United States Patent Application Publication US 2025/0074962 A1 - sequence listing, part 11

SEQ ID NO: 17829 - DNA, 1041 bp, synthetic construct
  misc_feature 1..1041: note = Description of Artificial Sequence: Synthetic coding sequence
  source 1..1041: mol_type = other DNA
atgggcctacaggcttgtttgctgggactgtttgccttgatcctgtctggcaagtgcagctacagtccagagcctgatcagaggcgaacactccctcctggatgggtgtcgttggggagggcagacccagaggaggaactgtcattgacgttcgctctgaggcaacaaaacgttgaacgcctgtccgaacttgttcaggctgtgtccgatccttcatcccctcaatatggaaaatatctcaccctcgaaaatgttgctgatctggtaaggccaagcccactgaccctgcacacagtccagaagtggttactagccgccggcgctcaaaagtgccactctgtaattacccaggactttctgacatgctggctgagtattcggcaagctgaacttctgctgcccggagccgagtttcaccattatgtaggtgggcccaccgaaactcacgtcgtcaggagcccccacccctaccagctgccccacatcttagaggttccctacgtcaccacggtggggggtaccagctttcaggaaccctttctgattaccaatgagatagtcgactacatcagcggggggggcttttctaatgtgtttcctcgacccagttaccaagaagaggccgtgaccaaattcttatctagctccccacacctgccccctagtagctactttaacgcttcagggagagcgtaccccgatgtcgccgctttgagcgacggatactgggtggtgagtaatcgggttcctattccttgggtatctggtacatcggcctcaacaccggtgttcggtggtatcctgtcgctgatcaatgaacataggatcctttcaggccgccccccactagggttcctaaacccaagattataccaacagcatggtgccgggttgtttgacgttacccgtggctgtcacgagtcttgtctcgatgaggaggttgaaggacaaggtttttgttccggtcccggatgggaccctgtgaccggctggggtacccctaatttccctgccttgctcaagacactgctgaatccatag

SEQ ID NO: 17830 - DNA, 3495 bp, synthetic construct
  misc_feature 1..3495: note = Description of Artificial Sequence: Synthetic coding sequence
  source 1..3495: mol_type = other DNA
atggctcagcaggcaaatgtcggagaattgttggctatgttggattctcccatgcttggcgtgcgagatgatgtcactgcagtatttaaggaaaacctaaattctgatcgcggccctatgctcgtgaacactttagtggactactacctggaaacgtcaagccagccagcgcttcatatcctgacaaccctgcaggaaccgcatgacaagcatctgcttgacaggataaatgaatacgtcgggaaggccgctacgaggctgtccatcttgtcccttcttgggcacgtgatacggctccagccttcttggaaacacaagctgagccaggcccccctgctaccttcactgctgaagtgtttgaaaatggacacggacgtggtcgtgttgacaaccggagttttagtcttaattactatgttaccaatgatccctcagtccgggaagcagcatctcttggatttcttcgatatctttggccgtctcagctcctggtgcctcaaaaagcccggacacgtagcagaagtgtatctcgtgcaccttcatgctagcgtatacgctcttttccatagactgtacgggatgtacccctgcaactttgtgtcatttttgagatcacactactctatgaaagagaatttggaaacattcgaggaagtggtcaagcctatgatggagcatgtcagaattcaccctgaactcgtcaccggatccaaagatcacgaactggatccccggagatggaagcgactggagacgcacgacgtggtcattgagtgtgctaaaatcagccttgatccaacggaagcgtcttatgaagacgggtatagcgtgagccaccagatctcagctcggtttcctcaccgttctgctgatgtaactacctccccttacgcagatacacagaacagctatggatgtgcaacatcaacaccctattcaacatcacggttaatgctactgaacatgcctgggcaacttcctcaaacactatccagtccctccactcggcttatcaccgaacctccccaagctaccctttggagccccagcatggtttgtgggatgaccacgccccccacaagccccggcaacgttccacccgatctctcccacccctatagcaaggtgttcgggaccactgctggtggcaaaggcacaccactgggaacaccagctactagccctccccctgccccactgtgccactccgatgattatgttcacataagcctgccacaggcgacagtgactccccccaggaaggaggagcgcatggactctgcccgaccatgccttcatcgccaacaccatctcttgaacgatcggggatcagaggagccacccggttctaaagggagtgttacactctcggatctacccggcttccttggcgacctcgcatctgaggaagactctatcgagaaggacaaagaggaggccgcaatctccagggaactgtcagagatcacgactgctgaggctgaacccgtcgtgcctcgtggggggttcgatagtccattctatagggactccctgccaggctcccaacgtaagacccacagcgccgcctcgagcagccagggagcgtcagttaatcccgagccactgcacagcagcctggacaaactaggtcctgatactccaaaacaggcgttcacccccatcgaccttccctgtggttccgctgatgagtctccagctggcgatcgcgaatgccagacctcattggagacatcaatatttaccccatccccttgcaaaattcctccacccaccagagtcggcttcgggagtggccagccgccaccttatgaccatctcttcgaagtggccctgcctaaaacagcccaccactttgtgattcgcaaaaccgaagagcttcttaaaaaagctaagggcaacactgaagaggatggagtgccctctacatcccccatggaggtcctcgatcgcctcatacagcagggagccgatgctcacagtaaggagctcaacaagctgccacttccaagcaaatctgtggattggacccactttggtggcagtcctcccagtgacgaaatcaggacactcagagatcagctgctgctgctgcacaatcagctcctctatgaacggtttaagcgccagcagcacgccctgcggaatcggcgactcttgcgcaaggtcattaaggccgccgcactagaagagcacaacgccgccatgaaagaccagttgaaactccaggagaaggacattcagatgtggaaagtgagtctgcaaaaggagcaggctagatataaccagctgcaagagcagcgggacaccatggtaaccaaattgcattctcagattcggcaactgcaacatgaccgggaagaattctacaaccagtcccaagaactgcagacaaaacttgaagactgtcgaaacatgatagccgagcttagaattgaactgaagaaagcaaacaataaagtatgccatacagagctcctactctcccaggtgagccaaaaactgtctaattcagagagcgtccagcagcagatggaattcttgaacagacagctcctcgtgcttggcgaagtgaatgagctttatctcgaacaactacagaacaagcacagcgacaccaccaaggaggtagagatgatgaaagcagcatatcgaaaggagctggaaaagaacagaagccatgtgctgcagcagactcagcgattggacacatcccaaaagcgcatcctggagctcgaaagtcacctcgctaagaaagatcatctgttactggagcagaagaagtatctcgaagatgtcaaactgcaggcaaggggccagctccaggccgctgagagcagatacgaggcacagaagagaatcacccaggtcttcgaactcgagatcctggatctctacggtcgtctagaaaaggatggactgctgaaaaagttggaggaggagaaggccgaggccgctgaagccgctgaagaaaggctggactgctgcaacgatggttgttctgacagtatggtaggccacaatgaggaagcctctggccataatggcgaaaccaaaacaccaaggccaagtagcgcccgggggtcctcgggatcccgtgggggcgggggatcatcaagttcatcctcggaattgtccactcccgagaaaccaccccatcaaagagctgggcccttttctagcaggtgggagaccactatgggggaagcatcagccagcatccccactacggtaggaagtcttccctcgtcaaagtcattcctgggaatgaaggctcgagagctctttagaaacaagtccgagtcacagtgtgacgaggatggcatgacctcttcgctctccgagtcccttaaaaccgaactgggcaaggatttgggtgtagaagctaaaatccctctcaacctggatgggcctcatccctcgcctcctacgcctgacagcgtaggacagctgcacattatggactataatgaaacgcaccacgagcactcatag

SEQ ID NO: 17831 - DNA, 1101 bp, synthetic construct
  misc_feature 1..1101: note = Description of Artificial Sequence: Synthetic coding sequence
  source 1..1101: mol_type = other DNA
atggcacagcaggccaatgtcggggaactgctggcgatgttggactcgccaatgttaggtgttagggatgacgttacggccgtgtttaaggaaaacctcaactctgacagagggccgatgctggtcaatactctggtggactactatttggagactagtagccagcccgctcttcacatcttgactaccctccaggaaccacatgataagcatctgcttgaccgaatcaatgagtacgtgggcaaggcggcaaccagactgtcaatcctgtccttgctggggcatgtcattcggctgcaacctagctggaagcataagctttctcaggctcctttgcttccctcactcctaaagtgcctcaagatggacacagacgtcgtggtactgaccacgggggtgctggtgttgatcaccatgttgcccatgatccctcagagcggcaaacaacacctactggacttcttcgatattttcggcagactgagctcatggtgcctcaaaaaaccaggtcatgtggctgaggtgtatctcgtgcatctccacgccagtgtgtacgccctatttcacagactctatggcatgtacccctgcaactttgtatcatttctgaggtctcattactcaatgaaggagaatcttgaaactttcgaagaagtggtgaagccgatgatggagcatgtcaggattcaccccgagctggtgaccggcagtaaggaccatgaactcgatccccgtcggtggaagcggctggagacccatgatgtggtcatcgagtgtgccaaaatctcccttgatccaactgaagcatcctatgaggacggatattccgtgagccaccagatctccgcccggtttccgcacaggtcggctgatgtgacgacatctccttacgccgatacacagaactcatacggatgcgcaacctccactccttactctacgtccagactgatgcttctgaacatgcccggtcagttaccccaaacgctttctagtcccagtacacgtttgattaccgaacccccacaggtctggtgccaactggtctgcctgctgtcccctttgttgagtggagaagctgacccccttgggcaaatttag

SEQ ID NO: 17832 - DNA, 954 bp, synthetic construct
  misc_feature 1..954: note = Description of Artificial Sequence: Synthetic coding sequence
  source 1..954: mol_type = other DNA
atggataccgacgtcgtcgtgcttactactggtgtcctggtcctaattaccatgctgcccatgattccacagtcggggaaacagcacttgctggacttcttcgacatctttgggcgcctctcgagctggtgcttaaagaaaccaggccacgttgccgaggtctacctcgtccatcttcacgctagcgtgtacgcactcttccatcgtctgtacggcatgtacccttgcaatttcgtttcattcttgagaagccattactccatgaaggaaaatctcgaaacgtttgaggaagtggtcaagcccatgatggaacacgtgagaattcatcctgaactcgttaccggtagcaaagatcacgaactggatcccagacgctggaagaggctcgagactcacgatgtagtgattgaatgtgctaagatcagtctggaccctaccgaagccagctatgaagatggctactctgtatcccatcagatttcagctaggttccctcatagaagtgcagatgttaccacaagcccctacgccgatacacaaaattcctacgggtgtgccacatcaaccccatactcaacgtcacgcttaatgctccttaacatgccaggacaattaccccagaccctctcctcaccaagcactcgactgatcaccgagcccccacaggccacgctctggtctccttccatggtgtgcggtatgacaactcctcccacctctcccggaaacgtgccgcccgacttgagtcatccttattctaaggtgttcggaaccacagcagggggaaagggaactcccctgggcacccctgcaacatctccaccaccagccccttccgtgattcgaatgaccacatgcactttccactctccgcggccgcagtcacacccacctgggcgcaagcgggagtggattctccaagatcatgtgtatacagataatacgatcttctag

SEQ ID NO: 17833 - DNA, 3495 bp, synthetic construct
  misc_feature 1..3495: note = Description of Artificial Sequence: Synthetic coding sequence
  source 1..3495: mol_type = other DNA
atggcccagcaagctaacgttggggaactgctagcaatgctggactcccctatgctgggcgtgcgtgacgatgtgacggcagtgttcaaagaaaatctgaactctgaccgagggcccatgctcgtgaatactctcgtagactattatctcgaaacttcgtcccagcctgctctgcacatcctcaccaccctccaggagcctcacgataagcacctgctggatcgcataaatgaatatgtgggtaaagcagccacccgcctctcaatcttatccctcctgggacacgtgatccggcttcagccaagctggaaacacaagttgagccaggccccactgcttccctccttgctgaagtgcttaaaaatggacactgacgttgtcgtgctgaccactggcgttctcgtcctcatcacaatgctgccaatgataccacagtcagggaaacagcatctattagacttcttcgacatattcggcaggctgagctcttggtgtcttaagaaaccggggcacgtggccgaagtctaccttgtacatcttcatgcctcggtttacgcactgtttcataggctatatggaatgtacccatgcaatttcgtgtccttcctgagatcccactacagcatgaaagagaatctcgagacattcgaggaggttgtgaagcccatgatggaacacgtcagaatccaccccgaattagtcacaggatcaaaggatcatgagctcgacccaagacggtggaaacggctggaaacccacgacgtagtgatcgagtgcgccaaaatctccttggacccaacagaagccagttacgaggatggttactccgttagtcaccagattagcgccaggtttcctcaccgttccgcagacgttactacgagcccttacgccgatacccagaactcatacggctgcgccacgagtaccccatacagcacctcccgcttgatgctgttgaatatgccggggcagctgccacaaaccctctctagccctagtactcgtcttattaccgaaccacctcaagccacattatggagcccttcaatggtatgcggcatgacaaccccccccacaagtcctgggaacgtcccaccagacctttcccatccatacagcaaggtgttcggcacaacagccggagggaaagggacccccctgggcactcccgccacatctcccccgccagctcctctgtgccatagtgatgactacgtccacatatctctcccacaggctaccgtgaccccgcccaggaaggaggagcggatggacagtgcccgcccatgcctgcaccgccagcaccatctactgaatgacagagggagcgaagaacctcccgggtcaaaaggtagcgtgacactgtctgatctgccagggtttttgggcgatctcgcctccgaagaagatagcatagagaaggacaaggaggaggcggcgatttccagggaactgagtgaaatcaccacagctgaagccgaacccgtcgttcctcgcggaggatttgacagccccttctatagagatagtctgccaggctcgcaaagaaagacccatagtgctgcctcgtcttcacagggcgcaagcgtgaacccggagcctcttcactcctcactcgataagttgggcccagacacacccaaacaagccttcactcccattgatctcccatgtggcagtgccgatgaaagccctgctggggaccgcgaatgtcagacgtcactcgagacgagcatttttacgccctcaccgtgcaagatcccgccccctacgcgggtgggtttcgggagcggacagccccctccatatgatcacttgtttgaagtggcattgcctaagaccgctcaccactttgtcattcgtaagaccgaggaactcctgaaaaaagccaagggtaataccgaagaagacggcgtgcccagcacatcacctatggaagtgctggatagactgatacagcagggcgctgacgcccatagtaaggaactcaacaaacttccgcttccttcgaagagcgtcgactggacacatttcggcggatctcccccatcagacgagattagaacactgcgcgatcagttactactactgcacaatcagctactgtacgaacggtttaaaaggcagcaacacgctttgaggaatcgcagactgctgcgcaaagttatcaaagccgccgccctcgaggagcacaacgctgccatgaaggatcagctgaagctccaggagaaagacatccagatgtggaaggtgtctctgcagaaggagcaggcacgatataatcagctgcaggaacagagagacacaatggtaacgaaacttcattctcagatccgccagctccagcatgatagagaggaattctacaatcagtcacaggaactgcaaactaaacttgaggactgtcgcaacatgatcgccgagctaaggatcgagttgaaaaaggctaacaataaggtttgccacaccgaacttctattatcccaggtgagccagaagctgtccaactcagaatcagtgcagcagcaaatggaattcctgaataggcagctgctggttctcggggaggtgaatgagctctatctggaacaacttcagaacaagcacagtgataccacgaaagaagtggagatgatgaaggccgcatacaggaaggagttggaaaaaaataggtcccatgtcctgcagcaaacacagcgccttgatacctcccagaagcgtatcctggagctggagtcacatctcgctaagaaggatcacttactccttgagcagaagaaatatctggaggatgtcaaacttcaggccaggggtcaattacaggctgcggaatcccgatacgaggcacagaagcgaattactcaggttttcgaattagagattctggacctctacggacgtctggagaaggacggccttttaaaaaagctggaggaggagaaggcagaggccgctgaagctgcagaagagcggttagactgctgcaacgacggatgtagcgactccatggtggggcacaatgaggaggcatctgggcataatggcgaaacaaagaccccacggcctagttctgcaagggggagttcggggagcaggggaggcggcggatcttcgtcctccagttctgaactgagcacccctgagaaacccccacaccagcgcgccggcccattttcttcccgatgggaaacaaccatgggtgaggcctctgcctccattcctactaccgtcggtagtctgcccagttccaagagctttctgggcatgaaagcaagagaattgttccgcaacaagagtgagtcgcagtgcgacgaggatgggatgacctcctcattgagtgagagtcttaaaacagagcttggtaaagatctcggggttgaggctaaaatacccttgaacctggatgggccacacccttctccgcccacgcccgactcagttggtcagttacatattatggactacaacgaaacgcaccacgagcatagctag

SEQ ID NO: 17834 - DNA, 849 bp, synthetic construct
  misc_feature 1..849: note = Description of Artificial Sequence: Synthetic coding sequence
  source 1..849: mol_type = other DNA
atggatactgatgtggtggtgttgaccacgggcgtcctggtcttgatcacaatgttgccaatgattccgcagtcaggcaagcagcacctgctggactttttcgacattttcgggaggctaagctcttggtgcctgaaaaaaccgggccacgtcgccgaggtctacctagttcacctacatgcgtccgtgtatgccctgtttcataggttatacggcatgtacccatgtaactttgtgtcattcctgagatctcattactctatgaaagagaatctggagacatttgaggaggtggtcaagccaatgatggaacacgtgagaatacatcccgagctggtcacagggtcaaaagaccacgagcttgacccaagaagatggaaacggctggaaacacacgacgtagtgattgaatgcgctaagatctcactagaccctactgaggccagctacgaggatggatattcagtcagccaccagatatctgctcgcttccctcacagatcggccgatgtgaccacaagtccttacgccgatacccagaatagctatggctgcgccacctccacaccctacagcacctcaagattaatgttgttgaatatgcccggtcacttggcaacaaccgtgcgccctaggccccccgggcctgcagcccccggcgctgtggtggaggctgaggttgtggaggctgcagccgcagcagctgcatccttccttcctcagaggaatccccacactcggggtcaggctcacagcgccgttggggggcggagactgtgggagaagcgccttcccgccagccctccattatgggctcacttccccgtccagaaagcctcatgggtctag

SEQ ID NO: 17835 - DNA, 3342 bp, synthetic construct
  misc_feature 1..3342: note = Description of Artificial Sequence: Synthetic coding sequence
  source 1..3342: mol_type = other DNA
atggcccagcaggcgaacgtgggtgagctgttggcgatgttggattcccctatgctgggagtgcgagatgacgtcacagcagttttcaaagagaacctgaacagcgacagaggacctatgctggtaaacacactagtggactactacctcgagacaagctcccagccagccttgcatattctcaccacactacaggagccgcacgataaaatggacactgacgtggtggtactgaccacgggggtactggtactgataacaatgctgcccatgattccacagagtggcaagcagcatctcctggatttcttcgacatctttgggaggcttagctcatggtgcctaaagaagcccggccacgttgcagaagtgtatctggtgcacctgcatgccagcgtctacgcactgtttcaccggctctacggaatgtacccgtgtaatttcgtcagctttttacgttctcattattctatgaaggaaaatctggaaaccttcgaagaagtagtgaaacccatgatggaacacgtgcgaattcacccggagctggtcaccggttccaaggaccacgaactcgacccccgaagatggaaacggctggagactcatgacgtcgttattgagtgtgcaaaaatcagcctcgatccaacagaggcctcttatgaggatggatattctgtcagtcaccagatctctgcccggtttccgcataggtccgcagatgttacgacatccccatatgcggacacccaaaattcttacggctgtgctacctcaacaccttacagcaccagccgattaatgttgttgaacatgcccgggcaacttcctcagaccctgtcatctccttcaacaaggttgatcacagagccgccacaggccacactctggtcaccttcaatggtctgtggcatgaccacacctccaacttcaccaggtaacgtcccccccgacctgtcccatccgtattcaaaggtgtttggtaccactgccggcgggaaaggcacacctctggggacccccgctacaagcccccctcctgctcctctgtgccattcagatgattacgtgcacatttccctccctcaagccaccgtcactccacctagaaaggaggaacggatggattccgcgcggccatgtctacaccgccaacaccatctcctgaacgacagaggaagtgaggaaccccctgggtccaagggctctgtaacactgtcagacttgcctggctttctcggtgatttagcctctgaggaagattccattgaaaaggacaaggaggaggcagccatcagccgggagctgagcgaaataactaccgctgaggccgaacctgtagtgcctagagggggatttgatagcccattttaccgggattcgctgcccgggagccagaggaagacccactctgcagcctcttcaagccaaggggcctccgtgaaccccgaaccactacactctagcttagataaactcgggccagataccccaaaacaggccttcacacctattgatttgccatgtgggtccgccgacgagtcgcccgcaggcgaccgcgagtgtcaaactagtctggagaccagcatcttcacgccctctccctgtaagatcccgccacctaccagggtggggttcggcagtggacagcctccaccttatgaccacctttttgaagttgctctgccaaaaacggctcaccatttcgtgatacgcaagacggaagaattgttgaagaaggcgaaaggaaatacggaggaagacggcgtcccaagcacatcccctatggaggtgctggatcggttgattcagcagggcgcggacgctcatagtaaggagctcaataagttacctctgccaagtaaatccgtcgactggacccactttgggggttccccgcctagcgatgagatcaggacactcagagaccaactgctgttacttcacaaccagttgctctacgaacgtttcaaaagacaacaacacgcccttcgcaatcgccgcctcctcagaaaggtaattaaagcagccgcgctggaagagcacaatgcggcaatgaaggatcaattgaaattgcaggaaaaggatattcagatgtggaaagtctcactccagaaggaacaggctcgatacaaccagctccaggaacaaagagacacaatggttaccaaacttcatagtcaaatcaggcagctgcaacacgatcgcgaggagttttacaatcaatcccaagagctgcaaacaaaacttgaggattgtagaaatatgattgccgaattgagaattgagttaaagaaagctaataataaggtgtgccacaccgagctgctgctcagtcaggtgagccagaaattatcaaatagcgagtcggtgcaacagcagatggaatttctcaataggcaactgcttgttctgggtgaggtgaacgagctttatttggagcagctacaaaataagcactcagacacgacaaaggaggtggagatgatgaaggctgcttatcgtaaggagctcgagaaaaaccggtcccatgtccttcagcaaacgcagaggctggataccagtcagaagcgaattttggaactcgaaagccatctggctaaaaaagaccaccttctgcttgagcagaagaagtatctggaggatgtgaagctgcaggccagggggcagctgcaggcagcagagtcgagatatgaggcccagaaacgtatcactcaggttttcgagcttgaaattcttgacttatatggcaggctggaaaaggacgggctgctgaaaaagcttgaagaagagaaggccgaggctgcagaagcagccgaagagcgattggactgttgtaacgatggatgcagcgacagtatggtcggccataatgaggaggctagcgggcacaacggggagaccaaaactccaagaccgtcaagcgccaggggtagttctggatcaagaggtggaggtggatctagtagttcgagtagtgaacttagcaccccagaaaaaccgcctcaccagcgagccggcccgttctcctcaaggtgggaaacaacaatgggagaggcctcggcctccatccctacaactgtgggttcccttccgtcttcaaaatcatttctgggaatgaaggctagggagttatttcgaaacaagtctgagagccaatgcgatgaagatggcatgacctcctctctgtcagaatctcttaagacagagcttggtaaggacctgggcgtggaagccaagatccctcttaatctggatgggcctcacccctcccctcctactcctgatagtgtcggccaactgcatatcatggattacaacgaaacccaccatgagcactcttag

SEQ ID NO: 17836 - DNA, 2397 bp, synthetic construct
  misc_feature 1..2397: note = Description of Artificial Sequence: Synthetic coding sequence
  source 1..2397: mol_type = other DNA
atggcactgcacagtccgcagtatatttttggagacttttcacctgacgaatttaatcagttctttgtcaccccgcggtcatccgtggagctgccaccttactctggcaccgttttgtgcggaacccaggccgtcgacaagttgcctgatggccaggagtatcagcggattgaatttggggtcgatgaagtgatcgaaccctctgacacgcttcccagaacgccgagctactcgattagtagcacactcaaccctcaagctcctgagttcattctggggtgcactgccagcaaaataactcctgacggcatcacaaaagaagcctcgtacggaagtatcgactgccaatatcctggtagcgctctggccctggacggttcatctaatgtcgaggccgaggtgctcgagaacgatggggtttctggggggttaggacagagggagcggaaaaaaaagaagaagaggccccctggatactattcatatctgaaagacgggggagacgattctatctcaactgaggctctggtgaatggacatgctaactccgctgtccctaatagtgtgagcgcagaagacgccgagttcatgggggacatgcccccgtccgttaccccaaggacgtgtaattccccgcagaatagcactgattcggtctcggatattgtccccgacagtcctttccctggcgccttgggttcagacaccagaaccgctgggcaaccggaaggcgggccaggggccgattttggtcaaagttgttttccggctgaagccgggagggacactctttctagaaccgcaggggctcagccctgcgtcggaaccgacaccacagaaaatcttggtgtagcgaatggccagatccttgagtccagcggcgagggaacagctaccaacggtgttgagttgcacaccaccgagagcatcgacttggaccctactaagccagagtcagcctcccctccagccgacgggacaggcagcgccagtggaacgctacctgtctcacagcctaaaagctgggcatctttgttccacgactctaagccatcgagcagtagccccgtggcatatgtggaaactaagtacagcccccccgccatctccccccttgtgtctgaaaaacaagtggaggtgaaggagggtctggtgccagtgagcgaggacccagtggcaatcaagattgccgagttgctagaaaatgttactctgattcacaaaccggtgagcctgcagcctcgaggattgatcaataagggcaattggtgctacatcaacgctacactgcaggccctggtggcctgccctcccatgtatcatcttatgaaatttatacctctctactcgaaggtacagaggccctgtacaagtaccccaatgatcgactcttttgtacggctcatgaacgagttcaccaacatgcctgtacctcctaagcctcgccaagcccttggcgataaaatcgtccgcgacatccggcccggggccgcttttgaacccacatacatctatagactgctgacggttaataaaagctccctctctgaaaaaggccgtcaagaagacgcagaggagtatctgggcttcattctgaacggcctgcatgaggagatgctcaatcttaagaaattactgtcaccttcaaacgagaaactgacgatcagtaatgggcctaagaatcattccgtgaatgaagaagagcaggaggaacagggtgaggggagcgaagatgagtgggagcaggtgggaccgagaaacaaaacatctgtgacccggcaggccgacttcgtccagactcccattaccgggatattcggaggccacatccgctccgtcgtctatcagcagtcgagcaaagagtctgctacacttcaacctttctttacactacagctcgacatacagagtgataagatccgtaccgttcaggatgccttagaaagcctggtggcccgggaatcagtgcagggctacactaccaaaaccaaacaggaggtcgaaatttcacggcgagtcacactcgagaaactgccgcccgtcctggtattacacctcaagcggtttgtctacgagaaaactgggggatgtcagaagctgattaaaaacattgagtaccctgtcgatctggagatatccaaagagcttctgtctcctggcgtgaaaaacaagaactttaagtgccacagaacatacaggctgttcgccgtggtttatcaccacgggaactccgccactggtggtcactacactaccgacgtcttccagattggtctcaatgggtggctgcggatcgacgaccagactgttaaggttatcaaccaatatcaggtggtcaagccaacagcagagaggaccgcatacttactgtactaccggcgggtggacctgctctag

SEQ ID NO: 17837 - DNA, 5355 bp, synthetic construct
  misc_feature 1..5355: note = Description of Artificial Sequence: Synthetic coding sequence
  source 1..5355: mol_type = other DNA
atggccaagcccacctctaaagactccggactgaaagagaaattcaagatactcctgggtcttggcacccctagacctaatcccagatccgccgagggcaagcagaccgagtttataatcaccgctgaaatcctgcgcgaacttagtatggaatgtggcctgaataacaggatccgaatgatcgggcaaatctgcgaggtggccaagactaagaaatttgaggaacatgccgtcgaagccttgtggaaggccgtcgccgacctcctgcagcccgagagacccctggaggcacgacatgctgtgttggccctgctgaaggcaatcgttcaaggccagggcgagcgactaggcgtactgagggcattattctttaaggtgattaaggactaccctagcaacgaagatttacatgaacgcctcgaggtttttaaggcgcttaccgacaacggccgtcacatcacgtaccttgaagaggaactggctgattttgtcttgcaatggatggacgtgggactgtcgagcgaatttctactggtcctggttaatctcgtgaaatttaactcctgttacttggacgagtatatcgcacgcatggtgcagatgatctgtcttctgtgcgtccgaaccgcatcttccgtagatattgaggtttcactgcaggtactcgatgccgttgtttgttataattgcctgccagcagagagtctgccactgtttatcgtcacactgtgccgcaccattaacgtgaaggagctgtgtgaaccgtgctggaaattaatgcgcaacttgctgggcacgcacttgggccatagcgctatctacaacatgtgccatctaatggaagacagggcctacatggaggatgcgccactcctcaggggagccgtcttctttgtcggtatggccctctggggcgcacaccgactatactctttacggaacagccccacgagtgtgttgcccagcttttaccaggcaatggcttgccccaatgaagtcgtctcctacgagattgtgctaagcatcaccagactgattaagaaatacagaaaggagttgcaggtcgtcgcatgggatattctcctgaatatcatcgagcggttgctacagcagctgcagacgctggactccccggagctgagaactattgtgcacgatcttctgaccaccgtagaggagttgtgcgatcagaatgagttccacggttcccaggaacgctattttgaactggtggaacgctgtgccgatcagcgccctgaaagcagccttctcaacctcataagttacagggcccagtcaatccatccggcaaaagatggatggattcaaaacctgcaggccttgatggaacgtttttttcgtagcgagtccagaggcgctgtgagaatcaaagtgctcgatgtcctgagctttgttctcctcatcaatagacagttctatgaggaagagctaatcaactccgtagtgattagtcagctgagccacattcctgaggataaggaccatcaggtacgcaaactcgcaacacaactgctggtggatctggccgagggctgccacacacatcactttaatagccttctggacattatcgagaaagttatggcaaggtctctttcgccaccacctgaactggaggagcgtgatgtggcggcatacagcgcatcactcgaggacgtaaagacggccgtgctgggtttattagttatcttacagaccaagttgtacaccctccctgcgtcacacgcaacccgggtgtacgaaatgctcgtgtctcatatccagctccattataagcactcttacactctccccatcgccagttctataagactgcaggcttttgacttcctgctacttttgcgagctgactccttacataggcttgggttgcccaacaaagatggagtggtgagattcagcccatactgtgtttgtgactacatggagccagagaggggttcagagaaaaaaacaagcgggccgttatcgcccccaactggccccccagggcccgccccagcaggaccagcggtgagactgggctcagtgccgtattctctgctatttcgagtgctcctccagtgcctgaaacaagaaagtgactggaaagtcctaaagttagttctcggtaggctacccgaatcccttaggtacaaagttctgatctttaccagcccctgtagtgtcgatcaactctgtagcgccctctgttccatgctgagcggtcctaagactctagagcggcttcgcggtgccccagagggctttagtagaactgatcttcacctggctgtcgtacctgtgctgaccgcccttatttcctatcataactacctggacaaaactaaacagcgcgaaatggtgtactgcctggagcaggggttgatccacaggtgtgccagccagtgtgtcgtagccctttctatttgtagcgtcgagatgccagatatcatcatcaaggccttacctgtgctggtcgtgaaattaacccacatttcagcaacggcttccatggcggtcccgcttctagaattcctttccacgctggcccggctcccccacctgtataggaacttcgccgccgagcagtacgccagcgtgttcgccatctcattaccctatacaaatcccagcaaatttaaccaatatatcgtgtgtttagcccaccatgttatagccatgtggttcatcaggtgtcggcttcctttccgaaaggacttcgttccgtttatcacgaagggcctcaggtctaatgttctgttatcgttcgatgataccccagagaaagactcttttcgcgcgcggtctacctccctgaatgaacgccccaagtccctgaggattgctaggccccccaagcaggggcttaataatagcccacctgtgaaggagttcaaagagagctccgcagcagaagctttcaggtgtagatccatctccgtatccgagcatgtcgtccgtagccggattcaaaccagtctgacttccgcatctttaggatccgccgacgaaaatagtgtggctcaggctgacgattcactcaagaacctgcaccttgaacttactgaaacctgcctggatatgatggcgcggtatgttttttccaattttacagccgtccctaagagatcgcccgtgggggaattcctcctggcaggcggcaggacaaagacctggctggtcggaaataagctggtgacggtcaccacttctgtgggcacgggtacgcgcagcctcctcggccttgacagcggggaacttcaatccggccccgagtcatcaagcagccccggtgtgcatgttcgccaaaccaaggaagcaccggctaagctagaatcacaggctggccaacaggtgtccagaggcgctcgggatagagtgcgcagcatgtccggcgggcacggactgagggtaggcgccctcgacgtaccagcctcacagtttctcggctcagccactagtccgggacccagaacggctcccgccgccaagcctgaaaaggcctccgccggtacacgagtacctgtccaggaaaagactaatttagcagcatatgtgccccttctcacacagggttgggctgagatcctggtgcgtcggccaaccggaaatacatcctggctcatgagtctcgaaaacccgctgtcccccttttcttcagacataaataatatgcctcttcaggagctgagtaacgctctaatggcggcggagaggtttaaagagcaccgcgacacagcgttatataagtcactgtcggtgccagcagcgtccacagctaaacccccccctctaccgaggtctaatacagatagcgccgtggtgatggaagagggaagcccaggggaggtcccagtgctggtcgagccccctggtctggaggatgtcgaagccgccctcggaatggacagaagaacggatgcttacagccgcagctcctctgtatccagccaagaggagaagagccttcatgcagaggagctcgtgggccgcgggatcccgatcgagagagtcgtttccagtgagggagggcgcccatctgtggacctgagctttcagcctagccagccactgagtaaatcctccagttccccagaattacagactttacaagatattttgggggatccaggggacaaggctgatgtaggacgtcttagcccagaagtgaaggcgaggtctcaatcaggtaccctggatggggagtcagcagcctggagtgcctccggggaggatagcagaggtcagcccgaggggcctctgccttcatcatcaccacgatctccatctggactacgcccccggggctacacaatctctgattcagccccttcccggcgtggaaaaagagtggagagagacgcactgaagagtagagccacagcatccaatgcggagaaagtgcccggtatcaaccccagcttcgtgttcctccagctgtatcactctcctttcttcggagacgagtcaaataaacccatactgctccccaacgaatcccagtcctttgagaggtcagtacagctgctcgatcagatcccttcatacgacacccacaagattgcggtgctctacgtgggagagggtcaaagcaactcagagctggccatcttgagcaatgaacacggctcttaccgctacactgagtttctgaccgggcttggcaggttgatagagctgaaggattgccagccggacaaagtgtatctcggcggcctcgatgtatgcggggaagatggtcaattcacgtattgctggcacgacgatatcatgcaggcagtgtttcacattgctaccctgatgcctactaaagacgtcgataagcaccgatgcgataagaaacgacatttggggaatgactttgtttccatcgtgtacaatgactcaggagaagactttaagctgggaacgataaaaggccaattcaatttcgtgcacgtgatcgtgacacccctcgactatgaatgtaatctggtgagtctccaatgcagaaaagacatggagggcctcgttgacacttcggttgccaaaatcgtcagtgatcggaacctcccctttgtggctaggcagatggcgttgcacgctaatatggcctcacaagttcaccatagtcggtccaatcccactgacatctatcctagtaaatggatagcccgcctgcggcatattaagcgtcttagacagcgaatctgtgaagaggcagcgtactcgaacccttccctgcccctcgtgcaccctccgagccattccaaggcccccgcccagacacctgccgagccaacgcccggctacgaagtaggccagcgaaagaggctgattagtagcgttgaggatttcacagaattcgtgtag

SEQ ID NO: 17838 - DNA, 5295 bp, synthetic construct
  misc_feature 1..5295: note = Description of Artificial Sequence: Synthetic coding sequence
  source 1..5295: mol_type = other DNA
atggccaaaccaactagtaaggattccggccttaaggagaaatttaaaattttattagggttgggaactccccgtcccaaccctaggtctgccgaggggaaacaaactgagttcattatcacagcagagattctgagagagctctctatggaatgtggtctcaacaataggattaggatgattggacagatctgcgaggttgctaaaacgaagaagtttgaagagcacgccgttgaggcgttgtggaaagccgtcgctgacctgctgcagccagaacggccactcgaggcacggcatgccgttctggcattgctgaaagccatcgtccaaggccagggagagcggctcggagtgctgcgggctctcttctttaaggtgatcaaagactatcccagcaacgaagatttacatgaaagacttgaggtgttcaaggcgctaaccgataacggcaggcatattacttaccttgaagaagaacttgctgattttgtgctgcagtggatggacgtgggactgtcctcagaatttttgctggtgctcgtcaacctggttaaattcaactcttgttacttagacgagtatatcgcacgtatggttcaaatgatctgcctcttatgtgttagaacagctagcagcgtggatatcgaagtgagtttgcaggttctagacgccgttgtgtgttataactgtctcccggcagaaagcctccctctgttcattgtgacgttgtgccggactataaatgtgaaagaattatgtgagccatgctggaagttgatgcgaaatctcctcggcacacatctcggccacagtgccatctataacatgtgtcaccttatggaagacagggcgtatatggaggacgccccactactgaggggagccgttttttttgtcggaatggccctatggggtgctcatagactgtattctctgagaaactcaccaacatccgtcctgccctcattttatcaggccatggcatgccctaacgaggtggtcagctatgagatcgtgctgagtatcaccagactaatcaaaaagtatcgcaaggaattacaggtcgtggcctgggacatcctccttaacatcattgaacggctgctacagcaactccaaaccctggactcccccgaactgaggacaatagtgcacgacctgctgaccactgtggaagagctatgtgatcagaacgaattccatggaagtcaagagaggtatttcgaattggtggagaggtgtgccgatcagagacccgagagtagcctgctcaatctgataagttacagagcacagagcatccacccagcgaaagatggatggatacagaatctgcaggcgctcatggagagattctttagaagcgaaagtaggggcgctgttcggatcaaagtcctggacgtgctgtccttcgtccttctgattaatcggcaattctatgaggaggaactgatcaatagcgtggtgatctctcagcttagccacatccctgaggacaaagatcatcaggtaaggaagttggctacccagcttctggtggatcttgccgagggatgccacacacaccatttcaactcgttgcttgacatcatcgagaaggttatggcccgaagcctttctccacccccagaactcgaggagcgcgatgtggcagcgtactccgcatccctcgaggatgtgaagacagcagttctaggactactggtgatcctccagaccaagctttatactttacctgccagccatgccaccagggtgtatgagatgctagtgtcccatattcagctccactacaagcatagttacaccttgccaattgccagctccattagactgcaggccttcgactttcttctcctccttcgcgccgactcattacacagacttgggctacctaacaaggacggagtcgtccgtttctctccatactgtgtttgtgactacatggaaccggagcgtggcagtgagaaaaaaacaagtgggccattgtctccccccacgggccctccggggcctgccccggccggaccggcggtgagactgggcagcgtaccctattctctgctgtttcgagtactgttgcagtgcctgaagcaggagagcgattggaaggttctgaaattggtgttaggtaggcttccggaaagcctgcggtataaggtgctgatttttacatctccgtgcagtgtggatcagctgtgttcagctctgtgctccatgctgagtggtccgaagaccttagagcgactgaggggcgctccggagggcttttctaggactgatctgcatctagccgtggtgccggtcttgaccgcccttatctcctatcacaattacctagataagactaagcaaagagaaatggtctactgtcttgagcaagggttgatacaccgctgcgcatcccagtgtgtggtggcactgtcaatctgttcagtagagatgcccgacatcatcattaaggccctccctgttctggtggtaaagctgactcatatatctgctacagcctccatggccgtgcccctgcttgagttcctcagcactctagcaaggcttccccatctctatcggaacttcgccgctgagcagtatgcctctgtcttcgccatctcactgccatataccaaccccagtaaattcaatcagtacatcgtgtgcctagcccatcacgtcatcgcaatgtggtttatacgatgtagactgccctttcgaaaagattttgtaccctttattactaaaggattgaggagcaacgtgctactctcatttgacgataccccggagaaagactcattccgcgctcgatcaacctctcttaacgagcggcccaaatcccgtattcaaacctcattgacttctgccagtctgggcagcgccgatgagaattcagtggcacaagccgatgatagtctcaaaaacctgcatctggagctgaccgagacctgtctggatatgatggcccgctacgtcttctccaacttcacagccgtgccaaagcgctctcctgtaggagaattcctcctggctggagggcggaccaagacctggctcgtgggcaataagctggtgacggtgactacatccgttgggaccggaactaggagtttgctgggactcgactccggggaactgcagtctggccctgaatccagctccagcccaggagtacacgtcaggcagacaaaggaagcccctgcgaagctggagtctcaggccgggcagcaagtgagccgcggtgcccgagatcgtgtgcgcagtatgagtgggggacacggtctgcgagtaggcgcacttgatgtccccgcctcacagtttctcgggtccgctaccagccccgggcctaggaccgcccctgctgccaaacctgaaaaagcctccgccggaacccgagtgcccgttcaggaaaaaaccaacctagccgcctacgttccactgcttacccagggttgggcggagatcttagtgcggaggcccaccggcaacacatcctggttaatgtccctggagaaccctctaagcccctttagtagtgacattaataatatgccactgcaggagctctccaatgccctcatggcagcggagagattcaaagagcaccgggacaccgccctctacaagtccctgagcgtccctgcggcgtccacggccaagcctccgcctctaccgcgcagcaacacggttgcctctttctcctccctgtaccagagcagctgtcagggccagctgcatcgtagcgttagttgggccgactccgccgtcgtgatggaggagggttctcccggagaggtaccagtgctggtggagccacccgggctggaagatgtcgaggcagcactcggcatggatcgccgaaccgacgcctattctcggtcttcaagtgtctcatcccaggaagagaaaagcctgcacgccgaggaactggtggggcgcggcatcccaatcgagcgggtggtttcgagcgagggcggaagaccgtctgtcgacttaagctttcagcctagtcagcccctgtctaagtcaagtagtagtcctgagcttcagacacttcaagatatcctgggcgacccgggcgacaaagccgacgtgggccgcctgtcccctgaagtgaaggccaggtcgcaatctggtaccttagacggtgagagcgccgcttggtccgcctccggagaagattctaggggccagccagagggaccattgcccagcagcagccctaggagtcccagcggactgcgcccccgcggttatacaatctccgactctgctccttctcgcaggggaaagcgagtcgagagggacgctctgaaatctagagcaacagcatctaatgcagaaaaggtacccggcataaaccccagtttcgtgttcctgcagctgtaccatagccctttcttcggagacgagagtaataaacccatacttctcccaaacgagagccagagttttgagaggtccgttcagctcttggaccaaatacctagctacgatacccacaaaattgctgtgctttacgtaggggagggtcagtctaatagcgagttggccattctgagcaacgaacacggaagctatagatacacagagttcctgaccggactgggacgcctgatcgagctcaaggactgccagcctgataaagtgtacttgggaggactggatgtatgtggggaagacggacagttcacctattgctggcatgatgatattatgcaggccgtctttcacattgctacgctgatgcctacaaaagacgtggataagcacaggtgtgacaagaaacgccacctcggaaacgactttgtctcaattgtctacaacgacagtggcgaggacttcaagctaggaactataaaagggcagtttaacttcgtccatgttattgtgacaccactggattatgaatgcaacctggtttctctgcagtgcagaaaggacatggaaggattggtcgacacgtctgtcgccaagattgtgtccgatagaaacttgcccttcgtagcacgacagatggctctgcatgcaaatatggcctctcaggtgcaccatagtcggtccaatccaacggatatttaccccagtaagtggatcgctaggcttagacacatcaagagactgagacagcgcatatgcgaggaggcggcttactcaaaccctagtttgccactggtgcatccgccctcacacagtaaagcccctgctcagacccctgccgaacctacacccggatatgaagtaggccaaaggaagaggttaatatcgtccgttgaggattttacagaatttgtgtag

SEQ ID NO: 17839 - DNA, 5079 bp, synthetic construct
  misc_feature 1..5079: note = Description of Artificial Sequence: Synthetic coding sequence
  source 1..5079: mol_type = other DNA
atggagtgcgggttaaacaatcgaattagaatgatagggcagatctgtgaggtggccaagaccaagaagtttgaggagcacgcagtcgaggctctctggaaggccgttgcagacctgctccagccggaacgcccattggaagcccggcatgccgttctggcgttacttaaggcaattgttcaaggacagggtgagcggttgggcgtcctccgggccctgttcttcaaagtaattaaagactatccatccaatgaggatctgcatgaacgactggaagtgtttaaagccctgaccgacaacggacgccacattacttaccttgaggaagagctggccgacttcgtcttacagtggatggatgtcggcctgagctccgagtttttgctcgttcttgtcaacctggtgaaatttaacagctgctaccttgatgagtacattgctcgcatggttcagatgatctgcctcctatgtgtcaggacggccagctcagtcgatattgaggtatctcttcaggtactagatgctgtagtgtgctacaactgtctgcccgcggagtccctccccctcttcatcgttacgctgtgcagaacgatcaatgtaaaggaactgtgtgaaccatgctggaagctgatgcgcaatctgctcggcactcatctggggcattctgccatttataacatgtgccatctaatggaagatcgggcctacatggaagacgctccactgcttcggggggccgtttttttcgtgggcatggcactgtggggtgcccaccgactctattcactcaggaattccccaacttcagtgctcccatcattttaccaagctatggcttgccccaacgaggtggtgagttacgagatcgtgttgagcataacgaggctgatcaagaaatatagaaaggagctgcaggtggttgcttgggatatcttgctgaatataatcgaacgattgctgcagcaacttcagaccttggattcccctgaactgagaaccatcgttcacgatttactgaccacagtggaggagttgtgtgatcagaatgagtttcacggttctcaggaaaggtattttgagcttgtcgaaagatgcgcagatcagcgacccgagtctagtttacttaacttaatctcttatagggcgcagtcgatccaccccgcgaaagatggttggattcagaacctacaggctctgatggaacgcttttttcgcagcgaaagtcggggtgctgtgcgtattaaagtccttgacgtgctttcgtttgtgctactgattaatcggcaattttacgaggaggaactcattaattctgtggtgatttcacagttatcacacatccccgaggacaaagaccaccaggtacgcaaactagccacacaactattggtcgaccttgcagaaggatgtcacacacatcactttaactcactgctggacatcatcgaaaaagttatggctaggtccctcagtcctccacctgagttggaagaacgggatgtggctgcttactcagcctcattagaggacgtcaagactgccgttctcgggctcctcgtgatcctgcagacgaagctgtacactttacctgcatctcacgcaactagagtatacgagatgctggtaagccatatacaactgcactacaagcacagctatacactgccaattgcatcctctattcgcctacaggcgttcgattttctcctcctgctgcgagctgatagcctgcacaggttgggtctccccaacaaggacggcgtagtgcgcttttctccttattgtgtgtgtgattacatggagcctgaacggggctccgaaaaaaagacaagtggacctctgagtccacctaccggtcctcccgggcccgccccagcaggacctgctgtgagactcggttctgtgccttacagccttctgtttcgtgtgctccttcagtgcctgaagcaggagtcggactggaaagtgctcaagctcgttctcggacggctgcccgaatctttgcgttacaaggtgctgattttcacaagcccctgttcagtagatcaactctgctccgcactctgcagcatgcttagcggccccaaaacactggaacgattgcgcggcgcacccgagggttttagcagaactgacctgcatttagcagtggtccccgtcctgaccgccttgattagttaccacaactatctggacaagacgaagcagcgggagatggtatactgcctggaacagggacttatccacaggtgcgcctcacagtgcgtcgttgcactgagcatttgctcggtggaaatgccggacatcatcattaaggcactccctgtgctggtggtaaagcttacacacattagtgccacagcatctatggctgtacccctgctggaattccttagcacacttgcccggctgccacacttgtataggaacttcgcagcagaacagtacgcgtctgtctttgcaatcagcctgccgtatacaaacccatccaagtttaatcaatacatcgtttgcctcgcacatcacgttattgctatgtggttcataaggtgtagattgccttttcgcaaggacttcgtgccgttcattacaaaagggctgaggagtaatgtgttattgagctttgatgatacccctgagaaggatagcttcagggccaggagcacttcacttaacgaacggccgaagtccagaatccagacttcactgactagtgctagcttagggagcgccgatgagaatagtgttgcacaggctgacgactcactgaagaacctccatctggaactgactgaaacttgcttagacatgatggcacggtacgttttttcaaactttaccgcagtaccaaagcgcagcccagtcggcgaatttctgttggccggcggcaggacgaaaacttggctggtcggaaacaagctggttacagtcaccacatccgtgggcaccgggactcggagcctgctcgggttagacagtggagagctccagtccgggccagagagcagtagtagtccgggcgtgcacgttcgccaaactaaagaagctcccgctaagctcgaatcacaagccggacagcaagtttcccgcggcgcccgagatcgcgtccggagcatgtccggcggccatggcctgcgggtaggagccctggatgtccctgcatcccagttcttaggctcagcaacgagtccgggacctaggacagcccctgctgcgaagcccgaaaaggcgagcgccggaacaagggtgcccgtgcaggaaaagaccaacctggctgcttatgttcctcttctgactcagggctgggcagagatattagttaggcgcccaactggtaatacatcttggcttatgtccctggagaacccattgagccccttctcttctgacatcaataatatgcccctgcaagaactaagcaacgccctaatggctgcggagcgttttaaggagcatcgcgacactgctttatataaatccttatccgtgccggcggcttcgaccgcaaagcccccacccctcccacgtagtaatacagacagtgctgtggtaatggaggaaggatccccaggagaagttcccgtgcttgttgagcccccgggcttagaagatgtagaagccgcccttggaatggaccgtcgcaccgatgcctatagccgaagctcctcagtgagtagtcaggaggaaaagtctctgcacgccgaagaactagtgggcagaggaatccccatcgaacgggtagtcagctcagagggaggcagaccttctgtggatctctcatttcagccaagccagccactgtccaagtcgtcatccagtcctgagctacagactctgcaggatatactgggtgatcccggcgacaaggccgatgtgggtagactgtcccctgaggtgaaggcccgaagtcagagtgggactcttgatggagaaagtgccgcttggtctgcatctggggaagattcacgtggtcagcccgaagggcccctgccctcatcatctccacgcagcccctcagggctgcgaccccgcggctacacaatctctgattcagccccttcgaggcggggtaaacgcgttgaaagagacgctctgaagtccagagctactgcgagcaatgctgaaaaagtacctgggatcaatccgagctttgtgttcttgcagctgtaccattcccccttctttggagatgaatccaataaaccaatactacttcctaatgagtcccagagtttcgagcggagcgtgcaactattggaccagattccatcttatgacacacacaagattgccgtgctatatgtgggcgaaggacaaagtaattcagagctggccattttgagcaacgagcacggctcctatcggtataccgagtttcttacaggactgggacgcctcattgagctgaaggactgtcaacccgacaaagtgtatctggggggtttagatgtatgtggcgaagatggccagtttacctattgttggcacgatgatattatgcaggccgtttttcatattgcaactctcatgcctactaaggacgtcgacaaacacagatgcgacaagaagcggcatttaggaaacgactttgtgagtattgtgtacaacgacagcggtgaggacttcaaacttggcaccatcaagggccagttcaatttcgttcatgtcattgttacaccgctggactatgaatgtaacctggtatcgctgcagtgtagaaaggacatggaagggttagtggacacttccgtcgctaaaatcgtatcagatcgaaatctaccgttcgttgcaaggcagatggctctgcatgctaatatggcgagccaagttcaccattcccgctccaatccaaccgacatctacccaagtaaatggattgcaaggctcagacatattaaacggctaaggcaacggatctgtgaggaagccgcctacagtaaccccagtttgcctctggtgcatcctccatcccacagtaaggctcctgcgcagacacctgctgaacccaccccagggtacgaggtcggccaacgtaaacggcttatctcaagcgtggaagactttacggaattcgtgtag

SEQ ID NO: 17840 - DNA, 5226 bp, synthetic construct
  misc_feature 1..5226: note = Description of Artificial Sequence: Synthetic coding sequence
  source 1..5226: mol_type = other DNA
atggccaaaccaacgtccaaggactcaggcttaaaggagaagtttaaaatcctgctcgggctggggacacctagacccaaccctagatcagccgaaggcaagcaaactgagtttattataacagccgagatcttgagagagttatctatggaatgcggactgaataatcgcattcgtatgattggccagatttgtgaggtagcaaagactaaaaaatttgaagagcatgctgtggaagctctgtggaaagccgtcgccgatctgcttcagcctgagcgacccctagaagccagacacgcggtcctcgctctactgaaagccattgtccaggggcagggcgaaaggctgggagtcttgcgcgccctgttcttcaaagtcattaaggactacccttctaatgaagatctacacgagcggctggaagtcttcaaggcgctgactgataacggaagacacattacatacctagaagaggagctcgccgatttcgtgctccagtggatggacgtgggcctgagcagtgagttcctgctcgtgctggtgaatctagttaagttcaactcctgttatctggacgagtacatcgcccgcatggtgcagatgatctgtttattatgcgtaagaaccgcgtctagtgtggatattgaggtctctctgcaagtcctggatgctgttgtgtgctacaactgcttgcccgctgaaagcctacccctcttcatagtaacattgtgccgcacgattaatgtcaaggaattgtgcgaaccctgttggaagcttatgcgcaatctgctcggcactcacttggggcacagcgctatttacaacatgtgtcatttaatggaggaccgagcctatatggaagatgcaccactcctgcggggtgcggtcttttttgttggaatggccttgtggggggcgcacaggctttattcattaagaaacagcccgacttctgtgttgccttcattctaccaggccatggcgtgcccaaatgaggtggtcagctacgaaatcgtactgtccattacgagactcatcaagaagtaccggaaggaactgcaggtagttgcctgggacatactcctcaatattattgaacgcctcctccaacagctccagaccctggactccccagaactaaggacgattgtacacgatttactgacgaccgtggaagaactgtgtgatcaaaatgagtttcatggatcccaggagcggtatttcgaactggttgaacgctgcgccgaccagcggccagaatcgtcactactgaacctgatctcatatagagcacagtctatccacccagctaaagacggttggattcagaaccttcaggcactgatggaacgattttttcggtccgaatcgaggggggctgtaagaataaaagtacttgatgtcttgtcttttgtgttgttgattaacaggcagttttacgaagaagagctgatcaattctgtggttattagccagctctcacatattcccgaagataaggatcatcaggtgcgcaagctcgcgacacagctgcttgtcgacttagccgagggctgccacactcatcatttcaactcccttctggacatcatcgagaaagtgatggctaggtccctgtctccgcccccagagttagaagagcgtgacgtggcggcatactctgctagtctggaggacgtcaagacggccgttctgggccttctcgtgatcttgcaaacaaaactgtacacactgcctgccagtcacgccactagggtgtacgagatgctggtgtcccacattcaactgcactacaaacatagctatacgttgcccatcgcatcgtccattcggttgcaggcatttgacttcttactcctgcttagagcagactctctacaccgcctgggcttacccaacaaggatggcgtggtgagatttagcccatattgcgtttgcgattacatggagccagagagaggtagtgaaaagaagacctcagggcctctctctccccctaccggtcccccgggacccgccccggccggaccagcagtgaggttgggatccgtgccttattcattattgtttagagtgctgctccagtgtcttaaacaggagtcagattggaaggtgctgaaactggttctgggacgcctgcccgagtccctccggtacaaggtgctgatttttacaagtccctgctccgtggaccagttgtgcagcgccttgtgcagcatgcttagtggcccaaaaactctagaacgtttgcggggggcgcccgaaggctttagcagaaccgacctgcacctagcagttgtccccgtgctgactgccttaatctcgtatcacaactatctggacaagactaaacagagagagatggtgtattgcctcgagcagggcctcatacatcgctgtgcatcacagtgtgtggtcgccctttctatctgttctgtagagatgccagacatcattattaaggcgttgcccgtgctggtagtgaaattgacgcatatttccgccaccgccagcatggcggtccccctgctcgaatttctcagcaccctggctaggctgccccatctgtatcggaattttgccgccgaacagtatgccagcgtgttcgcaatttccttaccctatactaatccatctaagtttaatcaatatatcgtttgcctagcgcaccatgtgatcgcaatgtggtttatcaggtgccgcctccccttcagaaaagatttcgtgccatttattaccaagggcctccggtcaaacgtgcttcttagcttcgatgatacccctgagaaagatagctttcgagctcggtctacctccttaaatgagcgccctaagtcacgaattcaaacttcgttaacaagcgcatctctgggaagcgcagacgagaattcagtcgcacaggcagacgattccctcaagaatctgcatctcgaactgaccgaaacatgtcttgacatgatggctcggtatgttttcagcaacttcaccgccgttcccaagcgttcacctgtaggcgagtttttgctggcaggcggccggacaaagacgtggctggtgggcaataaactggttaccgtcacaacttcagtcggcactggaacccgctctctgttagggctggacagcggcgagcttcagagcgggcccgagagttcgtcttctccaggtgttcacgtgaggcagactaaggaggccccagctaaactcgaatcgcaggctggacagcaggtctcgaggggagcccgagacagggtcagatccatgtccggcggccacggactgagagtcggcgcccttgacgtccccgctagccagttcctcgggtcagccactagccctggaccccggaccgcaccagccgctaaacccgaaaaggcatccgccggaacaagggttcctgttcaggagaagacaaacttagcagcatatgtgccgctcctcacacaggggtgggccgagatactggttcgcaggcctaccggcaacaccagttggttgatgagtctcgagaatcccttgagtcctttctccagtgacataaataacatgccccttcaggaactgagcaacgccctgatggccgccgagaggttcaaggaacatagagacactgctctgtataaatcgttatctgtaccagccgcctccacggctaagccgccccccctgcctcggagtaataccgacagcgccgtggtaatggaagaagggtcccctggggaagtcccagtactggttgagcccccaggattggaagacgttgaagccgccctgggaatggaccgtaggacggacgcctactccagatcctcttcagtgtcgtcccaggaggaaaaatccctacacgcggaggaactggtgggtcgtggcatccccatcgagcgggtcgtgtcttccgagggaggccgtccctctgtggatctctccttccagccttcccagccacttagtaaaagtagctccagccctgaactacagactctccaagacattctcggtgacccaggagataaggcggacgttggaaggctgtctccagaggtcaaagccagaagtcagagcggcacgctcgacggcgagtccgcggcgtggtcagcctccggcgaggatagtagaggtcaacccgaagggccacttccatcatcttccccacggtcacctagtggccttaggcccaggggttacacgattagtgactctgctcctagtcgacgcggaaagagagtggagagagatgcccttaaatcacgggcaaccgcctctaacgccgaaaaggtgcctgggattaatccatcattcgtttttctacaactataccacagccccttttttggggatgagagtaataaacctattctgctgccaaatgagagtcagtcctttgaacgcagcgtccagctgttagaccagataccaagctatgacacacataaaatcgcagtactatacgtcggggaaggccagtccaatagcgaactcgcgatcctgagtaacgagcatggatcttacagatataccgagttcttaaccggcctaggcaggctgatcgaactcaaggactgccagcctgataaagtgtacctggggggacttgacgtgtgtggtgaggatgggcagtttacctattgctggcatgatgacataatgcaggcagtgttccacattgcaaccttgatgccaacgaaggacgtcgacaaacacagatgtgacaagaaacgccacctgggcaacgactttgtgtctatagtatataacgattcaggagaggacttcaaactgggaaccattaagggccagtttaatttcgtacatgttatcgtcacacctctcgattatgagtgtaacctggtaagtctccaatgtcgaaaggatatggagggccttgtggacacaagcgtcgcaaagatcgtgtctgaccgaaatctgcccttcgtggctcgtcagatggcacttcatgcaaacatggcaagccaggtccaccacagcagaagtaaccctactgacatatacccgtccaaatggatcgctaggcttcgccacattaaaagattaaggcaacggatttgtgaggaagcggcatattcaaatcccagtttaccattggtacaccctcctagccactccaaagcccctgcacagactcctgccgaacccactccaggatatgaggtcggccaaaggaaacgtttgatcagctctgtcgaggattttactgagttcgtttag

SEQ ID NO: 17841 - DNA, 5115 bp, synthetic construct
  misc_feature 1..5115: note = Description of Artificial Sequence: Synthetic coding sequence
  source 1..5115: mol_type = other DNA
atggctaaaccgacttccaaagacagtggcttgaaggaaaagtttaagatattactgggtcttggaaccccacgaccaaacccccggagtgctgaaggaaagcaaacagaatttattatcaccgcagaaattcttagagaacttagcatggaatgcggactgaataatcgcatacggatgataggacagatttgcgaggtggccaagactaaaaaatttgaagagggcgagcgcctgggagttttgagggcgttgttctttaaggttatcaaagactacccttccaacgaggacctgcacgaacgacttgaagttttcaaagccttaaccgacaacgggcggcacattacatacctcgaagaggagctggcagattttgtccttcagtggatggatgtaggcttatcttccgagttcctcttggttctggtcaaccttgtgaagtttaacagctgctatctagacgaatacatcgctcgcatggtgcagatgatctgcctcctgtgtgttcgcaccgcgtcatccgttgatattgaggtgtcgcttcaggtcctcgatgccgtggtttgctataattgtttgccggccgagtcattgcccttattcatcgttaccttatgccggaccattaacgttaaagagctgtgcgaaccgtgctggaaactcatgcgcaatcttttagggacccacctggggcactccgccatttataatatgtgtcatctgatggaagatagggcctatatggaagacgctcccctgctgagaggcgcggtgtttttcgtaggaatggccctgtggggggctcaccgtctttacagcctgagaaattcacctacatctgtcctgcccagtttctaccaggccatggcatgtcccaatgaggtggtgtcatatgagatcgtgctgtccatcacacgcctcatcaagaagtaccggaaagagttacaggtggtcgcttgggatattctcttgaacataattgagcggcttctccagcagctacagacactagatagccccgagctgcgcactattgtgcacgacttgctgacaaccgtggaggaactttgcgaccagaatgagtttcatggatcacaggagcgatatttcgagctagtggagagatgtgccgatcagcgccccgagagcagcctcctcaatctcatcagctatcgcgcgcagagtatccaccctgccaaggatgggtggatccaaaatctgcaggctctaatggaaagatttttcaggtctgagtcaagaggcgccgtgcgcatcaaagttctagatgtgttatcatttgtcctcctaatcaatagacagttctatgaagaggaactcattaactccgtggtgatcagtcaattatcccacattcccgaagacaaggatcaccaggtaagaaagctggcaacacagctgctcgtagacctcgccgagggatgccacacgcatcattttaactcgttgctggacatcatagagaaagtcatggcccggtctttgagccctccacctgagcttgaagaacgagatgtggccgcatacagtgccagtctggaagacgtgaaaactgctgtcctaggactcctggtcatactccaaacgaagctttacaccttaccagcctcccatgcaacccgggtctacgagatgctggtgagccacatccagctccactacaagcacagttacaccttacctatcgccagtagcattaggctccaagcattcgactttttgctgctcctcagagcagacagtctccacaggttggggctgcctaacaaggatggagtggtcagatttagcccctactgtgtctgtgactacatggagccagaaagaggtagtgaaaagaagacttcaggtccattgtctcctcccaccgggccacccggccccgccccagctgggccagccgtgcggttgggaagcgttccctattctttgctcttcagagtgctactccagtgccttaaacaagagtcagactggaaagtgctgaaattagtactgggcagactgcctgagagcctgcgttataaggtcttaatcttcacaagcccatgttctgttgatcagttgtgctctgccctatgttctatgctatcgggccccaaaactcttgagcgtctgcgtggtgcgcctgaggggttctctaggaccgacctgcatctcgctgtagtgccagtactaactgcacttattagctatcataattacctggataagaccaagcagcgagagatggtttattgcctcgaacaaggtctgatccaccgatgcgcatctcagtgcgtggtggcactgtccatctgcagtgtggagatgcccgatattattattaaggctctccccgtactggtggtcaaacttacccacatatccgccaccgctagtatggcagtgcccctcctggagttcctgagcactttggcaagattgcctcatctctataggaattttgccgcggagcagtatgcctcagtgttcgccatcagcctgccatacactaacccgtccaaattcaatcagtacatcgtgtgcctggcccaccacgtcatcgctatgtggtttattcggtgccgattgccttttaggaaggattttgttccgttcatcactaaggggctgcggagtaacgtgttattgtcctttgatgacacaccagagaaggactcatttcgagcccgatcaacctccctgaacgagagacctaagtcccgtatccaaacatcactaacgtctgcaagtctggggagtgccgacgaaaactccgtggcgcaagccgatgatagcctcaaaaatctccatcttgagctgaccgaaacctgtttggatatgatggctagatatgtgttttcaaacttcacagcagtccccaaacgatccccagtaggtgagttcttgctggccgggggtcggacaaagacttggctagtcggcaataagctggtaaccgtgacgacttctgttggaacgggcaccaggtccctgctaggattagattctggggaactgcaatcaggacctgagagctcttcttcccccggtgttcatgttcgtcaaactaaggaggctcctgctaaactggagtcccaagcggggcagcaggtctcacgtggggcaagggatcgtgttaggtctatgtcgggagggcatggcttgcgcgttggggcactagatgtaccagcaagtcaattcctcggtagcgctaccagccctggtccacggaccgccccggccgcaaagcctgagaaagcgtccgctggaacccgcgtgcccgtgcaggagaagacaaacctggccgcatatgtgcctctgctgacgcaggggtgggccgaaatattggtcagacgtcctacagggaacaccagctggctcatgagtctggaaaatccattgtcaccattttcaagcgatataaataacatgcccctccaggaacttagcaacgccctaatggccgcggaacggtttaaagagcacagggatacagcactttacaagtcgctgtctgtcccagccgcgagcaccgctaaaccacctcccctccctcggtctaatacggattccgctgtggtcatggaagaagggagccccggcgaggtacccgttctggttgaaccccccggcctggaggacgtggaggcagcactgggaatggatcggcgcacagatgcatactcccgatcgtcctctgtgtcttcacaggaagagaaatccctgcacgctgaagaactcgtgggtcggggcatcccgatcgagcgggtagtctccagcgagggcggaagaccctctgtggatttgtccttccagccttcacagccactgagcaaatcaagtagcagtcccgagctgcaaacactccaggacatcctcggggaccccggcgacaaggcagatgttggacggctctcccctgaagtcaaggctagatctcaaagcggaactcttgacggagagagcgccgcctggtccgcgtcgggtgaagacagccgcgggcagccagagggtcctctccccagttcgtccccgaggagccccagcggtttgaggcctcggggatacacgattagcgacagcgccccttctcgcaggggtaaaagagttgaacgcgatgctctgaaaagtagagccacggcatctaatgccgagaaggtacccgggatcaacccttctttcgtgttcctgcagctgtatcatagccctttcttcggagacgagtccaacaagcccatcctgctccccaacgaaagtcagtcctttgaaagaagcgttcagctgctggaccagatcccctcatatgatacacataagattgccgtactgtacgtcggcgaagggcaatctaactcagagttagcgattctcagcaacgagcatggttcatatcgctatacagaattcctcaccggcctgggcagactgatcgaactgaaggactgtcagcctgacaaggtctacctgggcggacttgatgtctgtggtgaggacggacaatttacctactgttggcacgatgacatcatgcaagccgtctttcatatagcaactttgatgccaacgaaagatgtggataagcaccgatgtgacaagaagaggcacttgggaaacgattttgtttctattgtctataacgactccggcgaggacttcaaactaggaacaatcaaggggcagttcaatttcgtccacgtgattgtgacacctttggattatgagtgcaacctggtctctcttcagtgcagaaaggatatggagggactcgtagatacctccgttgcgaagatcgtatccgataggaacctgcctttcgtggccaggcaaatggccctgcatgccaatatggcttcgcaggtgcaccattcccgctcaaatcccacagatatctatccatccaaatggatcgcccggctgcggcatattaaaagactgcggcagaggatttgtgaggaggctgcctattccaacccaagcttacccctggtccacccccccagccactccaaagcgcctgctcagaccccagccgagcccacaccgggatatgaggtgggccagaggaagagattgattagttctgtggaggacttcactgaattcgtgtag

SEQ ID NO: 17842 - DNA, 516 bp, synthetic construct
  misc_feature 1..516: note = Description of Artificial Sequence: Synthetic coding sequence
  source 1..516: mol_type = other DNA
ttccctagagacttgtcgctgataagtcctcttgcacaagctgttcggagttcatccaggactccctctgataagcctgtagctcatgttgtggcaaatccacaggccgagggccagctgcaatggctgaacaggagagcgaatgcgttgttggccaatggagtggagcttcgcgacaaccaactggtcgtgccttctgagggcctgtacctgatctattcacaggtgctcttcaagggccaaggatgtccttccactcatgtccttctgacccacaccatatctaggattgcggtgagctaccagaccaaggtgaatttattgtctgccattaagtctccttgccagagagagacacctgaaggtgccgaggcgaaaccctggtacgaacctatatacttgggaggtgtattccagcttgagaagggcgaccgcttgtccgccgaaatcaacaggcctgattacctggactttgctgaatccggtcaggtttacttcgggattatagccctctag

SEQ ID NO: 17843 - DNA, 306 bp, synthetic construct
  misc_feature 1..306: note = Description of Artificial Sequence: Synthetic coding sequence
  source 1..306: mol_type = other DNA
atggcaatgatggaggttcaagggggcccttcgctcggtcaaacgtgcgtactcattgtgattttcacagttttgcttcagtctctgtgtgtggctgtgacctacgtgtattttacaaacgagctcaaacagatgcaagataaatatagcaagtccggaatagcctgcttcctgaaggaggatgacagctattgggatccaaatgatgaggagagtatgaatagcccctgttggcaagtgaagtggcagctgaggcagctggtccggaaaactcctagaatgaagcgactgtgggcagctaaatag

SEQ ID NO: 17844 - DNA, 846 bp, synthetic construct
  misc_feature 1..846: note = Description of Artificial Sequence: Synthetic coding sequence
  source 1..846: mol_type = other DNA
atggctatgatggaggttcagggtgggcccagcctgggccagacctgcgtcctcatcgtgatctttacagttctgctccagagcctgtgtgtcgcggtgacctacgtgtatttcaccaatgagctgaagcagatgcaggacaagtatagtaaaagcggaattgcatgtttcctgaaggaagatgactcctactgggaccccaacgacgaggaatccatgaattcaccttgctggcaggttaaatggcagctgcggcagctggtacggaagatgattttgagaacctccgaggaaacgatttccaccgtgcaagagaagcagcagaacattagcccgctggttagagagcgaggtccgcagagagtggccgcccatattaccgggacccgcggccggagtaatactctttcctctccaaacagcaaaaacgaaaaggcattgggtcggaagatcaactcgtgggagtcatcccggtcagggcattctttcctgtctaaccttcatctcagaaatggggaacttgtgatacatgagaaggggttttattatatatattctcaaacctatttcaggttccaggaggaaatcaaggagaacaccaaaaacgacaagcagatggtgcagtacatttacaaatacacctcttatccagatccaatcctcctaatgaaaagtgcacgtaacagctgctggtcgaaagatgcagagtacggcctttatagcatctaccagggcggcatcttcgagcttaaggaaaatgatcgcatattcgtctcggtcacgaatgaacacctcatcgacatggatcacgaagcttcttttttcggcgccttcctcgtgggctag

SEQ ID NO: 17845 - DNA, 858 bp, synthetic construct
  misc_feature 1..858: note = Description of Artificial Sequence: Synthetic coding sequence
  source 1..858: mol_type = other DNA
atggatgatagtactgaaagagagcagtcccggctgacctcctgtttgaaaaagagagaagaaatgaaactgaaagaatgcgtctccatcttaccaagaaaagaatccccatccgtcaggtctagcaaggatggcaaattgctggctgcaacactcctgctggccctgctctcatgttgcctgactgtggtgtcgttttaccaggtggcagcactacaaggcgaccttgcatcactgcgcgcagaactccaggggcaccatgctgaaaaattgcccgcaggcgccggcgcccctaaagcaggcctcgaggaggcccctgccgtgactgccggattaaaaatcttcgaaccgccggctcccggcgagggcaattcaagccagaactctagaaacaagcgggccgtccagggcccagaagagacagtgacacaggattgtctgcagctaatcgcagactctgagacacctacaattcagaaggggagttacacattcgtgccctggttgctgtctttcaaaagaggcagcgccctcgaggagaaagagaacaaaatcttggtgaaggagactggttacttcttcatttatggacaggtactatacacagacaagacctacgccatgggtcatctcatccagaggaagaaggtgcatgttttcggagacgagcttagccttgtgacccttttccgatgtatccaaaatatgccagagacactgcctaacaactcttgttactcagctggcatcgccaaactcgaagaaggggatgagttacagctggccattccgcgagaaaacgctcagatttccttagacggcgacgtgacattttttggggcacttaaactgctgtag

SEQ ID NO: 17846 - DNA, 801 bp, synthetic construct
  misc_feature 1..801: note = Description of Artificial Sequence: Synthetic coding sequence
  source 1..801: mol_type = other DNA
atggatgacagtaccgaaagagagcaaagtcgactgacgtcgtgtctgaagaagcgggaggagatgaagctgaaagagtgcgtgagcattctacctaggaaggagtccccatcagtccggagctccaaagacggcaaattgctcgccgcaacactcctgctcgcactcctctcctgctgtttgactgtggtgtcattttatcaggtggccgcattgcaaggggacctcgcttctctcagggccgaactgcagggtcatcacgccgaaaagctaccagcaggagctggggcccccaaagccggtctagaggaggcacctgccgttactgcgggtcttaaaatttttgaaccccccgcacctggggagggcaattctagtcagaatagccgaaacaaacgcgcagtacagggacctgaggaaaccgggagttatactttcgtgccatggctccttagttttaagaggggatccgctctcgaggagaaagaaaacaagatccttgtcaaagagaccggctacttcttcatctacggtcaagtgttgtacactgacaaaacttacgccatgggccaccttatacagcgcaagaaagttcacgtcttcggggatgagctgtctcttgtaaccctgttcaggtgcattcagaatatgccagagaccctccctaacaatagctgttattctgccggcatcgcaaagcttgaagagggagatgagctgcagctggctatcccacgagagaatgcacaaatatctctagacggtgatgtcacgttctttggggcccttaagctgctctag

SEQ ID NO: 17847 - DNA, 495 bp, synthetic construct
  misc_feature 1..495: note = Description of Artificial Sequence: Synthetic coding sequence
  source 1..495: mol_type = other DNA
atggatgattccactgagcgggagcagagcaggctgacatcctgcctaaagaaacgagaggagatgaagttgaaggagtgtgtctccattcttcctagaaaagaaagcccctcagttcggtcctccaaggacgggaaacttctcgctgccactctgctgctagccctactctcctgctgtcttacagtggtgagtttctatcaggtggccgcattacagggggatttggccagcctgcgcgctgagctgcaaggacaccacgctgaaaaactgcccgccggtgctggcgctcctaaggcaggcttagaagaggctccggccgtaactgccggcttgaagatcttcgagcctcccgctccaggcgagggcaattctagccagaactctcggaacaaacgcgctgtgcagggacctgaggaaaccgtcacccaagattgtctgcagctgatcgctgattctgagacccctaccatccagaagggctttatctactag

SEQ ID NO: 17848 - DNA, 2700 bp, synthetic construct
  misc_feature 1..2700: note = Description of Artificial Sequence: Synthetic coding sequence
  source 1..2700: mol_type = other DNA
atgcctactctgggctggctgccagaaaaccgagatatttccgaagaccagtccagcgctgaacagactcaggccctcgcttcacaggctagccaatttctagcaaaggtagagagctttgaaaggctaattcaggctgggcgactgatgcctcaggatcaggtgaagggttttcaaagattgaaggcagcccacgctgccctggaggaggagtacttaaaggcctgtagggaacagcacccagcacagcccctcgcgggcagtaagggcacgcctggcagatttgatccccgaagggagctggaagctgagatttaccgtctcggctcctgcctggaggagctgaaggagcacatagatcagactcagcaggaaccagaacctccaggcagcgattccgccctcgattctaccccagctctgccatgcttgcaccagccaactcacctccctgccccgtcgggccaggcgcctatgcctgcaattaagacttcatgcccagagcccgccaccaccacggccgctgcttcaactggcccttgcccgctgcatgtgaatgtggaagtgtctagcgggaattccgaggttgaggataggccccaggatcccctggccaggttgaggcataaagaacttcagatggagcaggtttatcatggtcttatggagcgctacctaagcgttaaaagtctgcccgaggccatgcggatggaagaggaggaggaaggggaggaggaggaggaagaggaaggtggaggggactccctcgaggtcgacggcgtggccgccactccaggcaaagccgaggcaacacgggtcttgccgcgccagtgccccgtgcaggctgaaaagtctcatggtgcccctctggaagaagccacggagaagatggtctccatgaagccccccggcttccaagccagtctggcgcgcgatggtcacatgtcgggtttaggaaaggcagaggccgcacccccaggacccggtgtaccaccccacccaccaggtacgaagtccgcagcctcccaccagtcatctatgaccagcttggaaggtagcggcatctcggagcgactgccacagaagccattgcacaggggcggaggcccacatcttgaggagacttggatggcctcccccgagaccgacagcgggttcgtggggagcgagaccagtcgcgtttctccactaacccagacaccagagcaccgcctgtctcacatttccactgccggtactctcgcacagcctttcgctgcctccgttccacgggacggcgctagctatccaaaagctcgggggagcctaattcctagacgggcaacggagccgtcaacaccccggtcccaggcccagcgctatctgtctagccccagtgggcccctacggcagagagcccctaacttcagtttggagagaacactggccgctgagatggcagtgccaggctctgaatttgaaggacacaaaagaatctccgaacagccgctcccaaacaaaacaatctctccaccaccagccccagctcccgctgccgcccccttgccatgtggacccactgagacaatcccttcgttccttctaactagggcaggacgtgatcaagcaatatgcgagctgcaggaagaggtgtctcgtctgcgactcagactcgaggattccctacaccagccactccaaggaagcccaaccagaccggctagcgcctttgacagacccgcaagaacgcggggccggcccgctgacagtcctgcaacatgggggtctcactatggatcgaagagtaccgaacgcctcccaggcgagccgcgcggcgaagagcagattgtacctcccggtcggcagcgagcccgctctagtagtgtgccgagagaggtactgaggcttagcctcagcagtgaatccgaactgcccagcctgccattgttctctgaaaagtctaaaactacaaaggactcgcctcaggccgcgagggacggcaagagaggcgtggggtcagctgggtggccagaccgcgtaacgtttagaggacaatacacagggcatgagtaccacgtattgagtcccaaggccgttcccaaaggaaacggaacagtgagctgcccacattgtcgaccgatccgaacccaagacgctgggggagccgttactggggatccattgggacctcccccagccgacactttgcagtgtcctctctgcggccaggtggggtcaccacctgaagccgacggccctgggagcgccacaagtggggcggagaaagccactactagacggaaggccagtagtaccccatctcccaagcagagatcgaaacaggctgggtcttcaccaaggcctcctcctggcctgtggtatctggccacagcgcctccggctcccgcccctcccgcatttgcttacatctcctcagttcctatcatgccctatcctcccgccgccgtgtattatgctccagcaggacctacatcagctcagccagccgctaaatggcctccaactgcatccccccccccggcacgccggcaccggcactctatccagctcgacctgggtgacctggaagagttgaataaagccctgagtcgggccgttcaggcagccgaatccgtgcgcagtaccacccgccagatgcgaagcagcctgtcagccgatttaagacaggcccattcccttcgggggagctgcttgttttag

SEQ ID NO: 17849 - DNA, 1569 bp, synthetic construct
  misc_feature 1..1569: note = Description of Artificial Sequence: Synthetic coding sequence
  source 1..1569: mol_type = other DNA
atggctctcctcccccgagcactatcagccggtgccggacctagctggcggcgcgcagcccgggctttccgcgggttcctgttgcttctccccgagcccgcagctctgacaagagcactctccagggccatggcctgtcgacaggaacctcagccacagggtcctcctcccgccgctggggcggtggcttcgtacgattacctcgtgatcggaggcggcagcggagggctcgcctcagcgaggcgtgccgccgagctgggcgcccgtgcagctgtcgtagagagtcataagctcggtgggacatgtgtgaacgtggggtgtgtccctaaaaaggtgatgtggaataccgccgtgcactctgagtttatgcatgatcatgccgattacggctttccttcctgcgaaggaaagtttaactggcgggtgatcaaggaaaagcgggatgcgtacgtcagccgcctcaacgccatctaccagaataatcttactaaatcccatattgaaatcatcagaggtcatgctgcatttacgtctgatcccaagccaactatcgaggttagcggaaagaagtacacggctccacacattctgatcgcgactggggggatgccaagcaccccacatgaaagccagatcccgggagcttctcttggaatcacatccgacggctttttccagctcgaagaacttcccggtaggtctgtgattgtgggggccggttacatagctgtggaaatggctggtatacttagcgctctggggtccaaaaccagcctcatgatcagacatgacaaggtcctccgaagttttgattccatgattagtaccaactgtacagaagaactggagaacgccggcgtggaagtgttgaagttctcacaagtcaaggaggtgaagaaaaccctatcagggctcgaggtgagtatggtgacggctgttcccggtagactgcccgtgatgaccatgatccctgacgtggattgcctgctgtgggccattggacgcgtcccgaacaccaaagacctgtcgctgaacaagctaggaatccagactgacgataaaggccatatcattgtggatgagttccagaataccaatgtcaaaggaatttatgccgtaggcgacgtgtgcggaaaggctttgctgaccccagtggccatagctgccggtaggaagttagcccacaggttgtttgagtataaagaggactcaaaactggactacaacaatattcctactgttgtcttcagccatccacctatcggcacagttggactgacagaagatgaagctatccataaatatggcatcgagaacgttaagacctactcaacttcttttacaccaatgtaccacgctgtcaccaaaaggaagacaaaatgcgtaatgaagatggtctgcgctaacaaggaggagaaggtcgtcggcattcatatgcagggcctgggctgcgacgaaatgctgcaaggcttcgctgtcgccgtaaagatgggagcgactaaagccgacttcgataacactgtggccatacaccccacatccagcgaggagcttgtgacgctgcggtag

SEQ ID NO: 17850 - DNA, 1323 bp, synthetic construct
  misc_feature 1..1323: note = Description of Artificial Sequence: Synthetic coding sequence
  source 1..1323: mol_type = other DNA
atggaacagagaggccaaaacgcccctgctgcatcgggcgctcgaaaacggcatggccctggaccaagggaggcgcggggggcacgccctggtccacgtgttcccaagaccttggtcctcgtggtggctgcagtgcttctcttggtatctgccgagagtgcccttattacccagcaggatctggctccccagcaacgcgctgccccccagcaaaaacggtcttcaccctcggaaggactttgtccccctggccaccacatctccgaggacgggcgcgattgcatttcatgcaagtatggacaggactactccactcactggaatgacctgctcttttgccttaggtgtacccggtgtgattctggtgaagtcgagttaagcccctgtacaaccacgagaaacacggtatgtcagtgcgaagagggaacttttcgcgaagaagatagccccgagatgtgtcggaagtgtcggactggatgtcctcgcggcatggttaaagttggggactgcaccccatggagcgacatagagtgtgtccacaaggaatctgggactaagcacagcggagaggtgcctgccgtggaggagaccgtcacgtcttctcctggcacccctgccagcccgtgctccctctctgggattattatcggtgtcaccgtggccgctgtcgtcctgattgtcgctgtgtttgtgtgtaagtcccttctctggaagaaggtgttgccgtacctgaagggcatctgttcaggtggcggcggagatcctgaaagagtggatagatccagccagcgcccaggggccgaggataacgtgcttaacgaaatcgtgagcattctgcagcccacacaggtgccagagcaagaaatggaggtccaggagccagctgaacccaccggtgtgaacatgttgtcccccggtgaaagcgagcatctgctcgaacccgccgaggccgagcgctcacagcggagaagactccttgtgcccgctaatgagggggaccctacagagaccttgcggcaatgttttgatgatttcgccgacctggtgccatttgattcttgggaacctctgatgagaaagttaggcctaatggacaatgagattaaagtcgccaaagcagaagctgcaggccatcgagatacgctgtacacaatgctgataaaatgggtgaacaaaaccggcagggacgccagtgttcacaccttgctggatgccttggagaccctgggggaacgcctggccaagcagaagatcgaagatcacctgctgtctagcggcaaattcatgtatcttgaagggaacgctgatagcgctatgtcttag

SEQ ID NO: 17851 - DNA, 1236 bp, synthetic construct
  misc_feature 1..1236: note = Description of Artificial Sequence: Synthetic coding sequence
  source 1..1236: mol_type = other DNA
atggagcagcgaggccagaacgccccagccgcaagcggtgctaggaaacgacatggtccgggtccgcgggaggctcgtggcgcaaggccgggcccccgagtgcccaagacactcgtactagtcgttgccgcagtgctgctgctggtgtccgccgaatcagcattgataacacagcaggatctggcccctcaacagcgcgctgctccacaacagaagcgcagttctccttctgaggggctgtgccctccaggccaccacatctctgaggatgggagggattgcatttcctgtaaatatggtcaggattattccactcattggaacgacctgctgttctgcctgcgctgcacgcgttgcgattctggcgaggtggaactgtctccctgcacaacaacacggaataccgtgtgtcagtgtgaagaagggacgtttagagaggaagactcccccgaaatgtgtaggaagtgcagaactggctgtccccgcggaatggttaaagttggggattgcactccctggagcgatattgagtgtgtacataaagagagtggtatcatcattggagtgacagttgcggccgtggtcctcattgtggctgtatttgtgtgcaaatcactgctttggaaaaaggtgctgccatacctgaagggaatctgcagtggaggaggcggagatcctgagcgggtcgaccggtcgtctcaacgtccaggcgccgaggataacgtgctgaacgagatcgtgtcaattcttcagcccactcaggtcccagaacaagaaatggaggtgcaggagcccgccgagcccaccggagtcaacatgctgtcccctggggagtctgagcatctgttggaacccgctgaagctgagcgctcacagagacgtagactgttggtgccagctaacgagggcgacccaaccgagacactgcgtcagtgtttcgacgatttcgctgaccttgtcccttttgactcgtgggagccgctgatgagaaaactgggacttatggacaacgaaatcaaagtcgcgaaggccgaggctgccggtcatcgcgatacactgtacactatgctgatcaagtgggtgaacaaaactggcagggatgcctctgtccacacactgctggacgctcttgagacactcggcgagcggctggccaagcagaagatagaggatcacctcttgtctagcggaaagttcatgtacttggaggggaatgctgacagcgccatgtcttag

SEQ ID NO: 17852 - DNA, 783 bp, synthetic construct
  misc_feature 1..783: note = Description of Artificial Sequence: Synthetic coding sequence
  source 1..783: mol_type = other DNA
atgtgtcgcaagtgtcgcaccggctgccccagggggatggtgaaagtaggcgactgcacaccctggtccgacattgaatgcgtccacaaggagagcggtattataattggggttacagtcgccgccgtcgtgctcatagtggcagtgttcgtgtgtaaatcccttttatggaaaaaggtcctgccttacctgaaaggcatctgctccggaggaggtggggacccggagagggtggatcgctcaagccagcggccaggagccgaggacaatgtcctgaacgagatcgtttccattctgcagcccactcaggtcccagagcaggaaatggaggtgcaggaaccagcagaacccaccggagtcaacatgctttccccgggcgaatccgagcacctgctagagcctgctgaagccgaaagaagtcagagacggcggctcttggtacccgctaacgagggggatccaaccgagacacttcgacaatgctttgatgacttcgcggatcttgtgccatttgactcttgggagccattaatgcgcaaactgggactgatggataatgagattaaagtcgcaaaagccgaagccgccggacaccgcgacactctgtacactatgttaattaagtgggtgaataagaccggtagggacgcgtcagtacatactctcttggatgccttagaaactctgggagagcgattagctaaacaaaaaattgaggatcacctattgtcatctggcaagttcatgtacctggaaggcaacgctgactctgctatgagctag

SEQ ID NO: 17853 - DNA, 1161 bp, synthetic construct
  misc_feature 1..1161: note = Description of Artificial Sequence: Synthetic coding sequence
  source 1..1161: mol_type = other DNA
atggggctgtggggtcaatcagtgcctaccgctagtagtgcaagggctggacggtatcctggagcccgaacagctagcggtactcgtccatggttgctggaccctaagatcctcaagtttgtggtgtttatagtggctgttcttctgccggtgagagttgactctgctactatcccgaggcaggacgaggtaccacagcagaccgtcgccccacaacagcagaggcgcagcctcaaagaggaagaatgccctgccggttcgcaccgtagtgagtatactggcgcctgtaatccatgtacagagggcgttgactacacaatcgcttctaacaatctgccctcctgcctcctttgtactgtttgtaaatcaggccagacaaataagtcttcttgcaccactactagagatactgtctgccagtgtgaaaaagggtcttttcaagacaagaactctccagagatgtgccgcacctgccgcactggctgcccgagggggatggtcaaagtatcaaactgtacccccagatccgatatcaagtgtaagaacgagagtgctgccagcagtacagggaaaacccccgccgccgaagagactgttacgacgatattgggaatgttagcgagcccataccactacctaataatcatagtcgtattagttatcatactggctgtagtggtggtggggttctcatgtcggaaaaagttcatctcttacctcaaaggaatctgtagtggaggcggcggagggcctgagcgcgtgcatagggttctcttcagacgacggtcgtgtccaagtcgtgtccccggagctgaagataatgcccggaatgaaaccttgtcaaaccgttacttacagcctacacaggtgtctgaacaggagatccaaggacaggagctggctgagctgaccggagtgacagtcgagctcccagaagagccccagcgtttgttggagcaggcggaggcggaggggtgtcaaagacgccggctcctggtgccagtcaatgatgctgattctgcggacatctccacgctgctcgacgcaagcgcgacgctagaggaaggccatgccaaggaaacgatacaagatcagttggtggggagtgaaaagttgttttatgaggaggacgaggccggctccgccacatcatgtctctag

SEQ ID NO: 17854 - DNA, 1368 bp, synthetic construct
  misc_feature 1..1368: note = Description of Artificial Sequence: Synthetic coding sequence
  source 1..1368: mol_type = other DNA
atgggcctgtcaaccgttccagatctgctgttgccactcgttctccttgagctccttgttggcatttaccctagcggggtgatagggctggtgccccacctgggcgacagggaaaaacgggacagtgtatgtccgcagggcaagtacatccacccccagaataattccatttgctgtaccaaatgccataaaggcacctatctgtacaatgactgtccaggtcccggacaggataccgattgtagagagtgcgagagtggatcatttacagcctcagaaaatcacctgaggcactgtctctcctgcagcaagtgcagaaaagagatggggcaggtggagatatcttcatgtacagttgatagagacacagtatgtggctgccgcaagaatcagtacaggcactactggagcgagaatttgttccaatgtttcaactgctccctatgtcttaatggaacggttcatttgagttgccaggagaaacagaacaccgtctgcacctgccacgctggctttttccttagagagaatgaatgcgtgagctgtagtaactgtaagaagagcctggaatgtactaagttgtgtctgcctcagatcgagaacgtgaagggcacggaagacagcggaacgaccgtcctcctccctttagtcattttcttcgggctctgtttactttcgttgctcttcatcggactgatgtaccgatatcagcgctggaaatcaaagctttactccattgtatgcggcaagtctacaccagaaaaggaaggtgaactcgagggaaccaccacaaagcccctggctccgaaccctagcttcagcccaacaccaggattcactccaaccttagggttcagccccgtgccttcatcaacctttacctcctcatctacatacactcctggagattgtccaaacttcgccgctccccggagagaagtggccccaccctaccagggcgctgacccaatcctggcaaccgccctggcttcagaccccattcccaacccactgcagaaatgggaagacagcgcccacaagcctcaatctctcgacaccgacgaccccgctaccctgtacgcagtcgttgaaaacgtgccacctctccggtggaaggaatttgtacgtaggcttggactgtctgatcatgagatagatcggcttgagctacagaacggccgctgccttagggaggcccaatacagtatgctggccacttggcgaagacggaccccccgcagagaggccaccttggaacttctgggacgggttctgcgcgacatggacttgttagggtgcctggaggatatcgaagaagctctttgcggcccagctgcactgcctccagctccttcacttttaagatag

SEQ ID NO: 17855 - DNA, 657 bp, synthetic construct
  misc_feature 1..657: note = Description of Artificial Sequence: Synthetic coding sequence
  source 1..657: mol_type = other DNA
atggggttaagtaccgtcccagacttgctgttgcctttagtgctcctagagctgttggtgggcatctatccgtccggagttatcgggttggtgccacaccttggagaccgagaaaagcgcgattccgtgtgtccccagggcaagtatattcatccccagaataactctatttgttgtaccaagtgtcacaagggtacatacttgtataacgactgtccggggcctggtcaggacaccgactgtcgagaatgtgagtcaggatcattcactgcatcggagaatcatctgcgtcattgtctgtcgtgttcaaagtgcagaaaggagatgggccaggtggagatttcgagctgtaccgtggacagagacaccgtctgtgggtgccgaaaaaatcagtacaggcactactggagcgagaatctctttcagtgcttcaattgtagcctttgtctgaatggcactgtacatttatcgtgtcaggaaaaacaaaacacagtttgtacctgtcacgctggtttctttctgcgcgaaaatgaatgtgtcagctgctcaaaagtgctgctgtgcagacctggctggaatgctgtcgcccgatccagacttaccgccacctctgcatcccagatccaggctatattgcttcttcagccacccaaatag

SEQ ID NO: 17856 - DNA, 1386 bp, synthetic construct
  misc_feature 1..1386: note = Description of Artificial Sequence: Synthetic coding sequence
  source 1..1386: mol_type = other DNA
atggctcccgtagcagtctgggctgcgctggccgtcggattagagctgtgggccgcagcacacgctctgcctgcccaagttgcattcacaccgtatgccccggaacctggcagtacttgtcgactgagggagtactatgaccagacggcacagatgtgttgtagcaaatgttctccagggcaacatgccaaagtcttctgtacgaagacttccgacaccgtatgtgatagctgcgaggatagcacatatacccagctgtggaactgggtcccagaatgcctgagctgtggcagtcggtgcagctcggatcaggtggaaacccaggcttgtacccgtgaacagaatcgcatttgtacgtgtcgaccaggctggtactgcgcactcagcaagcaggaagggtgtaggctgtgcgcacccttgcggaagtgcagacccggatttggcgtcgcacggccaggcacagaaacctctgacgtcgtttgcaagccttgcgctcccggcactttcagtaacacaacctcttcgactgatatatgtcgcccacatcagatttgcaacgtggtcgccattcccgggaatgcttccatggatgcagtgtgcacctccaccagtcctacacgatctatggcaccaggggcagtccatctgcctcaacccgtctccacacgttctcagcacacgcagcccacccctgagccatccaccgccccctctacatcatttttacttcctatgggaccaagtccaccagctgaaggcagcactggcgactttgcactgcctgtgggtctcatagtaggagttacagctctgggactcctcatcattggagtggtgaactgcgttatcatgacacaggtcaagaagaagcctctttgtttacaaagggaggctaaggtgccacacctgcccgcggacaaagcaagaggtacacaggggccagaacagcagcatctactgataactgctccaagctcctcaagttcaagtctggaatctagtgcttctgctctggaccggagggcaccaacacgcaaccagcctcaggcaccaggcgttgaagcctcgggcgccggtgaggcacgagcgtcaacggggagttctgatagcagccctggaggccatggaacgcaggtgaacgtgacatgcatagtgaatgtgtgttcctctagtgatcattccagccagtgttcttcccaggcgtccagcacaatgggagataccgactcatcaccttccgagtccccaaaggatgagcaagtacccttctccaaagaagagtgtgctttccgctctcagttagagaccccagagaccttgcttggctcgaccgaagagaaacctctccctcttggcgtacccgacgcaggtatgaaaccatcctag

SEQ ID NO: 17857 - DNA, 807 bp, synthetic construct
  misc_feature 1..807: note = Description of Artificial Sequence: Synthetic coding sequence
  source 1..807: mol_type = other DNA
atggcaccagtggccgtgtgggccgccttggcggtgggattagaattatgggctgcggcacacgctctccctgcacaagttgccttcaccccttatgcgcccgagcctggcagtacctgtcggctgcgggagtactacgaccagaccgctcagatgtgctgttccaaatgtagtcctggccagcacgcaaaggtgttttgtactaagacgtccgatacagtctgcgactcctgtgaagatagcacgtacactcagctgtggaattgggtgcctgaatgcctgagctgtgggtccaggtgctcgtcagaccaggtggagactcaggcgtgtaccagggagcagaatagaatttgcacatgtagacccggatggtactgcgccttgtctaaacaggagggatgcaggctttgcgcacccctgcggaaatgtcggccgggttttggcgtagccaggcccgggactgaaacgtcagatgtggtttgcaagccttgtgcaccgggtactttttctaataccacctcatctacagacatctgtcgccctcatcagatatgtaacgtggttgcgattccaggcaatgccagcatggacgctgtgtgcacgagcacctcacctacgagatctatggccccgggcgctgtgcaccttcctcagccagtgtctacacggtcccagcatacccagcccactcctgaacctagcactgctccgagtactagctttctcctccctatgggcccatccccacctgcagagggcagtaccggcgactttgctcttccagtggtcagcctaagcagtagttag

SEQ ID NO: 17858 - DNA, 468 bp, synthetic construct
  misc_feature 1..468: note = Description of Artificial Sequence: Synthetic coding sequence
  source 1..468: mol_type = other DNA
atggctccagtcgccgtgtgggccgctttagctgtgggcttagaactgtgggcagcagcccacgctctgcccgcccaagtggccttcacgccttacgctcctgagcctggatctacttgcaggctgcgcgagtactatgaccaaactgcgcagatgtgttgttctaaatgttcaccggggcagcacgcgaaggtcttttgcaccaagacatctgacaccgtttgcgattcatgcgaggattcaacgtatacacagttgtggaattgggttccagaatgcctctcctgcgggtccaggtgtagctcagaccaggtggaaacgcaagcctgcacccgagagcagaacagaatatgtacttgtaggcccgggtggtactgtgctcttagtaagcaggaggggtgtcggctctgtgcccctctccggaaatgtagaccaggctttggtgtcgcccggcctgacctgagctag

SEQ ID NO: 17859 - DNA, 114 bp, synthetic construct
  misc_feature 1..114: note = Description of Artificial Sequence: Synthetic coding sequence
  source 1..114: mol_type = other DNA
atggccccggtggcagtttgggcagcgctggcggtcggactggagctgtgggctgccgctcacgccttacctgctcaggtcgatcccgggcccctgtttcctcacccaggctag

SEQ ID NO: 17860 - DNA, 1968 bp, synthetic construct
  misc_feature 1..1968: note = Description of Artificial Sequence: Synthetic coding sequence
  source 1..1968: mol_type = other DNA
atgggcaccagcccctcctcttcaaccgctctggcctcatgttcacgcattgccaggcgggctaccgcaacaatgatcgcagggtcgctcctgctgctgggctttctgtcaacgactaccgcccagccagaacagaaagcaagtaacttaatcggtacatatcgccatgtcgatcgggcaactggccaggtgttgacttgcgacaaatgtccagcaggaacatacgttagcgaacactgcaccaacacatctctgcgcgtctgctccagctgccccgtcgggacttttactcgacacgagaacggcatcgagaagtgccacgactgtagtcagccatgtccctggccaatgattgagaagttaccctgtgcagcccttaccgatagagagtgtacttgtccacccggcatgttccagtccaatgccacttgcgctccccacactgtctgtcctgtgggttggggagtccggaagaaggggaccgagacagaggatgttcgctgtaagcagtgcgcacggggcacattcagcgatgtcccctcttctgtaatgaagtgcaaagcctacacggactgccttagccagaacctggtagtgatcaagcctggtaccaaggagaccgataatgtgtgtggtacacttccttcctttagctcctctacctccccaagtcccgggactgcaattttcccccggccagaacatatggagacacacgaggtgcctagtagtacatacgtgcccaagggcatgaatagcacagaatcaaattccagtgcatctgtgagaccaaaggttttaagctcaatacaggaagggaccgtgcctgataacaccagttctgcacggggcaaggaggacgtgaacaagaccttgcctaatctccaggtggtcaaccatcagcaggggccgcaccataggcacatcttgaagctgctgccttcaatggaagccaccggcggcgagaagtcatcaacacccatcaaggggccaaagaggggccatccccgacagaatcttcacaaacatttcgacatcaatgagcacctcccctggatgattgtcctattcctgctgttggttctcgtggtcatcgtggtctgttccatccgcaaatcttcacgtacccttaaaaaaggcccccggcaggatccctccgctattgtggagaaggccgggctgaagaaaagcatgactccaacccagaaccgggagaaatggatctactactgcaatggtcatgggatcgatatcctgaaactggttgctgctcaggtgggcagccaatggaaagatatctatcaatttttgtgtaatgcctctgagcgcgaagtggccgccttctctaatggatacactgctgatcacgaacgcgcatatgcagcgcttcaacactggaccatccgaggaccggaagcctcgctcgcccagctgattagcgccctgagacagcaccggcgcaatgacgtggtggagaaaatcaggggcttgatggaggacacgacacagttggaaactgacaaactcgctttgccgatgtcaccatctcctctgtcaccgtcccccatcccctccccgaatgccaaactcgaaaactcagccttacttaccgtggaaccaagccctcaggataaaaataaagggttcttcgtggacgagtctgagcccttattgagatgcgacagcacatcttctggctcttccgccctgagtcgcaatggcagctttatcactaaagaaaagaaggacacagtgttgaggcaagtccgcctggatccttgtgacctgcagcccattttcgacgatatgctgcatttcttaaaccctgaggagttacgtgtcattgaggaaatccctcaggcagaagacaaactcgaccgactcttcgaaattattggggtgaaatcccaggaggcttcacaaaccctacttgactcagtatactctcacctccccgacttactgtag

SEQ ID NO: 17861 - DNA, 1035 bp, synthetic construct
  misc_feature 1..1035: note = Description of Artificial Sequence: Synthetic coding sequence
  source 1..1035: mol_type = other DNA
tcgtgttgtagaccatggcggcccctcggagctcggtcccccgcacgcccttccagaccaaaaaggggacaccccagacagaacctgcataagcactttgatattaatgagcatctaccctggatgatcgtgctctttctgctcctggtactggttgtgatcgttgtgtgctccattcgcaaatcatcaaggaccctgaaaaagggtccccgccaagatccctccgcgattgtcgagaaggccggcctgaagaaatccatgacacccacccaaaaccgagagaaatggatctactattgcaacggtcatggaatcgacatcttgaagctagttgctgctcaggttggttcgcagtggaaagacatttaccagtttctgtgtaacgcttccgaacgggaggttgccgctttcagcaacggatatacagccgaccatgagcgagcttacgccgccttacagcactggactatcaggggaccagaagcctcactggcacagctgatttcagccctaagacaacaccggaggaacgacgtggtggaaaaaatacgcggcctcatggaggataccacacaactggagactgacaaactggctctgcccatgagcccctcccccctgtccccgagtcccatcccatcccccaatgcgaagttagaaaactccgcattgttaaccgtcgaaccgtccccacaggacaagaataaagggtttttcgttgacgagagtgagcctctcctgagatgtgacagtaccagctctgggagttcagccctttctaggaatgggtcattcatcacgaaggagaaaaaggataccgtcctgaggcaggtgcgactagacccgtgtgatctgcagcccatattcgacgatatgctgcacttcctcaatccagaagagctgagggttattgaagagatcccgcaggctgaggataaactggatcggctattcgagattatcggcgtgaaaagccaggaggcttctcagaccctcctcgattctgtgtactcccacctcccagacttgctgtag

SEQ ID NO: 17862 - DNA, 1119 bp, synthetic construct
  misc_feature 1..1119: note = Description of Artificial Sequence: Synthetic coding sequence
  source 1..1119: mol_type = other DNA
atggagcagcgcccacgcggatgtgctgctgtcgctgcggccctcctgctagtgctgctgggcgcacgagctcagggagggacacggtctcctcggtgcgactgcgctggagatttccataagaaaatcggactcttctgttgccggggttgcccagccgctagccaggtcgctctcgagaactgtagtgccgtggcagacactcgatgcggctgcaagccaggttggttcgtggagtgtcaggtttcccagtgtgtgtcatccagtcctttctactgtcagccatgcctggactgcggcgctttgcaccggcatacaaggcttctatgctcacgccgggataccgactgtggcacctgccttcctgggttttatgaacacggcgatggttgcgttagctgtccaaccagtaccttaggtagctgcccagagaggtgcgccgccgtgtgcggatggcggcaaatgttttgggtgcaggtgctactggctggactggtggtgcccctgctgctgggcgcaacactgacatacacatatcgccactgctggccacataaaccactggtcacggccgacgaggccggcatggaggctctgactcctccacctgctacgcatctgtcgcctttagattccgcacacactcttctggccccgcctgactctagcgagaagatctgcacagttcaattggtgggcaattcttggactcctgggtacccagagacacaagaggctctttgtccccaggtcacatggtcctgggaccagctcccctcacgagcattaggcccagccgctgcaccaactctcagcccagaatccccggccggctccccagccatgatgcttcaacctggtccccagctttacgacgtgatggacgctgtgccagcaaggcgatggaaggagttcgtgagaacattaggcctacgggaggcagagatcgaggctgtggaagtcgaaattggtcgctttcgggaccaacaatatgaaatgctcaagcggtggagacagcaacagccggctggcctgggtgcagtttatgcagccctcgaaaggatgggtctagacggttgtgttgaggacctgagatctcgtctgcaacgaggaccttag

SEQ ID NO: 17863 - DNA, 705 bp, synthetic construct
  misc_feature 1..705: note = Description of Artificial Sequence: Synthetic coding sequence
  source 1..705: mol_type = other DNA
atggaacaacgaccacgcgggtgcgccgctgtggctgcggctctcttactcgtcctactgggagcacgggctcagggggggacgcggagtcctcgctgtgattgtgctggggacttccataagaagattggtctgttttgttgtcgcggctgcccggccgacgaagccggtatggaggctttaacaccacctccagccactcatttgtccccactggattccgcccacaccttactggctccacctgatagttctgaaaagatctgtactgtgcagttagtcgggaacagctggacaccgggttatccggaaacccaagaggctctgtgcccacaagtgacttggtcctgggatcagttgccaagtcgcgccttaggaccagcagccgcaccgaccttgtcaccagaaagccctgccggtagtccagccatgatgctgcagcctgggccgcagctgtacgatgtgatggacgcagtcccggccagacggtggaaggagtttgtcaggacccttggtctcagagaagcagaaattgaagctgtggaagtggaaattggccgctttcgcgaccagcaatatgaaatgttgaagcggtggaggcagcaacagccagcgggcctgggggctgtgtacgcggctctggaaagaatgggtctggacggctgcgtcgaagatctgcggagccggctccagcgcggaccctag

SEQ ID NO: 17864 - DNA, 1143 bp, synthetic construct
  misc_feature 1..1143: note = Description of Artificial Sequence: Synthetic coding sequence
  source 1..1143: mol_type = other DNA
atggaacaacgccctcgcgggtgcgccgctgtggccgctgcccttctgctggttttactcggcgcccgagcgcaaggaggtacacggagcccccgttgtgactgtgccggagactttcacaagaaaattggcctgttctgttgccgcggatgcccggctggacattaccttaaggccccttgtacagagccttgcggaaatagtacttgtctcgtgtgcccccaggatacattcttggcgtgggaaaaccaccacaactcagaatgcgctaggtgtcaggcctgcgatgagcaagctagccaggtcgctctagagaactgcagtgccgttgccgataccaggtgtgggtgtaaacctggctggttcgtggagtgtcaggtgtcccagtgcgtgagctcgtcaccattttactgtcagccctgccttgactgtggggccctccatagacatacccgactgctgtgttccagaagggatacagactgtgggacttgtttacctggcttttatgagcatggagacggttgcgtgagttgtcctacgagcactttgggttcatgtcctgagcgatgcgcggccgtgtgtggctggcgtcaaaacgaggcaggcatggaggcactgacccctccacccgccactcacttgtctccactggatagtgcccatacacttctggctccccccgacagcagcgaaaaaatttgtacagttcagcttgtcgggaacagctggactcctggatacccagagacacaagaagccctttgtccacaggttacctggagctgggaccaactgccaagtcgcgccttgggacccgctgccgctccaactctgtctcccgagagtccagcgggtagcccagccatgatgttgcagcccgggcctcagctgtatgacgtgatggacgctgtgcccgcgcggagatggaaggaattcgtgaggacgctgggactccgggaggctgagatcgaagccgtagaggtcgaaatcggcaggtttcgcgatcagcaatacgagatgcttaagcgttggcgacagcagcaacctgcaggactgggtgctgtgtacgctgccttggaaagaatgggactcgacgggtgcgtggaagatctgagaagccgcctccagaggggtccatag

SEQ ID NO: 17865 - DNA, 1254 bp, synthetic construct
  misc_feature 1..1254: note = Description of Artificial Sequence: Synthetic coding sequence
  source 1..1254: mol_type = other DNA
atggaacaacgcccacgcgggtgcgcagccgtcgccgccgcacttctactggtgctcctgggagcccgcgcccagggcgggacccggtcacctcgttgcgattgcgctggcgacttccacaagaaaataggtctcttttgctgcaggggctgtccagctggccactatctaaaggccccgtgcacggaaccctgcggcaattccacatgcttggtctgccctcaggatacatttctggcgtgggagaaccatcacaatagcgaatgtgcaaggtgccaggcttgcgacgagcaagccagccaggtcgctctggagaactgctctgcagtagccgacacccgctgtggatgtaagcctgggtggttcgtggagtgtcaggtctcacagtgtgtcagcagtagtcctttttactgccaaccgtgcctcgattgcggtgccctccacaggcataccagactattatgctccagaagggacaccgactgtgggacttgtttgccaggcttctatgagcacggcgatgggtgtgtctcctgccctactagcacgctaggaagttgccccgaacggtgtgccgctgtgtgtggttggagacaaatgttttgggttcaagtcctcctggctggtttggtggttccccttctcttgggcgcaaccctgacctacacctatcggcattgttggccccacaagcctctggtgactgccgacgaagccggcatggaagccttaactcccccgcctgccacgcatttgagtccactcgattccgcccacacactccttgctcccccagattcctctgaaaaaatttgtacggttcagttagtaggtaattcctggacccctgggtaccctgagactcaggaagctttgtgtcctcaggtgacatggtcttgggatcagctcccttcccgcgcattggggcctgccgccgcccctaccctcagcccagagagccccgccggtagtcccgccatgatgttacagccaggtccacaactttatgatgtcatggatgctgtgccagcaaggcggtggaaggaatttgtgcgaacgctgggactgcgggaagccgaaatcgaggccgtggaggtggagatcgggagattccgggatcagcagtatgagatgcttaaaagatggcgccagcagcagccggctggcttaggcgccgtgtacgccgcactcgaacgaatggggctggacgggtgtgttgaagacctccgctctaggctacagcgcgggccctag

SEQ ID NO: 17866 - DNA, 1281 bp, synthetic construct
  misc_feature 1..1281: note = Description of Artificial Sequence: Synthetic coding sequence
  source 1..1281: mol_type = other DNA
atggagcagcggcctagagggtgcgccgccgtggctgccgccctgctcctcgtcctactgggcgccagggctcagggcggaactagaagcccccgctgcgactgcgccggcgacttccataagaagattggactgttctgctgccgcggctgccccgccggacattaccttaaggccccttgcaccgagccctgtggaaattccacctgcctcgtatgtccacaagacacatttctggcttgggaaaaccaccataatagcgagtgcgcccgatgccaggcttgcgacgagcaagcctctcaggtggctctcgagaactgctctgctgtcgcggacactaggtgcgggtgcaagccggggtggtttgtcgaatgtcaggtaagtcagtgcgtgagttcctctcctttttactgtcagccgtgtcttgattgtggcgccctccacagacatacgcgcttgttatgtagccgtagggacaccgactgcggtacctgtctgccagggttctatgagcacggagacggatgcgtcagttgcccaaccccccccccatctctggccggagcaccatggggagccgtacagtctgcagtcccactgagcgtggccggggggcgagttggcgtcttttgggtacaggttctactggcaggactggtggttcctttactgctgggggccacactgacttatacgtatagacattgttggccacacaagcctttagtgaccgcagatgaggccggtatggaagcattgactcccccgcctgccactcacctgtcacccttggatagcgcccacacattgctggcaccacctgatagttcagaaaagatatgtacagtccaactcgttggaaattcttggactccgggatatcccgaaacccaagaggccctatgcccccaggttacttggagctgggatcagctacccagtcgagctctgggtcctgctgcagcacctaccctgagccctgaatccccggctggctctccggccatgatgttacagccaggtcctcagctgtacgatgtgatggacgcggtgccggcacgacggtggaaagaatttgttagaacactcggacttagggaggccgagattgaagccgttgaggttgaaatcggaaggtttagagaccagcaatatgaaatgttgaagcgatggaggcagcagcagcctgccggccttggagctgtgtacgctgccctcgagcgcatggggctggatggatgtgtggaagacctaaggtctagactgcagcgcgggccctag

SEQ ID NO: 17867 - DNA, 768 bp, synthetic construct
  misc_feature 1..768: note = Description of Artificial Sequence: Synthetic coding sequence
  source 1..768: mol_type = other DNA
atggggaactcttgttataacatcgttgccactttgctcctggtgcttaactttgagcgtacacgaagcttacaggatccttgcagtaactgtcccgctggtaccttctgtgataataacaggaatcagatatgtagtccctgtccgccaaattccttttcatctgctggaggccaacgaacgtgtgacatctgtagacagtgtaagggcgtatttagaacccgcaaggaatgttcatccacctctaacgcagaatgcgactgtacccccggattccattgcctgggagccgggtgcagcatgtgcgaacaggactgcaaacagggtcaggaattaactaaaaagggttgcaaggattgttgtttcggaacattcaatgaccaaaagaggggcatctgcaggccctggacaaactgttccctggacgggaagtccgtgctcgtgaacggcaccaaagaaagagacgtggtgtgtgggccttcacctgctgatctgtcacctggcgcctcttcagtgaccccacccgctcctgcacgagagcccggccattccccacaaattatatcctttttcctggccctgacgtccactgcccttctctttctgctcttcttcctgacgctcaggtttagcgtggttaagaggggccggaagaagcttctgtatatctttaagcagccattcatgcgacccgtccagaccacccaagaagaagacggatgctcatgccggtttcccgaggaagaggaagggggatgtgagctttag

SEQ ID NO: 17868 - DNA, 5919 bp, synthetic construct
  misc_feature 1..5919: note = Description of Artificial Sequence: Synthetic coding sequence
  source 1..5919: mol_type = other DNA
atggatccaacaggcagccagttggatagcgacttttctcaacaagacaccccttgcctgatcattgaggattcccagcccgaaagccaggtgctggaagatgattccgggtctcactttagtatgttatctaggcacctccccaatcttcagacccacaaagaaaatcccgtgctcgacgtggtgagtaatcctgagcaaacagccggagaggaacgtggcgatggtaactcagggtttaacgaacacctgaaagaaaacaaggtcgctgatccggtggactcttccaacctggatacctgtggatcaatctcacaggtgatcgagcagttaccacagcccaaccgtaccagctctgtgctcgggatgtctgtggagtcagccccagccgtcgaggaggaaaagggtgaggagctggaacagaaagagaaggaaaaagaggaagatacgtccggtaatacgacgcactcgctgggcgccgaggatactgcaagtagtcaactgggattcggggttttggagctgtcacagagtcaagatgtcgaggagaacacagtcccatacgaggttgacaaagagcagcttcagtccgttactaccaacagcggctacacgaggctgtctgacgtggacgccaataccgccatcaaacacgaggagcagtcaaacgaggacatccccatcgccgagcaaagctccaaagatattcccgtgactgcccaaccctcgaaagacgttcacgtcgtgaaagagcagaacccgcctcctgctcgatctgaagatatgccgttttctcctaaggccagtgtggccgccatggaggcaaaggagcagctctcggcccaggagctgatggagtccggcttacaaatccagaagtccccagagccagaggttctgtccacccaggaagacttgtttgaccaaagcaataagaccgtatcgtccgacggctgctccacaccatccagggaggaagggggatgctctctggcctctaccccagccaccacccttcacctcctgcagctctctgggcagcgatctttggtacaggattcactgtcaaccaactcatcagatttagtagcaccctcacccgacgcattccggagcactcccttcattgtgccatctagtccgaccgaacaggaagggaggcaagataaacccatggacacaagtgtactgtccgaggagggcggagagccatttcagaagaagctgcagtcaggagaacctgtcgaactggagaacccaccactgctgcccgaatcaactgtgagccctcaagcctctacacccatatcccagtcgaccccagtatttcctccagggagcctgcccatcccctcccagcctcagtttagccacgatatctttatcccctccccgtccctagaagaacagtccaatgacggcaaaaaagatggggacatgcactcttcctctctgaccgtagaatgttcaaagacgtccgagattgagcctaagaattcacctgaagatctggggctgtccctgacaggagattcctgtaaattaatgctgtctacctctgagtattcccagtcccccaaaatggaatccctgagctctcacaggatagatgaagacggcgagaatacccagatcgaggatactgagcccatgagcccagtgttgaactcaaaatttgtgccagcggagaacgactcgattctgatgaaccccgcccaggatggggaggtgcagctgagtcagaatgacgacaaaaccaaaggagatgatacggacacccgtgatgacatctccattctggccaccggttgtaagggtcgtgaggaaaccgtcgccgaagacgtgtgtatagatctcacctgcgattccggctcgcaggcagttcctagccctgcgactcgcagcgaggcactcagctcggtattggaccaggaggaagcaatggagattaaagagcaccatccagaggagggaagttccggctccgaagttgaggagattccagaaactccatgcgaatcccaaggcgaggagctgaaagaagagaacatggaatcggtcccactgcatctgtcattaacggaaactcaaagtcagggcctgtgtctacaaaaagagatgcccaagaaggagtgtagcgaggcgatggaagtagagacgtccgtcatttccatagattctccccagaagctggcaattcttgaccaggagcttgaacacaaggaacaagaagcatgggaagaagccacatccgaggatagttcagtggtcattgtcgacgtgaaagaaccgagccccagagtggatgtcagctgcgagccgctcgaaggcgtggaaaagtgctcggattcacaatcctgggaagatattgctcctgagatcgagccttgtgctgaaaaccggctggacactaaggaagaaaagtcagtggaatacgagggtgatctgaagagcgggactgcagaaacagagcctgtggagcaagattcttctcagccttcgttaccgctggtccgtgcagacgatcccctcaggctggatcaggaacttcaacagccacagacgcaggaaaagacctccaattcactcactgaagattccaagatggctaatgccaagcagctgtctagcgatgccgaggcgcagaaactgggtaaaccaagtgctcacgcaagccaaagcttttgcgagagttccagcgaaacccctttccacttcacgctgccaaaggaaggcgacattattccacccctaaccggagccacccctccgctcatcggccacctgaaactggaacccaagcgacactcaactccaatcggcatctcgaactaccctgaatccacgatcgcaactagcgacgtgatgtcggaaagcatggtggaaacacatgatccgatccttggctctggcaagggcgactcaggggctgcgcctgatgtggatgacaagctttgtcttaggatgaagctggtctcacccgagactgaggcatcagaggagagcctgcagttcaacctggaaaagcccgcaacaggggaacgaaagaatgggagcaccgctgtggcagagtccgtggcaagcccacagaagacaatgagtgttctgtcctgcatttgtgaggccaggcaggagaacgaagccaggtctgaggacccccctaccaccccgatacgaggcaacctgctgcactttccatcctctcagggggaagaggaaaaagagaaactggagggggatcacaccatccgccagagccagcagcccatgaagcctatttctcccgtgaaggaccccgtgtctccggcgtcacaaaaaatggtcattcaaggaccatcttccccccagggagaagctatggtgactgatgtattggaggaccaaaaggagggccgctccactaataaggagaacccctcaaaggcactgattgaacggccaagccagaacaatatcggaatccagacaatggagtgctcgctgagggtccctgagacagtgtccgccgctacccagacaattaaaaacgtgtgtgagcagggcacatctacggtggatcagaattttggtaagcaggacgctaccgtccagaccgagaggggctctggcgagaagcccgtctctgcccccggtgacgatacagagagcctgcattcacaaggcgaggaagagttcgacatgcctcagccgcctcacggccacgtcttgcacagacatatgagaaccattagggaggttaggactttagtcacaagggtgatcacagacgtatattacgtggacgggaccgaggtggagcggaaggtgaccgaggaaactgaggaacctatcgtcgagtgccaggaatgcgagacggaggtgagtccatcccagactggcggttctagtggcgacctgggggacatctcctctttcagttcaaaggcctctagccttcaccgcacctctagcgggacatctctgagcgctatgcacagctcaggctctagcggcaaaggggccggtcccttgcgtggtaaaactagcggaaccgagcctgccgatttcgcactgccatcatccaggggagggccaggtaagctcagcccacgcaaaggggtgagccagacagggacccccgtttgtgaggaagacggggacgccggactggggatcaggcagggcggaaaggcgccagtaacaccgagaggccgcgggcgcagagggcgccccccatcccgtactacgggcactcgcgagacagctgtgccggggcccttgggcattgaggatatttcccctaatctgtcaccggacgataagtccttcagccgcgtcgtcccccgtgtcccagacagcacaaggcgtactgacgtgggggctggcgcactccgccggtccgatagccctgaaataccctttcaagccgctgccggaccaagcgatgggttagatgcttcatctcctgggaattcctttgtcggattgagggtggttgcgaaatggagctccaatggctacttctattcaggcaagattacgcgcgatgttggggcaggcaaatacaagcttctcttcgatgatggctatgaatgcgatgtgctgggaaaggacattttgttgtgtgacccaattcctctggacactgaagttaccgccctgtctgaagatgagtatttcagtgccggcgtggtgaagggccatcggaaggagtctggtgaactatactacagcatagagaaggagggccaacgcaagtggtataagaggatggctgtcatcttgtccctggaacaagggaatcgccttcgcgaacagtacggactggggccatacgaggctgtcacgcctttaactaaagctgccgacatcagtctggataacttagttgaaggaaaaaggaagaggcgttccaatgtgtccagccccgctacaccaacagccagcagctcatcgtcaacgacaccgacccggaagatcaccgaatctccccgcgcgagcatgggagtgctctccggaaaaagaaagttaatcaccagtgaggaggaaaggtcacccgcgaagagaggccgcaaatccgccaccgtcaagcctggtgcggtgggtgccggagagtttgtttccccatgcgaaagcggcgataacactggcgagcctagcgcactggaagagcagcggggccccctgccactaaataaaactctttttttgggttacgctttcttgctgacgatggctactacctctgataagctggccagtaggagtaaactccctgatggacctaccgggtcttctgaagaagaagaggagttcctggagatccctccatttaacaagcaatacaccgagtcccagctgcgggcaggggctggttatatcctggaggacttcaatgaggcacaatgcaatacagcctaccagtgcctgctcattgctgaccagcattgtaggactaggaagtactttctttgcctggcttctggaattccctgtgtttcacacgtttgggtccacgactcttgtcacgcaaaccaactgcagaactatagaaattatttgttgccagccggctattcccttgaggagcagcgcatcttagactggcaacctcgggaaaaccccttccaaaatcttaaggtgctcttggtgagcgaccaacagcagaatttcctcgaactatggagtgaaattcttatgaccggcggagcagcttcagttaaacagcaccacagctccgcacataacaaggatattgccctcggcgtgtttgacgttgtggtcaccgacccaagctgcccagccagcgtgctgaaatgtgcagaagctctgcagctccccgtggtgtcgcaagaatgggtcatccagtgcctgatcgtgggcgagagaataggcttcaagcaacacccaaaatacaagcacgactacgtctctcactag

SEQ ID NO: 17869 - DNA, 5784 bp, synthetic construct
  misc_feature 1..5784: note = Description of Artificial Sequence: Synthetic coding sequence
  source 1..5784: mol_type = other DNA
atgcctggcgagcagatggatcctactggctcccagctggacagtgattttagtcaacaggatacaccatgcctgattatagaggattcacagcctgagtcgcaggttctggaggacgattccggctctcattttagcatgctatctcggcacttgccgaacttgcagacgcataaagaaaacccggttctagacgtggtgagcaatccagaacagacagccggagaagaacggggcgacgggaacagcgggtttaatgagcacctgaaggagaacaaagtggccgaccctgtcgacagcagcaatctcgatacatgcgggtccatctctcaggtgattgaacagctgccacagcccaacagaaccagctccgtccttggaatgagtgtcgagtctgcccccgctgtggaagaagagaaaggagaagagttagaacagaaagagaaggaaaaggaagaagacacaagcggcaataccacccatagcctgggggctgaggacacggcctcatctcagctgggctttggcgtgctggagctgagccagtctcaggacgtagaagaaaacactgtgccatatgaggtggataaggaacagctacaaagcgtgactactaattccgggtatacacggctgtctgacgtggatgccaacaccgccatcaaacatgaagaacagtctaacgaggatattccgatcgcagaacagagtagcaaagacatcccagtgacagcccaaccatcgaaggacgtgcacgtggtcaaggaacagaatcccccaccagccagatccgaagatatgccctttagcccgaaagcctcggtggccgccatggaggccaaagaacagctgtcggcacaggaattaatggagagcggactgcaaatacagaaaagtccggagccggaagtattgagcactcaagaagacttgttcgatcagagcaataaaacagtaagcagcgatgggtgctcaactccgagcagggaagagggtgggtgttctcttgcctccactcccgccaccaccctccaccttctacaattaagtggccagagaagtctggtgcaggacagcttgagtactaactcttccgacctcgtagccccaagtccagatgcgttcaggtcaactccattcatcgtccctagctcccctaccgagcaggagggaaggcaagacaagccaatggatactagtgtgctgtctgaggaagggggcgagccattccagaagaagctgcagtccggcgaaccggtggagctggaaaacccccctttgctgccagagagcactgtctctccgcaggcgagtacccctataagccagtctactccagtattcccccccgggagccttcccatcccatcccaaccacagttttctcatgacatcttcatcccgagcccatcccttgaagagcagtctaacgatgggaagaaagatggggacatgcacagtagcagcctcaccgttgagtgttcaaaaacaagtgaaatcgagccaaaaaattctcctgaggatcttgggctgagtctgacaggggactcttgtaaactgatgctgtcaactagcgagtattctcaatcacctaaaatggagtctctgtcttcccacagaattgatgaggacggagaaaatacacaaattgaagacacggaaccaatgagccccgtccttaattcaaaattcgtgcctgctgaaaacgactctattctcatgaatccagcgcaggacggtgaagtgcagctatcccaaaacgatgataagaccaagggggacgatactgacactcgcgacgatatatccattttagccacgggctgcaaagggagggaagagactgtcgctgaggacgtgtgtatcgacctcacctgtgacagtgggtcgcaggcagtgccaagcccagccacgcgcagcgaggccctatcctccgtgctggaccaggaagaggccatggaaatcaaggagcaccaccccgaggaaggcagtagcggctctgaagtggaggagatacccgagactccttgcgaatcacagggggaagagctgaaggaagagaatatggagagtgtccccctccacttaagtctgactgaaacccagtctcaggggctctgtctgcagaaagagatgccaaagaaggaatgctctgaggctatggaggtggagacttctgtgataagcattgactcccctcagaagctggcaatcctggaccaggaactggagcacaaggaacaggaagcgtgggaagaggctacatccgaagattccagtgtcgtcatcgttgacgtgaaggagcctagcccaagagttgacgttagctgtgagcccctggagggagtggaaaagtgttccgactcacaaagctgggaggatattgcgcctgagatcgaaccatgcgcggaaaacaggctggataccaaggaagaaaagtctgtagagtacgagggggatctgaagtcaggaacggccgaaactgaacctgttgagcaagactccagtcagcccagtctgcctctagtgcgcgcggatgatcctctcagactggaccaggaattacagcagccccagactcaggagaaaacctccaatagcttgaccgaagacagtaagatggctaacgccaaacagctgtcgtccgacgcagaagcccaaaaacttggtaagccttcagcccacgcgtcacagtccttttgtgagagctcatccgagactccattccacttcaccctaccgaaggagggtgatattattcctccattaaccggtgcaaccccgcctttgatcggccacttgaaactggagcccaagagacactcaacaccaatcggcatatcaaactatccagagtctacgatcgccaccagcgatgttatgagtgagagcatggtggagacacacgaccccatcttgggaagcggaaagggcgattctggagcagcaccagacgtggacgacaaactgtgtttgcgcatgaagctggtatctcccgaaacggaagcaagcgaggagagcctgcagtttaacctcgaaaagccagcgacgggagaacggaaaaatggcagtacagcagttgccgaatccgtggcatccccacagaaaaccatgagcgtgcttagttgtatctgtgaagcacgccaagaaaatgaggccaggtctgaggatcccccgacaaccccgatacgtggaaacctcctgcatttcccttcgtcccagggagaggaagaaaaggagaaattagaaggcgaccatacaatccgtcagagtcagcaacccatgaagcccatttcacccgtgaaggatcccgtcagtcccgcaagccagaaaatggtgattcagggccctagctccccccagggcgaggccatggtgaccgacgttttagaagatcagaaggaaggccgctctacgaataaagagaacccttccaaagctctcatagagcggccttcccagaataacattggcatccagaccatggagtgcagtcttagggtcccggagaccgtcagtgcagccacgcagaccattaaaaacgtttgtgagcagggcacatctacagtggatcagaactttggcaagcaggatgccacagtgcagacggaacgcggctctggcgagaagcctgtctccgcccccggtgacgatactgaatccctacactctcagggcgaggaagaattcgacatgccccagccgccccacggacacgttctacataggcatatgagaacaatacgtgaggttaggacactggtgacccgagtgataacggacgtatattacgtggatggtactgaagttgagcgaaaagtcactgaggagacagaggagcctattgtagaatgccaggaatgcgaaactgaggtgagtccaagccagaccgggggcagcagtggcgatttaggcgacatcagctccttctcatcgaaagccagctcattgcataggacaagctccggcacatctctgagtgccatgcacagctccgggtcttccggaaaaggcgcgggaccattaagaggcaaaactagcggcacagaaccagctgattttgccctcccgtcttccagggggggcccagggaagttgagggagaccgcagttcccggccctctcggcatagaggatatctcccctaatttgtcgcctgatgataagagctttagtcgggtggtgccccgtgtgcctgacagcacccgaagaactgacgtgggagcaggcgcattgaggagatctgatagccctgagatcccttttcaggcagcggccgggccatcagatggtctggacgcctcttcacccggcaacagctttgtggggctgagagtagtcgcaaagtggtcatctaacgggtacttctatagcggaaagataacacgggacgtcggggccggaaaatataagctgcttttcgacgacgggtacgagtgtgatgttctgggcaaggatatcctactttgtgatcccatccctttagacaccgaggtgaccgcactttccgaggatgaatacttttcggctggagtcgtgaaggggcacagaaaagagtccggcgagctgtattattctatcgagaaagagggccagcggaaatggtataagaggatggccgtgattttgtcactcgagcagggaaatagacttcgcgagcaatacggcctgggaccctatgaggccgttactcctttgacaaaggcagcagatatttctctggacaacctggtcgaaggtaagagaaagagaagatccaatgtgagcagtccagctacccccaccgccagcagcagctcctcgactactcctacacgcaaaattacggagtcgccccgcgccagcatgggagtgctgtccgggaagaggaagttgatcacgtccgaggaggagagatcaccagcaaaaagaggtagaaagagtgccacggtgaaacctggggcggtgggagctggcgaatttgtttctccctgtgagtcgggggacaatactggcgagccttctgcactggaggaacagcggggcccgctgccactgaacaagacactgttcctgggttacgcttttttacttacaatggccacaacctcagacaaactcgcctcccgcagcaagctccctgatggccccacaggctcttctgaagaagaggaggaattcctggagattcccccctttaataaacagtacactgaatctcaattacgcgcgggagcaggatacatactggaggacttcaacgaggcccagtgtaatacagcctaccagtgcctgctcattgctgatcagcattgcagaactagaaagtactttctttgtttggcatctgggataccatgcgtatctcatgtctgggtgcatgatagttgccacgcaaatcagctgcagaattatcggaattacctcttacccgccggatacagcctggaggagcagaggatcttagattggcaaccacgggagaatcctttccaaaatctgaaagtgctcttagtctccgatcaacagcagaattttcttgaattatggagtgagattcttatgaccggcggcgctgcctctgtgaaacaacaccattcttccgctcacaataaggatatcgccctgggcgtcttcgatgtagttgttaccgatcccagctgccccgcttccgtattgaagtgcgccgaggccctgcaattgccagtggtgtcccaggaatgggttatacagtgtctgattgtgggagagcgcattgggtttaaacagcatccgaagtacaagcacgattacgtgtctcactag

SEQ ID NO: 17870 - DNA, 5934 bp, synthetic construct
  misc_feature 1..5934: note = Description of Artificial Sequence: Synthetic coding sequence
  source 1..5934: mol_type = other DNA
atgccgggtgagcagatggacccaactgggtcacagcttgactctgactttagtcaacaggatactccatgccttatcatcgaagacagccaaccagagagccaggtgctcgaggacgacagtggctcacatttttcaatgctttcccggcatctgccgaatttgcagacacataaagagaacccagtcctggacgtggtctcaaatcctgagcaaacggccggcgaggagaggggtgatggcaactcgggcttcaatgagcacctgaaagaaaacaaagtggcagaccctgtcgatagctccaatctggacacctgtggatccatttcccaagtgattgagcaattacctcagcccaatcgcacttcctcagtgctgggcatgtcggttgagtccgctcctgccgtggaggaggaaaagggcgaagagctggagcagaaagaaaaggaaaaagaggaggataccagcggaaacacaacacatagtctgggggctgaggatacggccagctcgcagctcggcttcggcgttctggaactatcgcaatctcaggatgtcgaggagaatacggtgccttacgaggttgataaagagcaactccagtcagtcacaaccaacagtggctacactcgcttatccgacgtagacgccaacactgcaattaaacacgaggagcagtcaaacgaagatattcccattgcggagcagagcagtaaagatatcccagtgactgctcaaccatctaaagatgtacacgtggtaaaggaacagaacccaccacctgccagatccgaagatatgccattcagtccaaaagcctctgttgccgccatggaagccaaggagcaactgagcgcacaggagcttatggagtctggcctgcaaatccaaaaatccccggagcctgaggtactctctacacaggaggatctctttgatcagagcaacaagacagtgagttccgacggatgctccaccccctcccgggaggagggaggctgttctcttgcttctaccccagcaactaccctccatttgctgcagctatctggccagaggtccttggtgcaggatagtctaagcacaaactccagtgatctggtggccccttcacctgatgccttcagatcaacaccttttattgtaccttctagtcctaccgaacaggagggcaggcaagataaacccatggatacttctgttctgtcggaagaggggggcgaaccttttcagaagaaattgcagagtggagagcctgtggaacttgaaaatccaccgctgctgccagagtccactgtgtctccgcaggccagtactcccatcagtcaatccactcctgtatttccccctgggtcactcccgatcccctcacagccccagttttctcacgatatatttataccctctccttctctggaggagcagagcaacgacgggaaaaaagatggagacatgcactcaagcagcctgacagtggaatgtagcaagaccagtgaaattgagcccaagaatagccccgaagacctgggtctgtcccttacaggcgattcctgtaagctgatgctgtcaacctcggagtatagccagtcccctaagatggagtctctgagctctcacaggattgatgaggacggcgagaatactcagatcgaagacacagaacccatgtcaccagtgcttaattcaaagttcgtccctgcggaaaatgattctatactgatgaaccctgcccaggacggagaggtgcagctctctcagaacgacgataagacaaagggagatgacacagacaccagagatgatatcagtattctagccacaggttgcaaagggagagaggagaccgtcgctgaagatgtttgtattgacctaacatgcgactctggctctcaggcagtgcccagcccagcaactcggagtgaagccctgagctcagtcttagatcaggaagaggccatggaaatcaaggagcaccacccggaagaaggatcgagcggatcagaggtcgaagagattccagagacaccatgtgaatcccagggggaagagctgaaggaggagaacatggaatcagtaccactgcatctgagccttaccgagactcagtcccagggcctctgtcttcagaaggagatgccaaagaaggagtgctcggaggctatggaagtggaaacttcagtgattagcatcgactcacctcaaaagttggctattctggatcaggagttagagcataaggagcaggaagcgtgggaggaagccacaagtgaggacagcagtgtagtaatcgtagacgtaaaggaaccctccccacgggtagacgtctcatgtgagccacttgagggagtggaaaaatgctcagactcgcagagctgggaggacattgcaccggagatcgagccgtgtgcagaaaataggctggataccaaggaggaaaaatcagtcgagtatgaaggcgatctgaagtcagggactgcggaaaccgagcctgtcgaacaggatagttcccagccatcccttcccctggtaagagctgatgatcccctgaggttagaccaagaactgcagcagcctcagactcaggaaaagacgagcaacagtctgaccgaagattctaagatggccaatgctaagcagctctcgtcagacgcggaggcacagaagctaggaaaacctagcgcacatgcatcccagtccttctgcgagagctcttccgaaaccccattccacttcacactgccaaaagagggcgatatcattccccccctcaccggggccacgccacctctgattgggcacctgaagctcgagcccaaaagacactcaacccctatcggcatttccaactatcccgagagtacaatagctacgagcgatgtaatgagtgaaagtatggtagagacccacgaccctattctgggctcaggcaaaggggatagcggggccgcaccggacgtagatgacaagctgtgtctgaggatgaaattagtgtccccagaaacagaggcgagcgaggaatccttgcaatttaacctcgaaaagcccgctaccggcgaaaggaagaatggtagtacagctgtggccgagtccgtggcttcccctcagaaaaccatgtccgttttaagttgcatctgcgaagcccggcaagagaacgaagccagatcggaagatccccctacgacacctatcagaggaaatttactccactttccttcctcccagggtgaggaggaaaaggagaagttagagggggaccacactataagacagagccagcaaccgatgaaacccatctctcccgttaaagaccccgtctcaccggcaagccaaaaaatggtcattcagggaccttcatcccctcagggggaggcaatggtaactgacgtgctggaagatcagaaagagggtcgcagcacaaataaggaaaacccgagcaaggcgctaatcgagaggccgtcccagaataacatcggcatccagacaatggaatgttcccttcgcgtgcccgaaacggtgtctgctgctacacagaccataaagaatgtgtgcgaacagggaacttccactgttgaccagaattttggtaaacaggatgcaacagtccaaaccgagagaggaagcggtgaaaaaccagtgtcagctcctggggacgatactgagagccttcactcccagggggaagaggaattcgacatgccccaaccaccccacggtcatgttctgcacaggcacatgcgcactattcgggaggtccgaaccctggttactcgggtcataaccgatgtctattatgtcgacggtactgaagtggagcgcaaagtgacggaggaaaccgaagaacccatcgtagagtgtcaagagtgtgaaaccgaagtgagcccctctcagaccggtggttcatcaggcgacctaggagatatctcttccttttcctccaaggctagtagcttgcaccggacctcttcaggaacttccctctccgccatgcatagctctggcagttccggaaagggcgccggcccactccggggtaagacctctggcaccgaacctgctgattttgccctgccgagcagtcgaggtggccccggaaaacttagtcctcgcaaaggcgtgtcccagaccgggacccccgtttgtgaagaggatggcgatgccggactggggatcagacaaggaggcaaggcgcctgtcaccccccgcggccgaggacggcgtggccggcccccgagtaggacaaccgggacgcgcgaaacagctgtacctggaccccttggcattgaggatatatctcccaatctgagtccagatgataaatcattttctagggttgtgccacgcgttcctgactcaactcggcggaccgacgtgggtgcgggagctctcaggcgatctgactcaccagaaattccctttcaggctgcagccggcccttccgatgggctggatgcatcgagtcctggcaacagcttcgtcggactgagagttgtcgctaagtggagctcgaatggctatttctactctggcaaaatcacaagagatgtcggcgccgggaagtacaaactactgtttgatgacggctacgaatgcgacgtcttgggcaaagatatcctcctttgcgatcctattccactggacaccgaagtgacagccctctctgaagacgagtacttctctgcgggcgtcgtgaagggccatcgtaaggagagcggagagctgtactacagcatcgagaaagagggccagcgtaagtggtacaagaggatggcagtaatcctttcccttgagcaaggaaaccggttgagggagcagtatgggcttggaccatacgaggcagtgacccctctgactaaagcggcagatatttcactggataatctggtcgaaggaaaaaggaagcgaagaagcaacgtgagttcccccgctacacccacagcgtcctctagttcctccaccacccctacaaggaaaatcaccgaatctccccgggctagtatgggtgttttaagcggaaagcgaaagctgattacgtcggaggaggaaagatcgccagccaagaggggacgcaagtccgccaccgtcaaaccaggagccgtgggcgctggcgaatttgtcagcccctgcgaatccggggacaatacaggtgaaccttcagccctggaggagcagaggggtccactgccacttaataagacgctctttctcgggtacgcctttctgctcaccatggccacgaccagtgataaactggcatccaggagtaagctacccgatgggcctacaggctcctctgaggaggaggaggaattcctagagatcccaccctttaataaacagtacaccgagtcacaactcagggctggcgctggctatattctggaggactttaatgaagcacaatgtaataccgcatatcagtgtctactcatcgctgaccagcactgtaggacaaggaagtactttctgtgcctcgcatctggcattccttgcgtcagccatgtgtgggtacacgactcatgccacgctaatcagctgcaaaattacaggaactatctgctgcctgctggctattcactggaggaacagcggatactagattggcaaccccgcgagaaccctttccaaaatctcaaggtgcttcttgtgtccgatcagcagcagaactttttggaactctggtctgaaatcctcatgacagggggtgcggcttcagtgaaacagcaccacagcagtgcacacaataaggacatcgcgctgggtgttttcgatgtggtggtcactgacccctcctgcccggcatccgtgctcaagtgtgcagaagccctccagcttcccgtcgtgtctcaggagtgggtgatccagtgtcttattgtaggcgaaagaatcggctttaaacagcatcctaaatacaagcacgactacgtctcccattag

SEQ ID NO: 17871 - DNA, 5928 bp, synthetic construct
  misc_feature 1..5928: note = Description of Artificial Sequence: Synthetic coding sequence
  source 1..5928: mol_type = other DNA
atgcccggcgaacagatggatcctacagggtcccagttggacagcgactttagccagcaagatactccttgtctgatcattgaagacagtcaacctgagtcccaggtgcttgaggacgactccggaagccacttttctatgttgtcgcggcatcttccaaacttacagactcacaaggaaaaccccgtgctggacgtggtgtccaatcccgagcaaaccgcaggtgaggagaggggtgatgggaatagcggattcaatgagcatttgaaggagaataaggtcgcagatcctgtcgacagctctaatttagacacgtgcggctccatcagccaggtgattgaacaacttccgcagcccaacagaaccagtagcgtccttgggatgagcgtggaatcagcccccgccgttgaggaagagaagggggaagagctagagcagaaggagaaggagaaagaggaggacacatctggcaacaccacgcactctctgggtgccgaagacactgcttctagccagttgggatttggcgtcttagaattgtcgcagtctcaggacgtggaggaaaatacagtcccctacgaggtagataaggagcaactgcaaagcgttactacaaattccgggtatacgcggctgagtgacgtcgatgccaatacagcaataaagcatgaggaacagtcaaacgaggacattccaatcgccgagcagtcctcgaaggacatcccagtcaccgctcagcccagtaaggacgtgcatgtggtgaaagagcaaaaccctccacctgcacggtccgaggacatgcccttcagccctaaagcgtccgtagcagccatggaggctaaagagcagctttccgcacaggaactgatggagtccgggctgcagattcagaaaagtcctgaaccagaagtgctgagtactcaggaggacttgtttgatcagtccaataagacggtttctagtgacgggtgctccacacccagtcgcgaggagggcggttgctctttggcttctacacctgcgacaaccctccatttgctgcagttgagcgggcaacgcagtttggtccaagactccttgtcaacgaattcctcagatcttgtcgcaccaagtcccgacgccttccggtctactcccttcattgtcccatcgtcccctactgaacaagaaggtcgccaggacaagccaatggacacctctgtcctgagcgaggagggaggcgagccatttcagaagaagctgcagtcaggcgaacctgttgaacttgagaacccaccactcctgcccgaaagtactgtgtctccccaggctagcacgcccattagtcaatccaccccagtattccctcctggctctctgcccatcccttcacaaccacagttctcgcatgacattttcatcccgagcccctctttggaagaacaatctaatgatggcaaaaaggatggagatatgcacagctctagtcttacagtggagtgttctaagaccagcgagatcgaacctaagaacagtcctgaggatctggggctgagtttgaccggagatagttgtaagctgatgctttcaacaagcgagtactcccagagtcccaaaatggaatctctgtccagccacaggattgacgaggacggcgagaacactcaaatcgaagacacagagcctatgtctcctgtgctcaacagtaagtttgtgccggcagaaaacgattcgatccttatgaatcccgcacaggacggggaggtgcagttaagccagaatgatgataagactaaaggagacgataccgacaccagggatgatatcagcatcttggccacgggatgtaagggtcgcgaagaaacagtggctgaggatgtttgtatcgatctgacatgtgacagtgggtctcaggccgtgccatcccccgctacaagaagcgaggccctgtctagcgtgctggatcaagaggaagccatggagataaaggagcaccatcctgaggagggtagctcgggctcagaggtggaagagattccagagactccatgcgagtctcagggagaagagctaaaagaagagaatatggagagcgttccactgcacttatctctgaccgaaactcagtcccaaggcttgtgccttcagaaggagatgcccaaaaaggaatgttctgaggcaatggaagtggagacttctgtaatctccatcgattcaccacagaaactagcgatcctagatcaggaactggagcataaggagcaggaagcctgggaggaagctactagtgaagactcctccgtggtcattgtggatgttaaagaaccaagcccgcgtgtggacgtctcatgcgagccccttgagggggtagagaaatgtagcgatagccagagttgggaggacattgcacccgagattgaaccttgtgccgagaatcggctcgacacaaaagaggagaagagcgttgagtacgagggagacctgaaaagtggcaccgctgaaacagaacctgtggaacaggattcatcacaaccctccctgcccctggtacgcgccgatgatcccctgaggctagatcaagaactgcaacagcctcagactcaggagaaaacctctaactcactgaccgaggatagcaaaatggcaaacgccaagcagctgtcatccgacgcagaggcccaaaaactgggaaaaccaagtgcacacgccagccagagtttctgcgagtcctcgagcgagacacccttccacttcacccttcccaaagagggcgatataatacctcctctgaccggcgccacgccacccctgattggacacttaaagcttgaacctaagcgccattccacaccaattggaatcagcaattacccagaatctaccattgccacatcagatgtcatgtcagagtctatggtagaaacgcacgaccccatcttggggagtggcaaaggcgattctggtgccgcccccgacgtcgacgataagctctgtctgaggatgaagttggtgagtccagagaccgaggctagcgaggaatccctgcaattcaatcttgagaagcctgcaacgggagaacgtaagaatggttccaccgccgtcgcagagagcgtggcgtctccacagaagacgatgagcgtgctaagttgcatctgtgaagccaggcaggagaacgaagctagatctgaggatcccccgaccacacccattaggggcaatttgctgcactttccatccagccagggagaagaggaaaaggaaaaacttgagggagatcacacaatccgccaatctcagcagcctatgaagccgatcagtccggtgaaggacccggtgagtccggcttcacaaaaaatggtgatccaagggccaagcagcccccaaggggaggccatggttaccgacgtcctggaggatcagaaggagggacgtagtactaacaaggagaacccatccaaagccctcattgagcgcccttcacaaaataatatcggcattcaaacaatggaatgctctctgagagtgcccgagaccgtgagtgccgcaacgcagaccattaaaaacgtgtgtgaacaagggacctccacagtcgatcaaaacttcgggaaacaagacgcaactgttcaaactgaaagaggctctggcgaaaaacctgtgagcgcccctggggatgatacggagagcctgcattcacagggcgaagaagaatttgacatgccgcaacccccacatggccacgtccttcaccggcacatgcgcactattagggaggttaggactctggtaactagggtaatcacagacgtgtactatgttgatggtactgaggtcgaacgcaaggtaacggaggagacggaggagcccatcgttgaatgccaagagtgtgaaacagaggtgagcccctcacagaccgggggctcttctggcgatctgggagatatctcttctttctcgtcgaaggctagctcccttcatcgtaccagctcaggtacgtctctgagtgcgatgcatagctcaggctcatctggaaagggggccggtccgctcagaggcaagacctccgggacagaacccgcggacttcgccctcccttcttcccggggaggccctggtaagctgtccccccgcaagggcgttagccagacaggtacacctgtttgcgaagaagatggtgatgcaggactgggtatcaggcaggggggcaaagcccctgtcactcctcgcggtcgtggaaggcggggtagacctccatcacgcaccacgggaacacgcgaaaccgcagtaccgggtcctctagggattgaagacatttccccgaatctatccccagatgacaagtccttcagccgtgtcgtccctcgcgtccccgacagtaccagaagaacagatgtgggcgccggtgcgctacggcggagcgactcccccgagataccattccaagctgcagccggcccatcggacggtctggacgcgagcagccccggaaattcatttgtgggcttaagggtggttgccaagtggtcgagtaacggctatttttactccggaaaaattacccgagacgttggcgccggtaaatataagctcctgtttgacgatggctacgagtgcgacgtcttaggaaaggatatcctgctctgtgatcctattccgttggatactgaagtgacagccctgtccgaggatgaatacttctccgccggggtggtcaaaggacatcggaaagaaagcggggaactgtattactccattgagaaagaaggacagcgcaaatggtataaacggatggcagtgatcctttccctggaacaaggaaaccggcttcgcgagcagtacgggctcgggccttatgaagccgtgacgccattgactaaggccgccgacatcagcctcgataacctagtagaaggaaagcgcaagagaagaagtaatgtgtcctctcctgccacccctaccgcaagctcaagtagtagtacgacacctacccgaaagattaccgaaagccctagagcttctatgggcgtcctctcaggtaagcgaaagctgatcaccagcgaggaggagcggtcccctgccaaacgggggcgcaagtccgccaccgtgaagcccgtgggggctggtgagtttgtgtctccatgtgaatctggtgacaacactggcgagccaagcgcattagaagaacagcgtggcccactgccattaaataagaccctgttcctgggctacgctttcctgttaacgatggcgaccactagcgacaagttggcgagccgcagtaagttacctgacggtcccacagggagctctgaagaggaggaggagtttttagagatcccaccatttaacaaacagtacaccgagagccaacttagagccggagctggctacatcctcgaagacttcaatgaggcccaatgtaatactgcctaccaatgtttgctgatcgcagaccagcattgcaggactagaaagtactttctatgcttggcgtctggcataccttgcgtgagccacgtgtgggtgcatgactcttgccacgcgaaccagttacagaattacaggaactacctactgccagcggggtactccctggaggagcagaggatcctggattggcagcctcgcgaaaatccttttcaaaatctcaaggtgctattagtctcggatcagcagcagaatttcctggagctttggagtgagattctcatgaccggaggagcagccagcgtgaagcagcaccacagttccgctcataacaaagacatcgcacttggagtctttgatgttgtggttacggacccttcctgccccgcttccgtactgaaatgtgctgaggctctccagctgccagttgtgtctcaggaatgggtcatccaatgcttaattgtgggggaaaggattggctttaagcagcatcctaagtacaagcatgactacgtgtcacactag

SEQ ID NO: 17872 - DNA, 1623 bp, synthetic construct
  misc_feature 1..1623: note = Description of Artificial Sequence: Synthetic coding sequence
  source 1..1623: mol_type = other DNA
atggcccagtcgaccgccacgtcaccagatggcgggaccacgttcgaacacctttggagttctttggagcccgattctacgtacttcgacctgccacagtcttctagaggcaataatgaagtggtcggcgggacagacagcagcatggacgtcttccacctggaagggatgacgacatccgtgatggcccaatttaacctgctgagcagcaccatggatcagatgagcagtcgtgccgcatcagcttctccttatactccagaacatgcggccagcgtgccgacccattcaccatacgcccaaccttccagcaccttcgacacaatgagcccagcccccgtcattccgtcaaatacagactacccagggccccatcacttcgaagtgacttttcaacaaagtagcacggcaaagagcgccacctggacttattctcccctattaaaaaaattgtactgccaaatagccaagacatgtcccattcagattaaagtgtcaacaccaccccccccagggaccgcaattagagctatgcccgtgtataagaaggctgaacacgtcaccgatgtggtgaagagatgcccaaatcatgagctgggtcgcgactttaacgaaggccagtcggcccccgcctcccacttgatccgagttgagggcaacaacctttcccagtacgtcgacgatcccgtgacaggtagacagtctgtcgtggttccctacgagccaccgcaagtggggacggagttcacaacaattctgtacaactttatgtgcaactcaagctgcgtgggaggaatgaatcgtcggcccatccttattattatcactcttgagatgagagacggccaggtgctggggaggcgtagtttcgaggggcggatttgtgcctgtcctggcagggaccgaaaggctgacgaggatcattatcgggagcaacaggcactaaatgaaagctccgccaaaaatggagctgccagtaagcgggccttcaagcagtcgcccccagctgtgccagcattgggtgccggagtgaaaaaacggcggcacggagacgaagatacttactacctccaagtccgcggtagggagaattttgagattctaatgaaactcaaagaatcattagagctgatggaattggtccctcaaccgctagttgactcctataggcagcaacaacagctgcttcaaagacccttccttactggccttggatgccctaattgtatcgagtattttaccagccaggggctgcagagcatttaccacctccagaatctgaccatcgaggacctgggggcactcaaaatccctgaacagtaccgcatgacgatttggaggggcctgcaagacctaaaacaaggacatgattacagcaccgcccagcagctgctgcggagttctaacgccgctaccattagcatcggaggcagcggtgagctccagcggcagagagtgatggaagcggtgcattttcgcgtgcgacacacgataactatcccaaaccgtggaggcccagggggaggccctgacgagtgggctgactttggtttcgaccttccagactgcaaagcacgcaagcagcctatcaaagaggaatttactgaggccgaaatccactag

SEQ ID NO: 17873 - DNA, 1500 bp, synthetic construct
  misc_feature 1..1500: note = Description of Artificial Sequence: Synthetic coding sequence
  source 1..1500: mol_type = other DNA
atggctcaaagcactgccacctctcctgatggaggcacaaccttcgaacatttgtggagcagcttggaaccggattccacttattttgacctgccacagtcgtcgcgaggcaacaacgaagttgtgggcggaaccgattcctccatggacgtgttccacctcgaaggaatgactacttctgtcatggcacaattcaacttgctgagctcaaccatggatcagatgtcttcccgcgccgcgtctgcgagtccttatacaccagagcatgccgcaagtgtgccgacacactccccgtacgctcagccctcctccactttcgacactatgtcacccgctcctgtgataccgtcaaataccgattaccctggcccccaccacttcgaagtgacatttcaacaaagctcgacggccaaaagcgctacatggacctattcccccctgttgaaaaagctctactgccaaatcgcgaaaacttgtcctattcagatcaaggttagcacaccgccaccaccaggcacagccatacgtgctatgcctgtgtacaagaaagccgagcacgtcactgatgtggtcaagcgctgtcctaaccatgagttagggcgggatttcaatgaaggccagagcgcccctgcctcacacctgatccgtgtggagggtaacaacctgtcacagtacgtggacgacccagtgaccggcaggcagagcgttgtggtaccctatgaacctccccaagtggggaccgagtttactaccattctgtacaacttcatgtgcaatagctcgtgtgtgggcgggatgaaccggcggcctatactcatcataatcacccttgagatgcgagatggacaagtcctcgggcggcgatcattcgagggacggatatgtgcatgtccagggcgggatagaaaggctgacgaagaccactatagagagcagcaagcattaaacgaatcttccgcaaaaaacggcgcagccagtaaaagggctttcaaacagtcccccccagccgtgcctgcgctgggcgctggggtgaagaaacgtcgccacggtgatgaagatacctactacttgcaggtgcgcggaagggagaatttcgagattttgatgaagctgaaggaaagcttagagctgatggagctggtccctcagccattagtcgatagttaccggcagcagcagcagttgcttcagcgccctagccatctccagccccctagctatggtccagttttatcacccatgaataaggtgcatggaggcatgaacaagttgcccagtgtcaaccagttagtcgggcagccacctcctcactcaagcgcagccacccctaatctgggacctgtcggtccagggatgttgaataaccatggccacgccgtgccagctaatggcgagatgagctcctcgcattctgcacagtctatggtgagtggaagccactgtactccaccgccaccataccacgccgatccgtcactggtaagaacgtggggcccatag

SEQ ID NO: 17874 - DNA, 1668 bp, synthetic construct
  misc_feature 1..1668: note = Description of Artificial Sequence: Synthetic coding sequence
  source 1..1668: mol_type = other DNA
atggcccagagcacagcaacgagcccggacggcgggactacctttgagcatctgtggagttcactggaacctgactcgacctatttcgacttaccacagagttcgaggggcaacaacgaggttgtcgggggaactgactcatccatggacgtgtttcacctggaaggaatgaccaccagcgtgatggcccagtttaatctgctcagttccaccatggatcaaatgtcttctagagcagcaagcgccagtccttacacgccagaacatgctgcttctgtgccaactcatagtccatatgctcagccatcgagcacttttgatactatgtcacccgccccagtgattccatcaaacacggactacccggggcctcatcatttcgaggtcacctttcaacagtcctcaaccgccaaatctgccacttggacctattcgcctctactgaagaaactgtattgccaaatcgccaaaacttgccctattcagatcaaggtgtctactcctcccccccccgggaccgccatacgagcgatgccagtgtacaaaaaggctgagcacgtaacagatgttgtcaaacggtgccccaatcatgagctcggaagggactttaacgaaggacagagcgccccagcttcccacttgataagagtggaagggaacaacctgagtcagtacgtcgatgacccagttactggccggcaatctgtggttgtcccctatgaaccaccacaggtgggcaccgagttcaccacgattttatacaatttcatgtgtaatagctcctgcgtaggcgggatgaacagaaggccgatcctgatcattattacattagagatgcgagatggccaggttctgggtaggcgatcatttgaggggaggatctgtgcctgccctggaagagacagaaaggccgacgaggaccattacagagagcagcaagcactgaacgagtccagtgctaagaatggcgcagccagtaaaagggctttcaagcagtccccgcccgcagtaccagcgctgggcgccggcgtgaagaaacgcaggcatggcgacgaggatacatactatctgcaggtgagagggcgggagaattttgagattctcatgaaactcaaagagagcttagagcttatggaactcgtcccgcaaccattagtcgactcctaccgccaacagcaacagttgctccagcgcccaccccgcgatgcccagcagccttggccaagatcagcctctcagcgccgggacgaacagcagccacagcgtcctgtgcacggcctaggggtgccccttcacagcgcaactccactgccacgaaggccccagcctaggcaggatttgggggccctgaaaatacctgagcaatatagaatgaccatatggaggggcctccaagatctgaagcagggtcacgattacagcacagcacagcaattacttcgatcctcaaacgcagccaccatttctatcggcggctccggggagctacagagacagcgagtgatggaagctgtgcacttcagggtacgccacacaatcaccatccccaatcgcggggggcccggcgggggtccagacgagtgggcagattttgggttcgatctgcctgattgcaaagcgcgcaagcaaccaattaaagaggaattcaccgaggccgaaatacactag

SEQ ID NO: 17875 - DNA, 1281 bp, synthetic construct
  misc_feature 1..1281: note = Description of Artificial Sequence: Synthetic coding sequence
  source 1..1281: mol_type = other DNA
atgctgtacgtcggagaccccgcccgtcacttggcaacggcccagtttaacctgttatcctccaccatggatcagatgagctcaagagcagcttccgcgtctccgtatactcctgagcacgccgcctctgtcccaacacattcaccctacgcccagccttcctcgacattcgataccatgagtccagcacctgtgattccctctaatacagactatcccggcccccaccactttgaggtaaccttccagcagtcctcaacagccaaaagcgccacatggacatatagcccgctgctgaaaaagctgtactgccagatcgctaagacatgtcccatacagatcaaagtctctacaccgccccctcctggaacagcgattcgagctatgcccgtttataagaaagccgaacatgtaaccgatgtcgtgaagagatgtcccaatcacgaactcggtagagacttcaatgaaggccagagcgccccagcctcccatttgattagggtggaaggaaataacctttcgcaatacgtggacgatcccgttacaggccgccaatccgtggttgtgccatacgagcctcctcaggtgggtaccgaatttaccaccattctgtacaacttcatgtgcaactctagctgcgttggtgggatgaaccgtcgcccaatcctcattattatcacactggaaatgagggacggacaagtgcttggccgacgtagctttgagggccgcatctgcgcctgccctggccgcgaccgcaaagccgacgaggatcattaccgagaacagcaggccctgaacgagtcttcagcaaagaatggagctgctagtaagcgggccttcaaacagtcccccccagcagtgcctgctcttggagcaggcgttaagaaacgccgacacggagacgaggatacttactacctccaagtccggggacgggagaattttgagatcttgatgaagttgaaagaaagccttgagctcatggagctcgttccgcagccgctggttgattcttaccggcagcagcagcaacttttacaaaggcctccgcgggacgcccagcagccttggcccaggtcggccagccagcgccgagacgaacaacaacctcaacgtccggtccacgggttgggagtccccctacatagcgctacaccactgcctcgccggccacagcccagacaattctttaaccgaattggagtgagcaaactgcatagggtgtttcatctgccccgtgtgactgagcatttgccgcctgcagaaccagaccattag

SEQ ID NO: 17876 - DNA, 1353 bp, synthetic construct
  misc_feature 1..1353: note = Description of Artificial Sequence: Synthetic coding sequence
  source 1..1353: mol_type = other DNA
atgctttatgtcggtgacccggcacggcacctggctaccgcacagttcaaccttctgtcatccacaatggatcagatgtcttcaagggccgcatcagcttctccttatacccctgagcatgcggcatcggtacctacgcattctccatacgcccagccgtcttccacattcgataccatgtcacccgcccctgtgatcccttccaacaccgattaccctgggcctcatcatttcgaggtgacttttcagcagagctcgacagccaaatcggctacctggacatatagcccgctactgaagaagctctactgtcaaattgcaaaaacttgtccaatccagatcaaggtctcaacacctccccctccggggactgctattagagccatgcctgtatacaagaaggcagaacacgtcactgacgtggtgaaacgttgcccaaaccatgagctaggccgggacttcaatgaaggccagtctgccccagccagtcatttaatcagagtggagggtaacaacctgagtcagtacgttgatgatcccgttacaggcaggcagtccgtggtggttccatacgaacctccccaggtgggaaccgaattcaccaccatcctatacaatttcatgtgcaattcttcatgcgtgggtgggatgaaccggaggcccattcttataattatcacattagaaatgcgagacggccaggttctgggcagacgtagcttcgagggccgcatctgcgcctgccccggccgggatcgcaaagccgacgaagatcactatcgagaacagcaggccctcaacgaaagcagcgccaagaacggagccgcgagcaagcgtgcctttaaacagtcccctcctgccgtccctgcgctgggcgctggtgtgaagaaaaggagacacggagatgaagatacctattacctccaggtccggggccgcgaaaattttgagattttgatgaagctcaaggaatcgctggagttaatggagttggtccctcagccgctggtggactcttaccgtcaacagcagcagcttctgcagcggccaagccacttgcagcctccgagctacggtccagtcctgagcccaatgaacaaagtccacggcggcatgaataaactgcccagcgttaaccagctcgtggggcagccccccccccactctagcgccgccacccctaatcttggcccagtgggcccaggcatgttgaacaaccacgggcatgcggtgcccgctaatggggaaatgtcttcctcgcactccgcacaaagcatggttagcgggtcgcactgtacaccgcctcctccctatcacgcagacccttccctggtcagaacctggggcccctag

SEQ ID NO: 17877 - DNA, 1764 bp, synthetic construct
  misc_feature 1..1764: note = Description of Artificial Sequence: Synthetic coding sequence
  source 1..1764: mol_type = other DNA
atgttatacgtgggcgaccccgcgcgccatctggctacagcacagttcaacctgctgtcctctactatggatcagatgagtagtagggcggctagtgcctcaccttacactccagaacacgctgcaagtgttcctactcacagtccctacgcccagccctctagcactttcgacacaatgtccccggcgcccgtgatccccagtaataccgactacccgggaccacatcacttcgaggtgacttttcaacagagtagtacagccaagtctgccacctggacatattcccccttgctgaaaaagttatactgtcaaatcgcaaaaacctgtccaattcagattaaagttagcacccctccaccacccggcaccgccatcagggccatgccggtctacaaaaaggctgagcacgtcacagacgtggtgaagagatgcccaaaccatgagcttggtcgagatttcaacgagggacagtcagccccagcctcccaccttatcagagtggaagggaataatctttcccagtacgtagatgacccagtcacaggccgacagagcgtcgtggtgccttacgagccgcctcaggtgggcactgaatttacaaccatcctttacaactttatgtgtaatagcagctgcgtaggcggcatgaatcgccggcctattctgatcatcatcacactggaaatgagagatggccaggtgctcggacgccgctctttcgaagggagaatctgcgcttgtcccggtcgggacagaaaagcagatgaagatcactaccgggaacagcaggccctgaacgagtcctcagccaagaacggcgctgccagtaagcgggctttcaagcagtcgccaccagctgtgcctgctctgggtgctggcgttaagaaacgccggcatggtgacgaagacacctattatctgcaggtgcgtggacgggagaattttgagattctgatgaaactgaaagagtctttggagttgatggaacttgtgccacagccacttgtggactcataccggcagcagcagcaactgcttcagcgcccaagtcaccttcagccccccagctacggccctgtgctgtcacccatgaataaagtgcatggaggcatgaataagctgccctccgtgaatcagttggtcggacaacctccccctcactcatctgctgcaacgcccaacctgggcccagttgggccaggaatgctcaacaaccatggccacgccgtgccagcaaatggggaaatgagcagtagtcactctgcccagtccatggtgtcaggcagtcattgtacaccccccccaccctatcacgcagatccttctctcgtcagcttcctgacaggcctgggctgccccaattgcatagaatacttcacgtcccaggggctgcagagcatctaccatctccagaaccttacaatcgaggatttgggagcattaaaaattccagagcagtaccggatgacaatctggcgtggactgcaagacttgaaacaaggtcatgactatagcacagcacaacagttgctgcggagtagcaacgctgccacaatctccattggcgggtctggcgagttacagcgacaacgcgtgatggaggcagtgcacttcagagtgaggcatactatcacaattcctaatcgaggcgggcccggggggggaccagatgaatgggccgatttcggctttgatctgcccgactgtaaggcgcgcaagcagcccatcaaggaggagttcaccgaagctgagatacattag

SEQ ID NO: 17878 - DNA, 1698 bp, synthetic construct
  misc_feature 1..1698: note = Description of Artificial Sequence: Synthetic coding sequence
  source 1..1698: mol_type = other DNA
atggaccaaatgagttcaagagccgcctcagccagcccctacactcctgagcatgcagcgtcggtccccacccacagcccatacgctcagcccagcagtactttcgacaccatgtctcctgcgccggtgatcccgtcaaacaccgactatcccggccctcaccatttcgaggtaacctttcagcaaagtagcacagctaagagcgcgacatggacatactcaccgttgttgaagaagctatattgccagatcgctaagacttgccccatacagataaaggtgtctacaccaccccctcctggaaccgccatccgggccatgcccgtctacaagaaagccgaacatgtgacagacgtggtaaagaggtgcccgaaccatgaacttggcagagattttaatgaggggcagtcagcccccgcctcacacttaatccgggtcgaggggaacaaccttagtcagtatgtggatgacccagtgactggtagacagtctgtggtggtgccatatgaaccgcctcaagtgggcactgagtttaccacaatcctctataatttcatgtgcaattcctcgtgtgttggcggcatgaatcgtcgacctattcttatcatcattacactggagatgcgcgacgggcaggtcctgggtcgcaggtctttcgagggacggatctgcgcatgtcctggacgcgatcgcaaagctgatgaggaccactatcgggagcagcaagcgctgaacgagtcgtctgcgaagaacggcgccgcttcaaaacgcgctttcaaacagtccccccccgcggtcccggccctgggagcaggagtgaagaaacgacggcatggagacgaggacacttactacttacaggtgaggggccgcgagaacttcgagattttaatgaagttaaaagaatcccttgaactcatggagctggtcccgcaaccacttgttgacagctacagacaacagcaacaattgttgcagaggccatcacatctgcaaccgccaagctacggccctgtcctcagtccaatgaataaagttcacggcggaatgaacaaattgccgagcgtgaatcaactggttggccaaccccccccacatagttcggctgccacccccaatcttgggcccgtgggacccggcatgttgaataaccatggacacgccgtccccgcaaatggggagatgtcctcctcacatagcgcgcagtccatggtctccggaagtcactgtacaccaccaccaccatatcacgccgaccctagtctggtgtcgttcctgaccggcttggggtgcccgaactgcattgagtacttcacctcacagggtctgcagtctatctaccaccttcagaacctgaccatcgaggatctgggcgccttgaaaatccccgagcagtaccgtatgacgatttggcggggtctgcaagacctgaaacagggtcatgactacagcaccgctcaacagcttctgagaagttcaaatgccgcaacaatctctatcggtggttccggagagctccaaaggcagagggtgatggaagccgtgcatttcagagttcgccacaccatcactatacccaatagaggaggccccggtggcggccccgatgaatgggcagattttggcttcgacctgcccgattgcaaagcccgtaagcagcccataaaagaagaatttactgaagcagagattcattag

SEQ ID NO: 17879 - DNA, 1911 bp, synthetic construct
  misc_feature 1..1911: note = Description of Artificial Sequence: Synthetic coding sequence
  source 1..1911: mol_type = other DNA
atggcccagagtactgccacatctcctgatgggggtactacgttcgagcatctatggtcttcgctcgagcctgattccacttatttcgatctgccgcagtcttctcggggcaataacgaggtcgtgggcggaactgatagtagcatggatgtcttccacctggaaggaatgacaacctccgtgatggcacagttcaacctcttgtcatctaccatggaccagatgagcagtcgtgcagcatctgcatcaccttataccccagaacacgcagctagcgtgccgacacactctccttacgcacaaccttcgtctacctttgataccatgagccctgccccagtaataccatctaacacagattatccaggaccccaccatttcgaagttacctttcaacagtcgagtacagccaagagcgcgacatggacctatagtcctctgctgaagaagttgtactgtcagatagccaagacttgccccatccagattaaagtgagcacaccccccccccccggcacagccatccgcgctatgccagtgtataaaaaggctgagcacgtcacagatgtggtgaagcgatgccccaatcacgagcttgggagagacttcaacgagggccagagcgctcctgcctcacatctaattcgggtggaagggaataatttatctcagtacgtggatgaccctgtaactggccgacagagtgttgtcgtgccgtatgaaccccctcaggtcgggactgagttcaccacgatcctgtacaattttatgtgcaactccagttgcgttggaggcatgaaccgccgtcccattttgatcattattaccctggagatgagagacggacaggtgctcggtcggcgtagcttcgaggggagaatctgtgcctgtcctggacgcgatcgcaaagccgacgaggaccactacagggaacagcaggcgctcaacgagagcagtgccaagaatggtgctgcttcaaaacgggccttcaaacagagccccccggcggtccccgcactaggggctggggtgaaaaagcgccggcacggggatgaggacacatattatctgcaagtgcggggacgcgagaacttcgagatcctgatgaaactcaaggagtctcttgaactgatggagctggtgcctcagcctctggtcgactcatacaggcagcagcagcagctcctgcagaggccctctcacctccagccacccagctacggccccgttctcagtcctatgaacaaagtgcatggcggcatgaataagttgccgtctgtgaaccagctcgtgggtcagcccccccctcacagctctgctgctacaccaaatctgggtcctgtcggccctggaatgctgaacaaccacgggcatgctgttcccgcaaatggggagatgtcaagcagtcacagcgctcaatccatggtctccggctctcattgcacaccccctcctccatatcatgccgacccctctctggtaagtttcctcaccggcctgggatgtcctaattgtatcgaatacttcacctcacagggcttgcaatctatttatcacctgcagaacctgaccattgaggatcttggggccctgaagatcccagagcagtacagaatgaccatctggcggggattgcaagacttgaaacagggtcatgattacagcacggcacaacagttgctgcgttctagtaatgccgctaccatctcaatcgggggcagtggcgagctccaaagacagcgggtgatggaggccgtgcattttcgggttcggcatacaatcacaatcccgaacaggggggggcctggagggggcccagacgaatgggctgacttcggattcgatctgcccgattgcaaggcacgcaagcagccgattaaggaggagtttacagaggcagagatccattag

SEQ ID NO: 17880 - DNA, 1053 bp, synthetic construct
  misc_feature 1..1053: note = Description of Artificial Sequence: Synthetic coding sequence
  source 1..1053: mol_type = other DNA
atgggagctggcgcatcagctgaggaaaagcacagcagagaattagaaaagaagctgaaagaggacgccgaaaaggacgcacgcactgtgaaacttctgctgctgggtgctggcgaatctggcaagtctaccatcgtgaaacagatgaaaatcattcaccaggatggatatagtctggaagaatgccttgagttcattgccataatttatggcaatacccttcagagtattttagctatagtgagggctatgacgactttgaatatccagtatggggatagcgcacgacaggatgacgccaggaagcttatgcacatggctgacaccatagaggaggggactatgccaaaggagatgtcagatatcattcagcgactttggaaggacagcggcatccaagcttgcttcgagcgggccagcgaataccagctgaatgatagtgccgggtactatttatcagacctagaaagacttgtgacacctggatacgtgcctacagagcaggacgtcctcagatcaagagtgaagactaccggtataatagagacacagttcagcttcaaggacttgaatttcaggatgttcgacgttgggggacaacgctcagagcggaagaagtggattcactgcttcgagggcgttacctgcatcatcttcattgcagctctctccgcatatgacatggtgctcgtggaagatgatgaagtaaaccgcatgcatgagtcattacacctcttcaacagcatctgtaatcacaggtattttgcgacaacatctatcgtcctttttctgaataagaaggacgtgttcttcgaaaaaatcaagaaggcacatctttcaatttgtttccccgactacgacggcccgaatacctacgaggatgctggcaattacatcaaagtacagttcctggagttaaatatgcgacgcgacgttaaagagatctattcccacatgacatgtgcaactgacacccagaatgtgaaatttgttttcgatgcagttacagatattatcattaaggagaacctgaaggattgcggcctcttttag

SEQ ID NO: 17881 - DNA, 609 bp, synthetic construct
  misc_feature 1..609: note = Description of Artificial Sequence: Synthetic coding sequence
  source 1..609: mol_type = other DNA
atgatgcaagatgtgagtagctctccggtgtccccggccgacgattctcttagcaactccgaggaagagcccgatcgccaacagccaccatccggaaagcggggcgggagaaagagacgatcaagccgtcgctccgcgggaggaggcgctggaccgggcggcgctgcgggaggcggtgtaggtggtggtgacgagcccggctcaccagcgcaggggaaaagaggcaagaaaagcgctgggtgcggtgggggaggcggagctggtggcggaggaggctcttctagtggtgggggctcccctcagagttacgaggaactgcagactcagcgtgtgatggccaacgtccgcgagagacagagaactcaatcattgaacgaggcctttgcagcattgcggaaaattatcccgaccctgccctcagataaactctctaagatccagactctgaaattagcggcaagatatatagatttcctgtatcaggtgctccagtcagacgagctggattccaagatggcctcctgttcctacgtggcccacgagcggctcagctacgctttctcggtctggcgtatggagggagcatggagcatgagtgcgagtcattag

SEQ ID NO: 17882 - DNA, 741 bp, synthetic construct
  misc_feature 1..741: note = Description of Artificial Sequence: Synthetic coding sequence
  source 1..741: mol_type = other DNA
atgggcgatcgcgaacagctgttgcagagggctcggcttgccgagcaggcagagcgctatgacgatatggcaagcgccatgaaagccgtgactgagctcaatgagcctctcagtaacgaagatagaaacctgctgtccgtggcttacaagaatgttgtgggtgcacgccgtagtagctggcgggtgatctcgtccatcgagcagaaaactatggcagatggaaacgaaaagaagctggagaaagtgaaggcctacagggaaaagatcgagaaagaactggagacggtgtgcaatgacgtcctttcattactggacaagttcctcatcaagaattgcaatgacttccagtacgaatcaaaagtgttctacctgaagatgaagggagactattaccggtatctagccgaggtagcatccggggagaagaagaacagtgtcgtggaggcctctgaggctgcatacaaagaggcttttgaaatatcaaaggagcagatgcagccaacacatccgataaggctcgggctcgcactcaatttctctgtgttttactatgaaattcaaaacgcaccagaacaggcatgtctgctagctaagcaggctttcgatgacgccatagctgaactggatacactgaacgaagacagctataaagacagcacgctcattatgcagttattgcgggacaatttgacactgtggactagcgatcagcaggatgaggaggccggcgaaggcaattag

SEQ ID NO: 17883 - DNA, 1626 bp, synthetic construct
  misc_feature 1..1626: note = Description of Artificial Sequence: Synthetic coding sequence
  source 1..1626: mol_type = other DNA
atggtgtggcgtgttcccccattcctgctgcctattctgttcctggggacacattaccagctggatgtgcagctgtaccactgtaccctgcttggtcctgctagccctcccgcccatgtcctccttcccccttcaggtcctcccgccccccgccatctgcatgcccaagcacttagcgattccgagatccagctgacctggaaacatccagaagccctgcctggtcctattagtaaatatgtggtggaagtgcaagtggcaggtggcgcaggggatcctctgtggatagacgtcgaccgccccgaggaaacttccactatcatcagggggctcaatgcaagcacccgctacctgtttaggatgagggcctccatacaaggattgggagactggtccaatactgttgaagagagcaccctcggtaacgggcttcaggccgagggcccagttcaggagagcagagccgccgaggagggcctagatcagcagctcatcctggccgtggtggggtctgtgagcgctacatgcctcactattttagctgctcttctgaccctcgtctgtattcgcaggtcgtgcctccataggagacgcactttcacttatcagtctggatccggagaagagacgattttgcagttttccagcgggacactgacgctgaccaggaggcccaaactacagcccgagcccctgtcttatcctgtcttagagtgggaagacatcacattcgaagacctgataggtgaaggcaacttcggtcaggtcatccgagctatgattaagaaagacggtttgaagatgaacgccgccatcaagatgctcaaagagtacgccagtgagaacgaccaccgcgatttcgccggggaacttgaggtgttgtgcaaactcggccaccaccccaacatcatcaatctgttgggagcctgcaagaataggggctacctctacattgccattgagtatgctccttacggcaatctactggatttcctgaggaaatctagggtcctcgaaacggatcccgcattcgccagggagcacggaaccgcaagtaccttaagctccagacagcttcttcggttcgctagcgatgcggccaacggcatgcaatacctgtcggaaaagcaatttattcaccgggaccttgctgccaggaacgtgctggtgggtgagaacctggcttccaagattgctgattttggcctgtctcgcggcgaagaggtctacgtaaagaagacgatgggaagactccctgtaagatggatggcgatcgaatccttaaattacagtgtctacaccaccaaaagcgatgtctggagcttcggcgtgctgctgtgggagattgtgtctctcggggggacaccttattgcggaatgacgtgcgctgagctctacgaaaaactcccccagggctatcggatggaacaaccacggaattgcgacgacgaagtctacgagttgatgagacagtgctggagggacagaccttacgagcggcctccttttgcacaaattgccctgcagctcggcagaatgctcgaggcccggaaagcatacgtgaacatgagcctttttgagaacttcacctacgcaggcatcgacgctacggctgaggaggcttag

SEQ ID NO: 17884 - DNA, 3417 bp, synthetic construct
  misc_feature 1..3417: note = Description of Artificial Sequence: Synthetic coding sequence
  source 1..3417: mol_type = other DNA
atggtctggcgagttcctccatttttgttacctatactgttcctagccagccacgtgggggcagccgtggatctgactctgctggccaacctcaggctcacagaccctcagaggttctttctgacttgcgtctcgggggaggcaggagccgggagaggctccgacgcctggggaccgcccctgctgctggagaaagacgaccggatcgtgcgcacacctcctgggccgcccctcaggctggcaaggaatggctcccaccaggtgactctgagaggtttcagtaaacccagtgatctggttggcgtgttctcatgcgtcggtggggccggggctagacgcacccgcgttatctacgtgcataactctccaggagcccacctgctgccggacaaagtgacacataccgtgaataagggggatactgctgtgctctcagcaagagtgcataaagagaaacaaaccgatgtgatttggaaatccaatggctcctacttttacacccttgactggcatgaggcgcaagatggtagatttttgcttcagctgcctaatgttcagcccccctcctccggaatctacagtgccacctacctggaagctagcccccttgggtccgctttcttcaggctaatcgtgagaggctgcggggcaggcagatggggccctggatgcacgaaagagtgcccgggttgcttgcatggaggtgtgtgccatgatcacgatggcgaatgcgtctgcccgcctggcttcaccggcaccagatgcgagcaggcatgtcgggaggggcgatttggccagtcctgccaggagcagtgtccaggcattagtggttgccggggtctcaccttttgcctgccggatccttacggatgctcctgcggaagcggttggcggggtagccagtgccaggaggcttgtgctcctggacactttggggccgattgcagactgcaatgtcagtgccaaaacggaggtacatgcgaccgatttagcggttgcgtgtgtccttcagggtggcacggagttcactgtgaaaagagcgataggattcctcagattctgaacatggcatcagagctggagttcaacctcgagaccatgccaaggataaattgcgccgccgcagggaacccgttccctgtaagaggatcaatcgaactgcgcaaaccagacggcactgttctgctgtctactaaggccatcgtcgaacccgagaaaacaacagctgagttcgaggtgccacgacttgttctagcagattccggtttttgggagtgccgcgtgagcactagcggcggacaagattctcggagatttaaggtgaacgtcaaggtccctccagtgcccctggccgcaccccggctattaactaagcaatcccgccagctcgtggtatctcctttggtgtccttttcaggagacggaccaatttccacagtgaggttgcactacaggccacaggatagcaccatggattggtccaccatcgttgtagatccttccgaaaacgtgactctgatgaacctccgcccgaagacaggctattccgtaagagtgcagctgagtaggccgggcgagggtggtgaaggggcatggggcccccccactcttatgactactgattgcccagagccgctgttacagccatggctggaaggatggcacgtagaaggtaccgacagactgagggtttcttggagcttgcctcttgtacccgggcctcttgtcggggatggcttcttgctgcgactgtgggatggcaccagggggcaggagagaagagagaacgtgagtagtcctcaagcccgaacagcccttcttactggattaacgcccggtacccactaccagctggatgtgcagctgtatcattgcaccctgctgggtccagccagtccccctgcccacgtgctgctcccgcctagcggacctcccgctccaagacatctccacgcccaagcattaagcgactctgagatccagctgacatggaagcacccggaggcactgcctggccctatttccaagtacgtcgtcgaagtccaggtagccggaggagccggcgacccactgtggattgatgtggatcggcccgaagaaaccagcacaatcattcggggactgaacgcctctactagatacctcttccgaatgagggcctccattcagggactgggagactggtcaaacactgtagaagaaagtacactgggaaacggtcttcaggcagaggggccagtccaggaatcacgagccgcggaagaaggcctcgaccagcagctaatcttggccgtggtaggatctgtgtcggctacgtgtctaacgattctagccgcgttactgactttggtgtgcatccgaagatcttgcttgcaccgcagacgcacgtttacttaccaatcagggagcggcgaggaaaccattttacagttcagttccgggactctcactctgaccagacggccgaagttgcaacctgaaccattaagttacccagtcctggaatgggaggatatcactttcgaggacctcatcggcgagggaaactttggccaggtaatacgcgctatgatcaaaaaagatgggctgaaaatgaatgctgctattaagatgctcaaagagtacgcgagcgagaacgatcacagagacttcgcaggcgagctggaagtgctgtgtaagctgggacaccaccctaacatcatcaacttactgggagcttgtaaaaatagggggtatctgtatattgctatcgagtacgcaccttatggcaatcttctggattttcttcgaaaaagtcgagtcttggaaacagaccccgcctttgctcgggaacacggaacagcatcaacattatctagccgacagctgctccgcttcgccagtgacgccgccaatgggatgcagtatctgtcagagaaacagttcattcatagggatttagccgctcgcaacgtgctagtcggtgaaaacctggcctcaaaaatcgcagattttggcttgagtaggggtgaggaggtgtacgtgaaaaaaacaatgggccgacttccagttcgctggatggccatagaatcgctgaattactccgtgtataccacaaaaagtgacgtgtggagctttggagtcttactctgggagattgtatctctgggtggtaccccttactgtggaatgacatgcgccgaactgtacgaaaaattgcctcagggctacagaatggaacaaccccggaactgcgacgatgaagtgtatgagctgatgcgccagtgctggcgggacaggccttatgaaagaccccccttcgcccagatcgcccttcagcttggcaggatgctcgaagctcggaaggcttacgtgaacatgtctctgtttgagaactttacttacgccggcatagatgcaaccgccgaggaagcctag

SEQ ID NO: 17885 - DNA, 2352 bp, synthetic construct
  misc_feature 1..2352: note = Description of Artificial Sequence: Synthetic coding sequence
  source 1..2352: mol_type = other DNA
atggccagcgaattagaattcaaccttgagactatgccccgtataaactgcgccgccgccgggaacccatttcccgtgcgagggtcaatcgaattacgaaagcccgacgggacagttctgctatctactaaagcaatcgtggagcccgagaaaacaaccgccgagttcgaggtgccgaggctcgtgctggctgacagtggattctgggaatgtagggtcagtaccagcggtggtcaggatagtcggaggtttaaagtcaatgttaaagtgccaccggtgccactcgcagcgcctagacttctgaccaaacagagccgtcagcttgtggtgagtcctctcgtaagcttcagcggtgacggccctatctccacagtgaggctccattaccgcccacaagattctaccatggattggagcaccatcgtagtagacccttccgagaatgtgactctgatgaatctgcgaccaaaaactggctacagcgtgagggtacagctgtctcggcccggggaagggggggagggcgcttggggcccacccactctgatgacaactgactgtcctgagccactgctgcagccgtggctcgaaggctggcacgtcgagggcacagaccggctgagagtgtcctggagcctgccgttggtccctgggcccctggtgggtgacgggttcttgttgagattatgggacggaaccagaggacaggagaggagagagaacgtgtcctctccacaggctaggacagccctccttaccggactgaccccaggaacccattaccagcttgacgttcaactgtatcactgtaccctactcggtccggcctcaccaccagctcatgttctgctgcctcccagcggtcctcccgctccacgccatctgcacgcacaggccctgtccgactccgaaattcaacttacatggaaacacccagaggccctgcctggacccatttcaaaatacgttgtggaagtgcaagtagccggcggcgcaggtgaccctctgtggatagacgttgaccggcctgaggagacaagcacgattatacgaggtctcaatgcatccaccagatatctatttcgcatgagggcttctatacagggacttggggactggtccaacaccgtagaggagtccacgttaggcaatggtctgcaagcagagggaccagtacaggagagtagagcagccgaagagggtcttgaccagcagttgatcctggctgtagtgggaagcgtgtcagccacctgcttgacgattctagctgcattactgactcttgtgtgcatcagacgaagttgtctgcaccgacggcgaactttcacttaccagtccggaagcggcgaagaaaccatcctccagttttccagcggcactctcaccctcacgcggcggcccaagctgcaacccgaaccactcagctatcctgtgctggagtgggaggacatcacttttgaagaccttatcggagaaggcaattttggccaggtcattcgcgccatgattaaaaaagacggcttaaaaatgaatgcggctataaaaatgctcaaggagtacgcgtccgagaacgaccatagagactttgctggtgagcttgaggtgctgtgcaagctcggccaccatcctaacattatcaatctgctcggcgcctgcaagaaccgaggatatctatacatcgccatcgaatatgctccctatgggaacttgttggactttctacgcaaaagtagggtgctggaaactgaccctgctttcgcccgtgaacacggcaccgcatccaccctttcctcccggcagttactgaggtttgccagcgatgcagccaacggaatgcaatacctttctgagaagcaatttatccatagagatcttgccgcgcgaaacgtcttggtcggggagaatctggctagcaaaattgccgactttggactctcacgtggagaagaggtttatgtcaagaagactatggggcgattgccggtacgctggatggccatcgagtcactgaattattcagtgtatacaactaaatccgacgtgtggtcgtttggggtactgctgtgggagatcgtcagcctggggggaacaccctactgcggcatgacctgcgccgagctctatgaaaagctcccacagggttatcggatggaacaacccaggaactgcgatgacgaggtgtacgagctgatgcgtcaatgctggagagaccggccctatgaacgtcctcccttcgcacagatagctctacagttgggtagaatgctggaggcgcgtaaagcctatgtcaacatgtccttgttcgaaaacttcacatacgccgggatcgacgctactgcggaagaagcgtag

SEQ ID NO: 17886 - DNA, 954 bp, synthetic construct
  misc_feature 1..954: note = Description of Artificial Sequence: Synthetic coding sequence
  source 1..954: mol_type = other DNA
atggtgtggagggtgccgcctttccttctgcccatactctttcttgcttcccatgtcggggctgcagtggatttgaccctgctagctaacttgaggctcacagacccccaacgcttttttctgacctgcgtttcaggggaggccggggctgggcgcgggtctgatgcatggggacccccacttctgcttgagaaagacgaccgcatcgtcagaacaccccccgggccacccttgagactggctaggaatggttcgcatcaggtgactctgaggggattcagcaagccgtccgacctggttggagtgttttcatgcgtaggaggagccggagctagacggaccagagtgatatacgttcataatagtcccggcgcacacctgctgcccgataaagtgacacatacggtcaacaagggcgatacagcagtcctcagcgccagagttcataaggaaaaacagaccgacgtcatctggaagtctaatgggtcctatttctatacattggattggcatgaggcccaagacggcagatttctgctacagcttccaaatgtgcagcctcccagcagcggcatctacagcgcaacctatctggaggcatcacccctcgggtccgctttcttccgcctgatcgtgaggggctgcggtgccggacggtggggacctgggtgtacaaaggagtgcccagggtgtcttcacgggggagtgtgtcatgaccacgacggcgagtgcgtctgtccccccgggttcactggaacccggtgtgaacaagcgtgccgggaggggcgattcgggcagtcctgtcaggagcagtgccccgggatctccggttgtcgcgggctgactttctgtctgcccgacccctacgggtgcagctgtggaagtggatggcggggcagccaatgccaggaagtacaccagggtcactgtggcgctagggaagaccacagttag

SEQ ID NO: 17887 - DNA, 1266 bp, synthetic construct
  misc_feature 1..1266: note = Description of Artificial Sequence: Synthetic coding sequence
  source 1..1266: mol_type = other DNA
atgagggcctcaattcagggcctgggagattggtcaaacaccgtagaggagtctacccttgggaacggactgcaggcggagggacccgtgcaagagagtcgcgccgccgaagagggtctggaccagcaactcatactcgcggtcgtcggaagcgtttcggctacctgcctaacaattctggcggccctccttaccctggtgtgcatcagaaggtcatgtctccaccgtcgccgtacttttacgtaccagtccgggtccggagaggagactatactgcaattctcatctggaactctcacgctcactcgccgcccaaagctgcaacctgagcctttatcctacccagttctggagtgggaggacattacatttgaagaccttataggagagggaaactttggacaggtcataagggctatgataaaaaaggatggtctgaagatgaacgccgctataaaaatgttgaaagagtacgcatctgaaaatgaccaccgtgacttcgcaggcgaactggaggtgctgtgtaaactcggccaccatcccaacattattaacctgctgggagcctgcaaaaaccggggatacctttatatcgccattgaatacgcaccatatgggaatctattggattttcttagaaagtcacgtgtactggaaacggatccggcctttgcgcgtgagcacggcacagccagtactttaagtagtagacaactactgcggtttgcaagtgacgcagccaatggtatgcagtacctgtctgagaagcagttcattcatagagatctggctgctcgcaacgtcctggtgggagagaatttagcaagcaaaattgcggattttgggctcagcaggggcgaggaagtttatgtgaaaaagactatgggtcgcctgcctgtaagatggatggcgatcgaatccttgaattactcagtttataccactaagagcgatgtgtggagtttcggcgtcctcttatgggagatagtgagcctaggggggactccctactgtggtatgacctgtgctgaactgtatgagaagctgccccagggctatcgcatggagcagcctcggaactgcgatgatgaagtgtacgaattaatgaggcagtgttggagagataggccctacgagcgacctccatttgcacagattgccctgcagctaggcaggatgctggaggctaggaaagcctacgtgaatatgagtctctttgagaacttcacgtacgcaggtatcgatgccacagccgaagaagcgtag

SEQ ID NO: 17888 - DNA, 1140 bp, synthetic construct
  misc_feature 1..1140: note = Description of Artificial Sequence: Synthetic coding sequence
  source 1..1140: mol_type = other DNA
atggtgtggagggtgccacccttcttgctcccaatccttttcctggcctctcacgtgggggctgccgtagatctcaccctgctcgctaacttgagacttaccgacccccaaagattttttctgacctgtgtcagtggcgaggctggggccggtcgcggctcggacgcctgggggccccctctcctcctagaaaaagatgaccggattgtgaggacgccacctggccctcccctgcggctggctaggaacgggtcacatcaagtaacgctgcgaggcttttccaaaccatctgacttggtgggagtcttcagctgtgttggcggcgcaggtgcccgcagaacccgtgtgatttatgtacacaacagcccaggggcacacctgttaccagacaaagttacccacactgtcaacaaaggagacacggccgtgctgagtgctagggtgcataaagagaaacagaccgacgtgatatggaagtctaatggctcttacttctataccctagactggcatgaggcacaggacggccgtttcctcctacagcttcccaacgtgcaacccccatctagcggtatctatagcgccacataccttgaggcctccccattgggctctgcattctttaggctgattgtgagggggtgtggagccggccggtggggcccagggtgcaccaaagaatgtccgggctgcctccacggaggagtttgccatgaccacgacggtgagtgtgtgtgtccaccagggtttaccggcacacggtgcgagcaggcatgccgggagggtaggttcggacagagctgccaggagcagtgtcccgggattagtggatgccgcggcctgacattctgcttaccggatccatatggctgcagttgcggtagcgggtggagggggagccagtgtcaagaggcctgcgcaccagggcatttcggagccgattgtaggttgcaatgtcagtgtcagaacggggggacatgtgatagattttctggctgcgtgtgcccttccgggtggcatggggtgcactgcgaaaagagtggatggcgggattgggtcgacacgtccactgagaaacagaacaccgatgagggaaggtttggtgggcacgtcagcgcacccgttggcgccccaggatag

SEQ ID NO: 17889 - DNA, 819 bp, synthetic construct
  misc_feature 1..819: note = Description of Artificial Sequence: Synthetic coding sequence
  source 1..819: mol_type = other DNA
atggccctgttagttcgcgtactgagaaatcaaacttcgatatcacaatgggttcccgtgtgtagccgtctcatccccgtgtcccctacgcagggccagggagatagagccttaagccgcacttctcagtggccacagatgtctcagtcgagagcctgcggtgggtccgagcagattcctgggattgacatccagctgaataggaagtaccataccacaagaaaactgtctaccacgaaggattcccctcagcccgtcgaggagaaggtgggtgcttttactaagattatagaggccatggggtttaccggccccttgaaatacagatgtcaaatgccagatacctttaatagctggttcctgattacactgttgcatgtgtggatgtgtttagtaagaatgaaacaggaaggacggtctgggaaatacatgtgcaggattatagtgcactttatgtgggaggacgtccagcagcgcggacgagttatgggggtgaacccttatatcctgaagaagaacatgattctcatgaccaatcatttttacgccgccattctcggatatgacgaggggatcttgagcgacgatcacgggctggcagcggcactgtggagaacattcttcaatcggaagtgcgaggacccccggcacctggagctcctggtggaatatgttcgcaagcaaattcagtatctggattcgatgaacggtgaggacttgctactaacgggcgaagtcagctggcgcccgctggtcgaaaaaaatccgcagagcatcctcaaaccacattcgcccacatacaacgatgaggggctgtag

SEQ ID NO: 17890 - DNA, 564 bp, synthetic construct
  misc_feature 1..564: note = Description of Artificial Sequence: Synthetic coding sequence
  source 1..564: mol_type = other DNA
atgcagcccatcgacacatgcgtgagttacccccgcaccgggggtcaagggtcagtttctcattttccaggctgccagatgcccgacacctttaactcctggttcctcatcaccctactccacgtgtggatgtgtttagtgcgcatgaagcaggaaggccgttctggtaaatacatgtgccggatcattgttcacttcatgtgggaagatgtgcagcaacgaggtcgggtgatgggggttaacccctacattctcaaaaagaacatgatcttgatgacaaatcatttctacgctgccatcctaggctacgatgagggaattctttccgatgatcacggactggcagcagctctttggagaacattcttcaacagaaagtgcgaggacccccgacacctggagctgctcgtggagtacgtgcgaaagcaaatacagtatttggactcaatgaatggtgaagacctgctccttacgggggaggtgtcatggagaccccttgtcgagaagaatccccagagcattttaaaacctcactcccccacctacaatgacgaaggcctgtag

SEQ ID NO: 17891 - DNA, 696 bp, synthetic construct
  misc_feature 1..696: note = Description of Artificial Sequence: Synthetic coding sequence
  source 1..696: mol_type = other DNA
atggccttactcgtccgcgtcttgagaaaccaaaccagcatttcccaatgggtacctgtgtgtagccggctcatacctgtgtcgcctacacaaggtcagggagaccgcgctttgtctagaacctcacaaaagattaaaatagcggctcttagaatgtacacaagttgtgttgagaagacagattttgaagagtttttccttaggtgtcagatgcctgatacttttaacagctggttcttaattactctgctacatgtttggatgtgccttgtgcgtatgaaacaggagggcagaagcggtaagtatatgtgccggattatcgtgcacttcatgtgggaggatgtacagcagcgaggtagagtcatgggtgtcaacccatatattctgaaaaaaaacatgatacttatgaccaatcatttctacgccgctatcttgggatatgatgagggcattctttcagatgaccacggattggcggctgccttatggagaacatttttcaacagaaagtgcgaagaccccagacatttagaattactggtcgagtatgtgaggaagcaaatccagtatttggacagtatgaacggggaggatctgttactgactggggaggtttcatggagacccctggttgaaaaaaacccccaatccatccttaaaccccactctcctacatacaacgacgaagggctatag

SEQ ID NO: 17892 - DNA, 822 bp, synthetic construct
  misc_feature 1..822: note = Description of Artificial Sequence: Synthetic coding sequence
  source 1..822: mol_type = other DNA
atggctctgttggtacgcgtgctgcggaatcaaacaagcatctcccagtgggtacctgtctgctcccggctgatccccgtgagccccacgcaggggcagggcgaccgcgccttaagtcgaacttcacagtggcctcagatgagccagtccagggcttgcggtggttccgagcagatccccgggattgacatacaactcaacagaaagtaccacacaactagaaaactttccactacgaaagacagccctcaacctgtggaggaaaaggtgggggcttttacaaaaattatcgaggcaatggggttcaccggtcctcttaaatactccaagtggaagatcaaaatcgccgctctgcgaatgtacacctcttgcgttgaaaagaccgacttcgaggaatttttcctccggtgtcagatgcctgatacattcaactcttggtttctgatcaccttgctccatgtatggatgtgcttggtacggatgaagcaagaagggagaagcgggaagtatatgtgccgcattatagttcactttatgtgggaggacgtgcaacaacgtggcagagtgatgggaggcatcctttccgacgaccatggcctggctgcagccctatggcggaccttcttcaacagaaagtgtgaggatccacggcacttagaattgctcgtggagtacgtgcggaagcaaatccagtatctagattctatgaatggtgaggacttgctactgacaggagaggtctcctggcgtccactggtagaaaagaacccccagagcattctaaagccccattctccaacctacaacgatgagggcctgtag

SEQ ID NO: 17893 - DNA, 900 bp, synthetic construct
  misc_feature 1..900: note = Description of Artificial Sequence: Synthetic coding sequence
  source 1..900: mol_type = other DNA
atggctctgctcgttcgagtcctgcgtaatcagacgtcgatcagccagtgggtgcccgtgtgctccagactgattcctgtctctcccacccagggccaaggagaccgcgccctgtcaagaacgagtcaatggccgcagatgagccaatcccgtgcctgcgggggttctgagcaaattccaggcatcgacatccagctaaaccgcaagtaccacacaactcgtaagctttccaccaccaaagactctccccagccagtggaggaaaaggtgggagccttcacaaaaatcatagaggctatgggctttactgggcccctgaaatactcaaaatggaaaatcaagatcgcagcactgaggatgtacacaagttgtgtggaaaaaacggacttcgaggaatttttcctgcggtgtcagatgccggacacctttaactcctggtttttgattacattactgcacgtatggatgtgcttggtgagaatgaaacaggaaggaagatcaggcaaatacatgtgccggataatcgtgcactttatgtgggaggatgttcaacagcgcgggagagtgatgggcgtcaatccgtatatactaaagaaaaatatgattctgatgactaatcatttctacgctgctatcctgggctacgacgaagggatattgtccgacgatcacggcctggccgcagccttgtggcggaccttctttaatcgaaaatgcgaggaccctcgccatctggaactgctggttgagtatgtgcggaagcagatacagtatctagactcaatgaatggagaggacctacttttgaccggagaggtgagttggcgccccttggtggaaaaaaatcctcaatctattctgaaaccacatagtccaacctacaacgacgaaggcctttag

SEQ ID NO: 17894 - DNA, 603 bp, synthetic construct
  misc_feature 1..603: note = Description of Artificial Sequence: Synthetic coding sequence
  source 1..603: mol_type = other DNA
atgggttttacgggccctttgaaatactctaagtggaagattaaaatagcagccctacggatgtacacctcttgcgtggaaaagaccgacttcgaagaatttttcttacggtgccagatgccagacacatttaacagttggtttctgattacactgttgcatgtgtggatgtgtcttgtgagaatgaaacaagaaggtagatccggaaaatatatgtgtcgcatcatagttcactttatgtgggaggatgttcagcaacgggggcgggtaatgggagtgaatccctatattctgaaaaaaaacatgattcttatgacaaaccacttctacgcggctatcctgggatacgacgaggggatcctgagcgacgaccacggactggccgctgcattgtggagaaccttctttaatcgcaaatgtgaggacccaagacacctggagttactggttgaatatgtgagaaagcaaattcaatatctggactcaatgaatggagaagacctgctgctgaccggtgaggtgtcatggcgacccctggtggagaagaatccacagtctattctcaagccacatagcccaacgtacaatgacgagggactatag

SEQ ID NO: 17895 - DNA, 489 bp, synthetic construct
  misc_feature 1..489: note = Description of Artificial Sequence: Synthetic coding sequence
  source 1..489: mol_type = other DNA
atggcactactggtgcgtgtcctgcgaaaccagacttcaatttcccagtgggtgcccgtctgcagtagattgataccggtttccccgactcaaggacagggtgaccgggccctcagtagaacctcacagtggccacagatgagtcaatcccgagcctgcggggggagtgaacaaatcccagggatcgatatccagctgaacaggaagtatcacacgacacccatattaggttacgatgaaggcattctaagcgacgaccacggccttgccgcggcgctgtggaggaccttttttaatcgtaagtgcgaagacccgagacacctcgagctcctggtggaatacgtgcgcaagcagatccagtaccttgactctatgaacggagaagacctgctactgaccggcgaagttagctggcggccactggtggaaaagaaccctcagagcattcttaaaccccacagtcctacttacaacgatgaggggctttag

SEQ ID NO: 17896 - DNA, 435 bp, synthetic construct
  misc_feature 1..435: note = Description of Artificial Sequence: Synthetic coding sequence
  source 1..435: mol_type = other DNA
atgtgtctggttcggatgaagcaggagggcaggtccggcaagtatatgtgcaggatcattgtacacttcatgtgggaagatgtgcaacagcggggccgcgtaatgggagtgaatccatatatactaaaaaaaaatatgatccttatgacgaatcatttctacgctgcgatcctcggttacgatgaagggatcctgtctgatgatcatgggttggccgcagctctgtggcgaacgtttttcaaccgtaagtgcgaggatcctcgccacctggagttactggtggagtatgttcggaagcagattcagtatctggatagcatgaacggtgaagaccttctccttacaggggaagtgtcctggagacccctcgtggaaaagaatcctcagtccatcctgaaaccacactcaccgacgtacaatgatgagggcctgtag

SEQ ID NO: 17897 - DNA, 447 bp, synthetic construct
  misc_feature 1..447: note = Description of Artificial Sequence: Synthetic coding sequence
  source 1..447: mol_type = other DNA
atggcactgctagtgcgggttctccggaatcagaccagcatcagccagtgggtaccagtctgctcacggctcattccggtgtcacctacccagggacagggtgacagagccctaagccggaccagtcagtggccacaaatgtcacagtctcgcgcctgtggaggctccgagcagatcccggggatcgatatacagctgaaccgtaagtatcatacgaccagaaagctgagcacaacaaaagattcaccacagccggtcgaggagaaggtgggcgcctttaccaaaatcatcgaggcgatgggtttcacgggaccacttaaatatagcaagtgggacgtgtcatctcctaatgaagctggcagaccagagtgggaggtccacgtgagttaccatagtagtttctacgtgggtggctgctccgccgctaggcagtcacatggcggatag

SEQ ID NO: 17898 - DNA, 825 bp, synthetic construct
  misc_feature 1..825: note = Description of Artificial Sequence: Synthetic coding sequence
  source 1..825: mol_type = other DNA
atgttatctgttgcaagtcgctcagggcccttcgccccagtgctgtcagctaccagtcgcggggttgccggagccttacggcctctcgtacaagctacagtgccagctactcctgagcagcccgtgctggacctgaagagaccgtttctttccagagaatctctgtcaggacaggctgtgcggaggcccctcgtcgcatccgtgggcctcaatgtcccggcgagcgtctgctatagtcataccgatatcaaagtgcccgactttagcgagtacagacgcttggaagtcttggattcaactaaaagctcacgggagagttcagaggcccggaaaggattctcctatctcgtgaccggtgttacaactgtgggcgtcgcttacgccgcaaagaacgctgtaactcagttcgtgagctccatgtccgcctctgccgatgttctggcactcgcgaaaatcgaaattaaactaagcgacatccccgaaggaaagaacatggctttcaagtggagaggcaaacctctgtttgtccgtcatagaacacagaaagaaatcgagcaggaagcagcggtggagctctcccaactgagggacccacagcatgatctggatcgtgtgaaaaagcctgaatgggtgattctgattggcgtgtgcactcaccttggctgtgtccccattgcaaatgccggagatttcggtgggtattactgtccttgccatggcagtcattacgacgcctccggtcgcatccggctagggccggcccctttaaacctggaagtgcccacatatgaattcacttccgacgatatggtgatcgtgggatag

SEQ ID NO: 17899 - DNA, 1221 bp, synthetic construct
  misc_feature 1..1221: note = Description of Artificial Sequence: Synthetic coding sequence
  source 1..1221: mol_type = other DNA
atggcggcaggcgctggggccggaagcgcacctagatggctgcgagctctctccgagccgctgtccgctgctcagcttaggcgcttggaggaacaccgctactcagccgctggggtttctctgctggagccccctctccagctctactggacatggctgcttcagtggatccctctctggatggccccaaattctataacactgctggggctggccgtgaatgttgtgactaccctggtgcttatatcttattgtcccacagcgacagaagaagcaccatattggacttacctgctatgcgccttagggctattcatatatcagtcactagacgcaatcgatggaaagcaggcccgccgaaccaattcctgtagtcccctcggagagctattcgatcatggatgcgacagcctgtcgacagtgttcatggctgtgggcgcgagtattgccgcgcggctgggcacatatccagactggttcttcttctgttctttcatcgggatgtttgtgttctactgcgcgcattggcagacatatgtctcagggatgctgagatttggcaaggttgatgttactgaaattcagatcgcactcgttattgttttcgttttatcagcattcggcggggccaccatgtgggactacactatccccatcctcgagatcaagctgaagatcctgcctgtattagggttcttgggcggcgtcatttttagctgttcaaattactttcacgttatcctgcatggtggcgtcgggaaaaatggcagcaccatcgccgggaccagcgtcctcagccctggcttgcatattggtctgatcatcatcctggccataatgatttacaagaaaagtgccactgacgtattcgagaagcacccatgcttgtacattctgatgttcggatgcgtgtttgccaaggtgtctcaaaagctggtggtggcccatatgaccaaatcagagttatacctacaggataccgttttcctgggacccgggctactgttccttgaccaatactttaacaactttatagacgaatacgtggtgctgtggatggccatggtgatttcttccttcgatatggtgatctacttctctgcactctgtctccagattagccgccatctgcacctgaatatattcaaaaccgcttgccaccaagccccagaacaagtgcaggtcctgagctcaaaatcccaccagaataacatggactag

SEQ ID NO: 17900 - DNA, 2508 bp, synthetic construct
  misc_feature 1..2508: note = Description of Artificial Sequence: Synthetic coding sequence
  source 1..2508: mol_type = other DNA
atggccgagttaagcgaagaggcgttgctgtccgttttgccaaccatccgtgtccccaaagctggcgatagggtacataaagatgagtgtgcctttagcttcgacacacctgagagcgaaggaggcctgtacatatgcatgaacacattcctcgggtttggtaaacaatacgtggaacggcattttaacaagaccggacaacgagtctacctgcacctgaggagaacaaggcggccaaaggaggaggatcccgccacaggtactggggacccaccacggaaaaagcctaccaggctcgccattggtgttgaaggaggattcgatcttagcgaagaaaagttcgagctcgatgaagacgtgaaaatcgtcatcttgccggattacttggagatcgccagagatggtctcggggggctacccgacatagttagagatagagtgacatctgcagtggaggctctgctgtccgcggacagtgcgtctaggaaacaagaagtgcaggcttgggatggcgaagtccggcaggtgtctaagcatgccttcagtcttaaacagctcgataaccccgctcgaattccaccttgcgggtggaagtgttccaaatgcgatatgcgcgaaaacttatggttaaacctaaccgatggatcgatcttgtgtgggaggagatattttgacgggagcggcggaaacaaccacgctgtggagcattacagagagaccggctaccctttggcagtaaaacttggtacaatcactccagacggcgctgacgtttactcatacgacgaagatgacatggtgctggatcctagcctggccgagcatttaagtcatttcgggatagacatgctgaaaatgcagaaaaccgacaagaccatgactgagttggagattgacatgaatcagagaattggtgaatgggagcttattcaagaatcaggagttcccctgaagccactgtttggaccaggttacacaggcattcgaaatctgggcaatagctgctatctgaacagcgttgtgcaggttctcttctctataccagactttcagaggaagtatgtcgataagctggaaaaaattttccaaaacgcacccacagacccgactcaggacttcagtacacaggttgcgaaactgggccacggtctcctgagcggtgaatactccaagccagtgcccgaaagtggcgatggagaacgggtgcctgagcagaaggaggtacaggatgggatcgcacctcgtatgttcaaggccttaataggcaaggggcacccagaattttcaacaaaccggcaacaggacgcccaggagttctttttgcatctgataaatatggtcgagcggaattgccgcagctctgagaatcctaatgaagtgttccggttcttagtggaggagaagattaagtgtctggcaacagaaaaggttaagtacacacagagagtggactacattatgcagctgccagttccaatggatgccgccctgaataaggaggagctgctggagtatgaggagaagaaaaggcaggccgaagaggagaagatggcactccccgaactagtccgcgcccaagtgccattctctagttgccttgaggcatacggcgccccagagcaggttgatgacttctggtcaacagccctccaagctaaaagcgtggctgtgaaaactacaagattcgcttccttccctgattatctggtgatccagatcaaaaaattcacctttggcctcgactgggttccaaaaaaactggatgtgtccatagagatgcctgaagaactcgatatctctcagctgcgggggaccggcttgcagcctggggaggaggagcttccagatattgcaccccccctggtaactcccgacgagccaaaggctccaatgttagatgagagtgtgattattcagctcgttgagatgggcttccccatggacgcttgcagaaaggccgtgtattacactggaaattcaggagccgaagcggccatgaattgggtgatgtcacatatggatgatcccgacttcgctaatccattgatcctgcccgggtcttcgggtccggggtccacttcagcggccgccgatcccccccccgaagactgcgtgaccactatagtatctatgggattcagtcgcgaccaagcgctcaaggctctaagagctactaataactcattagagcgggcggtggattggattttcagtcacattgacgatctcgatgctgaagccgccatggacattagcgagggacggtcagccgcagacagcattagcgaatccgtgcccgtgggtccaaaggtgcgggacggcccaggtaaataccaactgtttgcttttatatcacatatggggacatcaaccatgtgcggccactatgtgtgtcacatcaagaaagagggtagatgggttatctataacgaccagaaagtgtgtgcatccgaaaaaccacctaaggatctgggctatatctacttttaccagcgagttgctagttag

SEQ ID NO: 17901 - DNA, 2385 bp, synthetic construct
  misc_feature 1..2385: note = Description of Artificial Sequence: Synthetic coding sequence
  source 1..2385: mol_type = other DNA
atggctgacgcctgggaggagatcagaagactggcagccgactttcagcgggcacagtttgccgaggctactcaaaggctgtcagagagaaattgcatagaaatcgtcaataagctgattgcccagaagcaactggaagtcgtccatacccttgacggcaaggaatacatcactccagcacaaatatctaaggagatgcgcgacgaactccacgtgcgcggtggacgggtgaatatagtggacctccagcaggtgattaatgtcgatctgattcatattgagaatagaatcggagacataatcaaaagcgaaaaacatgtgcagctagtcctcggtcagctgatagacgagaactacctcgacaggcttgccgaagaagtgaacgataagctgcaggagtcggggcaagtaactatttctgagctatgcaagacatatgacttaccgggaaatttcctgacccaggcccttacccagcgcctcggacggatcatcagtggtcatatcgatctggataaccgcggagtgatcttcacggaggcattcgttgcaagacacaaggcgcgcatccgcggcctgttcagtgcgatcactaggccaactgcagtgaattctctgatttcaaagtacggtttccaggagcagttgctttattctgtgctcgaagaattagtcaacagcggtcgcctccgcggtacagttgttggggggaggcaggacaaggctgtctttgttccagacatctacagccggacccaaagtacctgggttgattctttctttcgccagaatggttacctcgagtttgacgctctaagccgtctgggtatccccgacgcagtgtcttatatcaagaagagatataagacaacgcagctgctgttcctgaaagctgcatgcgtgggacagggtctggtagatcaggtggaagcatctgtggaagaagcaatctcatccggaacctgggtggatatcgcaccactgctgcccacttcattgtcagtggaggacgcagccatcctgctgcagcaggtcatgagggcattcagtaaacaggcgtccactgtggttttcagcgacacggtcgtggttagtgaaaagtttatcaacgattgtaccgagctgttccgggagctgatgcaccagaaggccgaaaaggagatgaagaataacccagtccacctaattacagaggaggatctgaaacagatttcaacccttgagtccgtgtccacatctaaaaaggataaaaaagatgaaaggcgccggaaggctacagagggaagcgggagtatgagagggggggggggaggcaacgctagagagtacaagatcaagaaagtcaaaaaaaaggggagaaaagatgacgacagcgatgacgaatcacaatcctctcatacagggaagaaaaaaccggagatttcctttatgttccaagacgagattgaagactttttgaggaagcacatccaagatgcacctgaggagttcattagcgaactcgccgagtatttgattaaaccgctgaataaaacgtacctggaggttgtccgttccgtgttcatgtcttctaccactagcgctagtgggacgggcagaaagcggaccatcaaggacttgcaggaagaggtatcaaatctttataacaatattaggctattcgaaaaggggatgaaattctttgccgatgacactcaagctgcactgactaaacacttgctaaaatctgtgtgtactgatattaccaacctgatcttcaatttcctcgcatctgatttaatgatggccgtggacgatccagcagccattacctccgagataagaaagaagattctctctaaactgtcagaagaaacaaaggtggctctgacaaagctgcacaactccctgaatgaaaagagtattgaggacttcatttcttgtcttgattcggcagccgaagcctgtgacatcatggtgaagcgcggcgataaaaaacgtgaacggcagatactcttccagcatcgacaagcacttgcagagcagctgaaggttactgaagaccctgcacttattctccacttgactagcgttctgctctttcagttttctacccatagcatgcttcatgctcctggacggtgtgtaccccaaatcatcgcgttcctgaattccaagatccccgaggatcagcacgcgctcctggttaagtatcagggcctggtcgtaaaacagctggtaagtcagtcaaaaaaaacaggtcagggggattatccactgaataatgaattagacaaggaacaggaggatgttgcctcaaccactcgcaaggagttgcaggagctgtctagctccataaaggacctagtgcttaagtcgagaaagagttcggtcacagaggagtag

SEQ ID NO: 17902 - DNA, 942 bp, synthetic construct
  misc_feature 1..942: note = Description of Artificial Sequence: Synthetic coding sequence
  source 1..942: mol_type = other DNA
atgatcgggcaaaagactctctatagcttcttcagcccttccccagcgaggaagcggcacgcgccatccccagagcccgctgttcagggaaccggggtcgcaggtgtccccgaagagagcggtgacgccgccgcgatccccgcaaaaaaggcccccgccgggcaggaagaaccaggtacccctccctcctccccgctgagcgctgagcagctggataggatccagcggaataaggcggcagccctgcttaggctggcagctagaaatgtgccggttggatttggagagagctggaagaagcacctgtcgggggaatttggaaaaccatatttcattaaattaatgggattcgtggctgaagaaagaaaacactataccgtgtatccccctccccatcaggtgttcacctggacccagatgtgcgacatcaaagatgtgaaggtggtcattctgggtcaggatccctaccacggacccaaccaagcacacgggttatgtttcagtgttcaacggcctgttccacccccccctagcctggaaaacatatataaggaattatccaccgacatcgaagactttgtgcaccctggtcacggtgacctgagcggttgggccaaacagggagttcttcttttgaacgctgtcctgaccgtgagggctcaccaggcgaatagccataaagagcggggctgggagcaattcaccgatgctgtcgtttcgtggctgaaccaaaattctaacggactggtattcctgctgtggggctcttatgcacagaaaaagggtagcgccattgaccgaaaacggcaccacgttctgcagacggctcacccttcacctctgtccgtgtatcgaggattcttcggctgtagacacttctctaagacgaatgagttgctacagaagagcgggaaaaaaccaattgattggaaggagctctag

SEQ ID NO: 17903 - DNA, 915 bp, synthetic construct
  misc_feature 1..915: note = Description of Artificial Sequence: Synthetic coding sequence
  source 1..915: mol_type = other DNA
atgggcgtgttctgcttaggtccttggggcctcggacgtaaacttcgaactcccggtaaaggtcctctccagcttctgtcaagactgtgcggggaccacttacaagcaatcccagccaaaaaagccccagcaggacaggaggagccagggactcccccatcgtccccattgtcagccgaacaactggataggatacagagaaacaaggccgcggctttattaaggctggccgccaggaacgttcctgtcgggtttggggagtcttggaagaagcatctttctggggagttcggcaagccttactttattaagcttatgggttttgtggctgaagagcgaaaacattacaccgtttatccgcccccacatcaggtcttcacttggacacagatgtgcgacataaaagacgtgaaagtggtcattcttggccaagacccatatcacgggccaaaccaggcacacggtctgtgctttagcgtgcagcgccccgtgcctccccccccctcactggaaaatatctataaggagctgagtactgatatagaggacttcgtgcaccccggccacggggatctctcaggctgggccaaacaaggcgtcttgctgttgaacgccgtcctgacagtgagggcacaccaggccaatagtcacaaggagaggggctgggaacagtttacagacgccgttgtgtcttggcttaatcaaaattctaacggattggtgtttctactctggggatcctacgcccagaagaagggatctgccatcgaccgcaagaggcatcacgtcctgcaaactgcccacccgagtcctctgtcagtgtacaggggcttctttggttgtcgccacttctccaagactaacgagcttctacagaaatcaggtaaaaaacccattgactggaaggagttatag

SEQ ID NO: 17904 - DNA, 813 bp, synthetic construct
  misc_feature 1..813: note = Description of Artificial Sequence: Synthetic coding sequence
  source 1..813: mol_type = other DNA
atgggggtgttctgtcttggcccatggggactagggaggaagctgcggactcccggcaaaggcccgctcagcgcggagcagcttgatagaatacaacgcaacaaggccgctgccctcttgcgccttgccgccagaaacgtcccggttggttttggcgagagctggaaaaaacatttgagtggcgaatttggaaagccttattttattaagctaatggggttcgttgctgaggagaggaagcattacactgtgtatcctcctccccatcaggttttcacttggacccagatgtgcgacatcaaggatgtcaaggtggtgatcctgggccaggacccttatcatggcccaaatcaagctcacgggctgtgcttctctgtgcaaagaccagtgcccccccccccctctctcgagaacatttataaagaactgtcaaccgatatcgaggatttcgtccatccaggacacggtgacctgtcaggttgggccaagcagggggtgctcctactgaatgccgtcctgactgtgagagcccatcaggccaattcacacaaagaacgggggtgggaacagtttacagacgcagtggtgtcatggctgaatcaaaactcaaatgggctcgtgttcctgctgtggggttcctatgcccagaaaaaaggtagcgctatagatagaaaacgtcaccatgtgctgcagaccgcccaccccagtccactgtcagtttaccgcggatttttcggatgtcgccacttctctaagacaaatgaattgctccaaaagtcaggaaaaaaacctattgactggaaagagctgtag

SEQ ID NO: 17905 - DNA, 9288 bp, synthetic construct
  misc_feature 1..9288: note = Description of Artificial Sequence: Synthetic coding sequence
  source 1..9288: mol_type = other DNA
atggtttttgagtcagtcgtggtggacgtactaaacagattccttggcgattacgtagttgacctagatacatcacaactgagtctgggaatctggaagggcgcagtggcactgaagaacctccaaataaaggagaacgcgttatcgcagctcgatgtgccttttaaagtgaaagtgggccacatcggtaaccttaagttgatcattccatggaaaaatctctacacccagcctgtggaggctgtgctcgaggagatctacctgctgatcgtgccaagtagccggataaagtacgaccctctgaaagaagagaagcagctaatggaagccaagcagcaggaactcaaacgtatagaggaggccaaacagaaggtagttgaccaggagcagcacctgccagagaaacaagacaccttcgcagagaaactggtgacacaaataataaaaaacctgcaagtgaagatttctagcatccacatcagatatgaagacgatatcacgaacagggacaaacctctaagcttcgggatttccctccagaatctgagcatgcagaccacagaccaatattgggtcccgtgcttgcatgacgagacggagaaactagtgcgcaagttgattagacttgacaacctatttgcttactggaacgtaaaatcccagatgttctacctcagcgattacgacaattcgctggatgacctaaagaatggaatcgttaatgaaaatatcgtgccagagggctatgactttgtgttccgaccaattagcgccaatgcgaagctcgtgatgaatcggaggtctgacttcgacttctccgctcccaagataaacttggagatagagcttcacaacatcgcaattgaatttaataagccccagtacttctccattatggaactgctggaaagcgtggacatgatggcacagaacctgccttaccgaaaatttaaacccgacgttccgttgcaccaccatgctagagaatggtgggcttatgcgatccacggggtgctggaggttaatgtatgtccccgtctgtggatgtggtcatggaaacacatacggaaacatcgccagaaagttaagcaatacaaagagctgtataagaagaaattaactagcaaaaaaccccctggggagcttctcgtgtccctggaagaactcgagaagacactggacgtgttcaatattacaatcgcaagacaaacagcagaggtggaggtcaagaaggccgggtacaagatttacaaagaaggggtaaaagacccagaggacaacaaggggtggttcagttggctgtggtcgtggtcggagcaaaacacaaacgaacagcagcctgacgtgcagcccgagacactggaggaaatgctgacgcccgaggaaaaggctctcctgtatgaggcaatcggctacagtgagacagctgttgatcccactctcctgaagacctttgaggccctaaaattcttcgtacacctgaaatccatgtccatagtcctgagagagaatcaccagaagcctgagctcgtggatatcgtcattgaggaattctctacacttatagtgcagcggccaggtgctcaagcaatcaagttcgagactaagatcgactcattccacatcactggtttgcctgacaactctgaaaaaccacgcctacttagttcactcgacgatgccatgtcccttttccaaatcacattcgagatcaaccctctcgatgaaacggtcagccagagatgtatcatcgaggccgagcctctcgagatcatttacgacgcccgcaccgtcaacagtatcgtcgagttttttagaccgccaaaagaggttcatctggcccagctgacggccgcaacactcaccaagttggaagagttcagatccaagacagcaacaggcctattatacattattgaaacgcagaaagtgctggaccttaaaatcaatctgaaagcttcctatatcatcgtgcctcaagatggaattttttccccaacctctaatctacttttgctcgacttgggccacttaaaggtgacatccaagtcaaggtcagaactgcccgacgtcaagcagggggaagcaaacttgaaggaaataatggaccgggcgtatgactctttcgatatccagctaacctcggtgcagctgctgtacagcagagtcggggataactggcgagaagcacggaaactgagtgtgagcacccagcatattctggtgcccatgcactttaacctggagcttagtaaagcaatggtttttatggatgtgcggatgccaaaatttaaaatctacggcaaactgcctctcatatcattgcgaatcagcgacaaaaagttacagggcataatggaactgatagaatcaatccccaaacccgagcccgtgactgaggtatccgcgccagtgaaatccttccagatccagacctcaacatctctgggtacatcacagatctcacagaaaatcattcctttgttagaactgccctccgtgtcagaggacgattcggaggaagaattttttgacgccccatgctctcccctcgaggaacccttgcagttcccaactggagttaagagcattcgaacacgaaaactccaaaagcaggattgtagcgtgaacatgacaacattcaagattcgattcgaggtccctaaggtgctgatcgaattctaccatttagtcggggactgcgagctttctgtggtggagatacttgtgctgggtctaggggcagaaatcgagattcgtacttacgatctgaaggcaaacgccttccttaaggagttctgcctgaaatgtccagagtatctagacgagaacaagaagcctgtgtacttggtgacaacactcgacaacactatggaggacctgctcacgcttgagtatgtaaaagcggaaaagaacgtccctgacttaaaaagcacttataataacgttctccaactgatcaaagtgaactttagctcgctggatattcatctgcacaccgaggctctacttaacacaattaactacctgcacaatatactgccccagtccgaagaaaaatccgctcccgtatctacgaccgagaccgaggacaaaggagatgttatcaagaaactcgctctgaagctgtcgaccaacgaagacattataacccttcagatcttggccgaactgagctgtctgcaaatcttcatccaggaccagaaatgtaacatcagtgaaattaagatcgaaggtctcgatagtgaaatgatcatgaggcccagcgagaccgaaatcaatgctaaactaagaaacatcattgttctggattctgacataactgctatttataagaaagccgtgtacatcacagggaaagaggtgttcagctttaaaatggtgtcatacatggacgcaactgccggctctgcatatactgatatgaatgtcgttgatattcaagtgaatctaattgtgggttgcatcgaggttgtattcgtcacaaaattcctttatagcattctggcctttatcgataattttcaggctgcgaaacaagctctcgcggaggccaccgttcaggcagcagggatggccgcaacaggggtgaaggaattagcacagcggagcagtagaatggccctggacattaacatcaaggcgccagtggtcgtgattcctcagtctcctgtgagcgagaacgtctttgttgctgattttggtctcatcacaatgacgaacacgtttcatatgattactgaaagccagagctcgcctcctcctgtgatcgacctgatcactataaagctctctgaaatgagactgtacagaagcaggttcataaacgacgcatatcaggaagtgctggacttactcctccctcttaatctggaagtagtggtggagcggaacttatgttgggaatggtatcaggaagtaccttgttttaacgttaacgcccagctgaagcctatggaatttattctcagccaggaggatattacgacgatttttaaaactctgcacggcaacatatggtatgagaaggacggcagcgcttccccagccgttacaaaggatcagtactcagctactagtggcgtcaccacaaatgcaagccaccacagcgggggagcgactgtggtgactgctgctgttgtcgaggtccactcacgcgctcttctagttaagaccactttgaatatcagtttcaaaacagatgacctgaccatggtgctgtactctcctggacccaagcaggcatcattcacagatgtgcgagacccatccctaaaattggcggaatttaagttggaaaacataattagtacccttaagatgtacacagatggctccacattctccagcttttctctgaagaactgtattctcgatgacaagcgtccccatgtcaagaaggccacacctcgcatgatcggcctcacagtaggatttgataagaaggacatgatggacattaaataccgcaaggtccgagacgggtgcgtgaccgacgccgtcttccaagagatgtacatctgcgcatcagtcgagttcctgcagactgttgccaatgtgttcctcgaggcatacaccactggaaccgctgtggagacgtcagtccagacttggaccgcgaaagaagaagtgcccactcaagagtccgtcaagtgggaaatcaacgtcattattaagaaccctgagatcgttttcgtggcagacatgactaaaaatgacgcgcccgcactggtaattacaactcaatgcgaaatctgttacaagggcaatctcgaaaatagcacgatgacggccgccataaaagatctccaggtaagagcttgccccttcctgccggtaaagcgcaagggcaaaatcacaaccgtcctgcagccttgtgaccttttctaccaaacgacccagaagggcactgacccccaggttatcgatatgagtgtaaagtctctcacgctaaaggtctcacccgtcatcattaataccatgatcacaatcacgagcgccttgtataccacaaaagagaccataccagaggaaacagctagttctaccgcccatctgtgggagaaaaaagacacaaagacactcaagatgtggttcctcgaagagagcaatgagactgagaagatcgccccaacgaccgaactcgtgccaaagggcgaaatgatcaaaatgaacatcgactcgatctttattgtgttggaagcaggaatcggccaccgaacggtgcccatgttactagctaaatcccggtttagcggggagggcaaaaattggtcgagtctcatcaacttgcactgccagttggaactcgaggtacattattacaatgaaatgtttggagtttgggagcccctgctcgaaccacttgagattgatcagaccgaagactttcgaccatggaatctgggaatcaaaatgaagaagaaggcgaagatggctatagtggagagtgaccctgaggaggagaattacaaggtgcctgagtataagactgtgattagctttcactcgaaggatcagcttaacattactctgtccaagtgcggcttggtcatgctaaataatctggtcaaagccttcactgaagccgcaacagggtccagtgctgatttcgtcaaggatctagcgccgttcatgattctgaatagccttggactgaccatttcggtcagcccaagcgattctttttctgtgttaaacatcccaatggcaaagtcctacgtgctcaagaacggagagagcctgagcatggactatatacgtacaaaggacaacgatcacttcaacgctatgacatccttgtcatccaagctgttctttatcctgctgacccccgtcaaccatagtaccgcggacaaaatccccctgacgaaagtcggtcggcgtctatatacagtccgacaccgcgagtcaggagtggagaggagcattgtttgccagatcgacactgtggaagggtcaaaaaaggtcactatccggagccctgttcagatccgtaaccatttcagcgtgcccctttcagtatatgaaggagacaccctactggggaccgccagccctgaaaacgagttcaatatccccttgggcagctatcggtccttcatttttttgaagccagaggatgagaactatcagatgtgcgaaggcattgactttgaagaaatcattaaaaatgatggggcactgcttaagaaaaaatgccgaagtaagaacccatcaaaagagtccttccttattaatatcgtgcctgaaaaagacaacctgacctccctgtctgtctattcggaggacggttgggatctgccctatattatgcacctttggccccccatacttcttagaaatttgctgccctataagattgcctactacatagagggcatcgagaactccgtttttaccctgtcagaggggcactctgctcagatctgtactgctcagttgggaaaggcccgcttgcatctcaaactgttagactatctgaaccatgactggaagagtgagtaccatatcaaaccaaatcagcaggacatatcgttcgtaagttttacgtgtgtgacagaaatggagaagactgacctcgacatcgcggtccatatgacatataatacaggtcagacggtcgttgccttccacagtccgtactggatggtgaacaagactggtaggatgctgcagtacaaagctgacggcatccaccgaaagcatcccccaaattacaagaaaccagtattattctcctttcagcccaatcatttcttcaataacaacaaagtgcagctgatggtcacagattcagaactttccaaccagtttagcattgatacagtaggttcacacggcgcggtgaaatgcaaggggctcaagatggattaccaggtaggagtcacaatcgatttaagtagtttcaacatcaccagaattgtcacttttacgcccttttacatgatcaagaacaaatcaaagtaccatatctcggtcgcggaagagggcaacgacaagtggctgagccttgacctggaacagtgcattccattctggcccgagtatgcctcgtcaaagctgctgatacaggtggaaagaagcgaggacccccctaagcgcatctacttcaataaacaggaaaactgtattttgcttcgccttgacaatgaattaggcggcataattgcagaggtgaacctagctgagcacagtacggtgataactttcttagactaccatgatggggctgcaacattcctgctcatcaaccatactaagaacgagctggttcaatataaccagtcgtcactcagcgagattgaggatagcttgccaccggggaaagccgttttttacacctgggccgatcctgttggaagcaggcggctgaagtggcgatgtcgaaaatcccacggtgaagtgactcagaaagacgatatgatgatgccgattgacctgggagaaaaaaccatctacttagtctcattcttcgaggggctgcaaaggattatcctgtttacggaagatccacgggtgttcaaggtgacctacgagtccgaaaaagcggagttggcagaacaagagatcgcagtcgcacttcaagatgtaggaatctctctcgtcaataattacactaagcaggaggtcgcatacatcggcataacgagtagtgatgtcgtttgggagactaagcccaaaaagaaggctcgctggaagcccatgagtgtgaagcacacggagaagctagagagagagtttaaggagtatacagagagctccccttctgaggataaggtgattcaactggacaccaacgtgcccgtgcggttgacacctaccggccacaatatgaagattctgcagccacacgtgattgctctcaggagaaactacttaccagcactaaaggttgaatacaatactagcgcccaccagtctagcttccgcatccagatttaccgtattcagattcagaatcagatacacggtgctgtctttccatttgtcttctatcctgtcaagcctcctaaaagtgttacaatggacagtgctcccaagcctttcactgacgtgagtattgttatgcggtccgccggccactcccagatttctcgaatcaaatacttcaaagtcctaattcaggagatggatctaagactcgacctcggattcatttacgctctcacggacctcatgacagaagcagaagtcaccgaaaacacagaggttgagttattccataaggatattgaggccttcaaagaggaatacaagactgcttcactcgtggaccagagccaagtttccttgtacgagtattttcatatcagtcctataaagttgcatctttcagtttcgctgtcctccggtagagaggaggcgaaagatagcaagcagaacggcgggttaattcctgttcatagtctcaatctgctgctcaaaagtatcggagccacacttactgatgtgcaggatgtggttttcaagctggccttcttcgaactaaattaccagttccacaccaccagcgatttgcaatctgaagtgattagacactattcaaaacaggcgatcaagcagatgtatgtccttatcctgggactggacgtactcggcaacccattcggtcttattagggaattcagtgaaggcgtggaggcctttttctatgagccttaccagggcgccattcaggggcccgaggaattcgtggaaggcatggccctcgggctgaaagctttagtagggggcgccgttggtggcctggctggcgcagcatcaaagatcactggggccatggcaaaaggtgtcgccgcaatgactatggatgaggattaccagcagaaacgtagagaagctatgaacaagcagccagcaggattcagggagggaatcacacgcggcgggaaagggctggtgagtggctttgtgtcggggattaccggaatagtcaccaaaccaatcaagggcgctcagaaaggtggcgcggccggattttttaagggagtcggcaagggattagtgggagctgtggcgaggccgacgggaggcatcatagacatggcaagctccacgtttcaggggatcaaaagagccactgagacctctgaagtagagagcctgcgcccacccagatttttcaatgaggacggggtcatccgcccctatcggttgagggacgggaccggaaatcagatgctccagaaaattcagttttatcgggagtggatcatgacacactcttcaagctccgatgacgacgatgacgacgatgacgatgacgaatccgacctgaatcattag

SEQ ID NO: 17906 - DNA, 9525 bp, synthetic construct
  misc_feature 1..9525: note = Description of Artificial Sequence: Synthetic coding sequence
  source 1..9525: mol_type = other DNA
atggtgtttgaatcagttgtggtagatgtgcttaacagatttctaggggattatgtcgtggacctggacacgtcgcagctgagtctgggcatctggaagggagctgtggccctcaagaatctgcagattaaagagaacgccttgtcccagctggacgtgcctttcaaagttaaagttgggcacatcgggaacctgaaactcatcataccctggaagaacttgtatacacagccagtcgaggccgtgctggaggaaatctacctcctcattgttccatcaagcaggataaaatacgacccactgaaggaggagaaacagctgatggaagcaaagcaacaggagctcaaacggatcgaagaagccaagcagaaagtcgtcgatcaggaacagcatttacccgaaaagcaggacacctttgcagaaaagctcgtgacacagattattaagaacctccaggttaaaatttcaagtattcacatccggtatgaagatgatataaccaatagggacaagccgctgtccttcggcatcagcctacagaatctgtccatgcagacaaccgaccaatactgggtcccttgtcttcatgacgagactgaaaaacttgtgcgaaagctcatccgcttagataacctcttcgcctattggaacgtgaaaagtcaaatgttttatctctccgactatgacaatagcctagatgatctgaagaatggaatcgtcaacgagaatatcgtcccagagggatatgatttcgtgtttcggcctataagcgccaatgcaaaacttgtaatgaataggagaagcgactttgacttctcagcccccaagattaacctcgagattgaactccataatattgccattgagttcaacaaaccacagtacttctcgattatggagctgcttgagagtgttgatatgatggcccagaacttgccatacaggaaattcaaacccgatgtgccattgcatcaccacgccagagagtggtgggcgtacgctatccacggagtacttgaggtgaacgtgtgccctcgtttatggatgtggtcctggaaacacataaggaaacatagacagaaagtcaagcagtataaggaactgtacaagaagaagctgacctcaaagaaacctccaggtgagctgctagtgtctctcgaggaattggagaaaacactggacgtgtttaatataacaatcgcccgccagacggcagaggtggaagtcaagaaagcaggctataaaatttataaagaaggcgtgaaggaccccgaggacaataaaggatggttcagctggctttggtcttggagcgaacagaacactaacgagcagcagcccgatgtgcaaccggaaacattagaagaaatgctgaccccagaggagaaagccctgctttacgaagctattggatactctgagactgctgttgatcccacattgctgaaaaccttcgaagctctgaagttcttcgttcacctgaagtccatgagcatagtcctacgcgaaaatcaccagaagccggagctagtggacattgtgatcgaggagttcagtactctcattgtgcagcggcctggcgctcaagccatcaaatttgagaccaaaattgactcgtttcatataactggactgcctgataactctgagaaaccccggttattatcctccctcgatgatgccatgagtctgttccaaattaccttcgagatcaatccactggatgaaacggtgtctcagcgctgcatcatcgaagctgagccattggagattatctacgatgcccggactgtcaactccatcgtggaattcttcagaccacctaaggaagtccatctcgcgcagttgaccgccgccactctgacaaagttggaggaatttagaagcaagaccgcgacagggctgctgtatataattgaaactcagaaagtgctggaccttaagataaacctcaaggccagctacatcatcgttcctcaggacggcatcttctcacccacctctaacttattgcttttagacctggggcacctgaaagtcacgtccaagtctcgaagcgagctcccagatgtcaaacaaggtgaggctaatctcaaagagatcatggatagagcgtatgactcttttgacatccagctgacttccgtccagttgctgtactctcgcgtcggcgacaattggagggaggccaggaagctgtcagtgtctacccagcacatactagtcccaatgcattttaacttggagctcagcaaggccatggtctttatggatgtgcgtatgcccaagtttaagatatacggtaagctcccactaattagtctcaggataagcgataaaaaacttcagggcattatggagctgatcgagtccattcctaagcccgaacctgtcacagaggtaagcgcccctgtaaagagctttcaaattcagactagcacgtctctgggcacatcgcagatcagccagaaaattataccacttttagaactgccatccgtttctgaagatgattccgaggaagagttctttgacgccccctgctctcccctggaagagccactccaattccctaccggagtgaaaagcattagaactcgcaagctgcagaagcaggactgttcggtgaacatgacaaccttcaagatccggtttgaggtgcccaaggtcttaatcgagttttaccacctcgtcggggattgcgagttgtcagtggttgagattctggttctcggcttgggagccgagattgaaatccgtacatatgatctcaaagccaacgctttcctgaaagagttctgcttaaagtgccccgaatatttagacgagaataagaaacctgtgtatctggtgactaccttggacaacacgatggaggacctgctaacccttgagtatgttaaagcagaaaagaacgtgcccgatcttaaaagcacctacaataatgtcctgcaactgatcaaggtgaacttcagttccctggatatccatctgcatactgaggcgttgctaaacacaattaactaccttcacaacattctgcctcagagtgaggagaaaagtgctcccgtctccactaccgagaccgaagataaaggggatgtcattaaaaagctcgcactgaagctatccacaaatgaagacatcatcacccttcagatcttggctgaactgtcctgtctgcagatatttatacaagaccagaaatgtaatatatcggagatcaagatcgaaggcttagattctgaaatgatcatgaggccgagcgagaccgaaatcaacgccaagttgcggaatattattgtgcttgattccgatattacagccatctacaaaaaggccgtgtatattaccgggaaggaagtgttcagtttcaagatggtgagttacatggatgctacagccggtagcgcctatactgatatgaacgtggttgacatccaggtgaacctgatcgtgggctgtatcgaggtggtgttcgtcaccaaattcttgtacagtatactcgcattcatcgacaacttccaggccgccaaacaggctctggctgaagccaccgtgcaagcagcaggtatggccgcaaccggcgtgaaggagctggctcagaggtcaagccggatggccctggatatcaatatcaaagcccctgtagtggtcattccccagagtccagtgtctgagaacgttttcgtcgctgactttgggctgataacgatgactaataccttccacatgataaccgaatcccagtccagtccaccccccgtgatcgatttaatcactatcaagctgtctgagatgagactttatagatcaagatttatcaacgacgcttaccaagaggttctggaccttttgctacccctcaacctggaggtggtggtagaacgtaacttgtgctgggaatggtatcaagaggtgccctgcttcaacgttaacgcccaactgaagccaatggaatttattctctctcaggaggatatcaccacaatttttaagaccttgcacgggaacatttggtacgagaaggatggctctgcctctcccgcagtgactaaagaccagtactccgcaaccagcggtgtcactaccaatgcctctcaccatagcgggggagcgacagtggtgaccgcagcagtagtggaagtgcactcaagggccctcctggtaaaaacaactctcaatatttccttcaaaactgatgaccttaccatggtcctatactcccctggccccaaacaggcctcgttcacagatgttagagatcctagcctgaagctggctgagtttaagctggaaaacatcattagcacgctaaaaatgtacaccgacgggagcacgttctccagtttttccttgaaaaactgcatcctggatgataagaggccccacgtaaaaaaggcgacgcctcgcatgatcgggctgaccgtcggtttcgacaagaaagacatgatggacattaaatacaggaaggttcgagacgggtgcgtgacggacgccgttttccaggagatgtatatctgcgcaagtgtagaatttctgcaaacagttgccaatgtgtttcttgaggcttacacgacgggtacggccgtggagacctccgttcagacttggacagccaaagaggaggtcccaacacaagagtcagtcaagtgggaaataaatgtgatcattaaaaacccagaaatcgtgtttgtggctgacatgactaaaaatgatgcacccgctctggttattactacacagtgtgaaatctgctataaggggaacttagaaaattctaccatgaccgctgcaatcaaggatttgcaggtgcgcgcatgcccctttctccccgtgaagcgcaaaggtaaaattacaacggtcttacagccctgtgacttgttttaccagacaacacaaaaagggacggacccacaggtcatagatatgagcgtcaagtccctcaccttgaaggtttctcctgttatcattaacacaatgataacgattacatccgccctgtacactacaaaggagacaatccccgaggaaaccgcgtcttcaaccgcccacctgtgggaaaagaaagacactaagacattgaagatgtggttcttggaggaatcaaatgagacagagaaaattgctcccaccacagagctggttccaaagggagagatgataaagatgaatattgacagcatcttcatcgtgctggaagctggaattggccatagaacagtgccaatgctactggctaagagcagattcagcggcgagggcaaaaactggagttccttgatcaacctgcactgtcaactggagctggaagtacactattataacgaaatgtttggtgtatgggagccactgctggaaccactggagatcgaccagacagaggactttcgaccctggaacctggggataaagatgaagaagaaagccaaaatggccatcgtcgagtcagaccccgaggaggagaattataaagtgcccgagtataagacagttatctcatttcattcaaaagaccagcttaatatcactctttccaagtgcggtttggtgatgctgaacaacctcgtcaaggctttcacagaggctgcgacaggatcttcggcagactttgtgaaagacctagccccgtttatgatcctgaactctctggggctgacgatctctgtgagtccaagtgacagcttctccgtcctcaatatcccaatggcaaaatcctacgttcttaagaatggcgaaagcctgtctatggactacataaggacgaaggacaatgaccactttaacgcaatgacgtcactgagctcaaaacttttctttatcctcctgactccggtaaatcactccactgctgataagatcccactgactaaggttgggcggaggttgtataccgtgcgacatagagagtcaggagtcgagagatcaattgtgtgccagatcgatacggtggaaggctcaaaaaaggtgaccatccgctcacctgtgcaaatcaggaatcactttagcgtccctctcagtgtgtatgagggtgacactctcctcgggaccgcttcccctgaaaatgagttcaacatccccctgggaagttatagaagttttatttttctgaaacctgaggatgagaattaccagatgtgcgaaggcatcgactttgaagagataataaaaaacgatggcgcactgctcaaaaaaaagtgtaggagtaaaaatccctcaaaagaatcctttctgattaacatagtcccagaaaaagacaacttgacttcactctccgtttactcagaagatggttgggatcttccctacatcatgcacctctggccgcctatcttattgaggaacctgctaccttacaagattgcatactatattgaaggcatcgagaactccgtgttcactctgtctgaaggacactcagcccagatctgtactgcccagctcggaaaagcaagattacatcttaaactacttgattacttaaatcatgactggaagtctgagtaccacattaagcccaaccagcaagatatttcattcgtgtcattcacttgtgtgactgagatggaaaaaactgacttagacatagccgtgcacatgacatacaataccggacagacagtcgtggcattccattctccctattggatggtgaataaaaccgggcgcatgctgcagtataaggcagatgggattcaccggaagcatccccctaactataagaaacccgtgctcttttcattccagcctaatcactttttcaataataacaaggtgcagttgatggttacagattccgagttaagcaaccagtttagcatcgacaccgtcggaagccatggtgctgtgaaatgcaagggcctgaaaatggattatcaggtcggcgtgacaatcgatctcagttctttcaacattactcgtattgtgacattcactcctttctacatgatcaagaataagtcaaagtatcacatctcagtagcggaggagggaaatgacaaatggctgtccttggatctcgagcagtgcatacccttttggccagagtatgcatcttccaagctgctgatccaggtggagcgatccgaagatccccccaagcgcatatacttcaacaagcaggaaaattgtatcctgctgaggttggataacgaacttggcggtataattgctgaggtcaacctagccgaacattccaccgttatcacttttctggactaccacgacggagcggcgacgttcctgctgattaatcatacaaaaaacgagcttgtgcagtataaccagagctccctgtccgagatcgaagactcattgccaccaggtaaagctgtgttttatacttgggccgacccggtgggctcccgtcgactgaaatggcggtgtcgtaaatctcacggggaagtgacacagaaggacgacatgatgatgccaatcgacttgggagagaaaaccatctatctcgtttccttctttgagggactccagcgtatcatcttatttactgaagaccctcgggtgtttaaagttacgtatgagtctgagaaggccgagttagctgagcaggaaattgctgtggcgcttcaggacgtcggaatttccttagtcaataattacacgaaacaagaggtggcatacatagggatcacaagttccgacgtggtgtgggagactaaacccaaaaagaaggccaggtggaaacccatgagcgtgaagcataccgagaagttagagagggagtttaaagagtataccgagagctctcctagcgaagacaaagtcattcaattagatacaaatgtgccagtgagattgaccccaacgggccataatatgaaaattcttcagccgcacgtaatcgcgctcaggcgaaactatctccccgcgcttaaggtggaatataatacttccgcccaccaatcgagcttccggattcagatctatagaatacagatccagaatcaaatccacggcgccgtgttccctttcgttttctatcccgtcaagcctcccaaaagcgtgactatggattctgcgcccaaaccattcacagacgtgtctatcgtcatgcgcagcgcaggtcacagccagatcagtcgtataaaatactttaaggttcttattcaggagatggacctacgcttggatttgggcttcatttacgccctaacagacttgatgaccgaggccgaagttacagagaataccgaggtggagctctttcacaaggatatcgaggccttcaaggaagaatataaaactgcaagccttgtggaccaatcacaggtgagcctgtacgagtacttccacatttcacccattaaacttcatctcagcgtgtcgttgagttccgggagggaggaagcaaaggacagcaaacagaatgggggtcttatcccagttcatagcttgaacctgctgttgaagagcattggcgccacactgacagacgtgcaagatgtcgtttttaaactggccttttttgagctgaattaccagtttcacacaacgtcagacctgcagtctgaagtcataagacactactctaagcaggcgattaagcagatgtacgttctcatcttgggtcttgatgttctgggaaaccctttcggtctcatccgggaattttccgaaggcgtcgaagcctttttttatgagccctatcagggcgccatccagggccccgaggagtttgtcgagggaatggctttgggcctgaaagccctggtcgggggggcagtgggcggattggctggtgcggcgtctaaaataaccggtgctatggcgaaaggggttgccgccatgacaatggatgaggactatcagcagaagagacgggaagccatgaataagcagcctgccggatttagggaagggatcacacgcggaggaaaaggcctggtgtcaggcttcgtgtccggcatcactggcatcgttactaagccaataaagggtgcccagaaaggaggggccgccgggttctttaagggtgttggcaaaggattggtgggcgccgtagcccgccctacgggcggaatcatagacatggcttcgtctacttttcagggcatcaagagagcaacggaaacttccgaggtcgagagcctgaggcctccacgattttttaacgaggatggtgtaatccgcccataccgacttcgtgacgggacaggcaaccagatgctgcaagtaatggaaaacggaagatttgctaaatacaagtactttacacatgtgatgatcaataaaacagacatgcttatgatcactagaagaggagtgctgttcgtcacaaagggaaccttcggtcaactcacgtgtgaatggcagtattccttcgacgaattcactaaggagcctttcattgtgcatggccgaaggctgcggatcgaggctaaggagcgcgtaaaatcagtttttcacgcgcgcgaattcggtaagatcattaactttaaaactccagaagacgcccgctggatcctgactaagttgcaggaggcaagagagccatcccccagtttatag

SEQ ID NO: 17907 - DNA, 9210 bp, synthetic construct
  misc_feature 1..9210: note = Description of Artificial Sequence: Synthetic coding sequence
  source 1..9210: mol_type = other DNA
atggtgttcgaatcagttgtggtagatgtgctaaacagattccttggggattacgtggtagatttggacacgtctcagctgtctcttggaatctggaaaggggccgtggctctgaaaaatctgcagataaaagagaacgccctgtctcagcttgacgttccctttaaggtgaaagttggacacataggcaatctcaagctcattattccatggaaaaacctgtatacacagccagtggaggcagtactggaagagatatacctactgatcgtcccgtctagccggatcaagtacgatcccctcaaagaggaaaagcagctgatggaagctaagcaacaggagttaaagcggatcgaagaggctaagcagaaggttgttgaccaggagcagcacttgccagagaagcaagacaccttcgcggagaaactcgtgactcaaataatcaaaaacctgcaggttaaaatttctagcatccacatccgctacgaggatgacataaccaatcgtgacaaacccctgagctttggaattagtctgcagaatctatccatgcaaacaaccgatcaatattgggttccgtgcctgcatgacgaaaccgagaaactcgtgaggaaactcattagattggataacctgttcgcctactggaacgtcaaatcccagatgttttacttatcagactatgataacagcttggacgacctaaagaacggaatagttaacgagaatatcgtgcccgagggctacgactttgtgtttcgccctattagcgccaacgcgaagctagtgatgaatcggcgatctgatttcgatttttccgcacccaagataaacttggaaatcgagcttcataatatcgccatcgaatttaacaagccacagtacttttctatcatggagctgttggagagtgtcgatatgatggctcagaatcttccgtataggaaatttaaacccgacgtgcctctgcatcaccacgccagggaatggtgggcatatgccatccacggagttctcgaagtgaatgtatgtccccgtctgtggatgtggtcctggaaacacatccgaaaacaccgccaaaaggtcaagcaatacaaagaactttataaaaagaagctaactagtaagaagccgcctggagagctgctggtcagcctcgaagaattggagaagacactggatgtttttaacatcaccatcgcccgccaaacagccgaagtcgaagtgaaaaaagcggggtacaaaatttacaaggaaggtgtgaaagatcctgaagataacaagggctggttctcatggctgtggtcctggtcagaacagaacacaaacgaacagcagcctgatgtgcagcccgaaactctggaagagatgctgaccccagaggagaaagcgcttctgtacgaggccattggctattcggaaactgcagtggatcctaccttgcttaagacttttgaggccctgaagttcttcgtgcacctcaaatcgatgagtatcgtgctgcgagaaaaccaccagaaacctgagctggtggacatagttattgaagagttttcaacactaattgtgcagcgccccggggctcaggctataaaatttgagacgaaaattgattcctttcacatcaccggccttcccgacaactccgagaaaccccggctgctatccagtctggacgatgccatgagtttatttcagattacctttgaaataaaccctctagatgaaaccgtctcacagcgatgtattattgaagcggaaccgttggaaatcatttatgatgcaagaaccgtgaactccatcgtagagttctttcgccccccaaaagaagtccatctggcacagctcaccgcagcaaccttgacaaagcttgaggagtttcggtcaaagactgctacgggtctgctgtacatcattgagacccagaaggtgttggacttgaaaatcaatctgaaggcctcctacataatcgtaccgcaggacggcatcttctcccccacaagcaatctactactgctcgaccttggccatctgaaggtaactagtaaatcgcggagcgagttgcctgatgtcaaacagggagaagccaatctgaaagaaataatggatcgcgcttatgactcattcgacattcaattgacaagcgtccagctgctgtattcccgggtgggcgataattggcgggaggctagaaagctgtcggtcagcacgcagcatattcttgtccctatgcacttcaaccttgaactgtcaaaagcgatggttttcatggatgtgcggatgcccaagtttaaaatttacggaaaactgcccctcatcagcttgcggatctccgacaaaaagctccaggggatcatggagctgatcgagagtattcccaagcccgaacccgtcacggaggtgagtgctcccgtgaagagtttccagattcagacatccacctctctgggaacaagccagatcagccaaaagattattccgctgctggagctgccctcagttagcgaagatgattcagaggaggaattcttcgatgcaccgtgctctcccttagaagagcccctgcagttcccaaccggtgtgaagtccatacggacgagaaaacttcagaagcaggattgtagcgtcaatatgaccactttcaaaattagattcgaggtgcccaaagtgttgattgagttctaccatctggtaggtgactgtgagcttagtgtcgtcgaaatattggtgctcggccttggagcagagatcgagatacgcacctacgaccttaaggccaatgcctttctcaaagagttttgccttaagtgccctgagtatctcgacgaaaacaagaagcctgtatatctcgtgacaaccttggataatacaatggaagacttactcacactggaatacgtgaaagcggagaaaaatgtgccagacctgaagtcaacctacaataatgttctgcaactgataaaagtgaatttctcttcccttgacatccatcttcacacggaggcactcctgaataccatcaactacctccataatatactgccccaatcagaggagaagagtgcccccgtatccacgaccgaaaccgaagacaaaggagatgtgattaaaaagttggcgttgaagctcagtactaatgaagatatcataaccctacaaattctggccgagctatcctgtctccagatcttcatccaggatcaaaagtgtaacatctctgagataaaaattgaaggtctcgattctgaaatgatcatgaggccaagcgaaacagagattaacgccaagttgagaaatatcattgtgctggatagcgacatcaccgccatatacaaaaaggccgtgtacatcacggggaaagaagtgttctccttcaagatggttagctatatggacgccaccgcaggcagcgcgtacacggatatgaatgtcgtcgatatccaagttaacttgatcgtaggctgtatcgaagtggtgttcgtcacaaagtttttgtatagcattcttgccttcatagataacttccaagcagccaaacaggctctcgctgaagcaaccgtccaagccgctgggatggcagcgactggggtgaaagaactcgcccagagatcaagtcgcatggctctcgatatcaacataaaagctccggtggtggtgatcccccagagccctgtctctgagaatgtctttgtggctgattttggccttatcacaatgaccaacacattccacatgatcacagagtcccagtcttccccgccacccgtgatcgacctcatcacaatcaagctctctgagatgcgcttataccggtctcgtttcatcaatgacgcttatcaagaagttctcgacctacttttgccacttaacctggaagtggttgtggagcgaaatctgtgttgggaatggtaccaagaggttccatgtttcaatgtcaatgctcaactaaagcccatggaatttattctgtctcaggaagacataacaaccatcttcaaaaccctgcatggaaacatctggtacgagaaggatggaagcgccagccctgccgtaaccaaggaccagtacagtgccaccagtggcgtgacaaccaacgcctcacatcattcgggaggcgccactgtggtgacggccgctgttgttgaggtgcacagccgcgccttacttgtcaagaccaccttgaatatctcctttaaaactgacgacctgacaatggtgctctacagcccaggccccaaacaggcctcttttactgatgtgcgcgacccatctctgaagcttgctgaattcaagttggaaaatatcatttctacattaaagatgtatacggatgggtctaccttcagtagcttctccctaaaaaattgcatactggatgacaagaggccacatgtgaagaaggctaccccccgcatgattggcctgacagtagggtttgataagaaggatatgatggatatcaagtaccggaaagtgcgtgatggctgcgtgacagatgccgtgtttcaagaaatgtacatttgcgcttctgtggagtttttgcagaccgtggctaatgtgttcttagaggcgtatacgaccggaaccgcagtggaaacaagcgtccagacttggacagcaaaagaggaggtgcctactcaggaatcagtgaaatgggagatcaacgtgatcattaaaaaccctgaaatcgtattcgttgctgacatgacaaaaaatgacgcaccagctctggtgatcaccacccagtgtgagatctgttataagggtaacctggagaatagtaccatgacagcagccatcaaagacctccaggttcgggcctgtccttttctgcctgtaaaaagaaaaggcaagatcaccacagtcctgcaaccgtgcgacctgttttaccaaaccacacagaaggggaccgatccccaggtcatcgatatgtctgtaaagtctctcactctcaaggtgagtccagtcattatcaacacaatgattaccataacatcagctctctatacaaccaaggagacaatccctgaggagactgcctctagcacggcgcacctttgggagaaaaaggacaccaagaccctcaagatgtggttcctcgaggagtccaatgaaactgagaagatcgcgccaaccaccgaactcgtgcccaagggcgagatgattaaaatgaatatcgactcaatattcatcgtgttagaagccggaatcggacaccggactgttcccatgctcctcgcgaagtctcggttcagtggtgaagggaagaattggtccagcctgatcaacctgcattgtcagcttgagttggaggttcattactacaacgaaatgtttggcgtttgggagccattgctggaacctctggagatagaccagacagaagatttcagaccatggaacctgggcatcaagatgaaaaagaaagccaagatggccatagttgaaagcgacccagaggaagagaactataaagtccctgaatataagacagtgatcagtttccactcgaaagatcaactgaacattaccctttcaaaatgcggtttagttatgcttaacaacctcgtgaaagcgtttacagaggccgctacaggatcatccgccgatttcgtcaaggatttggcgccctttatgattctgaattcacttggccttactatttccgtgtcacctagcgacagtttcagtgtactcaatattcccatggcgaagagttatgtgcttaagaatggcgaatctctgagtatggactacatccggactaaggataacgatcactttaacgcaatgacttctttgagcagcaagctgttcttcattctgttaactccagtgaaccacagtaccgcagataaaatcccactcactaaagttgggagacgtctgtacaccgtgcggcacagagaaagcggcgtcgagagatccatagtatgtcagattgacactgtggaagggtctaaaaaggtcaccatccggtctccagtccagatccgaaaccacttcagcgtacctctgagtgtctacgagggtgacacacttttaggtacggcaagcccagaaaatgagtttaacataccactcggctcatataggtcttttatattccttaaacccgaagacgaaaattatcaaatgtgtgaaggcatcgacttcgaggagatcatcaagaatgatggtgccttgctgaagaagaagtgtagatctaaaaacccaagcaaggagtcctttctcattaacatcgttcctgagaaagataacttaacctcccttagtgtgtacagcgaggacggctgggaccttccatacatcatgcacctttggcccccaatcctgctccgcaatctcctcccctacaaaatcgcatactatattgaagggattgagaattccgtgttcacactttccgaaggccacagcgcccaaatatgtacagcacagctcggcaaggcgcggctacacttaaagttgcttgattatctgaaccacgactggaagtcagaatatcatataaagccgaaccagcaagatatcagcttcgtaagttttacatgcgttactgaaatggagaagaccgacttggatatcgccgtgcatatgacctataatacggggcagaccgtggtggcctttcactctccctattggatggtgaacaagaccggaagaatgctccagtataaggccgacggaatccaccggaaacatccacctaattataaaaagcctgtattattttcatttcaaccaaaccacttttttaataataacaaagtacagctgatggtgacagattcggaactgagcaaccagttctctatcgatactgtgggctcccatggcgcagttaagtgcaaaggcctcaagatggattatcaagttggtgtcactatcgacctttcttcctttaacattacgcgcatcgtgacgttcaccccattctatatgattaagaacaagagcaagtaccacatcagtgtggccgaagagggaaacgataaatggttatctctggatctcgaacagtgcattccattctggcccgagtacgccagcagcaaactgctgatccaggtcgaaagaagtgaagacccgccaaaacgcatatacttcaacaaacaggaaaactgcatccttctcaggctggacaatgagttggggggaataatcgctgaggtaaacctcgcagagcatagtacagtgatcacctttctggattaccatgatggtgcagctacattcctcctcatcaatcacaccaagaacgagctcgtgcaatacaatcagagcagtcttagtgagatcgaggactcactgcccccgggaaaggccgtgttttatacatgggccgatcccgttggtagtagacgtctgaagtggcgatgccgtaagtcccatggggaagttacacagaaagacgacatgatgatgcccatcgacctgggcgaaaagactatctatttggtgtctttctttgaggggctccaaaggattattctttttacagaagatcctcgagtgtttaaggtgacctatgagtctgaaaaagctgaactcgccgaacaggagatcgccgtagcccttcaggacgtgggcattagtctggtcaacaactatacaaagcaggaggtggcctacatcgggatcacctctagcgacgtagtgtgggagacaaaacccaagaaaaaagcacggtggaaacctatgagcgtaaagcataccgagaagttggagagagaatttaaggagtatactgaatccagcccctctgaagacaaggttattcagctggacactaatgtccctgtgcgtcttacccccactggtcacaatatgaagatcttacagccacacgtgatagccttgaggcggaactacctgccggctctgaaggtcgaatacaacacaagcgcacaccagtcctccttcagaatccagatctaccgtatccagatccagaatcagatccatggcgctgttttcccctttgtgttctaccccgtcaaacctcctaagtccgttaccatggatagtgcgcccaagccctttacagacgttagcatcgtcatgaggagtgctgggcattcccaaatcagcaggataaagtattttaaagtgcttattcaggagatggaccttagactggatcttggcttcatctatgccttgaccgacctaatgacagaggccgaagttacggagaatacagaagtggagctttttcataaggatattgaagcttttaaagaggagtacaagaccgcctctctggttgaccagtctcaggtgtctctgtacgagtatttccatatctcacccatcaaactgcacctttcggtctcgctttcttctggaagagaggaggcaaaggactctaagcagaacggcggcctgattcctgtgcattcattaaatcttttactgaaaagcatcggggccacgctcacagatgtccaggacgtggttttcaaattggcttttttcgagctcaattaccagttccacacgacttcagaccttcagagcgaagttattcggcattacagcaagcaggctattaagcagatgtacgttctcatcctcgggctggacgttttgggcaatccatttggacttatccgcgagttttccgagggggtggaggcatttttttacgagccttatcagggtgcaatccagggccctgaggagtttgtggagggtatggctctgggtctgaaggctctggtgggaggggcagtggggggtcttgctggcgctgcatcaaagattaccggcgccatggcaaagggagttgcggcgatgacaatggacgaggattaccagcagaaaaggcgcgaagcaatgaacaagcagccagccggttttagggagggcattactcggggcggcaagggcctcgtaagtggcttcgtctcaggtatcaccggtatcgtgacaaaaccaattaaaggagcccagaaagggggcgcagcaggttttttcaaaggggtaggaaagggtctggtgggagctgttgcaaggcccacggggggaataatcgatatggcctccagtacatttcagggcatcaaacgggccacagagaccagcgaggtggagtcattgaggccaccgcggttcttcaacgaggacggagtgattcgaccttacagactgcgagatgggaccggcaaccagatgctccaggcctctaagtccctcatttag

SEQ ID NO: 17908 - DNA, 9408 bp, synthetic construct
  misc_feature 1..9408: note = Description of Artificial Sequence: Synthetic coding sequence
  source 1..9408: mol_type = other DNA
atggtgttcgagagtgtggttgttgacgttctaaacaggtttctgggagactacgtagttgatttggatacttcccagctgtcactgggaatttggaaaggtgccgtggctctgaagaatctgcagatcaaggaaaatgccctcagccagctggacgtgccctttaaagtcaaagtggggcacatcggcaatttgaaactcatcataccctggaaaaacctgtacacccaaccagtcgaggcagtcctggaagagatctatctcttgatcgtgccgtcaagtcgtattaagtacgatcctctgaaggaagaaaaacagctgatggaggctaagcagcaggagctaaagcgaattgaagaagcgaaacagaaggtcgtcgatcaggagcagcacctccccgagaaacaggacacctttgctgagaagcttgttacccagatcatcaagaacctgcaggtaaaaatttcctccatacatatccgctacgaggatgatattaccaatcgtgataaacctctcagcttcggtatcagcttacaaaacctgagtatgcagacgaccgatcaatactgggtgccatgtctacatgacgaaaccgagaagctggtgaggaaactaatccgcttagacaacctgttcgcctattggaacgtcaaatcccagatgttttacctctctgattatgataacagtctggacgatttgaagaacggaatagtgaacgagaatatcgtccccgaagggtacgactttgtgtttaggccgatttctgctaatgcgaagctggttatgaacagaaggtctgattttgacttctcagccccaaagatcaacctggaaatcgaattacataatattgccattgagtttaacaagccccagtacttttcaatcatggagctgttggaaagcgttgatatgatggctcaaaatctgccctatcggaaattcaagccagatgtccccctgcatcaccatgcccgtgagtggtgggcctatgcaatacacggtgtcctggaggtcaatgtatgtcctcgtctgtggatgtggagctggaagcacatccggaagcatcgccagaaggtaaagcagtacaaggagctatataagaaaaagctaacatcgaagaagcctcccggagaactgctcgtctctttagaggagctggagaagactctggacgtgttcaatattacgatcgctcgacagacagccgaggtggaagtgaaaaaagcagggtataaaatttacaaggaaggcgtcaaagacccggaagataacaaagggtggttctcttggttgtggtcatggagtgagcagaacacaaatgagcagcaacccgacgttcagcctgagaccttggaagaaatgctgacacccgaggaaaaggcgctgctgtacgaggctattgggtattctgagactgctgtcgaccctaccctgctgaaaacttttgaagcattgaaattttttgtccacctcaaatctatgagcattgtgctgagagaaaaccaccaaaagcccgagctggtagacatagttattgaggaattttcgaccttaatcgttcagaggcctggcgcccaagccataaaattcgagacaaaaatcgactcatttcatatcacaggtctgccagataattccgaaaagccgcgtttgctgagttctctggacgacgcaatgtcactgttccagataacctttgaaatcaacccccttgatgagaccgtgtctcagcgatgtatcatagaggccgaacccctcgaaatcatctatgatgctagaaccgttaatagcatcgtggagttcttcagacctccaaaagaggtccatcttgcgcagttgaccgctgcaactttaacaaagctcgaagaatttcgatccaagaccgctacaggcctgctttatatcatagaaacccagaaagtccttgacttgaaaattaacctgaaggcttcttacatcatagtgcctcaagatgggattttcagtcctactagcaacctcctgctgttagacctgggccatttgaaggtcacgtctaagagccggtcagagttacctgatgtgaaacagggagaggcgaaccttaaagaaattatggacagggcatatgatagtttcgatattcagctgacctccgtacagttgctctactccagagtgggtgataattggcgagaagcccgaaagctctcggtttccacgcagcacatcctcgtcccaatgcacttcaacctcgagcttagcaaggccatggtcttcatggacgttaggatgccgaaatttaaaatttacggaaagctgccactgattagcttacggatttctgacaagaagctgcagggcattatggagctgatcgaatccatcccgaaaccagagccagttacagaagtgagcgcccctgtaaaatcctttcagatacagacttccacatcattaggtactagccagatatcccagaagataattcccttgctggagctgccttctgtttcagaagatgactctgaagaagaatttttcgatgccccatgttctcccttggaggagcccctgcagttcccaacaggtgttaagtctattcgcacacggaagctgcaaaagcaggattgctcggtcaacatgacaacattcaagatccggtttgaggttccaaaagtgctcatcgaattttatcaccttgtcggcgactgcgagctcagtgtggttgagattctggtgcttggacttggtgctgagatcgaaatcagaacatacgacctgaaagctaacgcttttctgaaagagttctgccttaaatgtcctgagtacctggacgaaaataagaaacctgtttatctggtgaccacattagataataccatggaagatctgctgacactcgagtatgttaaagccgaaaaaaacgtgccggatttgaagtctacatacaataatgtgttacagttaatcaaggtgaatttttcttctctcgacattcacctgcatactgaagccttactgaataccatcaattacctccataacattttaccacagagtgaggaaaagtccgcacccgtatccaccactgagaccgaggataaaggtgacgtgattaaaaagcttggcctggacagcgaaatgattatgcggccatccgagactgaaataaacgccaaactacgaaatattatagtccttgacagcgacattacagccatttataaaaaggccgtctatatcacgggcaaggaagtcttctccttcaagatggtgagttatatggacgctacggccggctcagcatacacggacatgaatgtggtggatatccaggttaatctaattgttggatgtattgaggttgtattcgtgactaagttcttatactctatactggcattcattgataacttccaggccgccaagcaggccctggcagaagccacagtccaggcagcaggaatggctgccaccggcgtcaaggagctggcccagaggtcctcaagaatggctcttgatatcaacatcaaggctccggtagtagtgatacctcagtctccagttagcgagaatgtgtttgtggccgactttggcctgatcacgatgacgaatacttttcacatgattactgagagccagtccagtcctccaccggtgatcgaccttattacaataaaattaagcgaaatgcgactttaccggagtcgatttattaatgatgcctaccaagaagtcttggatttactccttcctttgaatcttgaagtcgtggtggagagaaatctgtgctgggaatggtaccaagaggttccgtgtttcaatgtgaatgcacagttaaaaccgatggagtttatactatctcaggaggacatcactacaattttcaagacattacacggaaacatttggtacgagaaggatggctccgcctctcctgcagtgacaaaagaccagtatagcgccacttcaggggtgacaaccaatgcctctcatcactctggcggagccactgtcgtcaccgcagctgtcgtcgaagtgcattcccgagcactcctggttaagactaccctaaatatctctttcaagactgacgatctgactatggttttgtattcgcctggccccaagcaggctagcttcacagatgtacgggatccttccttaaaattagccgagtttaaactggaaaacatcataagcaccctgaaaatgtacactgacggaagtacattcagttctttttcccttaagaactgtatcctcgacgacaagcgcccccacgttaagaaggctacgcctaggatgattggactgaccgtcggctttgacaagaaggacatgatggatataaagtataggaaagtccgcgatgggtgtgtgacagacgcagtatttcaagaaatgtacatttgcgctagtgtcgaattcctgcagactgtggctaatgtttttctggaagcctacacaaccggtacggccgtggaaacgagcgtacagacttggactgctaaagaggaggtaccaacccaagaatcagtgaaatgggagataaatgttattattaagaacccagagatagtctttgtagctgacatgaccaagaacgacgcgcctgctttagtcatcactactcaatgtgagatttgttataaggggaatcttgagaatagcaccatgacagctgctataaaagacttacaggtcagagcctgtccctttctgcctgttaagcgtaaagggaagatcaccactgtcttgcagccatgtgatcttttttatcaaactacccagaaggggacggatcctcaggttattgatatgagtgttaagtcgctgacattaaaagtttcccctgtgattatcaataccatgataaccataacctcagcattgtataccaccaaagagacaattccagaagaaaccgccagcagtacagctcatctgtgggagaagaaagatactaaaactctgaaaatgtggttcttggaggaaagcaatgaaacggagaagattgccccgaccacggaactagtgcctaagggagaaatgataaagatgaacatagacagtatctttattgtgctcgaggccggaattggtcacaggacagtccctatgcttttggcaaagtccaggttcagtggcgagggaaagaattggagcagcttgattaacctccattgtcagctggagctggaggtgcattattacaatgaaatgtttggcgtgtgggagccccttctggaaccactcgagattgatcagaccgaggactttcgcccatggaacttaggtatcaagatgaaaaagaaggcaaagatggccattgtcgaatccgatcctgaagaagagaactacaaggttcctgagtataagaccgtcatatcattccattcaaaggatcaactgaacattactctgtctaaatgtggcttggttatgctaaataatctggttaaagcttttactgaggcagccacagggagcagcgcagacttcgtgaaggacctcgctccttttatgatcctcaattccttgggccttaccattagcgtctcaccttctgacagcttctccgtgctgaacatcccgatggccaaatcttatgtgctgaaaaacggggagtctttgtccatggattacattaggactaaagacaacgatcacttcaacgcaatgaccagtttaagctcaaaactgttcttcattctattgactccagtgaaccactccacagccgataagattcccctgaccaaagtaggcagacgcctatacaccgtgcggcatcgcgagtccggtgtggagcggtctattgtttgtcaaattgataccgtggaaggatcaaagaaggtgacaatccggagccctgtgcaaataagaaatcacttttcagtgccactctctgtgtatgaaggggacacgcttttggggaccgccagtcccgaaaatgagttcaatataccactgggatcttatcggagctttatctttcttaagccagaagacgaaaactatcagatgtgtgaagggatagactttgaggagattatcaagaacgatggggctctcctcaaaaagaaatgccggtcaaaaaacccatctaaggagtctttcttgataaacattgttccggagaaggacaacctgacctccctttcagtatacagtgaggatgggtgggacctcccctacatcatgcatctttggccgccaatccttctgagaaaccttctgccttacaagattgcctactacatcgaagggatcgagaatagcgtgttcactttgtcagagggtcattccgcccagatctgcaccgctcaactgggtaaagcccgcctccacttgaagctgctagattatctcaatcatgattggaagtccgaataccacatcaaaccaaaccagcaggacatctcatttgtgtcttttacttgtgtgactgagatggaaaagacggacctggatatcgctgtccacatgacctacaacacaggccagaccgtagtcgccttccatagcccttactggatggtaaacaagactggacggatgcttcagtacaaagcggacggaatccaccggaagcatccccctaactataagaaacctgtgctgttctctttccagcctaatcactttttcaacaataataaagtgcaactgatggttacggacagcgaacttagtaatcaattttcgattgacactgtggggtcacatggcgctgtaaaatgtaagggtctgaagatggactaccaggtgggtgtgacgattgatcttagttccttcaacattacgcggatcgtcactttcacacccttctatatgataaagaataagagcaaataccatatttcagtggccgaagaggggaacgacaaatggttgagcctggacctcgaacaatgcattcctttctggcccgaatacgcatcctctaagctgctgatccaagtggagagaagtgaagacccacctaagagaatttacttcaataaacaggaaaactgcatcctcctgcgactggataatgaactggggggcatcatagcagaggttaacctggcagaacattctactgtcattaccttcctggactaccacgatggggccgcgacttttctgctgattaaccatactaagaatgaactcgtccagtacaaccagtcatctttgagcgagatcgaagactcattacctccgggcaaggcagttttttatacttgggccgatccagttgggtctcgcaggctgaagtggcgatgtcgcaagtcccacggcgaggtgactcagaaagacgatatgatgatgcccatcgacctgggcgaaaagaccatttatttagtgagcttctttgaaggcctgcagagaatcatcctgtttactgaggacccacgcgtctttaaggtaacctacgagagcgagaaagccgagttggctgagcaggaaatcgccgtagccttacaggacgttggaatcagccttgtcaacaactataccaaacaagaagtggcttatatcggcattaccagctcggatgttgtatgggagacgaagcctaagaagaaagcgaggtggaagccaatgtcagtcaagcacaccgagaaactggagcgtgagtttaaggagtacactgagtctagcccgtccgaagacaaagttatacagctggatactaatgtacccgtccggcttacccccacaggccacaacatgaaaatcctgcagccacacgtgattgcgttgcggcgcaactatctgcctgccctcaaggtcgaatacaatacaagcgcgcatcagagctcattccgaatccagatttatcggattcagattcagaatcagattcatggggctgtgttcccctttgtgttttacccggtaaaacctccaaaatcagtgacgatggactccgcccccaagccgttcactgatgtttccattgtaatgaggagtgccggacactcacagattagtagaattaagtattttaaagtgttgattcaggagatggatttgagactcgatctcggctttatttacgccctgacagacctcatgacagaggcggaagtgacagaaaacacagaggtagagctctttcacaaggatatcgaggcattcaaagaggagtataagactgcctccttggtggatcaatcccaggtgagtctttacgaatatttccacattagcccaatcaagttgcacctaagcgtgagtttgtcaagtggccgcgaggaagccaaagatagcaagcagaacggcggcttgatccccgtgcatagccttaacctgcttctgaagtccatcggcgcaaccctgaccgacgttcaggatgtggtctttaagttagctttcttcgaacttaactatcaatttcacactacctctgatctccagtctgaagttattcggcactactctaaacaggccatcaagcagatgtacgtgctaatcctggggctggacgtcctggggaaccccttcggattaattcgcgagttcagcgaaggggtggaagcgtttttttacgaaccatatcaaggtgcaatacagggcccagaagaatttgtcgagggcatggcattggggctaaaggcactagtgggcggcgccgtgggcggccttgcaggtgcagcctccaaaatcaccggggccatggctaagggggtcgcggccatgactatggacgaggattaccaacaaaaacgacgggaggcgatgaacaagcagcctgccgggttccgagagggaattacccgggggggcaaagggctggtgagcggcttcgtctcaggaattaccggcatcgtgaccaagccgatcaaaggcgctcaaaaagggggagctgctggattctttaaaggcgtgggtaagggcctcgtgggggctgtcgcacgcccaaccggcggcatcatagacatggctagttccacattccaggggatcaaacgggcaaccgagacaagcgaggtggagtcacttagacccccgcgcttctttaacgaagatggggtcatcagaccttatcgtctgcgagatggtactggcaatcagatgctgcaggtgatggagaacggcagatttgctaaatacaagtacttcactcacgtaatgataaacaagaccgacatgttgatgattaccagacggggtgtgctgttcgttactaaaggcacatttggccagctgacatgtgagtggcagtattccttcgacgaattcacaaaagagccctttatcgttcatggtcgacggctgcggatcgaggcaaaggagcgcgtgaaatctgttttccacgctcgagagttcggaaagattatcaactttaagacaccagaagatgctcgatggattctgaccaagctgcaagaagcccgcgagcccagcccctccctctag

SEQ ID NO: 17909 - DNA, 1317 bp, synthetic construct
  misc_feature 1..1317: note = Description of Artificial Sequence: Synthetic coding sequence
  source 1..1317: mol_type = other DNA
atgaacgaagtgtccgtgatcaaagagggctggctgcataaacgcggcgagtatatcaagacatggcgccccaggtacttcttgcttaagtcggatgggtcttttattggatacaaggaacgtcctgaagcccctgaccagactctgccccctctgaataatttttccgtcgctgaatgtcaactgatgaaaaccgaacgcccccgaccgaatacttttgtgatacggtgtctgcaatggacaacagttatagagcggacatttcacgtggactcacccgatgaaagggaggagtggatgcgagccatccaaatggtggccaacagcttgaagcagagagctcctggtgaggacccgatggattataaatgtggttcccccagtgattcatctacaaccgaagagatggaggtcgccgtgtctaaagcccgggcaaaggtaaccatgaatgattttgattatcttaaacttctgggtaaaggcactttcgggaaggtaatcctggtccgggagaaggctaccggtaggtattacgcaatgaagattcttcgcaaggaagtgatcatcgccaaagacgaggtagcgcacacagtgaccgaatccagggttctccagaatacacgccatccctttctgactgccctgaagtatgcctttcagacacatgatagattgtgctttgtcatggagtacgccaatggaggcgagctcttcttccatctgagtagggaacgggttttcaccgaggaacgagctcgcttttacggcgcggaaatcgtgagcgcactggagtacttgcattctagggatgtggtttatagagacataaaggtgctagaggataacgattatggaagagcggttgactggtggggtctcggtgtagtgatgtatgagatgatgtgcggccgcctgcctttctacaaccaggaccacgagcgcctgttcgaactgatccttatggaggaaattagatttccaaggaccctctcccccgaggctaagagcttactggctgggcttttgaaaaaggaccctaagcaacgtctggggggtgggccgagcgacgccaaagaagtcatggaacatagattcttccttagcatcaactggcaggacgtggtgcaaaagaagttgctacccccttttaagccccaggtcacctccgaggttgacacccgctactttgacgatgagttcactgcacagagtattacgatcacacccccagaccgctacgactccctcggccttctggaattggaccaacgtacccattttccccaattttcctatagcgccagtatcagagaatag

SEQ ID NO: 17910 - DNA, 444 bp, synthetic construct
  misc_feature 1..444: note = Description of Artificial Sequence: Synthetic coding sequence
  source 1..444: mol_type = other DNA
atgcgctgtctgtcatccaagaaagctggttcaaccagcgtggtgaaatatatcaaaacctggagaccacggtacttccttcttaaaagtgatgggtccttcattggttacaaagagcgacccgaagcacctgaccagacacttcccccactaaacaactttagtgtggcagagtgccagctgatgaagacggaacgaccacgaccaaacactttcgttataaggtgcctgcaatggacgactgtgatcgaacgcacctttcatgtggattccccagatgaaagggaagagtggatgcgcgctattcagatggttgcaaactcactccagccacatctgtgcgctcaaacacggatctggaaaaccccccctccagcccaggcctgggcagtaggcaggctggagatccaagtcctaatccacacatctccttctgagggatag

SEQ ID NO: 17911 - DNA, 1149 bp, synthetic construct
  misc_feature 1..1149: note = Description of Artificial Sequence: Synthetic coding sequence
  source 1..1149: mol_type = other DNA
atgagagccatccagatggtcgctaattcattaaaacagcgcgctcctggggaggaccctatggattataaatgcggatcacccagcgactcttcgaccaccgaggagatggaggtcgccgtctctaaggctcgggccaaagtcaccatgaacgattttgactacctcaagctgctggggaagggtactttcggaaaagtgattcttgtgagagagaaagccaccgggcgctactacgccatgaagattttacgaaaggaagtgattatcgcaaaagacgaggtggcccacaccgtgaccgaaagccgcgttcttcaaaacacacgtcatccatttcttacagcccttaagtacgctttccagacacatgatagactctgttttgtgatggaatacgccaatgggggtgaactgttctttcatctgtcacgggaaagagtctttactgaagaacgcgctagattttacggcgctgaaatcgttagcgccttggagtacctccactccagagacgttgtctaccgcgacattaagcttgagaaccttatgttggacaaggatgggcacatcaaaattacagatttcggtctgtgtaaggagggcatttccgatggcgctactatgaagaccttctgcggtacaccagaatatctagcgcctgaggtgctggaggacaatgattatgggcgggcagtggactggtggggcctgggagtggtaatgtatgagatgatgtgcggccgacttcccttttacaatcaggaccacgaaaggttgtttgaactcatcctaatggaggaaattcgatttcctcgtaccctctcaccagaagcgaagtcattgttggcgggcttgctcaaaaaagaccccaagcagcgattaggcggcggaccctctgatgccaaggaggtgatggagcaccggttctttctgtctattaactggcaggacgtcgtccagaaaaaactactgccgcctttcaaaccacaggtaaccagtgaggtggacactaggtactttgacgatgaattcactgcccaaagcatcactatcacgccccccgaccgctatgactcacttggcttattagagttagaccagcgaacccactttccccaattctcatattccgcgtcgataagagaatag

SEQ ID NO: 17912 - DNA, 402 bp, synthetic construct
  misc_feature 1..402: note = Description of Artificial Sequence: Synthetic coding sequence
  source 1..402: mol_type = other DNA
atgaatgaggtttctgtgatcaaagaggggtggctccacaaacgcggggaatatattaagacctggcgaccgcgttactttttgttaaaaagtgacgggtcttttatcggctataaggagagacccgaggcacctgatcagacccttccgccgctgaataacttttctgttgcagaatgccagttaatgaagactgagcggccccgaccgaatactttcgtaatccgatgcctgcagtggactacagtcatcgagcgaacctttcatgtggatagcccagacgagcgcgaggagtggatgcgcgctatccaaatggtggctaactcactgaagcagagggctcctggggaggatcctatggactataaatgcggaagtccgtcagacagcagcacgacctag

SEQ ID NO: 17913 - DNA, 1446 bp, synthetic construct
  misc_feature 1..1446: note = Description of Artificial Sequence: Synthetic coding sequence
  source 1..1446: mol_type = other DNA
atgaacgaggttagcgtaatcaaagaaggatggctgcacaaacgcggcgaatacataaaaacctggcgaccacggtacttcttgctgaaatcggatgggtcattcatcggatataaggaacgacctgaggccccggatcagactctgcccccattgaataatttctcggtcgccgagtgtcagctgatgaaaaccgagcgcccccgacccaacacttttgttattcggtgcctgcagtggactactgtcatcgagcgaaccttccacgttgattcgcccgacgagagagaggaatggatgcgcgcaatacagatggtcgccaactctctgaaacagagagctccaggggaggaccccatggactacaagtgcgggagtccttcggactcgagcacgacagaagagatggaggtggcagtcagtaaagcgagggcaaaagtgaccatgaatgattttgattacctgaagctactgggaaaaggaacttttgggaaggtgatactagtccgcgaaaaagctaccggacgctattacgcaatgaaaattcttagaaaagaggtgattattgctaaggacgaagtggcccacacagtgacagaatccagggttctgcagaatacccggcacccattcctcacggccttaaagtacgctttccaaactcacgacagactgtgttttgtgatggaatatgccaacggcggagaattgttttttcatctgagtagggagcgggtgtttactgaggaacgggcgagattttatggcgcggaaattgtgtccgcactggagtatctgcattccagggacgtagtgtacagggatatcaagttggagaatttaatgctggataaagatggccatattaaaattacggactttggactctgcaaggagggaatatctgacggtgcaaccatgaaaaccttttgtggcactcccgagtacctggctccagaggttctggaggataatgactatggacgagctgttgattggtgggggctcggagtggtaatgtacgaaatgatgtgtggtcggttgcctttttacaatcaggaccacgagcgcctcttcgaactcatactcatggaggaaattcgattcccccggaccctgagcccagaggcgaaaagcctgctggccggacttcttaagaaggaccctaagcagcgactcggcggcggcccgtctgatgccaaggaagtgatggaacatcgcttcttcctgagcataaattggcaagatgttgttcagaaaaagctgctgccaccttttaagccccaagtaacttccgaggtcgacaccaggtactttgatgacgagttcaccgcccagtcgatcacgattacgcctcccgaccgttacgatagtctcggcctgctggaacttgaccagcggactcactttcctcaattctcctattcagcctctatcagagagtag

SEQ ID NO: 17914 - DNA, 402 bp, synthetic construct
  misc_feature 1..402: note = Description of Artificial Sequence: Synthetic coding sequence
  source 1..402: mol_type = other DNA
atgaatgaggtctccgtcataaaggagggctggctgcacaaacggggggaatacataaagacctggagaccccgctattttttgctgaaaagtgacggctcatttatcggctataaggaacgcccagaggctccggaccagacattgccccccctgaacaacttcagcgttgcagaatgccagctcatgaaaacagaaaggcccaggcccaacacttttgtgattcggtgtcttcagtggacgactgtgatcgagcgcacattccacgtcgatagtccagatgagagggaggagtggatgagagcaatccagatggttgcgaatagcctaaagcaaagagctcctggtgaggatccgatggattacaaatgtggctcccccagcgattcttctaccacctag

SEQ ID NO: 17915 - DNA, 291 bp, synthetic construct
  misc_feature 1..291: note = Description of Artificial Sequence: Synthetic coding sequence
  source 1..291: mol_type = other DNA
atgaatgaggtgtcagtgattaaggaagggtggctgcacaaaaggggggaatatatcaagacctggagaccaagatattttctcctgaagtcggatggctcgttcataggctacaaagaacgtccagaagccccggaccagaccctcccacccctcaacaattttagcgtggccgagtgtcagcttatgaagacagagaggcccaggcccaacacattcgtgattagatgcctgcaatggacaacagtgattgaaaggaccttccatgtagacagccccgacgaaagatag

SEQ ID NO: 17916 - DNA, 360 bp, synthetic construct
  misc_feature 1..360: note = Description of Artificial Sequence: Synthetic coding sequence
  source 1..360: mol_type = other DNA
atgaatgaggtgagcgtgatcaaagagggctggctgcacaaacggggtgaatacataaagacttggagaccgcggtatttcctgttaaagtccgacggcagctttataggttacaaggaaaggcccgaggcaccagatcagacactgcctccacttaacaacttttcagtggcagagtgtcaactgatgaaaacagagcggccccgacctaataccttcgtcatcaggtgcctccagtggactaccgtgatagagcgcacgttccacgttgatagtccagacgagcgggaggagtggatgcgcgccatccagatggtggcaaactcattgaagcagagggcccctggcgaagacccgtag

SEQ ID NO: 17917 - DNA, 1446 bp, synthetic construct
  misc_feature 1..1446: note = Description of Artificial Sequence: Synthetic coding sequence
  source 1..1446: mol_type = other DNA
atgaatgaggtgtccgtgatcaaagaaggttggctacacaagcgcggggagtatatcaaaacttggcggccaaggtacttccttctgaaatctgatggtagtttcattgggtacaaggagaggcccgaggcccccgatcagactctgcctccgctcaataacttctctgtcgccgaatgtcagctcatgaagaccgaacggcctcgcccgaatactttcgttatccgttgtctacaatggaccactgtgattgagcggacgttccatgtagactcacccgatgagcgcgaagagtggatgagagccatccaaatggtcgccaatagtctgaaacagcgagcacctggcgaagatcctatggactataagtgcggatccccctccgatagcagcaccactgaggaaatggaggttgccgtcagcaaagctagggcaaaggtcaccatgaatgatttcgattatctaaagctgcttggaaagggaacattcggtaaagtgatcttagtccgggagaaggcaacaggcagatattatgctatgaagatccttaggaaagaggtgattatcgccaaggatgaagttgcccacacagtgacagaaagtagggtactgcagaacactcgacatccgttcctcaccgccttgaagtacgctttccagactcatgaccggctttgctttgtgatggagtacgcgaacggaggcgaacttttcttccacctgtctcgcgagcgggtgttcactgaggagagagccaggttctacggagcggaaatcgttagcgcactggagtatttacacagcagggatgtggtttacagagatatcaaactggagaatcttatgttagataaagatggccatatcaagatcacggactttgggctctgcaaagaaggcatatctgatggcgccacaatgaaaactttctgtggtacgcctgaatatttagcgcccgaagtgctcgaggacaacgattacgggagagccgtggactggtggggcctcggcgtggtcatgtacgaaatgatgtgcggacgtctccccttctataaccaggatcacgagagactgtttgaacttatactaatggaagagattcgctttccgaggacactctccccagaggccaaatccctccttgctggactgctgaaaaaggaccccaaacaaaggttaggtggaggcccctcagacgcaaaagaggttatggagcacaggttcttcctgtcaattaattggcaggacgtggtccagaagaaactcttgccaccctttaaaccccaggtgaccagcgaggtggatacacgatacttcgacgacgagtttacggctcagagcatcacgattactcccccagacagatacgacagccttgggcttttagagctcgaccagaggacacacttccctcagttcagctacagtgcttctataagggagtag

SEQ ID NO: 17918 - DNA, 204 bp, synthetic construct
  misc_feature 1..204: note = Description of Artificial Sequence: Synthetic coding sequence
  source 1..204: mol_type = other DNA
atgaacgaggtatctgtcatcaaggaaggctggctgcataaacgaggggagtatatcaagacgtggcgcccaaggtatttcctgctgaagagtgatgggagtttcatcggatacaaggaaagacctgaagctcccgatcagacgctcccaccattgaacaactttagtgtagccgaatgccagttaatgaagaccgagcgctag

SEQ ID NO: 17919 - DNA, 144 bp, synthetic construct
  misc_feature 1..144: note = Description of Artificial Sequence: Synthetic coding sequence
  source 1..144: mol_type = other DNA
atgaatgaggtatctgtcattaaagaagggtggctccacaaaagaggggagtatattaagacctggcgtcctagatattttctcctcaaatcagatggctcatttataggatacaaggaaagacctgaagcacccgaccagtag

SEQ ID NO: 17920 - DNA, 405 bp, synthetic construct
  misc_feature 1..405: note = Description of Artificial Sequence: Synthetic coding sequence
  source 1..405: mol_type = other DNA
atgaacgaggtctctgtgattaaagaaggatggctccataagagaggcgagtacattaaaacttggagacccaggtacttcctcctgaaaagcgacggcagtttcattggatacaaggagagacctgaagccccagatcaaacactgccaccgctcaataacttcagtgtcgctgaatgccagctgatgaagacagaaagaccaagacctaacacctttgtcattaggtgcctccaatggaccaccgtgatcgaacgcacatttcacgtggactcgcccgatgagcgcgaggaatggatgcgagctatccaaatggttgccaactcactcaagcagagggcacctggagaggaccccatggactacaaatgcgggtcgccatctgacagttccactactgaatag

SEQ ID NO: 17921 - DNA, 324 bp, synthetic construct
  misc_feature 1..324: note = Description of Artificial Sequence: Synthetic coding sequence
  source 1..324: mol_type = other DNA
atgaatgaggtgtccgtaatcaaggagggctggctgcacaaaaggggagagtacataaagacatggaggcccagatatttcctgctcaagagcgacggctcctttataggatataaagaacggcccgaggcccctgaccagactctcccaccattgaacaacttctccgtggcggagtgccagctcatgaagaccgagaggccaagacccaacacatttgtgattcgttgcttacagtggacaacagtcatcgagcgcacattccacgtagattccccagacgagagagaggagtggatgagggcaatccaaatggttgcttag

SEQ ID NO: 17922 - DNA, 867 bp, synthetic construct
  misc_feature 1..867: note = Description of Artificial Sequence: Synthetic coding sequence
  source 1..867: mol_type = other DNA
atgaacgaagtaagtgtcatcaaggaaggctggctgcacaagagaggtgaatacatcaagacctggagacctcggtactttctgttgaaaagtgatggcagtttcataggttacaaggaacggcccgaagctccagatcagactctaccacctctgaataacttcagcgtagctgagtgccaactcatgaaaaccgaacgccctcgcccaaacacgtttgtgatacggtgcctgcagtggaccaccgtgatcgagagaaccttccatgtggattctccggacgaacgcgaggaatggatgagagcaattcagatggtcgccaacagtcttaaacaaagggcacccggggaagaccctatggattataagtgcggaagtccttcagacagctccaccacagaagagatggaagttgcagtctcaaaggctcgcgccaaggttacgatgaacgatttcgactatctcaaattactgggtaaaggcacatttggtaaagtaatcctggttagagagaaagccaccggccggtactatgccatgaagatactgcgcaaggaagtcattatcgcgaaagacgaggttgcccacactgtcacggagtcccgggtacttcaaaacacacgtcatcccttcctcacggtaagttgtccccccctaccccgccaatgcgaagcttccctgtggaccgaactgcgggagcgggctctcatcttctggtataaagcccagtcgtggggccgccccggcgggcagggcaaggtactccttagaccggctaaaagtagcgaaccacgccacgtggtaggggtgtcccgactgggggagtgggaaggagattcattcttcatcgacggagggtttatgtag

SEQ ID NO: 17923 - DNA, 1440 bp, synthetic construct
  misc_feature 1..1440: note = Description of Artificial Sequence: Synthetic coding sequence
  source 1..1440: mol_type = other DNA
atgagcgatgttacaattgtaaaggaaggctgggtacagaaaagaggcgagtacatcaagaattggcggccacgttattttctgctgaaaacagacggatcattcattgggtacaaggaaaaacctcaggacgtggacctgccctatcccctgaataacttttcagtggcaaagtgccagcttatgaaaactgaaagacctaaacccaacacctttatcattcgctgcctccaatggaccacagtgatcgagcgcacttttcatgttgatacaccggaagaaagggaggaatggaccgaggccattcaggctgtggcagaccgattgcagcgccaggaggaagagagaatgaattgctccccgactagccagattgataatataggcgaggaggaaatggatgcgtctactacacaccacaagagaaaaaccatgaatgacttcgattacctaaaacttcttggcaaaggcacatttggcaaggtgatccttgtgcgcgagaaggcctctgggaagtattacgctatgaaaattctgaagaaggaagttataatagctaaagatgaagtcgctcacactctgaccgaatccagggttcttaagaatacaaggcacccttttttgaccagcctcaagtactcattccaaactaaagatagactctgcttcgttatggaatatgtgaatggcggagaactatttttccacctctcaagggagcgcgtctttagcgaagataggaccaggttttatggggccgagatcgtgtcggcgttggattatctccactctgggaaaatagtgtacagggacctgaagctggagaacctgatgctggacaaagatgggcacattaagatcactgacttcggcctctgtaaagaagggatcaccgatgcagccactatgaaaaccttctgtggaacgcctgaatatttagccccggaggtgctggaagataacgactatggcagggctgtagactggtggggactgggcgtagtgatgtatgaaatgatgtgcgggagactgcctttctacaatcaagaccacgagaaattattcgaactgattctgatggaagacattaaattccctagaactctgagctcagacgccaagagtctgctgagcggattactgataaaagatcctaataagcgcctgggcggcggccctgatgacgctaaagaaattatgcggcattccttcttttccggcgtgaattggcaggacgtttatgacaagaagttggtgcctcctttcaagcctcaggtgaccagtgaaactgacacgcgctacttcgatgaagaatttacagctcagacaattacaatcacaccaccagaaaagtacgatgaggacggaatggactgcatggataacgaaagacggccgcatttcccccagttttcttacagtgcctcaggcagagagtag

SEQ ID NO: 17924 - DNA, 1398 bp, synthetic construct
  misc_feature 1..1398: note = Description of Artificial Sequence: Synthetic coding sequence
  source 1..1398: mol_type = other DNA
atgtccgatgtgacaatcgtaaaggaggggtgggtgcagaaacgcggggagtacataaaaaactggagacctcgatattttttgctgaagactgacggatcatttattggatacaaagagaaaccccaggacgtcgatctgccttatccccttaacaattttagcgttgccaaatgccaacttatgaagaccgagcgcccgaaacccaacacttttattattcggtgtctccagtggaccacggtgatagagagaacattccatgtcgacacgcctgaggagcgggaggagtggacagaagccatccaggctgtagcggatcgcctgcagagacaagaagaagagcgtatgaactgtagtccaacttctcaaattgacaatattggggaagaggaaatggatgcatcgaccacgcatcataagcggaagacaatgaatgattttgactatcttaagcttctggggaagggcactttcgggaaagtgattttggtccgagaaaaagcatccggaaaatattatgcaatgaagatcctaaagaaagaagtgattatcgccaaggacgaagttgctcacacactgacagaatcacgggtgctgaaaaacacccgccaccccttcttgacatctcttaaatactctttccagacaaaggataggttgtgctttgttatggagtatgtcaacggaggagagctgttctttcacctgtcaagggaaagagtcttcagtgaggacagaacacgtttttacggcgcagagatcgtcagtgcactggattacctgcactctggaaagattgtgtatcgggatttgaagttagaaaacctgatgctggacaaggatgggcatataaagatcaccgacttcggcttatgtaaggagggcataactgatgcagccacaatgaagacgttctgcggaacaccggagtaccttgcacctgaggtgcttgaggataacgattatgggcgggctgtagattggtggggcctgggggtcgtgatgtacgaaatgatgtgcggaagactgccattttacaatcaggatcacgagaaactgttcgagttaatcctcatggaggacatcaagttccctcggacactcagtagcgacgccaaatcgctgctgagtggactgttgatcaaggaccccaataaacgcctgggcggcggacccgacgacgccaaagagattatgcggcactccttttttagcggagttaactggcaggacgtatacgataaaaagctggtgcctccctttaagccacaggtgaccagtgaaactgatacaaggtactttgacgaggagttcactgcccagacaatcaccatcactccccctgaaaaatgtcagcagagcgattgcgggatgctcggcaactggaaaaaatag

SEQ ID NO: 17925 - DNA, 1440 bp, synthetic construct
  misc_feature 1..1440: note = Description of Artificial Sequence: Synthetic coding sequence
  source 1..1440: mol_type = other DNA
atgagcgacgttacgatcgtgaaggagggatgggttcaaaaacggggagagtacatcaagaattggcggcctcgatactttctgctgaaaactgacggctctttcatcggttacaaagagaaacctcaggatgtcgaccttccttatccactgaataactttagcgtggccaagtgtcagctgatgaagaccgagcgcccgaaaccgaatacctttattatcaggtgtctgcagtggaccacagtgatcgagagaacgtttcacgtagacaccccggaagagagagaggaatggaccgaagctatacaggccgtcgccgatagactgcaaaggcaggaggaggaacggatgaactgctccccgacttctcagatcgataatataggcgaagaggaaatggacgccagtaccactcaccacaagcgcaaaaccatgaacgacttcgattacctgaaactgttgggaaagggcacatttggcaaggtcattctcgttcgggaaaaggccagcggcaaatattacgcaatgaaaatcttgaaaaaggaagttatcatagcgaaagatgaagtcgctcatactctgacggagtctagggtgttgaaaaacaccaggcacccttttttgacatccttaaagtactccttccagacgaaggatcggctctgttttgtgatggagtatgtgaacggcggcgaactgtttttccatctgagtcgggaacgtgtgttctcggaagatagaacgcgtttctacggggcagaaattgtctccgcactggactacttacattccggtaaaatcgtgtaccgcgatctgaagttggaaaacttgatgctggataaagatggccacatcaagattactgacttcggactgtgtaaagaaggtatcaccgacgccgccactatgaagacgttctgcgggacaccagaatacctcgctcctgaggtgctggaggataatgactatggcagagctgttgactggtggggattaggtgtcgtgatgtatgagatgatgtgtgggagacttcctttctacaatcaggatcatgaaaagctctttgaactcatactgatggaagatattaagtttccgagaacattgagcagcgacgcaaagtctttattatctgggttattgatcaaagatcctaataaaaggctgggaggcggacccgatgacgctaaggagatcatgagacactcctttttcagtggagtgaattggcaggacgtctacgacaagaaattagttccacccttcaagccacaggtgacttcagagacggatactcggtatttcgatgaggaattcaccgcacaaacaatcacaatcactccccctgagaagtacgatgaggatgggatggactgcatggataacgaaaggagaccgcactttccccagttctcgtacagtgcatcgggaagggagtag

SEQ ID NO: 17926 - DNA, 1398 bp, synthetic construct
  misc_feature 1..1398: note = Description of Artificial Sequence: Synthetic coding sequence
  source 1..1398: mol_type = other DNA
atgagcgacgtcacaatcgtcaaagagggctgggttcagaagagaggggaatatattaaaaactggaggcctagatacttcctgctcaagactgatggctcctttatcggatacaaggaaaaaccacaggacgtggatttgccctatccactgaacaactttagcgtagccaaatgccaattaatgaagacggaaagaccaaaacccaacaccttcatcattagatgtctccaatggactaccgtgatcgagagaaccttccacgtggacacacccgaggagagggaggagtggacggaggccatccaggccgtcgccgaccgtttgcagcggcaagaggaggaaagaatgaactgctcccctacgtcccagattgataatattggggaggaagagatggacgccagcactacacaccataagaggaagaccatgaacgacttcgattacctgaagttgctgggaaaggggaccttcggtaaggtgatcctggtaagagaaaaggcgagcggtaagtactacgccatgaagatactcaaaaaagaggtgatcatcgcaaaagacgaagtggctcacacgttgactgagagccgagtcctcaaaaacactaggcacccatttttgacgagtctgaaatactcgtttcagacaaaagaccgactctgctttgtaatggagtacgtaaacggcggtgagttgttcttccatcttagccgtgaacgcgtgttcagtgaggaccgaactaggttctacggtgcagagattgtttctgccctggattacttgcatagcggaaagatcgtctatagggacctcaagctggaaaacctgatgctcgataaggatggtcatattaagataaccgactttggactgtgcaaggagggcatcactgatgcagccactatgaaaaccttttgcggaacccccgagtacctagctccggaggtcctagaggacaatgactacggcagggccgtggactggtggggtctgggcgtggtgatgtatgaaatgatgtgcggaaggctgccattctacaatcaggaccatgagaagctgtttgagcttatcctgatggaggatatcaaattcccccgcacacttagctcagacgctaagtccctcctcagtggcctgcttatcaaggatcccaacaaacgcctgggaggcggccccgacgacgcaaaagaaatcatgcgccacagcttctttagtggagtgaattggcaggacgtgtatgacaaaaaactggttccaccgttcaaaccgcaagttaccagtgaaacagatacacgctatttcgacgaggaattcaccgcacagaccatcactataacgccccccgagaagtgccaacagagcgattgcgggatgttggggaattggaaaaaatag

SEQ ID NO: 17927 - DNA, 420 bp, synthetic construct
  misc_feature 1..420: note = Description of Artificial Sequence: Synthetic coding sequence
  source 1..420: mol_type = other DNA
atgtctgatgtgaccattgtgaaggaaggatgggtccagaagcggggcgaatatatcaagaattggcgtcccaggtacttcctgctcaaaaccgacggctcctttatcggctacaaagaaaaaccccaggacgtggacttgccttaccctctaaacaactttagcgtggctaagtgccagttaatgaagactgagaggccgaaacccaatacgtttatcattagatgcctgcagtggaccacagtcatcgagcgcaccttccacgtagacactcctgaagagcgggaggagtggactgaagcaatccaggctgtggccgaccgccttcaacgccaggaggaagagcggatgaattgctccccaactagtcaaatcgacaatattggagaagaagagatggatgcttccaccactcactag

SEQ ID NO: 17928 - DNA, 624 bp, synthetic construct
  misc_feature 1..624: note = Description of Artificial Sequence: Synthetic coding sequence
  source 1..624: mol_type = other DNA
atgtcaccattgcttcggcggctgctgctggccgcacttctgcaactggcgcctgcccaagccccggtttctcaacccgatgcgccaggacaccaaaggaaggtggtgtcttggattgacgtctatacccgggctacctgtcaaccacgggaggttgttgtgcccctgaccgtggaacttatgggaactgtggcaaagcagttagttccttcctgtgttactgtccaacggtgcggcggctgctgccctgacgatggcttggagtgtgttccaactggtcaacaccaggttaggatgcagatattgatgattaggtaccctagttctcagcttggagagatgagcttggaagagcactctcagtgtgagtgcagacctaaaaagaaggatagcgcagttaagcctgacagggccgccacacctcaccatcgaccacaaccgagatctgttcccggctgggattctgcacccggtgccccttccccagccgacatcacccatcccacgcctgcccccggtcccagtgcacacgcagctccttccaccaccagcgctctcacacccgggccagcggcggcagccgccgacgctgccgcttcttccgtggctaagggcggcgcgtag

SEQ ID NO: 17929 - DNA, 567 bp, synthetic construct
  misc_feature 1..567: note = Description of Artificial Sequence: Synthetic coding sequence
  source 1..567: mol_type = other DNA
atgagcccattgttacgccggttactccttgcggcccttcttcagctggctccggcccaggctccggtatcacagcctgacgccccaggccaccaaaggaaggtagtctcgtggattgacgtttacactcgcgccacttgccagcctcgcgaagtggttgtccctctgacagtcgagcttatgggaacagtcgccaaacagctggtcccttcctgcgtgactgtacagagatgcggtggctgctgtcctgacgacggacttgaatgtgtccctacagggcaacatcaggttagaatgcagattctcatgattagatatccctcttctcaattgggcgagatgagcctggaggagcactcacagtgtgagtgtaggccaaaaaagaaggattctgcggtgaagcctgatagccccaggccgctgtgtccccgctgcacacagcaccaccagcgccccgatcccaggacctgtagatgccgatgtcgacggcgcagcttcctgagatgccaaggtagggggctggaactgaatccggacacttgcagatgccggaaactgcgcagatag

SEQ ID NO: 17930 - DNA, 1143 bp, synthetic construct
  misc_feature 1..1143: note = Description of Artificial Sequence: Synthetic coding sequence
  source 1..1143: mol_type = other DNA
atgtccgaaacagtaatctgctcatcccgggctacagttatgttatacgacgatggtaataagagatggcttcccgctgggacaggaccacaggccttctctagggtacagatctaccataaccccacagcaaactctttcagagtagtgggcaggaaaatgcagcccgaccagcaagtggttatcaactgcgccatcgtgaggggtgttaaatataaccaggcaaccccaaactttcaccagtggcgcgacgccagacaggtgtggggtctcaacttcgggtctaaggaagatgccgctcaattcgccgccggtatggctagtgcactggaggccctcgaagggggagggcccccccctcctccggccttaccaacctggagcgtccctaacgggccttcccccgaggaggtggaacagcagaagagacagcagcctgggccaagtgagcacatagagcggagggtgagcaacgcaggcggccctccagcaccaccggctggagggcctcccccaccaccaggtcctccccccccaccaggacccccccctccgccaggcctgcccccttcaggcgtgcctgccgcggcccatggtgctggtgggggccccccgcccgctccacccttacccgctgctcagggccctggaggaggcggcgccggcgctcctggactagccgcagctatcgccggagcaaaactgagaaaagttagtaagcaggaggaagctagcggcgggcctaccgcacctaaggctgaatccggtcggagcggaggaggcgggctaatggaagagatgaacgccatgctggctcgtcgtcggaaagctacacaggtaggtgagaaaacccccaaagatgaatcagccaaccaagaggaacctgaggcacgagtccctgctcagagcgagtcagtacgaaggccttgggagaaaaactccaccaccctgccccgcatgaagtccagctcttccgtgactacttcagagacccagccttgcacgcccagctcatccgactacagcgacctccagcgcgtcaagcaggaactgctcgaagaggttaagaaagagctgcaaaaggtaaaagaggagatcattgaggccttcgtgcaagagctgaggaagcgggggtcaccttag

SEQ ID NO: 17931 - DNA, 915 bp, synthetic construct
  misc_feature 1..915: note = Description of Artificial Sequence: Synthetic coding sequence
  source 1..915: mol_type = other DNA
atggccggcaacttcgatagcgaggagaggtcatcctggtactgggggaggctctccaggcaagaggccgtcgcattactgcaaggccagaggcacggcgtgttccttgtgagggactcctccactagtccaggcgattacgtgttatctgtgtcagagaacagcagagtgagccactacataataaattcatctggaccccggcctcctgtgcctccaagcccggcgcagccaccacctggggtctccccctccaggctgcggataggtgatcaggaatttgatagtctgcccgcactgctcgaattttataagattcactacctagacaccactacgcttatagagcccgtgtctaggagccgacagggatccggcgtcatcctgcggcaagaggaggctgaatatgtcagagcccttttcgacttcaatggaaatgacgaggaggacctgccattcaagaagggagatatcctgcggatccgggacaagcctgaggagcaatggtggaacgcagaagattccgaggggaaacgcggcatgatccccgtgccatatgtagagaaataccgtcccgcaagtgcctctgtgtccgccctgataggaggaaaccaggagggctcacacccgcagcccctggggggaccagagccagggccttatgcccagccaagcgtgaatacacccctaccaaacctgcagaatggccctatttatgccagggtgatccaaaagcgggtcccaaatgcgtatgataagacagctcttgcgttagaggtaggcgaactcgttaaagtgactaaaattaacgttagcgggcagtgggagggcgaatgtaacggtaagagaggacatttcccattcactcatgttcgcctgttggatcagcaaaaccctgacgaggattttagctag

SEQ ID NO: 17932 - DNA, 615 bp, synthetic construct
  misc_feature 1..615: note = Description of Artificial Sequence: Synthetic coding sequence
  source 1..615: mol_type = other DNA
atggccggtaactttgactctgaagagagaagctcgtggtactgggggcgtctgagcagacaggaggctgttgcgctactgcaggggcagaggcatggcgtattcttagttcgggacagttccacatcacccggagactacgttctatctgtgtccgaaaactcacgggtgagtcattacattatcaacagcagcggtcctcgtccgcctgtccctccctcaccagctcagccgccacccggggtgtccccttcaagactgagaatcggcgatcaggaattcgattctctacccgcactgctggaattttataagatccattatcttgataccacaacccttatcgagccagttagtcggtcccggcaaggctctggcgtgattctacggcaggaggaggctgagtacgtgcgcgcactgttcgattttaacggcaatgacgaagaggacttgccctttaagaagggcgatattcttcgcatacgagacaagccggaggaacaatggtggaatgccgaagattccgaaggcaaacgcggcatgattcctgtcccctatgtcgagaaatatcggccagccagcgcttccgtgagcgccctcattgggggtcgatag

SEQ ID NO: 17933 - DNA, 2196 bp, synthetic construct
  misc_feature 1..2196: note = Description of Artificial Sequence: Synthetic coding sequence
  source 1..2196: mol_type = other DNA
tgaaagcctgctacaggactctgggtgtgggtcagtctgctagtcgctgccggcactgtgcagccctccgattcacagtccgtctgtgccggaaccgagaacaagttaagctctctttctgatctcgagcaacaataccgtgctttacgcaagtactatgagaattgtgaagtcgtgatgggtaatctggaaatcacatctattgagcacaatcgcgaccttagctttctgcgctctgtgcgcgaagtgacaggttatgttctagtggcactgaaccaattccgttacctgccgctggagaacctgaggattattaggggcacgaaactgtacgaagaccgttacgccttagcaatttttttgaattatcgcaaggatggtaatttcggcctccaggagttaggcctcaaaaacctcaccgagatactgaatggtggtgtttacgtcgaccaaaacaagttcctgtgctatgccgataccatacactggcaggatattgtgcgaaatccatggcccagtaatctcaccctggtctccaccaatggatctagtggatgtgggaggtgtcacaagagttgcacaggacggtgttggggccctaccgaaaaccactgccaaaccctgactcggactgtctgcgcagagcagtgcgatggccgctgttacggcccttacgtttctgattgctgccatcgggagtgcgctggcggttgtagcgggcccaaggacaccgactgctttgcctgtatgaatttcaacgattcgggtgcctgcgttacacaatgtccgcagacgtttgtttataaccccacgacatttcagctagagcacaactttaacgccaaatacacctatggggccttctgtgttaagaaatgtccgcataacttcgtggtggattcaagcagctgcgtgagagcctgccctagctcaaaaatggaggtggaggagaatgggatcaaaatgtgtaagccttgtactgacatatgtcccaaggcatgcgatggtatcggcactggatcgctgatgtcagcccaaacagttgattcctcaaatattgacaagttcataaattgtactaagattaatgggaatttgatttttcttgtgacaggaatccatggggacccatacaacgccatagaggcgattgaccccgagaagctgaatgtgttccggacagtacgggagataaccggatttcttaatattcagagttggccaccaaatatgactgacttctccgtcttcagcaacctggtaacaatcggtggacgcgtcttatattcggggctgagtctcttgatcctgaaacagcaggggatcacatcgctgcagttccaatctcttaaggaaatttctgctgggaatatctacatcaccgacaacagcaatctgtgctattatcacacaattaactggacaactcttttctccaccatcaatcagagaatcgtgatccgggataacagaaaggcagagaattgtacagcggaaggaatggtttgtaatcacctgtgctcctcagacggatgctggggcccaggacccgatcagtgcctgagctgccgacgcttctcaaggggccgcatatgcatagagtcatgcaacctgtatgatggtgaatttcgggagtttgaaaatgggagcatctgtgtcgagtgtgacccacagtgtgagaaaatggaagatggactgttgacatgccacggtcccggccccgataattgcactaaatgttctcatttcaaagatgggcctaactgtgtggaaaagtgccccgatggattgcagggggccaattcttttatctttaaatacgccgacccagatagggagtgtcacccctgccatccaaattgtacccagggatgtatcggcagctccatcgaggattgtatcgggctgatggacaggacgccattgatcgctgctggcgtgatagggggcctgttcatcctggtgattgtcggtctcaccttcgccgtgtacgttaggaggaaatctatcaaaaaaaagcgagctctgcgacggttccttgagaccgagctggtggaacctctgaccccctcagggactgctccaaatcaggcgcagctgcgaatcttgaaggagactgagctaaagagggttaaggtgctaggcagcggggcgttcggcactgtgtacaaaggcatctgggtcccagagggctag

SEQ ID NO: 17934 - DNA, 3927 bp, synthetic construct
  misc_feature 1..3927: note = Description of Artificial Sequence: Synthetic coding sequence
  source 1..3927: mol_type = other DNA
atgaagcccgccaccggtctgtgggtgtgggttagcttactggttgctgctggcaccgtccagccatctgacagccagagcgtgtgcgccggcacagaaaataagctttcgagcctgtccgaccttgaacaacagtatcgtgcactccgaaagtattatgaaaattgcgaggttgtaatggggaatctcgaaattacgtccattgagcataatagggatctttccttcctgcgtagcgtgcgggaagtaacgggttatgtgctggtcgccttgaaccagtttcgttacctacccctggagaatttgcggatcatcagaggaaccaagttatacgaggacagatatgcattggcgatcttcctgaactatcgcaaggacggaaacttcgggctgcaagagttgggtctcaaaaatctgactgaaatcttaaatggtggcgtttatgttgaccaaaataagttcttatgctatgccgataccattcattggcaggatatagttaggaacccctggccttccaatctgaccctggtctccaccaacggaagttctgggtgcggacgctgtcacaagtcatgtaccggaaggtgctgggggcctaccgaaaatcattgccaaaccctcacgcgaaccgtttgtgctgagcagtgtgacggtcgttgttacgggccatatgtctcagactgttgtcatagagagtgcgctggcggatgctcaggccccaaggatacagactgtttcgcctgcatgaatttcaatgactctggggcttgcgtcactcagtgtccccaaactttcgtgtataacccaacgacctttcagctcgagcacaatttcaacgccaagtacacgtacggagctttctgcgtcaagaaatgccctcacaatttcgtcgtggacagctccagctgcgtgcgtgcctgtccctcctcaaagatggaggtggaggagaatggaatcaaaatgtgtaaaccatgtactgatatctgtcctaaggcctgcgatggaatcgggaccggctctctcatgtcagcacagactgtcgacagcagcaatatcgataaattcattaattgtacgaaaattaatggaaatttaattttcctggtgaccggtatccacggagacccatacaatgccatagaggctattgacccagagaagctgaatgtgttccgcactgtgagggagatcacagggtttctgaacatccagtcgtggcccccaaatatgacagatttctcagtgttctccaatctggtaacaatcggaggtagggtactctacagcggcctcagcctgttgattctgaaacagcagggcatcacctctcttcaatttcaatcactaaaagagatcagtgcagggaatatttatatcactgacaacagcaacctatgctactatcatactatcaactggaccactctgttctccacaatcaatcagcgtatcgtaattcgagataaccgcaaagcagagaactgcacagccgagggcatggtctgcaatcacctgtgctcatcggacggctgctgggggcccggcccggatcaatgcttgagctgtcgcaggttttcaaggggcagaatctgtatcgagtcttgcaatctgtacgatggagagttcagagagttcgagaatgggtcaatttgtgtcgagtgcgacccccagtgcgagaagatggaggacggtctgctgacatgtcacggccccggccctgacaattgtactaaatgtagccactttaaagacggacccaattgtgtggagaagtgtcccgacggattgcaaggcgcgaatagctttatctttaaatacgccgacccggatagggagtgtcacccttgtcatccgaactgtacccaaggctgtaacggtcccacctcgcatgactgcatttattacccctggacaggacactcaacccttccccagcacgcccgaacaccactcatcgcggctggcgtcatcggagggctgttcatcctggtcatcgtgggactgacctttgccgtctacgtccggcgaaaatctatcaaaaaaaaacgcgccctgcgacgcttcctagaaaccgaactagtggagcccctgaccccctcaggcacagccccgaaccaggctcagctcagaattctgaaagaaaccgaactgaagagagtcaaggtcctggggtccggcgcttttgggacagtgtacaaaggaatctgggtccctgaaggcgaaactgtaaaaatcccagtcgctatcaagatcctgaacgagacaaccggccctaaggcaaatgtggagtttatggatgaggcgctgatcatggcttcaatggaccacccgcacctcgtcagattgttgggcgtttgcttatcccccaccatccaactcgtcacacagctcatgccccacggctgcctgctggaatacgtccacgaacataaagacaatataggatcccagctacttttaaattggtgcgtgcaaattgccaagggcatgatgtatctggaagagcgcagactggtccacagggacttagccgcccgtaatgtgcttgtgaaaagcccgaaccatgtgaaaataaccgattttggcttggccagactcctggagggagacgagaaagaatacaatgctgacggcgggaagatgcctatcaaatggatggcgctcgaatgcatccattacagaaagtttactcatcagtcagacgtgtggagttacggcgtcaccatatgggagctcatgacctttgggggaaagccgtatgacgggatcccaacccgcgagattcctgacctgctggagaaaggtgagcgcttaccacaacctcctatctgtacgatcgatgtgtacatggtgatggtaaaatgttggatgattgatgccgattctagaccaaagttcaaggaacttgccgccgagtttagtcggatggccagagacccacagcggtacctagttattcagggtgatgaccggatgaagcttccatcacctaatgactctaagttttttcagaatctgctggatgaagaggacctggaggacatgatggacgccgaggaatacttggttccccaggcctttaacatccctccccccatctataccagtagggctaggatcgacagcaatcgttccgaaatcgggcactctcctcctccagcctatacacctatgtccgggaatcagttcgtttaccgtgacggcggatttgccgcggaacagggcgtgagtgtcccttatagggcacctacaagcacgattcccgaggcacccgtggcgcagggagctaccgctgagatctttgatgattcatgctgcaatggaaccctgagaaagccagtggctccccacgttcaggaagattcatcaacacagcggtacagtgccgatcccacggtattcgccccagagcggtctccacggggcgagctggatgaggaagggtacatgacccccatgcgtgataagccaaagcaggaatatctgaaccccgtcgaagagaacccattcgtgtcaagacggaagaatggcgacctccaggcgctcgataaccccgaatatcacaatgcgagtaacggcccaccaaaggccgaagacgaatacgtgaacgagccactgtatttgaataccttcgcaaatactctaggtaaggccgagtacttaaagaataacatcctgagcatgcccgaaaaggctaaaaaggcttttgataatcctgattattggaaccattcgttgcccccacggtccactctacagcatcctgattatctccaggaatacagcacaaaatacttctataagcagaacggccgcatccgacctatcgtggctgaaaaccccgagtatttgtccgaattctctttaaagcctggtacagtccttcctccaccgccttatagacacagaaataccgtggtgtag

SEQ ID NO: 17935 - DNA, 3897 bp, synthetic construct
  misc_feature 1..3897: note = Description of Artificial Sequence: Synthetic coding sequence
  source 1..3897: mol_type = other DNA
atgaagcctgcaaccggcctgtgggtgtgggtgtccctgctggtggctgcaggcactgtgcagcccagcgattcccaaagcgtttgcgcaggtaccgaaaataagctaagttctttgtccgatctggaacaacaataccgagcactccgtaagtattacgagaactgcgaggtggtcatgggcaacctagaaataacatctatcgagcataatcgggacctgagttttttaagatctgtacgggaggtgaccggatacgtgctagtggcactaaaccagtttcgctatcttcccctggaaaacttgcggattatccggggaacaaaactgtacgaagatcgctacgccctggcaatcttccttaattacagaaaggacggaaacttcggtctgcaggagttaggcttaaagaatctgacagagatcttaaacggcggagtttatgtggaccaaaacaagtttctgtgttacgctgacactattcattggcaagatatcgtgcggaatccctggccgtcgaacctgacattggtgagtaccaacgggagcagtggatgtggcaggtgccataagtcatgcacggggcggtgttggggaccaacagagaatcactgtcaaaccttgacaagaacggtctgtgccgaacagtgtgatggccggtgctacggtccctatgtttctgactgttgtcatcgggagtgcgccggcggctgcagtggccccaaagacactgactgtttcgcttgtatgaacttcaacgactcaggagcatgcgtcacacaatgtcctcaaacgtttgtatataatcccacaactttccagctggagcacaacttcaacgccaaatatacatacggagccttctgtgtgaagaaatgcccccacaatttcgtggtcgacagtagctcctgcgtgagagcctgtccctcaagtaaaatggaggtggaggagaacggaatcaagatgtgcaagccctgcacggacatctgtccaaaggcttgcgacggaattggaacaggcagcctcatgtctgcacaaacagttgactcatctaatattgataagttcattaattgtacgaaaatcaacggcaacctcatctttctggtgacgggaattcatggcgatccatataacgcaattgaggccatagatccggagaagctcaatgtatttagaacagttagggagatcacaggcttcctcaatattcagagctggccccccaatatgactgacttctctgtcttttcaaatctcgtgacaatcggggggagggtgttgtatagcggactgtctctgctgatactgaagcagcagggtattacgagtctccaattccagtccctcaaggaaatctccgccggtaacatttatatcactgataactcaaatctgtgctactaccacactatcaattggaccacactcttctccacaattaatcaaaggatcgtcattagagataatcgaaaggccgagaactgtacggccgagggcatggtttgcaatcacctatgctcatcagacggctgctggggaccagggcccgatcagtgcctctcttgtcgaagattttcccgggggcggatttgcatcgagagctgtaacctgtatgatggcgaattccgggagttcgagaacggcagcatctgtgttgagtgtgatccgcaatgtgagaagatggaggacgggctgcttacctgccatgggcctggacccgataactgtaccaaatgttcacattttaaagatggaccaaattgcgtcgaaaaatgtccagacggcctgcagggggcaaacagttttattttcaaatacgccgatccagatcgcgaatgccacccctgccatcctaactgtacccaaggctgcataggcagcagcatcgaagactgcatcggactcatggatcgtacgcccttgatagcagcaggcgtgatcggtggactctttattctggttatagtcgggctcaccttcgccgtgtacgtcagaaggaagagtattaaaaagaaaagagccctgagacgcttcctagaaaccgagctggtagagccgctgaccccatccggaaccgcacccaatcaggcccagcttcgcatcttgaaggagactgaacttaagagagtcaaggtcctcgggtcaggagctttcggtactgtctacaaaggcatctgggtgccggagggcgagactgtcaagatcccagtggcaattaaaatcttgaacgagacaacgggtccaaaagccaacgtggaattcatggatgaggcgcttattatggcatcgatggatcatcctcacctggttcgccttctgggcgtgtgtctctccccgaccatccagctggtaactcagctcatgcctcacggctgtctgctcgagtatgtccatgaacacaaagataacattggaagccagctactactgaattggtgcgtccagattgccaagggaatgatgtacctggaagagagacgattggtgcatagggatctcgcagcaaggaacgttttggttaaatctcccaatcacgtgaaaattaccgacttcggcctcgctcgactgctggagggcgacgaaaaagagtacaatgccgacggaggtaagatgcccatcaaatggatggctctggaatgtatccactacagaaagtttacacaccagtccgatgtgtggtcctacggcgtgaccatatgggaacttatgacctttggaggcaagccttacgacggaatacccacaagggagatcccagatcttttggagaaaggggaaagacttccacagccccccatctgcacgattgacgtatacatggttatggtgaagtgctggatgatcgacgccgatagcagacctaagtttaaggaacttgcagcggaatttagccggatggctcgggaccctcagcgatatttggttatacaaggcgatgatcggatgaaactgccttcaccaaacgatagcaagttcttccagaaccttctcgatgaagaagatcttgaagacatgatggacgcagaggagtacctcgtgccccaagcatttaatattcctccccccatttacacctctagagctcgcattgacagcaaccggagcgagattggacattctcctcctccagcatatactcctatgtcggggaaccaattcgtgtatagggacggaggctttgccgccgagcaaggcgtctctgtgccctatcgagccccaacgtcaacaatccctgaggcacccgtggcccagggtgcaacagctgagattttcgatgacagttgttgcaatggaaccctgcggaaacctgtcgcaccccatgtccaggaggacagcagcacacagcgatatagcgccgatcctaccgttttcgcccctgagcgctccccacgtggtgagctggatgaggaaggctatatgacacccatgagagataaacccaaacaggagtatttaaacccagtggaggagaaccccttcgtcagcagacgtaaaaatggagacctgcaggccctagacaaccctgagtaccataacgccagcaatggtccacctaaagccgaagacgagtacgtgaatgagccactgtacctgaatacatttgccaacactctcggcaaggccgagtatctcaagaacaacatcctgtccatgccagagaaggccaaaaaggcatttgacaatcccgattattggaaccattctctaccacctcgctctacacttcagcatccagattatctccaggaatacagcacaaagtatttttacaaacaaaacggacggattcgacccatcgtggctgagaatccggaatatctttccgagttctcactgaagccaggcacggtgttacccccgccgccctatcgtcatcgcaatacagtcgtgtag

SEQ ID NO: 17936 - DNA, 387 bp, synthetic construct
  misc_feature 1..387: note = Description of Artificial Sequence: Synthetic coding sequence
  source 1..387: mol_type = other DNA
atgggaaatctcgaaattaccagcatcgaacacaaccgggacctcagctttcttagatctgttagggaagtcacaggatacgttcttgttgcgttgaatcagttcagatatcttccgctggaaaacctgagaataatcagggggacaaagctgtatgaggaccgctatgcacttgccatttttctcaattatcgtaaagatggcaatttcgggctgcaggaactgggtctaaaaaacctcacagaaattttgaatgggggcgtctatgtcgatcaaaacaagtttctctgttatgccgacaccatccactggcaggacattgtaaggaatccttggccttcaaacctgacgttagtcagcaccaacggcagcagtggatgcgggtag

SEQ ID NO: 17937 - DNA, 3879 bp, synthetic construct
  misc_feature 1..3879: note = Description of Artificial Sequence: Synthetic coding sequence
  source 1..3879: mol_type = other DNA
atgaaacccgccaccgggctttgggtctgggtgagcctgcttgtggccgccggcacagttcagcctagtgatagtcagtccgtttgcgccgggaccgagaacaagctgtcttctcttagcgacctggagcaacagtatagggctctgagaaagtactatgagaattgtgaggtcgttatgggtaatctcgagattacgtcaatcgagcataaccgggatctctcgttcctgcgctcagttcgggaagtcactggctatgtgctggtagctctcaaccagttccgttatctcccactggaaaacctgagaattatcaggggaactaagctctatgaggaccggtacgctctggctatatttctgaactaccgaaaagacggcaatttcggactgcaggaactcggactgaaaaacctgactgagattttgaatgggggcgtgtatgtggatcagaacaagtttctgtgttacgcagatacaatccattggcaggatattgtgcgtaacccttggccttccaatctgacacttgtctcaaccaatggatcttcaggatgtggaaggtgtcacaaatcatgcacaggaagatgctggggccccactgagaatcattgccagacgctcaccaggactgtatgtgctgagcagtgcgacggacggtgttacggtccgtatgtaagcgactgttgtcatagagagtgtgctggcggctgtagcggaccaaaggataccgattgcttcgcatgcatgaatttcaatgattctggagcgtgcgtgactcagtgccctcagactttcgtgtacaatccaacaactttccagctggagcacaacttcaatgcgaagtatacttatggggccttttgcgtgaaaaagtgcccccacaactttgttgtcgactcatccagttgcgtccgggcttgccccagttcaaaaatggaagtagaagagaacgggattaagatgtgtaaaccatgcacagatatttgcccaaaagcatgtgacggaatcggaacaggcagtttaatgagtgctcagacggttgatagttccaacatcgataaatttattaattgcactaaaattaacggcaacctgatcttcctggtcactggcatccacggagacccctataatgcaatcgaggcaattgatccagagaaacttaacgtattcaggactgttcgtgagattacaggattcctaaatattcagtcctggccgcccaacatgacggacttctcggtgttcagcaatctggtcacaataggcgggagggtattgtattcgggactcagccttctcatcttgaaacagcagggcattaccagcttacagttccagtccctgaaagaaatctcagccgggaatatctacatcactgataattccaatctttgctattaccatacaattaattggactactctattttctaccataaatcagagaatcgtaatacgcgacaaccggaaggccgaaaactgcacagctgaaggtatggtatgtaaccatctgtgctcatccgacggttgctggggccctggtcctgaccagtgtctttcttgccggcggttcagccgggggcgtatctgcatcgaaagctgcaacctgtacgacggggaattccgggaattcgaaaacggctctatctgcgtggagtgcgacccccaatgcgagaagatggaggacggcctcttgacttgccacggcccagggcctgataactgtaccaagtgctcccacttcaaagatggacctaactgcgtcgagaaatgcccagatggcttgcagggggccaacagtttcatttttaagtacgccgatcctgatagagagtgccatccatgccacccaaattgcacacagggctgtaatggtcctaccagccatgactgcatttattacccctggaccggtcactctaccctaccacagcatgccaggaccccattgattgcagctggcgtgatcggtggcctctttattctagtaatcgtggggctgacttttgctgtgtacgtccggaggaaatccatcaaaaaaaaaagagccttgaggagatttctcgaaacggagttagtggaacccctcacaccatccggaaccgctccaaatcaggcccagctgagaattctcaaggagaccgagctgaagagggttaaggtgctcgggtccggagctttcggcacagtatacaaggggatttgggtccctgagggagagaccgtgaaaatccccgttgcgataaaaatcttgaatgaaacaacgggtcctaaagcgaacgtggagtttatggatgaagccctcataatggctagtatggaccatcctcacctggtgcgtctcctcggtgtgtgtctcagtcctacaattcagcttgtgactcagctgatgccccacgggtgtttgcttgaatacgtacatgaacacaaggataatatcggctctcagttactcctcaattggtgtgtgcaaatcgcaaagggcatgatgtacctcgaggagcggcgcctggtgcacagagatctggctgccagaaatgttctggtaaaatctcccaatcacgtgaagataaccgacttcggtctggccaggctgcttgaaggcgatgagaaagaatacaacgctgacggaggcaaaatgccaattaagtggatggcgctggagtgcatccactaccgtaagttcactcaccagtctgacgtgtggtcctatggcgtcactatttgggaactgatgacttttggagggaaaccatacgatgggatcccaacacgcgagattccagatctgctggagaaaggggagcggcttccacaacctcctatttgtactatcgacgtctacatggtgatggttaagtgctggatgatcgatgcagactcacggcccaagtttaaggaacttgctgccgagttctcacgcatggcccgggatccacagagatacctcgtgatccagggggacgatcgtatgaaattgccgtcacccaacgactcaaaattcttccagaacttgctcgatgaagaagatctggaagacatgatggatgccgaggagtacctagtgccacaggcctttaacataccgcccccaatctataccagccgtgcccgaatcgacagcaacagaaatcagttcgtctatagggatggcggcttcgccgccgagcagggagtatctgtgccatatcgagccccgacatccactatacccgaggctcccgtggcgcaaggagcaaccgcagagatcttcgatgattcctgctgtaacgggactttacggaaaccggtggctccacacgtgcaggaagatagctctactcagcgctacagcgctgacccaaccgtatttgcacctgagcggtccccccgtggggagcttgatgaggaggggtacatgactcctatgagggacaagccaaaacaggaatacctgaatcctgtagaggaaaatccgttcgtttctaggcggaaaaacggggatctacaagcgttggataatccagaataccacaacgcctcaaacggaccccccaaggccgaggatgagtatgtcaacgagccactgtatctgaacactttcgctaatactctgggcaaggccgaatatctgaagaacaacattcttagcatgcctgagaaagcaaaaaaagcatttgataatcccgactactggaaccacagccttccaccacggagcacactgcagcaccccgattacctgcaagagtacagtacaaagtacttctataagcagaacggaaggatccgacccatcgtcgctgaaaatcctgagtacctttctgaattcagcctgaaacctggtactgtactgcctccccccccctacagacacaggaacacagtggtatag

SEQ ID NO: 17938 - DNA, 4029 bp, synthetic construct
  misc_feature 1..4029: note = Description of Artificial Sequence: Synthetic coding sequence
  source 1..4029: mol_type = other DNA
atgagggccaacgatgccctccaggtccttgggcttcttttttctcttgccaggggctcagaggtcgggaattcacaggccgtttgcccaggaaccctgaacgggttgtccgtgacgggagacgccgagaaccagtatcagactctatacaaactttacgaaaggtgtgaagttgtgatgggaaacctggagatcgtgctgaccgggcataatgctgacttgtccttcctgcagtggattcgggaggtcactgggtacgtactggttgctatgaacgaattctccacactaccgcttccgaacctgagagtcgtacgggggactcaggtttacgacggtaaatttgcaatcttcgtgatgctgaactataatactaacagcagtcatgcgctgaggcaattgcggctgacccagctgacggagattctttctggcggagtgtacatcgagaaaaatgacaagctatgccacatggatactattgactggagggatattgtgagggaccgtgatgcagagattgtggtgaaagacaacggcaggtcttgccccccttgtcacgaggtctgcaaggggagatgttggggcccgggctccgaagactgtcagactttgacaaaaaccatatgtgcaccacaatgcaacggtcattgcttcggccccaaccctaaccagtgttgccacgacgaatgcgctggtggctgctctgggcctcaagataccgactgctttgcctgccgccactttaatgactcaggcgcgtgtgtgcctaggtgtccccagccccttgtgtacaacaagttgacttttcaacttgaacccaatcctcacacaaaataccagtacgggggagtgtgcgtggcttcttgtcctcacaacttcgtggtagatcaaacttcctgcgtacgcgcctgcccccctgacaagatggaggtggataagaacggattgaaaatgtgtgaaccctgcgggggtctctgccccaaggcgtgcgaagggacggggtccgggtccagattccaaacagtagattcctccaatatcgacggattcgttaactgcaccaagatcctgggcaacttagactttctcatcaccgggttaaatggggatccctggcacaaaatccccgccctagaccccgagaagctgaacgtgtttcggacggtccgggagatcaccggttacttgaacatccagtcttggcccccccatatgcacaacttctcagtcttctctaacctaaccaccatcggtggccggagcctttacaatcgagggttttccttgcttattatgaaaaacctgaatgttacatctctggggttccggagcctgaaagaaatcagcgccgggagaatctatattagtgctaaccggcaattgtgctaccatcactcgctgaactggacaaaggtgctgagggggcctacggaagagcgattagatatcaagcacaatcgaccacggagggactgtgtagcagaaggaaaggtgtgtgatcctctgtgttcctcaggcgggtgttggggaccaggacctggccagtgcttgagttgtcggaactatagccggggtggggtgtgtgtgacacactgcaactttctgaatggggaaccaagagagtttgctcacgaagccgagtgcttttcctgccacccagagtgtcaaccgatggaagggactgccacttgcaatggtagtggcagcgatacttgcgcacagtgcgcacacttccgagatggtccacactgcgtgtcctcttgcccccatggagtgttgggcgctaaggggcccatttataagtaccccgacgtccagaatgagtgccgtccatgtcacgagaattgtacgcagggctgcaagggacctgagctccaggactgtcttggtcagaccctggtcctgattggcaagacccacttgaccatggctctcaccgttattgccgggctggtggtaatattcatgatgctcggcggtaccttcctgtattggcgaggacgccgcatacagaataaaagggccatgcgccggtatttggagcgcggcgagtccatcgaacctctcgatcccagtgagaaggctaataaggtactagcccggattttcaaagagacagagctgaggaagttgaaagttcttggatccggcgttttcgggacagttcacaaaggcgtttggatccccgaaggcgaatctataaagattccggtgtgtattaaagtcatagaggacaagagcggtcgccagtcttttcaagccgtcaccgatcacatgctcgcaatagggtctctggatcatgctcacatcgttcgtctgctgggattgtgccctggctccagtctccagctggtgactcagtacttacccctcggctccctactggaccacgtgcgacagcaccgcggcgcactggggccccagcttctgttgaattggggcgtgcagatcgccaagggcatgtattatctcgaagaacatgggatggttcacaggaatctggctgcgaggaatgtgctgttaaagtcaccgagtcaggtccaggtggctgacttcggcgtcgccgatctgttaccacccgacgataaacagctcctgtactcagaagcgaagacgccaatcaagtggatggctcttgaatctatccattttggaaaatacacgcatcagagcgacgtgtggtcctacggtgtcactgtatgggagcttatgacatttggagctgagccgtacgccggcttgaggctggctgaggtccccgatctgctggaaaagggagaacggctggcccagccacagatctgcactatcgacgtctacatggtgatggtaaagtgctggatgatcgacgagaacataagacctactttcaaggaactggcaaacgagttcacaaggatggccagggatcctccacggtatctcgttatcaaacgcgaaagcggacccggtatagccccaggccctgaaccgcatggcctcactaataagaagctggaggaagttgaactggaacctgaactggacctggacctcgatttagaagctgaagaagataacctggccacgaccacgctcggctccgctctgtccctgccagtcgggacactgaataggccacgcggttcacagagtcttctcagcccctcttctgggtacatgccgatgaaccagggtaacctcggcgaatcttgtcaggagtctgcagtgtctggatcatccgagcggtgtcctcggccagtgtcattgcacccaatgccaagagggtgcctggcaagcgagagctctgagggccacgtgactgggtccgaagcagagctccaagaaaaggtgagtatgtgtcgctcacgatctaggagtaggagccccagaccccgcggggacagcgcttaccatagtcaaagacactctctgctgacacctgtcacacctttgtctcctcctggtctggaagaggaagacgtgaatggttatgtcatgcccgatacccacctcaaggggactccatctagccgggaaggaactctgtcctccgtgggcctgagcagcgtgctgggcaccgaggaagaagacgaggacgaagagtacgagtatatgaatcgacgtcgacgccatagtcccccccatcctccgcgcccatcaagcttagaagaacttggttatgagtatatggatgttggatctgacctgagtgcgagcttaggaagtacacagagttgccccctacatccagtgccaatcatgccaaccgcaggtaccactcctgacgaagattatgaatatatgaacaggcagcgcgatggagggggccccggaggagactatgctgcgatgggggcatgccctgccagtgaacagggatacgaggaaatgagggcgttccaaggccccggccaccaggctccccacgtgcactacgccaggcttaaaactttgaggagccttgaagcaaccgattctgctttcgacaatcctgattattggcactctagattatttcccaaagccaacgctcagcgtacttag

SEQ ID NO: 17939 - DNA, 996 bp, synthetic construct
  misc_feature 1..996: note = Description of Artificial Sequence: Synthetic coding sequence
  source 1..996: mol_type = other DNA
atgcgcgctaacgacgccctccaggtccttggcttgctattctccttagcccgcggtagtgaggtgggcaacagccaggctgtatgcccggggaccctcaatggactgtccgtgaccggagatgccgagaatcaatatcagaccttatacaagttatacgaacgttgtgaagtggtgatggggaatctggagattgttctgacaggtcacaatgcagacctttcttttctgcagtggattagggaggtgactggttacgtgctggtggccatgaatgagttctccacactgccactgccgaatctgagagtggtacgcggaacgcaggtgtatgatggcaagttcgctatcttcgtcatgctaaattataataccaattcttcacacgccctgcgacagctccgcctcacccagctgactgaaattctgtctggcggagtgtatatcgaaaagaatgataaactgtgccatatggataccattgattggagagatatcgtgcgtgaccgggacgccgaaattgtggtcaaggacaacggccggtcgtgtccaccatgtcatgaggtgtgcaagggtcgatgctgggggcctggtagcgaagattgtcagactctgaccaaaactatatgcgcgccgcagtgcaacggacactgttttggtcctaatccaaaccagtgctgccacgacgaatgtgcaggagggtgtagcgggccacaggatacagactgtttcgcatgtaggcactttaacgactctggggcgtgtgtccccagatgcccgcagcccctcgtctataataaactcacattccagcttgaacctaatccacataccaaataccagtacggtggagtgtgcgtcgcgtcctgcccccataattttgtggtcgatcaaacgtcttgcgtgcgcgcttgtccacccgacaagatggaggttgacaaaaacgggcttaaaatgtgcgagccctgcggtgggctttgccccaaggttttctag

SEQ ID NO: 17940 - DNA, 552 bp, synthetic construct
  misc_feature 1..552: note = Description of Artificial Sequence: Synthetic coding sequence
  source 1..552: mol_type = other DNA
atgcgggccaacgacgcactgcaggtgctcgggctgctgtttagcttggccagggggagtgaagtggggaatagtcaagccgtgtgccccggaaccctgaacggcctttcagtgaccggtgatgcagaaaaccagtaccagaccctttacaaactctatgagcggtgcgaggttgtcatgggtaatctggagatcgtcttgacaggtcataacgcagacctcagttttctgcagtggatccgggaagtgaccggctacgtactcgtggccatgaatgagttctccactctcccactgccaaatctgagggttgtcaggggaacccaggtgtatgacgggaaattcgccatcttcgtgatgctgaattataatacaaactcatcgcacgcactcagacagcttagactcacacagttgacgggccaattcccaatggttccttcaggcctgactcctcagccagcccaggactggtatctgcttgatgatgacccgcgcttattaactctgtctgcttcaagcaaagttccagtaacactggccgccgtgtag

SEQ ID NO: 17941 - DNA, 3852 bp, synthetic construct
  misc_feature 1..3852: note = Description of Artificial Sequence: Synthetic coding sequence
  source 1..3852: mol_type = other DNA
atgggcaatctggagatcgtgctcacaggacacaatgccgacctgagctttctgcagtggatcagagaggtaactggatacgtactcgtcgctatgaacgaatttagtacactccccttacctaatctgcgagtagttaggggcactcaggtatacgacggaaaatttgcaatttttgtcatgctaaattataataccaactcaagccacgctctgcgacagctgcgcttaacccagcttacagaaattctgtccggcggtgtgtacattgagaaaaacgacaaattatgtcacatggacacaatcgactggcgcgacattgtcagggacagggatgctgagatcgttgttaaagataatggccgaagttgtccgccgtgccacgaagtgtgtaagggcaggtgttggggtcccggttctgaggattgccagaccctgacaaagacaatttgcgccccacagtgcaatgggcactgctttggccctaatcccaaccagtgctgtcacgatgagtgcgccggtggctgttccggcccccaggacacggattgcttcgcctgtagacacttcaatgacagcggcgcctgcgtaccacgatgcccacagcccctggtctataataagctcacctttcaactggaacctaaccctcatactaagtatcaatacgggggggtttgtgtggcatcttgcccccataacttcgtggtggaccagacttcatgtgttcgggcttgtccgcctgataagatggaagtggacaaaaatggcctcaagatgtgcgagccttgtgggggactgtgtcccaaagcctgtgaagggacgggctctggctccagatttcagactgtggacagcagtaacatagacggctttgtcaactgtactaagattttggggaatttggactttttgatcaccggcctcaacggagatccgtggcataaaattcccgcactggatcccgaaaaattaaatgtttttcgaacagtgagggagatcactggttatcttaatatccaatcctggccacctcatatgcacaacttttcagtcttttctaatctgacgaccattggtgggaggtcgctgtacaatagggggttcagcctgctgattatgaaaaatctcaacgtcactagcctgggatttagatctctcaaggagataagcgccggacggatctacattagcgcgaaccgacagttgtgttatcaccattctttgaattggacgaaggtgcttcgaggtccaacggaagaacgtctcgacatcaaacacaatcgaccacgccgcgactgtgtagccgaaggcaaagtctgtgaccctctgtgttcttctggcgggtgctggggacccggtcccgggcagtgcttaagttgtaggaactactcgagaggcggggtgtgcgtgacccattgtaactttcttaacggagagcctagggaatttgcacacgaggcagagtgtttctcttgccatcccgagtgccaacctatggaaggcacagcgacttgcaacggttccggctcggatacctgcgcccagtgcgcgcatttccgggacggtcctcactgtgtgtcctcttgtccacacggagtgctcggtgcaaaaggacccatttataaataccccgacgtgcagaatgagtgtcggccctgccacgagaattgcacacaggggtgcaaggggccggaactccaggactgtctgggacagactttggtgttgataggtaagacccacctcacaatggccttgactgttatcgctggattggtggtgatctttatgatgctaggagggacgttcttatactggcgtgggcgccgcatccaaaacaagcgtgccatgcggcgctatctagaaagaggggagtctattgagcctctggatccttccgagaaggctaacaaagtgttggcgagaatctttaaagagaccgagcttaggaagctaaaggttcttggttccggggtgtttggtaccgtgcacaaaggggtctggattcccgagggcgagtctatcaagatccccgtgtgcatcaaggtgatcgaagacaagtcgggtaggcagtcatttcaggcggtgaccgaccatatgctggccatagggtcattggaccacgcgcatattgtaaggttgttaggcctgtgccctggttccagcctacagctagttactcagtatctgccactgggaagtctcctggatcatgtacgccagcaccgcggagctcttggacctcagctgcttctaaattggggcgtacagattgcgaaggggatgtactatttggaggagcatggaatggtacatcggaacctcgcagccaggaatgtgctgctaaaatccccttctcaagtacaagtggcggacttcggggttgcagacctgttgccgcctgacgacaagcagttgctgtatagcgaggcaaagacgccgatcaagtggatggccttggaatccatacacttcgggaagtacacgcatcaaagcgacgtgtggtcctacggggtcaccgtttgggaacttatgactttcggggctgaaccttatgccggcctgcgactcgctgaagtcccagatctgctggagaagggagaacgtctagctcagccccagatttgcactatcgacgtctacatggtgatggtgaagtgttggatgattgacgaaaatattagacctacctttaaggaactcgctaacgagttcacacggatggcgcgggatcccccccggtacttagtgataaaaagggagagtggaccaggcatagctccagggcctgagccacacggactcactaacaagaagctggaagaagtggaactggagcccgaactggacctagatctcgacttggaggccgaagaggacaacctcgctactacgacactgggatcagccctgtctctgcctgttggtacgctgaaccgaccgagggggtcgcagagtctcctgtcaccctcaagtggctatatgcccatgaaccagggcaacctgggcgagtcttgccaggagtccgcggtctccggatctagcgagcgctgtccaaggccagtgtcccttcaccccatgccgagaggttgtctagccagcgagagcagcgagggccacgtgaccgggagcgaggcagagctccaggagaaggtcagcatgtgcagaagcagaagtcgatcccggtccccaaggcccagaggcgattccgcatatcattcccagaggcactcactgttgacgcctgtcacaccgctgtcccctcccggcttggaggaggaggatgttaatggctacgtcatgccagacacccacctcaagggcaccccaagctccagggagggcactctctcttcagtgggactgagtagtgttctaggtaccgaggaggaggacgaagatgaagagtacgaatacatgaacagacgaagacgccattccccaccacatcctccaaggccaagctctctggaagaacttggatatgagtatatggacgtaggcagtgacctctctgccagcttgggaagcacccaatcctgccctctgcaccctgtgcccataatgcccaccgcggggaccacgcctgacgaagattacgaatatatgaacaggcagcgcgacgggggaggcccggggggagattatgctgcaatgggtgcatgccctgctagcgagcagggttacgaggaaatgcgagcctttcagggaccagggcatcaggctcctcacgttcactacgctcggctgaagacactacgatcactggaggccacagatagcgcttttgataaccccgattactggcattctcgcctcttcccaaaagcaaacgcccaacgtacctag

SEQ ID NO: 17942 - DNA, 2100 bp, synthetic construct
  misc_feature 1..2100: note = Description of Artificial Sequence: Synthetic coding sequence
  source 1..2100: mol_type = other DNA
atggcactgacagtcatcgccggcctggtggtgatattcatgatgttgggcgggaccttcttgtactggcgtggaaggcggattcagaacaagcgcgccatgagacggtatttagaacggggcgagtcaattgaaccactggacccttcggagaaggccaacaaggtactagcaagaatttttaaagaaacagagctgcggaagctgaaggtcctgggatcaggagttttcggcaccgtgcacaaaggggtgtggataccagagggggagtccattaagatcccagtatgtataaaggttatcgaggacaaatcaggtcgtcaatctttccaggccgtgaccgatcacatgttggctattggtagtttagaccacgctcatattgtgcggcttctgggcctttgcccgggctcctcattacagctcgttacccaatacctcccactaggtagcctgttggaccatgttagacagcaccgcggggccctgggaccacagctcctccttaattggggcgtgcagatcgcaaaaggcatgtactatcttgaggagcatgggatggtgcatcggaatctggcggcaagaaacgtcctgcttaaatcccccagtcaggtgcaggtagcagattttggcgtggccgatttactgcctcctgacgataagcaattgctgtattctgaagcaaaaacgcccataaaatggatggccttagagtcaatccactttgggaaatacacccatcagtctgatgtgtggagctatggcgtcacggtttgggagctgatgacctttggcgctgaaccctatgcaggactccgtctggccgaggtacctgacctcctcgaaaaaggcgagagactcgctcaaccacagatttgcacaattgacgtctacatggtcatggtaaaatgttggatgatcgatgagaatattagacctacctttaaggagttggctaacgagtttacccgcatggcacgggatcccccgcggtacctcgtgataaaaagggagtccgggccagggattgcccctggaccagagccccatggcctgactaataaaaagctcgaagaagtcgaactggagccggaactcgatctcgatctggatcttgaagcggaggaggacaacctggcaaccactaccctcggctccgccctatctttgcccgtcggaaccctgaataggccccgagggtcgcagagccttcttagcccatcatctggctatatgcctatgaatcaggggaacctcggagagtcatgccaggagagtgcggtgtccggtagctctgaacgctgcccacgccccgttagcctgcacccaatgccaagaggatgcctcgcaagcgagtcctctgagggacacgtgacggggtcagaagctgagctgcaggagaaagtctctatgtgcaggtcaaggagtcgcagcaggagtccccggcctagaggagacagcgcttaccacagccagcgccacagtctcttgacaccagtgactcccctgagcccccccggactagaggaagaggacgtgaatgggtatgtgatgccagatacgcacctcaaggggaccccctctagtagagaaggcactctgagctccgtgggtctctccagtgtactaggaacagaagaagaggacgaggacgaggaatacgagtatatgaaccgccgcagaaggcactctccacctcatccacctagaccctctagcctggaggagctggggtatgagtacatggacgtggggtctgatctgtctgcctccttgggcagtacgcaatcgtgtcccctccatccagtgcccattatgcccactgccggcactacgcctgatgaagattacgagtacatgaatcgacagcgggacggcggcgggccaggaggagactatgccgctatgggagcatgcccagcctcggagcaaggctatgaggagatgcgtgcctttcagggtccagggcatcaagctccccacgtgcattacgcgcggttaaaaacattgaggagccttgaggcaaccgacagcgcttttgataatcccgattattggcacagccgactctttccaaaggccaacgctcagaggacttag

SEQ ID NO: 17943 - DNA, 381 bp, synthetic construct
  misc_feature 1..381: note = Description of Artificial Sequence: Synthetic coding sequence
  source 1..381: mol_type = other DNA
atgcgggcaaatgacgcattgcaggttctgggtctactcttcagcctcgcacgcgggtctgaagtgggcaacagtcaggccgtgtgtcctgggacgctaaatggccttagtgtgaccggggacgccgagaatcagtaccagacgctttacaaactctacgaaagatgtgaagtcgtgatgggcaacctggagatagttctgacaggccataacgcagacctgagcttcctccagtggatcagagaagtgactggctacgttttggtggcaatgaatgaattcagcacactgcccctgcctaacctgagggtggtgaggggcacccaggtctatgacggaaaattcgccatctttgtgatgttgaattacaacacaaactag

SEQ ID NO: 17944 - DNA, 2766 bp, synthetic construct
  misc_feature 1..2766: note = Description of Artificial Sequence: Synthetic coding sequence
  source 1..2766: mol_type = other DNA
atgcgagctaatgatgccctccaggtgctcggcctcctgttctctctggctcgaggctccgaagtgggcaactcccaggcagtctgccctggcacccttaatgggttgagcgtcaccggagatgccgagaatcaataccagaccctttacaaactatatgagaggtgcgaggtggtgatgggtaacctggagattgtccttactggacacaatgctgatctgtcctttctccagtggattcgcgaagtgaccggatatgtcctcgtagccatgaatgaattctctaccctacccctgcctaatttacgcgtggtgcggggcacccaggtgtatgacgggaaattcgcaatctttgtgatgctgaactataacacaaacagtagccatgccctccgtcaacttcggttgacacagctcaccgaaattctgtcgggtggcgtgtacatcgagaaaaatgataaactgtgtcacatggacactattgattggcgcgacattgtccgcgacagagacgccgagatcgtggttaaagacaacggacgtagctgccctccatgccatgaggtgtgtaagggaagatgctgggggcccggatccgaggactgccagacactcacaaaaactatttgcgcaccacagtgtaacggccactgctttgggcccaatcctaatcagtgttgccatgatgagtgtgccggagggtgctctggccctcaggacacagactgcttcgcgtgccggcacttcaacgatagcggggcctgtgtaccccggtgcccccagccattggtttacaataagcttacctttcagctcgaaccaaatccccacacaaaataccaatatggaggcgtttgtgtggctagttgtccccataatttcgtagtggatcagacctcctgtgtgagagcatgcccacctgataaaatggaagtcgataagaatgggcttaaaatgtgtgaaccctgcgggggcctctgtccgaaggcatgcgaggggactgggtcaggatcccgttttcaaacagtcgacagcagtaatatcgacggcttcgtaaactgcactaagatccttggaaatctcgactttctgataaccggactcaacggagacccttggcacaagatcccagccttagatcccgagaaactgaacgtatttaggactgtaagggaaataacaggttatctgaatatacagtcctggcccccacatatgcacaacttttcagttttcagtaatcttactacaattggaggccggtccctgtacaaccgcggattctctttgctgattatgaagaacctgaacgtgactagtctggggtttagatctctgaaagagatcagtgccggccgcatatacatctccgccaatagacagctctgctaccaccattccctcaactggaccaaggtgcttaggggcccaaccgaagaaagactcgatattaagcacaacaggccccgccgcgactgtgtggcagagggaaaggtgtgtgatcccctttgctccagcggcggttgctggggtccagggcccggacagtgcctgagttgtcgcaactacagtagaggcggagtgtgcgtgactcattgcaactttcttaatggcgaaccgcgcgaatttgcccatgaagctgagtgcttttcttgccatcctgagtgtcaacctatggaagggaccgccacctgtaacggatcaggcagcgatacctgcgcccagtgcgcacacttcagggacggtcctcattgtgtgagctcgtgtcctcacggagtcttgggtgcaaaagggcctatctacaagtacccagacgtgcaaaatgaatgcagaccctgtcatgagaattgtacgcaggggtgcaaggggccagaacttcaggattgtctcggacaaacgctggtgctcattggtaagacgcacttgaccatggccctgaccgtaattgcaggcttggtggtaatctttatgatgctgggcggcacattcctgtattggagaggaagacgaatccagaacaagcgcgctatgaggcggtacctggagaggggagaatccattgagccactggacccctcagagaaagcaaacaaggtcctcgctaggatattcaaggagactgagctgagaaagttgaaagtgcttggcagcggagtcttcggcaccgtgcacaaaggggtttggatacctgaaggtgagtcaatcaagattcctgtttgtattaaggtgattgaggacaagtctgggagacagtccttccaggcggtgacggatcacatgctagcaataggatctctggaccacgctcatattgtgaggctattaggactgtgtcccggctcaagtctccaactggtaactcagtacttgcctttggggtcccttttggaccatgttagacagcaccgcggcgctctggggccacagctccttctgaactggggtgtgcaaatcgctaagggcatgtattatctggaggagcacgggatggttcatcgcaacttggcggcgcgtaacgtcctcctgaaaagcccaagtcaggttcaggttgccgattttggggtcgctgatctgctccccccagacgacaaacaactgctgtacagcgaggccaaaactcccataaaatggatggccctggagtccatccacttcggaaaatatacccatcagtcagacgtgtggagctacggccaatgtatctggatgccatcgttgcccagcttggcccccgtttcaaatctgccttttgagactccttcatag

SEQ ID NO: 17945 - DNA, 10191 bp, synthetic construct
  misc_feature 1..10191: note = Description of Artificial Sequence: Synthetic coding sequence
  source 1..10191: mol_type = other DNA
atgtttatcaacattaaaagcatcctgtggatgtgctcaacacttatcgtaacccacgcattacacaaagtcaaagtcggcaaaagcccccccgtgagaggaagcctgtctggtaaggtatcgctgccctgccacttcagcacaatgcccacattgccacccagttacaacacttcagaatttctccgaatcaagtggtccaaaatcgaagtggacaaaaatgggaaagatcttaaggagaccacggtcctcgtggctcagaatggtaatattaagattggccaagactacaaaggcagagtgagtgttcctacccacccagaggcagtcggcgacgcctctctgacggtcgtgaaactgctggcctctgacgcgggcctgtataggtgcgacgtcatgtatgggatcgaagatacacaggacaccgtcagcctaactgtcgatggagtcgtgtttcattatagggccgctacatcaagatacaccctgaacttcgaggccgctcaaaaagcttgcctggacgtgggggccgtcatagccactcccgagcagttattcgccgcctacgaagacgggttcgagcagtgtgatgctggttggctggccgatcagacagtgaggtacccaatccgagcccctcgcgtcggatgctacggagacaaaatgggtaaagccggagtgcgcacttatggcttcaggagtccccaggagacctacgacgtttactgctatgtcgatcatcttgacggtgacgtcttccacctgaccgttccctctaaatttaccttcgaggaggccgcaaaagagtgcgagaaccaggacgccagactcgccacggttggggagttgcaggccgcctggagaaatggatttgatcagtgcgattatggatggctctctgatgctagcgtgagacaccctgtcacagtagcaagagcccagtgcggcggcgggttgcttggagtgagaacactgtacaggtttgagaatcaaacagggtttccaccacctgattccagattcgatgcttattgttttaagccgaaggaagccactacaatcgatctatccatcctagccgagacagcgtccccgtcactgtctaaggaacctcagatggtatcagacaggactacacctatcattccactagtggatgagctgccggtcattcctacagaatttccaccagtggggaacattgtttcctttgagcagaaagccacagtgcagcctcaggcaattacagatagtctcgctactaagctgcccactcctaccggatcaactaagaaaccgtgggacatggacgattatagtccaagcgccagtggacctctggggaagttagatatctccgagatcaaagaggaggtgctgcagtcgaccaccggcgtaagccattacgctactgactcatgggacggagtggtggaagacaaacagactcaggagtccgtgacacaaatcgagcagatcgaggtgggaccactcgtcacttccatggagattctgaaacatatcccgtcaaaagagttccctgtgacagaaacgcccctggtgactgctcgcatgatcctggaatctaaaacggagaaaaagatggtctcgaccgtctcagaactggtgactacaggccattatggattcacgctgggagaagaggacgacgaggataggacgctgacggtggggtctgacgagtctacactgatatttgatcagatcccagaagtcatcaccgttagcaagacgtcagaagacacgatccacacccacctcgaggatctggaaagcgtgtcagcctctactaccgtgtcacccctcattatgcctgacaataacgggtcctctatggatgattgggaagagcgccagacctcggggcgcatcacagaggagtttctggggaagtacttgagcaccactcccttcccttcacagcaccgcacggaaatcgagttattcccttactcaggagacaagatcctggtcgaggggataagcactgtgatatatccttccctccagaccgaaatgacacaccggcgggagaggacagaaacacttatccccgagatgagaacagacacgtatactgacgagatccaggaagagatcaccaaatcgccatttatgggtaagacagaagaggaagtgttcagtggcatgaaactttccacgagcctgtccgagcccatccacgtgactgagtccagcgtggaaatgacaaagagttttgatttcccaacactgatcacaaaactttctgcagagcccacagaggtgcgggatatggaggaagactttaccgcgacaccaggaaccactaagtacgacgagaacattacaactgtgctgcttgcccatgggactctgagtgtggaagcagccaccgttagcaagtggtcttgggatgaagataatacaacttctaaacccctggagtccaccgagccctctgcaagcagcaagctaccccccgccttgcttaccaccgttggaatgaacggaaaggacaaggatattccctcctttaccgaggacggtgccgatgagtttacgctcattcccgactcaacacagaaacaactggaggaagttacagacgaagacatcgcggcgcatggaaaatttactatcagatttcagcccactaccagcaccggaatagcggaaaagtccaccctccgagacagcacaactgaagagaaagttcctcccatcaccagtacggagggtcaggtttacgctacaatggagggctctgctctaggcgaggtagaagacgtggatctgagcaagccagtgagtacagtgccacagttcgctcatacctcagaggtggaaggactggcctttgtgtcatattcttcaacacaggagcccacaacgtacgtggactcaagtcacactattccgctctcagttatccccaaaactgactggggagtccttgtgccaagtgtcccaagcgaggatgaagttttaggagaaccctctcaggacatcttggtgatcgatcagacacgccttgaggcaaccattagccctgaaaccatgcgaactactaaaattaccgagggcacgacccaagaggagttcccttggaaggaacagaccgcagaaaagcccgtgccggcactgagttccactgcctggacgcccaaagaggctgtgaccccgctcgatgagcaggagggcgatggctcagcctatacggtcagcgaggacgagctcttgaccggtagcgaaagggttcccgtgttagagaccacaccagtcggcaaaatcgatcattctgttagttacccaccgggagcagtaacagaacacaaggtcaagaccgatgaggtggtgacgctcacacctaggatcggcccaaaggtttccctctcacctgggcccgagcagaaatacgagacggaggggtcctctaccacaggattcaccagttcattgagcccgtttagcacccacattacccagctcatggaggaaacaacaacggagaagacttccctagaggacatagatctggggagcggcctttttgaaaagcctaaggccactgaactgatcgaattttcaaccattaaagtcaccgtaccaagtgacatcacaacagctttctcttctgttgatcggctgcacactactagcgcatttaagcctagctcggctattacaaagaaaccccctctcatcgacagagaacccggtgaagaaaccacttctgacatggtgattattggagagtccacatcccatgtgccaccaaccactttggaggacattgtggccaaggaaaccgagactgacatagacagggagtactttacaacatcatcccctcctgcaacacaacccactcggccgcccacagtggaagataaggaagcctttggtccccaagccctaagtaccccacagcctcctgcctctacaaagttccaccccgacattaatgtttacattatcgaggtgcgcgaaaacaagactggaaggatgtccgatttgtccgtgatcggacatcccattgacagcgagagcaaggaagatgagccgtgtagcgaggagaccgaccctgtccatgatctcatggccgagattctcccggaattccccgacattattgagattgatctgtaccactctgaagaaaacgaggaggaggaggaggaatgcgcaaacgcaaccgacgtgacaacaaccccatctgtgcagtacattaatggtaaacacctggttaccactgtgcctaaggatcctgaggccgcggaggcgcgacggggccaatttgaatctgtagcaccttctcagaatttttctgactcatccgagagcgacacccacccatttgtcattgccaaaactgaactttcaactgccgtgcaacccaatgaatcgactgagaccaccgagagcctggaagttacatggaagccagaaacctaccctgagactagtgagcattttagtggtggggagcccgacgtcttccccacagtgcccttccatgaggagtttgaatccggcaccgcaaagaaaggtgcggagagtgtgacggaaagggacaccgaagttggacaccaggcccatgagcacactgagcctgtgtccctgttccccgaagaatcatccggggaaatagcaatcgatcaggagagccagaaaatagctttcgctcgtgccaccgaagtcacatttggcgaagaagttgagaagagcacttccgtcacctatacgcctacgatcgtgccctccagtgcctcagcgtacgtgtcagaggaggaggctgtgacactgatagggaatccatggcccgatgaccttctttccaccaaagagtcatgggtggaggctaccccacgccaagtggtagaattaagcggcagctccagtatacccatcaccgagggaagcggagaagcggaggaggacgaagatacgatgttcacgatggttactgacctaagccagcggaacacaaccgatacactcattacactcgacacatctcgaattataaccgaaagctttttcgaggtgcccgccacaacgatctacccagtatctgaacagccgtccgcgaaggtcgtgcctacaaagttcgtctcagagactgacacttcggagtggatatcttccaccactgtagaagagaagaaacgaaaggaggaagaaggaacaactgggacagcgtcgacatttgaggtgtacagtagcacgcagcgttctgatcagctgattctgcctttcgaattagagtcaccaaacgtcgccaccagttccgatagcggtacccggaagtcgttcatgagtcttacaacccccacccagtctgaacgtgaaatgaccgactctacacccgtgttcactgaaactaataccttagaaaatctgggcgcccaaacaaccgaacatagttcaatccatcagccgggcgtgcaggaagggctgactactcttccgaggtccccggcctccgtgttcatggagcagggcagtggcgaagcagctgcagaccctgaaaccactactgtctctagttttagcctgaatgtggagtacgccatccaggctgaaaaagaagtcgccggaacactgtccccccacgtagagaccactttttccaccgaacctacggggttggtgctgtctactgtgatggaccgagtcgttgccgaaaacatcacccagacatctcgggaaattgtgatcagtgagaggttgggagagccaaattatggcgccgagatacgcggattctcaacagggttccctttggaagaggatttttcgggggacttccgtgagtactcaacagtgagccaccccatagccaaggaagagaccgttatgatggaagggagcggagacgcagcctttagagatacacaaacctccccgtccacggttccgacctcagtgcacatttcacatattagtgactccgagggcccaagctctaccatggtgtccacaagtgctttcccttgggaagagtttacctcatcggcggagggatctggggagcaactggtcacggtaagtagctcagtcgtcccggtactgcccagcgcagtccagaaattcagcgggactgctagttccataattgatgaagggctgggagaagtgggcacagttaatgaaattgataggcggtcaacaatcctacctacagcggaggtagaggggaccaaagcccccgtggagaaagaggaggtgaaggtgtcagggaccgtctcaaccaactttccgcagactattgagccagccaaactgtggtctaggcaggaggtgaaccccgtgcgacaggaaatcgagtcagaaacaacgtcagaggagcagatccaggaggaaaaatcgtttgagtcccctcaaaattcccctgccaccgaacaaaccatatttgattctcagacctttacggagaccgagctgaaaaccactgactatagtgtgctcacaactaaaaagacttacagcgatgataaagagatgaaagaagaggatacatcactcgtgaacatgtccacgccagaccctgacgcgaacggattggagtcttatactaccctgccagaggccactgagaaaagccattttttcctggctacagcacttgtaacggagtcaatacccgccgagcatgttgtgacagattccccgatcaagaaggaagagtcaaccaagcacttcccaaaaggcatgagacctaccatacaggagagtgacactgaacttttatttagcgggttgggatcaggagaggaggttttacctactctgccgactgaatcggttaacttcaccgaggttgagcagataaacaatactctctaccctcacaccagccaggtcgaaagcacatccagtgacaaaattgaggacttcaaccggatggaaaacgtggccaaggaagtcggacccttggtgagccagacagatattttcgaaggcagcggctcagtgacctccaccactctgattgaaatcttgagcgacactggggcagaagggccaaccgtcgcacccctgcccttcagcactgatattggacatccgcagaatcagactgtgcgctgggcagaagagatccaaacatcccgccctcaaaccatcacggagcaggattccaataaaaattctagcacagcagagatcaatgagacaacaacgtccagtacagattttctcgcgagggcatatggtttcgagatggcaaaagaattcgtaacttctgcccccaaaccttctgacctgtactatgagccatctggggagggcagtggtgaagtggacatagtggactctttccatacttctgccactacccaggccacccgacaagagagcagtaccacattcgtaagcgacggatcactcgaaaaacatcccgaggtgccatctgccaaagccgtgaccgccgacggcttccctactgtcagcgtgatgcttcccctgcactcagagcagaataaaagttcacccgaccccacctccacgttatcgaatacagtgagttacgagaggagcacagacggctcctttcaggaccgctttagagagttcgaagactccaccctgaaaccaaaccggaagaagcctaccgaaaatataatcatcgacctcgacaaggaggacaaagacttgattctgactataacagaatcaacaatccttgaaatattgccagagctcacatccgacaagaacaccatcatcgatatcgatcacaccaagcccgtatacgaagacatcctggggatgcaaactgatatcgacactgaggtgccgagcgaaccacatgacagtaatgacgaaagcaacgatgacagtacacaagttcaggaaatctacgaagcggctgtcaacctatctctcactgaggagaccttcgaggggtctgctgatgtgcttgccagctatacccaggcaacacatgatgagtccatgacgtacgaagacagaagtcagttagaccatatgggatttcactttacaactgggatccccgccccctctactgaaaccgaactggatgtgcttctacctacagcgacctcgctccccatacctcgcaaatcggccaccgtaattcctgagatagagggcatcaaggccgaggccaaggccttggacgacatgtttgagtcctcgactctgtctgatggtcaggcaatcgccgatcaatcggagattattccgaccctgggtcagttcgagcgcacacaggaggaatatgaagacaagaagcatgctgggccatcttttcagcccgaatttagctccggcgcagaggaagcacttgtggaccacacaccgtacctctcaatcgctaccacccatctgatggatcaaagcgtgaccgaggtccctgacgttatggaagggagcaacccgccgtactacactgacacaaccttggcggtgagcaccttcgcaaagctgtcatcacagacaccaagttcaccgctgactatctactctggctccgaggcctccggacataccgaaatacctcaacctagcgctctccccggtattgacgtcggctccagtgtgatgtccccacaggactctttcaaagagatccacgttaacattgaggccacctttaagccctctagcgaagagtatttgcacatcactgagccaccttctctgagtccagacacgaagctggaaccaagtgaagatgatggaaagcccgaattactggaagagatggaagctagccccactgaactgatcgccgtggagggcaccgagattctccaggatttccaaaataagaccgacggtcaggtgtccggcgaggctataaagatgttcccaaccatcaagaccccggaggcaggaaccgtgattaccacggcggacgaaatcgagttggaaggtgcaacccaatggccacactctactagtgcttccgccacatatggcgtcgaagccggggtcgtgccgtggctttctcctcaaacctctgaaagaccaaccctgagctctagtcctgagatcaaccccgagacccaggcagctctgataaggggccaggacagcacaatcgccgcgagcgaacagcaagttgccgcacgaattctcgactccaatgaccaggcaaccgtgaacccagttgagttcaacactgaggtggccacacccccgttcagccttctggagactagcaatgagactgactttctcatagggataaacgaagagagtgtcgagggtacggccatctacctgccgggacccgacagatgtaagatgaacccgtgtttgaatgggggcacctgctaccccaccgagacatcatatgtatgcacctgtgtgcctggctactctggcgatcagtgcgagctcgattttgatgagtgccactccaatccttgtcgaaacggagccacatgtgtcgacgggttcaacaccttccgctgtctttgtctccctagttatgtgggcgcactgtgtgaacaagacactgagacatgcgattacggctggcacaagtttcagggccagtgttacaagtacttcgctcacagacgtacttgggacgcagccgaaagagaatgccggctacagggagcacatcttacctccattctttcccacgaagagcagatgttcgtcaacagggtggggcatgattaccaatggatcggactgaacgataaaatgttcgaacatgatttcagatggacagacggctccaccctccagtacgaaaactggcggcccaatcagccagatagtttttttagcgccggagaggactgcgtggtcataatttggcacgaaaacgggcagtggaacgatgtgccctgtaattaccacttaacatacacttgtaagaaaggaaccgtcgcctgcggccaaccacccgtcgtggagaatgctaagaccttcggaaagatgaaaccccgctacgagatcaactccctcattcgatatcattgcaaagatggcttcatccaaagacatctgcccacaataagatgcttgggaaacggtagatgggccattcccaaaataacttgcatgaatccatccgcctatcaacgcacatattctatgaaatatttcaagaacagtagcagtgccaaggacaacagcattaatacctcgaaacacgatcaccgatggtctcggagatggcaggagagtagacgctag

SEQ ID NO: 17946 - DNA, 4929 bp, synthetic construct
  misc_feature 1..4929: note = Description of Artificial Sequence: Synthetic coding sequence
  source 1..4929: mol_type = other DNA
atgttcattaatatcaagtctatcctctggatgtgcagcacgttgatagttacccacgcactccacaaagtgaaagtcggcaaatccccacctgtgaggggctccttaagtggaaaggtgtcgctcccttgtcatttttctacgatgcccaccctccctcccagttacaatacctcagaatttttgaggatcaagtggtctaaaatcgaagtagataagaacggaaaagaccttaaagaaactacggtgctggtcgctcagaatgggaatatcaaaattgggcaggattacaagggtagggtgagcgtgcccacacatcctgaggcggtcggggacgcgtctctgaccgtggtgaagcttctcgcttctgacgcaggcttgtaccggtgcgacgtcatgtatggtattgaggacacacaagacactgtcagcttgaccgtggatggagttgtgttccactatcgcgcggcgacatctcgttacactttgaacttcgaggccgcccagaaagcgtgtttagatgtgggcgcagtcatcgccacccccgagcagcttttcgctgcctacgaagatgggtttgagcagtgcgacgccggatggttggctgaccaaacagtccggtacccaatacgggcccccagggtgggttgttacggggacaaaatgggcaaggccggggtcagaacctatggtttccgttctccccaagaaacctacgacgtttactgctatgtggaccacttagatggtgatgtttttcatctgaccgtgcctagcaagttcaccttcgaagaggccgcaaaggaatgcgaaaatcaggatgcgcgactggcaacagtgggtgagctccaagccgcctggcgtaatggttttgatcagtgcgactatggctggcttagtgatgcctcggtgagacaccccgtcacagttgcaagagctcagtgtggtggcggcctgcttggcgttaggaccctttatagattcgagaaccagaccggcttcccaccacctgacagtaggttcgacgcatactgtttcaaacctaaagaggcgacgaccatcgatctctcaatcctggccgagacagctagtccctccctatctaaggaacctcagatggtttcagaccgtacaacgcccattattcccctcgtggacgagctccccgttattcctaccgagttccccccagtaggcaacattgtttcgttcgagcagaaagctactgtacagccacaggccatcaccgactcgctcgcaacgaagctacctacaccaacaggatctaccaaaaagccttgggacatggatgactactccccttccgctagcggcccgctgggcaagctggatatttctgagattaaagaggaagtattacagagcacgacgggggtctcacactatgccaccgacagttgggacggtgtggtagaggacaagcagacacaggagtcggtcacacagatcgagcagatagaagttggacccttagtcacaagtatggagattctgaagcacattcccagcaaagaattccctgtgacagagaccccccttgtgactgcccggatgatcctggaatccaagactgagaaaaagatggtttcaactgtgtcagagctcgtcacgacaggccactacggcttcacgctgggagaagaagatgatgaggatagaacgctaacagttggttcagatgagagcacgctaatctttgaccagatcccagaggttataacagtgtctaaaacgtccgaagacacaattcacactcatctcgaagacctggaaagcgtgtctgcatctactactgtctctccacttattatgcctgacaataatggctcgagcatggacgattgggaggaaagacagacctctggtcgcattacagaggagttcctgggcaaatacctgtccaccaccccttttcccagccagcaccgtaccgagatcgaactttttccctactccggtgataaaatcctcgttgagggtatttccacagttatttatccttccctccagactgagatgacccatcgtagggaacggacagagactctcatccctgaaatgcggactgatacctacaccgacgagatacaggaggaaattactaagagtccgttcatgggaaaaaccgaagaggaagtgtttagcgggatgaagctatccacgagcctatcagaaccaattcatgtcaccgaatcctccgtggagatgaccaagtctttcgacttcccaactctgattaccaaactcagtgccgaacccactgaggttcgggatatggaagaagacttcacagccacacctggtacaaccaagtacgatgagaatattactacggttctgctggctcacggcactctgagtgtggaagccgcaactgtgagcaagtggtcatgggatgaagacaatactacctccaagcccctcgagtccaccgaaccatctgccagctctaagcttccacctgccctgctgaccacagttgggatgaatggcaaagacaaggatattcccagctttacggaggacggagcagacgagttcacccttataccagactctacacagaagcagctggaggaggttaccgatgaggacatagctgcccatggcaaattcaccatcaggtttcaaccgaccacttccaccggtatcgccgagaaatctaccctccgtgactctacaaccgaggagaaagttcccccgattacatctacagaggggcaggtctacgcaaccatggaaggatctgctctcggcgaggtggaggacgtggacttgtcgaagcctgtatccactgtgccccagttcgctcatacttctgaggtggaaggactggctttcgtgtcttattcaagcacacaggagccaacaacctatgtagacagcagtcacaccattcctctcagtgtgatacctaaaaccgactggggagtgcttgtgccgtccgtaccaagtgaagacgaggttcttggggagcccagtcaagatatacttgtcatcgatcagacccgactggaagccactataagtcccgagaccatgagaactactaaaattaccgagggtacaacgcaggaggagtttccgtggaaagagcaaacggcggagaagccagtacctgcccttagctctaccgcctggactcccaaggaggctgtgacacctctggatgaacaggagggcgacgggtcagcctacaccgtgtccgaagacgagctgctcaccggatctgagcgagtgcctgtgctggaaaccaccccagtcgggaaaatcgatcacagtgttagctatcctcccggtgccgtcaccgagcacaaggtcaagaccgatgaggtggtgactttgacacctcgcatcggccccaaggtgtctttgagccccggtcccgagcagaagtatgagacggaaggaagtagcacaacaggctttactagcagtctctcgcctttcagcacacacataacccagcttatggaagaaaccacgactgagaagacctccctggaagatattgacctggggtcaggcctctttgagaagccaaaggccacagaactgatcgagttttccaccatcaaggtcacagtgcctagtgacataacaactgcattcagctctgtcgatagacttcacaccacgtccgccttcaaaccatcatcagctatcaccaagaaaccgccgttaatagaccgggagccaggcgaagagaccacctcggacatggtgataataggcgaatccactagccatgtcccccctaccaccttggaagacatagtggcaaaggaaaccgagaccgacatcgacagagaatactttaccacaagtagccccccagctacacagcccaccagaccccccaccgtcgaggacaaggaagcatttgggcctcaggcgctgagcactccccaaccccctgcctctacaaagttccacccggatatcaatgtgtacattatcgaggtgcgcgaaaacaagaccggaccagaccggtgtaaaatgaacccttgccttaatggaggcacatgctaccccacagagacctcctatgtctgcacttgcgtgcctggatattccggtgatcagtgcgagcttgattttgatgagtgccactctaacccctgtcgaaacggtgctacctgtgtagatgggttcaatactttcagatgcctttgcctgcctagttatgtaggagctctgtgtgaacaggacaccgaaacctgtgattatggatggcacaaatttcaaggccaatgctacaaatacttcgcacacagacggacctgggacgcagcagagcgagagtgtcgcctgcagggagcccacttaacatccatcctgtcacacgaagaacaaatgtttgtcaacagggtgggccacgattaccagtggattggcctcaacgataagatgtttgaacacgacttcaggtggaccgacgggagtaccctgcagtatgagaattggagaccaaaccagcccgactctttctttagtgcaggcgaagactgcgtggtgatcatctggcacgagaatgggcaatggaatgatgtgccctgtaattaccatctgacatacacctgcaagaagggcacagttgcttgtgggcagccccccgtcgtggagaatgcaaaaacattcggcaagatgaagcctagatacgagattaattctctgatccgatatcattgtaaagacggttttattcaaagacatcttcctacaattcggtgtctcggcaatggccgatgggcaattcctaaaatcacctgtatgaaccctagtgcttaccaaaggacctactccatgaaatattttaagaactctagttccgcgaaggacaattccattaatacaagtaaacatgatcatcggtggtcacggaggtggcaagagtcccgccgttag

SEQ ID NO: 17947 - DNA, 7230 bp, synthetic construct
  misc_feature 1..7230: note = Description of Artificial Sequence: Synthetic coding sequence
  source 1..7230: mol_type = other DNA
atgttcatcaacatcaaatctattctttggatgtgtagcaccctgatcgtgacccatgccctgcataaagtgaaggtgggaaagtccccacccgtccgtgggtctctcagcggaaaggtgtccctaccttgtcacttttctacaatgcccacactgccaccatcatataatacttcggagtttctgcggatcaaatggagcaagatcgaggtggacaagaatgggaaagacttgaaagaaactacggtgctcgttgcccagaatggcaacatcaaaatcggacaagattacaaggggcgcgtctcggtgcccactcaccctgaggccgtgggcgacgccagtttaaccgtggtcaaattgctggccagcgatgcgggcctgtacagatgtgatgtcatgtacggtatcgaggatacccaggacaccgtgagcttgaccgtcgacggggtagtgttccactatagggctgctacatccagatacaccctgaacttcgaagccgcacagaaagcctgtttagacgtgggggctgtgattgctacacctgagcagctctttgcagcgtacgaggacggttttgagcagtgtgatgctggctggctggctgatcagacggtacgataccccatcagagctcccagggtcggctgttatggcgacaagatgggtaaagccggtgtccgaacttatggattccgctccccccaagaaacatacgatgtttactgctatgtggatcacctggatggggatgttttccacctgacggttccgagtaagtttacctttgaggaagccgccaaggaatgcgaaaaccaagatgccaggctggccacagtcggcgaactccaggccgcctggaggaacggcttcgatcagtgtgactatggatggctgagcgatgcctctgtgcgccatcctgtcacagtggcccgcgctcaatgtgggggcgggctgctgggagtgcgtactctctaccggttcgagaatcagacaggctttcctccacccgatagtaggttcgatgcctattgtttcaaacgccgcatgagcgacctttccgtcatcgggcacccgattgattcagagagtaaagaggacgaaccatgctctgaggagaccgacccggttcacgacctcatggccgaaattttgcctgagtttccggatatcattgagatcgatctgtatcacagcgaagaaaacgaggaggaggaagaggaatgcgccaacgcaaccgacgtgaccactactccatccgtgcagtacattaacggtaagcacctggtgacaacagttccgaaagatccggaggccgcagaggcccgcaggggacagtttgagagtgtggcccctagccagaacttttctgattccagtgaatctgacactcacccattcgtaatcgccaaaacagaactgtcgactgcagtgcagcctaacgagtcgactgagaccacagaatcattggaggtgacctggaaaccagagacttaccctgaaacttctgagcacttctcagggggcgagcccgacgtgttcccaactgtcccattccacgaagaatttgaatcggggacagctaagaaaggtgcagaatcggtgaccgaaagggacactgaggtgggacaccaggcccacgaacacactgaaccggtttccctgttccctgaagagagttcaggcgagatagctatagatcaggaaagtcagaagatcgccttcgcccgagccactgaggttacttttggcgaagaagtggaaaagtcaacctccgtcacctatacacccactattgtccctagtagcgcaagtgcatacgtaagcgaggaggaggcagtaacactgattggaaatccatggccagacgacctcctgtccaccaaagaatcttgggtggaggccacaccccggcaggtggtggagctgtcaggcagttccagtattccgatcacagaaggctccggagaagccgaggaggacgaggatacaatgttcacaatggtgacggacctgtctcagcgcaatactacagatacccttatcaccctggacacctcccgcatcattaccgagagcttcttcgaagtgcccgctactaccatatatccagtgtctgaacagcctagcgctaaggtggtccctaccaagtttgtgtccgagaccgataccagcgaatggataagcagcaccactgttgaggagaaaaagcgtaaggaggaagagggaactaccggaacagcatctactttcgaagtttactcttctacgcagcgttcggatcagctgattctccccttcgagttggaatcgccaaatgtagcaactagttccgactccgggactcgcaagtctttcatgagtctgacgacccctactcagagtgaacgcgaaatgacagattccaccccggtgttcacggagaccaatacactggagaaccttggagcacagacaacggaacacagttcaatccaccagccaggcgtccaggaggggctaactaccttgcccaggtctccagcatcagtgttcatggaacaggggtccggtgaagcggcagccgatccagaaaccactactgtgagcagtttcagcctgaacgttgagtacgctatccaggcagagaaagaggttgcaggcactctgtcaccccacgtagagacaactttttccaccgagccaaccggactcgtgctgtccaccgtcatggacagggtcgttgcagaaaatatcacacagactagcagagaaatagtaatcagtgagagactgggtgagcccaactacggagctgagatccgcggattttccacgggctttcccttggaagaagacttctctggcgacttcagagagtactcaactgtttcacacccaattgcaaaagaagagaccgtgatgatggagggctcaggcgatgcggcattccgggacacacagaccagtccaagcactgtccctaccagcgtgcatattagccacattagcgactctgagggccctagcagtaccatggtatccaccagtgcctttccatgggaagaatttacatccagcgcagagggatctggagagcagctggtgacagtatccagtagcgtagtgcccgtgctgccatccgccgttcagaagtttagtggcacagcctcttctatcatcgacgagggattaggcgaagtggggactgtgaatgagatcgatcgtcgtagtacaatcctgcccacagcagaggttgagggcacaaaagcccccgtggagaaggaggaagtgaaagtgagcgggaccgttagcactaactttcctcagacgatcgaacccgctaagctgtggtcgcggcaggaggtgaaccctgtgcggcaggagattgaatctgagaccacttcggaggaacagatccaggaggaaaagagttttgaatcaccgcagaactcgcccgcaacggagcagacaatctttgacagccagacctttactgaaaccgagctgaaaaccactgattatagcgtccttactacaaaaaaaacatactccgatgacaaggagatgaaggaggaggatacatctctcgttaatatgtcaactcctgatccagatgccaatggactcgagtcatacactactctaccagaggctaccgagaagagccacttctttctcgcaactgctctggtgaccgagagtattccagcagagcacgtcgtcaccgattcaccgattaagaaagaggagtcgaccaaacatttccctaaggggatgcgccccacaattcaagaatcagacaccgaactgcttttcagtggtctgggctcaggagaagaggttctacccaccctcccaacagagtcagtgaatttcacagaagtggagcagatcaacaacactctctacccacacacaagccaggtggaatccacctcctctgacaagatcgaggattttaatcgcatggagaatgttgccaaggaagtgggaccgctagtctcacaaaccgatatatttgaagggtccggcagcgtaacctctacgacgcttatagagatcctgtctgacaccggcgcagagggacctacggtagcccctttgcctttctccaccgatataggccatccccaaaaccagacagtgcggtgggctgaagagatccaaacatcccgaccccagaccatcaccgagcaagactcaaataagaattcgtcaacagcagaaattaacgagactacaacgagttcaaccgatttcctagcaagagcatacggcttcgaaatggccaaggagttcgtgactagtgccccaaagccatcagatctgtattatgagcccagcggtgaagggagcggagaggtggacatcgtggattcatttcatacaagtgctaccactcaggcaacgagacaggagagttcaactacatttgtgtccgatggtagcttagagaaacaccccgaggtgcctagcgctaaggccgtgactgccgacggatttcccacagtgtcagtaatgttgcccttacacagtgaacagaataagtcctcgccagatcctacatcaaccctctctaataccgtgtcctacgaaaggagcactgacggtagctttcaggataggtttcgtgagtttgaagacagtaccttgaagcccaaccgaaaaaagccgacagagaatatcatcatcgacctggataaggaggataaagatctgattctgactatcactgaatcgactattctggagatcctaccagagctgacatccgacaaaaacactatcatcgacattgaccacaccaagccagtttatgaggatatccttggaatgcaaactgacatcgacacagaagtccctagtgagccccatgattctaatgatgaatccaacgacgactcaacccaagtgcaggagatctatgaggctgctgtgaatctgtcccttaccgaagagaccttcgagggctccgcagatgtgctggcatcatatacccaggccacccacgacgagagtatgacctatgaggacaggtcgcaactcgaccacatgggttttcattttaccaccggtatacccgctccttctacagagactgagctagacgttcttctaccaacggccacatcattaccaatacctcgcaagagcgccacagtgatccctgagattgagggtatcaaggctgaggcgaaggcccttgacgacatgttcgagtcctctaccctgagtgacggccaagccattgccgaccagagcgaaatcatccccacgctcggccaattcgagagaacccaggaggaatatgaggacaaaaaacacgccggtccatcattccagcctgaattttccagcggcgcagaggaggcactggttgatcataccccatacctgtcaatagccacaacacacctaatggatcagagtgttaccgaagtgcccgatgttatggagggatcaaatccaccttactacacagataccaccctagcagtttccactttcgctaagcttagttcacagacaccctcaagtcctctcacgatttatagtggaagcgaagcttcaggccacactgagatccctcagccctccgcactgccagggatagacgtgggaagttctgtgatgagccctcaggattcttttaaggagattcatgtaaacatcgaggcgacatttaagcccagctctgaagaatatcttcacataaccgagcctcccagcctatctcctgacactaaactcgagccctccgaagacgacgggaaacctgaactgctcgaagagatggaggcttcccctacggagctcatagccgtggagggaactgagatcctccaggactttcagaataaaacggatggccaagtgtccggcgaagcaatcaaaatgtttcctaccatcaaaactccagaggctggcacagtgatcacaactgccgacgagattgagctggagggcgctacccaatggccccactccaccagtgccagcgcaacttatggagtcgaggcgggggtggttccttggttaagccctcaaacctccgaaagacccacactgtcttcttcacccgagattaatccggagacccaggccgccttgattagagggcaggattccacaatagctgccagcgagcaacaggtcgctgcacgcatactggatagtaacgatcaggccacggttaaccccgtcgaattcaataccgaagttgctacaccccccttctctctattagaaacgtcaaacgaaacagacttcctgataggaatcaacgaagagagtgtggaagggaccgcaatatatttgcctggccccgacaggtgtaagatgaacccctgcctaaatgggggaacatgctaccctacagaaacatcatacgtgtgcacttgcgttcctggatatagcggggaccagtgtgagctcgatttcgatgaatgtcattctaatccatgtagaaatggggcgacctgtgtcgatgggttcaatacgttcagatgtctgtgcctgccgtcatacgtgggcgccctttgcgaacaggacacggaaacatgcgattacggttggcataaatttcaagggcagtgctacaaatattttgcccaccgccgaacttgggacgctgccgagcgagaatgccgacttcaaggggcacacctcacctcaatcctgtctcacgaggaacagatgtttgttaaccgggtggggcatgactatcagtggattggactgaatgataaaatgttcgagcacgatttccgttggaccgatggctcaacactccagtacgagaattggcgccccaaccagccagattcttttttctctgcgggcgaagattgtgtggtgatcatttggcacgagaatggacaatggaatgacgtgccctgcaattatcacctcacctatacttgcaagaagggaaccgtggcatgcggacagccacccgttgtggagaacgcaaagacgtttggcaagatgaagccgcgatacgagatcaactccctgatacggtatcactgcaaagatggcttcatccaaaggcatctgcccaccattagatgtctgggcaacgggcgttgggctattccaaagatcacctgcatgaacccctctgcttatcagcgaacttactccatgaaatacttcaagaattcaagcagtgccaaggacaattccataaatacctctaaacacgatcacaggtggtctcggaggtggcaggagagtagaagatag

SEQ ID NO: 17948 - DNA, 4785 bp, synthetic construct
  misc_feature 1..4785: note = Description of Artificial Sequence: Synthetic coding sequence
  source 1..4785: mol_type = other DNA
atgccgaccttacctccttcgtacaacactagtgagtttctgcgcattaaatggtccaagatcgaagttgacaagaacggcaaggatctaaaagagactaccgtgttggtggcccagaatggtaacataaaaatcggtcaggactataaagggcgggttagtgtgcctacccatccggaggcggtcggcgatgccagcctgaccgtggttaaactgcttgccagtgacgcaggtctgtatcgctgtgatgtgatgtatggaatcgaggacacccaagacactgtcagtctgaccgtggatggggtggtattccactatcgggctgcaacatctcgatataccttgaattttgaggccgcccaaaaggcatgtttggatgttggcgcagtgatcgcaacaccagagcagctcttcgccgcgtatgaagatggtttcgagcaatgtgacgctggctggctagctgatcagactgttagatacccaataagggcccctcgcgtaggttgttatggcgacaagatggggaaggctggtgttagaacttacggctttaggtcaccccaggagacctatgacgtatattgttacgtggaccatctggacggggacgtgttccacctgacagtgcccagtaagttcacttttgaggaagctgcaaaagaatgcgagaaccaggacgctaggctcgccaccgtgggtgagctgcaggctgcatggagaaacgggtttgatcagtgcgactacggatggttgtccgacgcttcagtgcgacaccccgtgacagtggcaagggcacagtgcggtggcgggctactgggcgtgcgtaccctgtacagatttgaaaatcaaacaggctttccccccccagatagccggtttgacgcttactgtttcaaacctaaggaagccacaaccattgatctgagtattctcgccgagactgccagcccgtcactgagcaaagaacctcagatggtgtccgaccgaacgactccaatcatccctctggtcgacgagctacccgttattcccactgaattccctccggtggggaacatagtatcatttgagcagaaggctaccgttcagccacaggctatcacagattccctggcaactaagttgccaactcctaccggttctactaaaaaaccgtgggacatggacgattattctccatctgcctccggcccgctagggaaattagacatatctgagattaaggaggaggttctgcaatctacgacaggagtatcccactatgcaacggactcctgggacggcgtcgtggaggacaagcagacacaagagagcgtcactcagatcgaacagattgaggtggggcctctggtgacatccatggagatccttaaacacatcccttcaaaggagttccctgtgaccgaaaccccgcttgtaacggctcggatgatactcgagtccaaaaccgagaaaaagatggtgtctacggtgtctgagctcgtcacaacggggcactatggatttaccctcggtgaggaggacgacgaggatagaactctcaccgtcggttccgacgaatccacattgatcttcgaccagatccctgaggtgatcacagtgtccaagacgagtgaagacacaatccatactcatctggaggatctggaatccgtttcagcatctaccaccgtgtcacccttgatcatgcctgataacaacgggtcttcaatggatgactgggaagaacgacaaacttctgggagaattactgaagagtttctaggcaagtacctgagcacaaccccctttccctcccaacacaggactgagattgagcttttcccctattccggagacaaaattctggtggaaggtatcagcacagtgatctacccttcgttgcagaccgagatgactcaccgccgtgaacgcacagagacattgatccccgagatgcgaaccgacacatacacagatgagattcaggaagagattactaaatcgcccttcatgggaaagaccgaagaggaggtattctccgggatgaagctgtcgacctccctgtccgaaccaatccacgtgacagagtcctccgtggagatgactaagtcgtttgatttccctacgctgattaccaaactgtcagccgagcccacagaagtgagggacatggaagaagattttaccgcaacccctggaactacgaaatacgatgaaaacattaccacagtgctactagcacatggcaccctgagcgtcgaggcagctaccgtgagtaaatggagttgggatgaggacaacactacgagcaagccgctcgagtccacagagccgagcgctagcagcaagttgcctccagccctcttgacaactgtcggaatgaatggaaaagataaagacattccttcattcaccgaggacggcgcagatgaatttactcttatcccagattccacccagaagcagctggaagaggtcaccgacgaggatatcgccgcgcatggaaaatttacaatccgtttccaaccaacgacttcaacgggcatagcagagaagagcaccctgagagactcgactaccgaggagaaagtgccgccgattacaagcaccgagggccaggtgtacgccaccatggaaggttccgccttgggggaagtcgaagatgtagacctgagtaaacctgtttccactgtgccgcagtttgcacatacaagtgaagtagaggggttagcttttgtctcttactcttctacccaggagccaaccacttatgtagacagctcacacaccatccccctgtcagttatacccaaaactgactggggagtgctggtgccttccgtgccttcagaggacgaagtacttggagagccaagccaggatattctggtcatcgaccagacgcgcctggaggctacaattagcccagagaccatgagaactacaaagatcactgaaggcacgacccaagaagaatttccatggaaggagcaaacagccgaaaaaccggttcccgccctgtcttctaccgcctggaccccaaaggaagcggttacacctctggacgagcaggagggcgacggctcggcctacaccgtaagtgaggacgaactcctcacagggtcagagagggtgcctgtactcgaaaccactccagtgggaaaaattgatcacagcgtgtcataccctccaggcgccgtgacagagcacaaagttaaaactgatgaagttgtcacgctgacccctcgcattggtcccaaagtctcactgtcacccggaccagaacagaaatacgaaaccgagggcagctccactacaggcttcacttcctctttgagccccttctccacacacatcacgcagctcatggaggagactacgactgaaaagacttccctcgaggacatcgacctggggagcggattatttgaaaagcctaaggcgacggagctaatagagttctccaccattaaggttacggtgccctctgatatcactaccgcattcagttctgtggaccggctgcatactaccagcgcctttaagccatcttctgcaattacgaagaagccccctctgattgaccgggagccaggagaagagacaacctccgacatggtgataatcggcgagagcacatctcacgtcccccctaccactctggaggacatcgtggccaaagaaacggagactgatattgatcgggagtactttacaacctccagcccacctgctacgcagcctacccgcccccctaccgtggaggataaggaagccttcggtccccaggccctgtccacgcctcagccacctgctagcaccaagttccaccctgatattaacgtctacatcattgaggtgcgcgaaaataagacaggcccggatagatgtaaaatgaatccttgcctgaatggtggcacttgctaccccaccgaaacctcttacgtttgcacgtgcgttcccggctattccggtgatcaatgcgagctcgatttcgatgaatgccactctaatccatgtaggaatggtgccacgtgtgtcgatggcttcaacacattcagatgtctgtgtctcccatcctatgtgggggctctgtgtgagcaggacaccgagacttgcgactacggatggcataagtttcagggccaatgttacaaatacttcgctcatcggcgcacgtgggacgctgctgaacgagagtgccgccttcaaggcgcgcacttaacctccatcttgtcccacgaagaacagatgttcgtaaacagagtgggccatgattaccagtggattggcctgaatgacaagatgttcgaacatgatttcagatggacagatggatccactctgcagtacgagaactggcgtccaaatcagcccgactcgttttttagcgcaggtgaggactgcgttgtgatcatttggcacgagaacggccagtggaacgacgtgccctgcaattaccatttaacttatacatgcaagaagggcactgtggcttgtggacagccccccgtagtcgagaacgccaagacatttggaaagatgaagccccggtatgaaatcaatagcctgattcgctatcattgcaaagacggctttatccaaaggcatttgcccacgattcggtgccttggaaacggaagatgggccatccctaaaataacttgtatgaatccctcagcttatcaacgaacatactcgatgaaatatttcaagaacagttcatcagctaaggataactcgattaatacctccaagcacgaccaccggtggtcgcggcgctggcaggagtcccgtaggtag

SEQ ID NO: 17949 - DNA, 1968 bp, synthetic construct
  misc_feature 1..1968: note = Description of Artificial Sequence: Synthetic coding sequence
  source 1..1968: mol_type = other DNA
atgttcatcaacatcaaatccatcctgtggatgtgcagcacacttatcgttacccatgcactgcataaggtaaaagtgggcaagagccctcctgtcaggggctccttgagcgggaaagtctccttgccttgccacttttctaccatgcctaccctacctccttcctacaatacaagtgaattcctcagaattaagtggtccaagattgaagttgacaagaatggaaaagatttgaaggagactacagtacttgtggcacaaaatggaaacataaagatcggtcaggactacaaaggcagggtgagcgtccctacgcatcctgaggcggtcggcgacgctagcctcaccgtagtgaagttacttgcgtcggacgctggactgtatcgatgtgacgtgatgtatggcatcgaggacacgcaagacacggtgtcattgacagttgatggggtggtgttccattatagggcagccacatcaaggtacacccttaatttcgaagctgcgcaaaaagcctgcttagacgtaggagccgtgattgcgacaccagagcagctgttcgctgcttatgaggacggattcgagcagtgcgacgccggatggctggcggaccagactgtaaggtatccgatccgggcccctagggtggggtgttatggcgataaaatgggcaaggctggggttcgtacttatgggtttcgatcacctcaagaaacctatgatgtctattgctacgtggaccatttagatggcgatgtgtttcatctgaccgttccgtcgaagtttactttcgaggaggcggccaaggaatgcgaaaaccaggatgcccgccttgccactgtcggggaactgcaagcagcctggcgaaacggttttgatcaatgtgactatggatggctgtccgacgcttccgtccgacatcctgtgaccgtggccagagcccaatgtggaggaggactgttgggagttcgtacactgtatcgcttcgagaaccaaaccgggttccccccgccagacagtaggtttgacgcctactgttttaagcggccggatcgttgcaagatgaacccatgcctgaatggaggaacctgctacccaacagagaccagctatgtgtgcacttgcgttccaggctatagcggtgatcaatgtgaattggactttgacgagtgtcactccaatccatgtcgaaatggcgccacttgcgtcgacggattcaacacatttaggtgtctgtgtttaccgagctacgtgggagcgttgtgcgaacaggacacagaaacctgtgactatggctggcacaagttccaaggccagtgttacaaatactttgctcacaggcgtacttgggacgctgctgagagagaatgtagactgcagggcgcccacctcactagcatactttcccacgaggagcagatgttcgtcaaccgcgtgggtcacgactaccaatggatcggactcaacgataaaatgtttgaacatgatttccggtggaccgacggatccacccttcagtatgaaaattggaggcccaaccaacccgatagtttcttcagtgccggcgaggactgtgtggtgatcatctggcatgagaacggccagtggaacgacgtcccatgcaattaccatctgacatacacgtgcaaaaagggcacagttgcctgcggacaaccacctgtcgtggaaaatgctaagactttcggcaagatgaagccccgctatgagattaactccttaattcgataccactgcaaggacggcttcattcagaggcatctgccaactatacggtgtctaggtaacggcagatgggcgatccccaaaataacatgtatgaatcccagtgcttatcagcgaacctactccatgaaatatttcaagaactcctcaagcgcaaaggacaattcaattaatacatcaaagcacgatcatcgttggtccaggcgctggcaggaatcccgtcggtag

SEQ ID NO: 17950 - DNA, 1440 bp, synthetic construct
  misc_feature 1..1440: note = Description of Artificial Sequence: Synthetic coding sequence
  source 1..1440: mol_type = other DNA
atggcctcaacaataaaggaggccctctcagtggtgtccgaggatcagtccctcttcgagtgcgcttacgggacaccccacctagctaagactgaaatgaccgctagttcctcatcagactacggccagacttcaaagatgtcccccagggtcccccagcaggattggctgagccagcctcctgctagagtaaccatcaaaatggagtgcaatcctagtcaggtcaatggctctaggaatagcccggatgagtgctccgtggctaagggtggaaagatggtggggagtcctgataccgtgggtatgaactacgggtcctacatggaagaaaagcacatgcccccccccaatatgacaacgaacgagcgacgggtcattgtcccagccgacccaactctctggtccacagatcacgtccgacagtggctggaatgggccgtgaaggagtatggcttgccggatgtaaatatactgctattccagaacattgacggaaaggaactctgtaagatgaccaaggatgactttcagcggttgaccccatcctacaacgccgacatcttactctcccatctgcattacctaagggagaccccactgccccaccttactagcgatgacgtggacaaggctctgcagaacagtccacggttgatgcacgccagaaacactgggggcgcagcgttcatttttccaaatacatctgtctaccccgaggctacccaaagaattacgacccggccagatctgccttacgagccaccacggaggtccgcttggaccgggcacggtcaccccacccctcagagcaaggccgcccagccctccccatcaacagttcctaaaactgaagatcagaggcctcaactggacccctaccagatactcggccccacctcctccagactagctaacccgggatctgggcagatccagctgtggcagttcctcctggaactgctgagcgacagcagtaactcctcctgcatcacatgggaggggaccaatggcgagtttaaaatgacagacccagatgaggtcgctcgcaggtggggagagcgaaaatccaaaccaaacatgaattacgacaaattatctcgagcactccgatactactatgataagaacatcatgaccaaagtacatggcaagagatatgcgtacaagttcgattttcacggtatcgcgcaggcattgcaacctcacccaccagagtcatcattgtacaagtacccatcggatttaccctacatggggtcctaccatgcccatcctcagaagatgaattttgttgcaccccatccccccgctctccccgtgacgagctcgtcatttttcgccgcacccaacccatattggaacagtcctactggtggcatatacccaaacactcggctgcccacaagccatatgccatctcatcttggcacctattactag

SEQ ID NO: 17951 - DNA, 1092 bp, synthetic construct
  misc_feature 1..1092: note = Description of Artificial Sequence: Synthetic coding sequence
  source 1..1092: mol_type = other DNA
atggtgggttccccagataccgtgggcatgaattatggctcttatatggaagaaaaacacatgccgcctcccaatatgactacgaacgaacggagggtgatcgtgcctgctgatcccacgctgtggtcaactgaccacgtacgacagtggctcgagtgggcagtgaaggagtacggcctgcctgatgtaaatatcctactttttcagaatatagacggaaaagagctctgtaaaatgactaaggatgatttccagaggctcacccctagttacaacgctgacattttactgtcccacctgcattatttaagagaaacgccacttccacatttgacgagtgacgacgtggacaaagccctgcaaaactcacctcggctcatgcatgcccggaatactgacctcccctacgaacctcccaggagatcagcctggaccggccacggacaccctacgccccaatcaaaagctgcccaacccagccctagtactgtacctaagaccgaggatcaaagacctcagctcgatccgtaccagatcctcggcccaacttccagcaggctggcaaaccctgggagcggtcaaatccaactgtggcaattcctgttagaactgctgagtgattcttctaactcctcttgcatcacgtgggagggcaccaatggggaattcaagatgactgaccctgacgaggtagcgagacgctggggcgagcggaagagcaaaccaaacatgaactatgacaagctttctagggcccttcgatactactacgacaaaaacatcatgaccaaagttcacggaaaacggtacgcatacaagttcgacttccacggcattgcccaggcactacagccgcacccgcccgagtcttccttgtacaagtacccttccgatttgccttacatggggtcttaccatgcccacccccaaaagatgaactttgttgccccccacccaccagctcttccagttacttcctcatcattttttgccgcccctaatccctactggaattcccccactggaggcatttatccgaatacacgcctgcctacatctcacatgccctcgcatcttggtacctactattag

SEQ ID NO: 17952 - DNA, 1389 bp, synthetic construct
  misc_feature 1..1389: note = Description of Artificial Sequence: Synthetic coding sequence
  source 1..1389: mol_type = other DNA
atgatccagacagtccctgatcccgccgcgcacatcaaggaagccctgagcgttgtgtccgaagatcagagcctgtttgagtgtgcctatggcacaccacacctggccaaaaccgagatgactgcgtctagctcttccgactatggccagacatctaagatgagccctagagtccctcagcaagattggctgagccagcccccagctagagtgaccattaagatggaatgtaacccctcccaggtgaacggatctagaaattccccagatgaatgctctgtcgccaaaggagggaaaatggttggaagcccagacacagtcgggatgaattatgggagctatatggaagagaagcatatgcctccccccaatatgacgacaaacgaaagacgtgtgatcgtgcctgcagatcctacgctgtggtctaccgaccacgtccgacaatggttagaatgggctgtgaaagaatatggcctccccgatgtgaacatactcttgttccagaatatcgacggtaaggaactgtgcaagatgaccaaagatgactttcagaggctcaccccatcatacaacgccgacattttgctgagccacttacactatctgcgcgaaacaccactcccacacctcacatctgacgacgttgataaggcattacagaactcgccaaggttgatgcatgcacgcaatactgatctgccttatgagcctccccgccggagtgcatggactggacacgggcacccaaccccacagagcaaagcggcccagcccagtccttccacagtgcctaaaacggaggatcagcgacctcaactcgacccataccagatcctgggccctacaagtagccgtctagccaatcccggcagcggacagattcagctatggcagttcctgctggaacttctgagcgattcttccaactcctcttgtataacctgggagggaactaatggagaattcaagatgactgatccggacgaagttgctcgccgatggggcgagcggaagtccaaaccgaacatgaactacgacaaactttcacgggccttacgctattattatgacaaaaacattatgaccaaagtccacggcaagcggtacgcctacaaatttgacttccacggcatcgcccaagccctgcaacctcatccccccgaaagctccctgtataagtatccatcagacctgccttatatgggcagctaccacgctcatccacaaaagatgaatttcgtggcaccccacccacccgcattgcctgtaacatcttcaagcttttttgctgctcccaatccatactggaactccccgactggaggcatctacccaaacactagactgccgacttctcatatgccatcccatctgggtacttactactag

SEQ ID NO: 17953 - DNA, 1461 bp, synthetic construct
  misc_feature 1..1461: note = Description of Artificial Sequence: Synthetic coding sequence
  source 1..1461: mol_type = other DNA
atgatccagactgttcccgatcctgccgcccacattaaagaggccctttcagtggtgtctgaggatcagagtctgttcgaatgtgcctatggaactcctcatctggctaagacggaaatgacagcaagctctagtagtgactacgggcagaccagcaaaatgtcgcctagagtgcctcagcaggactggctgtctcaaccccctgcccgggtcaccatcaaaatggaatgcaacccgtcccaggtgaacgggtccagaaatagtccagacgagtgttctgtcgctaaaggtggtaagatggtcgggtctccagacactgtggggatgaattacggcagttacatggaggagaaacacatgcctcccccaaacatgacaacaaacgaacgcagggtcattgtaccagccgacccaacactttggtctaccgatcatgtgagacagtggctggaatgggctgtgaaggaatatggattgccagacgttaatatcttactgttccagaatatagacggcaaagagttgtgtaagatgaccaaggacgacttccagagactgacccccagctacaatgccgatatcctcttaagccacctgcattatttacgggagaccccgctccctcacctcacttctgatgatgtggataaggctctgcagaactcccccaggctgatgcacgctcggaacaccgggggcgctgcattcattttccctaatactagcgtgtaccccgaagctacacagcggatcactacccggccagatctcccatacgagccgccaaggcgtagcgcttggacaggacatggccaccccaccccacagtccaaagcagcccagccttctcctagcactgtgcccaaaacagaagaccaaagaccccagcttgatccgtaccagatcttaggtccgactagtagtcgacttgcaaaccccggcagcggacagatccagctgtggcagttcctgctcgaactgctgagtgacagctcaaatagctcatgtataacatgggaggggacaaacggtgaattcaagatgaccgatcccgacgaagtggctagaaggtggggggaacgtaagtcaaaacctaatatgaattacgataagctctcaagagcgctgcgttactactacgataagaacatcatgactaaggtgcatgggaagcggtatgcctacaaattcgactttcacggtatcgcccaggctctacagccacatccccctgagtcatccctctacaagtatccatccgatctcccctacatgggttcctatcacgcgcacccgcaaaagatgaacttcgtggcccctcacccaccagctctgcccgtgaccagcagcagcttctttgccgctccaaatccttactggaattcaccaaccggtggcatctacccaaacacgagactaccaacgagccacatgccgtcccacctgggtacctactattag

SEQ ID NO: 17954 - DNA, 1461 bp, synthetic construct
  misc_feature 1..1461: note = Description of Artificial Sequence: Synthetic coding sequence
  source 1..1461: mol_type = other DNA
atgatccagacagtaccagatcctgcagctcatattaaggaagccctgagcgtcgtgagcgaggatcaaagtctgttcgaatgcgcatacggcaccccacacttagctaagactgagatgacagcatcatcatccagtgattacggccagacgtctaagatgagccccagagtgccccagcaggattggctaagccagcccccagccagagtaaccatcaagatggagtgcaatccaagccaggtgaatgggagccgcaattcacccgacgaatgttcagttgctaaaggaggtaaaatggtaggatccccagacacagtgggaatgaactatggttcctatatggaagagaaacacatgccgccacctaatatgactacaaacgagcgcagagtcatcgttcccgcagacccaactctatggtccacagatcacgttcgacagtggctggagtgggccgttaaggaatacggcctgccagatgtgaacatcttgctttttcagaacattgacggtaaggaactgtgcaagatgaccaaggacgactttcaacgactgacgccgtcttataacgccgacatcttgctgtcccatctacactacctccgcgagactcccttgccccatctgaccagtgatgacgtggacaaggctctgcaaaattcgcctcgtctaatgcatgctaggaacaccggaggcgccgcttttattttcccaaatacaagcgtctatccagaagccacacagcgcattactactcgtccagaccttccttatgaaccaccccgtagaagcgcttggactggccacgggcaccctactccacagtcaaaagcagctcagccttccccttccaccgtcccgaaaaccgaagatcagcggccccaattggatccataccagatcctgggcccaactagcagcagacttgccaaccccggcagcggacaaatacagctttggcagtttctccttgaattactgtctgactctagcaacagttcatgcatcacctgggagggcactaatggcgagtttaaaatgacggaccccgacgaagtcgctaggaggtggggggagagaaaatccaagcccaacatgaactatgacaaactctctagggcattacggtactactatgacaaaaacattatgactaaagtgcatggtaaacgatatgcatataagttcgactttcacggcatcgcccaggccctccagccccacccgcctgagtccagtctttacaagtacccatctgatctaccttatatgggatcctatcacgcgcacccgcagaagatgaactttgtagcacctcacccgcctgcactgccagttacctcctcctcatttttcgctgcccctaacccgtactggaactcccctaccggtggaatttaccccaacacccgactccccacatcacacatgccaagtcatctgggcacgtattattag

SEQ ID NO: 17955 - DNA, 516 bp, synthetic construct
  misc_feature 1..516: note = Description of Artificial Sequence: Synthetic coding sequence
  source 1..516: mol_type = other DNA
atggcgtctacaatcaaagaagccctgtccgtggtaagcgaagatcagtctctctttgagtgcgcctacgggaccccgcacctagcaaaaactgagatgactgctagctcgtccagcgactacggacagacaagcaagatgagcccccgtgtgcctcagcaggactggttgagccagccccctgcgcgggtgactatcaaaatggaatgcaatccatctcaggtaaacggcagtcgcaattcaccggacgagtgttcagtcgccaagggtggcaagatggtgggatctcccgacacagtgggcatgaattatggatcctacatggaggagaagcacatgcccccaccgaacatgaccacaaacgaaaggagggtgattgtccctgctgatctgccctatgaacctcctaggaggtctgcttggacaggccatggccaccccactccccagagcaaggggacggtcttggctcctatgacgttgtcgtttatgtctcaggctgtggacgattgttag

SEQ ID NO: 17956 - DNA, 1389 bp, synthetic construct
  misc_feature 1..1389: note = Description of Artificial Sequence: Synthetic coding sequence
  source 1..1389: mol_type = other DNA
atgattcagaccgtccctgacccagccgcccacattaaggaggccctgtccgtcgtgtcagaagatcagagtctctttgagtgtgcatacggcaccccccatttggcaaagacagaaatgacagctagttcttcgtccgattacggccagacaagcaagatgagtcctagggtgccacagcaggattggttgtctcagccccccgctcgggttactatcaaaatggaatgcaaccccagtcaggtgaatggctctcgcaacagcccagatgaatgctctgttgcgaaggggggcaagatggtgggaagccccgacacagtgggcatgaactatggatcctacatggaggagaaacacatgcctccaccaaacatgacgacgaacgaacgtcgcgtgatcgtgccggcagaccccaccctttggtcaactgaccacgtgaggcaatggttagagtgggccgtgaaagaatacggactgccggacgtcaacattctcctcttccagaatatcgatgggaaagagttgtgtaagatgactaaagacgacttccagcgcttaacacctagttacaatgcagacattctgttaagccatcttcactacttacgagaaacgcctctgccacacctgacgagtgatgatgtggacaaggcactgcagaacagccctcgcttgatgcacgcaaggaatacagatcttccgtacgagccccctcgtcggagcgcatggaccgggcacggtcaccctacaccccagagtaaggctgctcagccgtccccttcaacagtaccgaagaccgaagatcagaggcctcaactagatccttaccagattctggggcccaccagctctcgcttagccaaccctggcagtggccagattcagctttggcagtttcttctggagctgctgagtgactcctctaactcaagttgtataacgtgggaagggacaaacggcgagttcaagatgacagacccggacgaggtagcccggcggtggggcgagaggaaaagtaagccgaatatgaactacgacaagctgagcagagcgctgcgctactactatgacaaaaatatcatgacaaaggttcacggtaagcggtacgcatacaaattcgattttcacggaattgcccaagcgctgcagcctcaccccccggaatccagtctctataagtatccctcagatttaccctatatgggttcataccacgcccatccccagaagatgaactttgtcgcaccccacccccctgcgctgccggtgactagctctagcttttttgccgcgccaaatccatattggaactccccaaccggcggcatctatccaaacacgaggctgcccaccagccatatgccttcccatctgggcacctactactag

SEQ ID NO: 17957 - DNA, 1164 bp, synthetic construct
  misc_feature 1..1164: note = Description of Artificial Sequence: Synthetic coding sequence
  source 1..1164: mol_type = other DNA
atggtcggcagcccagataccgtcggcatgaattacggaagctacatggaagaaaaacatatgccccctccaaatatgacgaccaacgagcggagggtaattgtcccagcagatcccaccctgtggtcaacggaccatgtgagacaatggctcgagtgggccgtaaaagagtatggcctgcccgacgtgaatatcctcctctttcagaatatcgatgggaaagagctgtgcaagatgacaaaggacgacttccagagactgacgcctagttataatgctgatatactcttgagtcatcttcactatctcagggaaactcccctgcctcacctgacatctgacgatgtagacaaggcactacaaaactcacctagactaatgcacgcccgcaatactggtggcgcggcctttatattccctaatacgtctgtgtaccccgaagccacccagaggataacaactcggccggacttaccgtacgagcccccaagaagaagcgcttggactggacacgggcaccctactccacagagcaaggccgcccagcccagcccctcaaccgttcctaagactgaagatcagcggcctcagctcgacccctatcaaatcctggggcctacaagttcccggctggcgaaccccgggtcgggccaaatacagctgtggcagttcctgctggaactgttgtcagactcttcaaactcatcctgtataacatgggagggaacaaacggtgagtttaaaatgactgatcccgacgaagtggcgagaaggtggggggagagaaaatcaaaaccaaacatgaattacgacaagttaagccgagccctccggtattattatgacaaaaacattatgactaaggtccacggtaagcgttacgcttacaagtttgactttcatggcattgctcaggcactgcagcctcatccccccgagtcttctctttacaagtatccttcagatctcccctatatggggtcatatcacgcccacccccagaagatgaattttgtggcgccccacccccctgccttacctgtcacatcttcaagcttctttgcagcccctaacccctactggaatagtcccacaggaggcatctaccccaacacccgcttgccaactagtcatatgccaagtcatctggggacatattactag

SEQ ID NO: 17958 - DNA, 1410 bp, synthetic construct
  misc_feature 1..1410: note = Description of Artificial Sequence: Synthetic coding sequence
  source 1..1410: mol_type = other DNA
atgaatgatttcgggattaaaaatatggatcaggtggcgcctgtggcgaattcttataggggaaccctgaagcggcaacctgcatttgatacttttgacgggagcctgtttgctgtgttcccatctctcaacgaagagcaaacgctccaggaggtgcccacaggacttgacagcatctcccacgacagcgccaattgtgaattaccattgttaacgccttgttcaaaggctgtgatgtcccaggctcttaaagctacctttagcggcttcaagaaggagcagagacgcctggggattccaaagaatccatggctgtggagcgagcagcaagtctgccagtggctcctgtgggccaccaatgaattctctctggttaatgtaaatctgcagcgctttggtatgaatggacaaatgctgtgtaatctgggaaaagaaaggtttcttgagctggcacccgacttcgttggagacattctctgggagcatctggagcaaatgatcaaagagaatcaggaaaaaaccgaggatcagtacgaggagaactctcatttgacttcagtgccgcactggattaatagcaatacacttgggttcggcacagaacaggccccttacgggatgcagacgcagaattaccctaagggcgggctccttgacagcatgtgcccagcgtccacaccaagtgtcctcagtagtgagcaggagttccaaatgtttcctaagtcccggctgtccagcgtgtcagtaacatactgctctgtgagtcaggacttccccgggagcaatttgaacctgctgaccaataactccggaactccaaaagatcatgatagtccagagaatggcgcggattcttttgagagctctgactccctactccaaagctggaatagtcagagctccctattagacgttcaacgagtgcccagctttgaatcttttgaagacgattgctctcagtcgctgtgcttaaacaaacctaccatgtcattcaaggattatattcaggagaggtcagaccctgtggaacaggggaagcctgtcatccccgccgccgtattggcagggttcacaggtagcggtcccatacagttgtggcaatttctgttagagttgctgagcgacaaatcatgccaaagttttatatcatggaccggcgatggatgggagttcaaattggctgacccagatgaggtagcacgtaggtggggaaaacgaaagaacaagccaaaaatgaactacgagaagttaagccgggggctgagatattactacgataaaaatatcatccataaaacatccggtaaaagatatgtctatcgatttgtttgcgacctgcagaatctcctgggctttactcctgaagagctgcacgctatcttgggggtccagcctgacacggaggattag

SEQ ID NO: 17959 - DNA, 1410 bp, synthetic construct
  misc_feature 1..1410: note = Description of Artificial Sequence: Synthetic coding sequence
  source 1..1410: mol_type = other DNA
atgaatgactttggcatcaaaaacatggatcaagtggcacctgttgcgaatagctatagggggaccctgaagaggcaacccgctttcgacacctttgacggcagtctgtttgccgttttcccttctctgaacgaggaacagacactgcaggaggtgcccaccggtctggactccatctctcacgactccgccaactgtgagctgccattgttgaccccctgcagcaaagccgtgatgtctcaggcactcaaggccactttcagtggattcaagaaagaacagcggcgcctggggatcccaaaaaacccatggctctggtccgagcaacaggtgtgccaatggctactgtgggccaccaacgagttttctctggtgaacgtcaatctccagcgctttgggatgaatggccagatgctgtgtaatttgggcaaggagcgctttctggaactcgcccccgatttcgtgggcgatatcctttgggagcacttagagcagatgatcaaggagaaccaggagaagactgaggatcagtacgaggaaaacagtcaccttacttcagttcctcattggattaatagcaacactcttgggtttgggacggaacaggccccgtacggcatgcaaacgcagaattatccgaaagggggtttgctggattccatgtgtcctgccagcacaccctccgtcctctcttccgaacaggagttccagatgttcccaaagagccgactgtccagtgtgagcgtcacatattgcagcgtatctcaagattttcccggcagtaacttaaacctgttgactaataactctggaacacccaaagaccatgattcaccagagaatggagccgacagctttgaaagttccgactctctgcttcagtcatggaacagccagtcctctttgttggacgttcagcgcgtgcccagtttcgagtcatttgaggatgactgcagccagagcctgtgtctgaataagccgacaatgagtttcaaagattacattcaggagcgcagcgatcctgttgaacagggcaagcccgttatcccagccgccgtgcttgctggatttactggatctggcccgattcagctgtggcagtttcttctggaactcttgagcgacaagtcctgccaaagttttatctcttggactggcgatggctgggagtttaagctcgccgaccctgatgaggtggcccggagatgggggaagcgcaaaaacaaacctaaaatgaactacgagaaactttcacgtggactccgttattactatgataaaaatatcatccataagacgtccggaaaaaggtacgtgtataggtttgtctgcgatctgcagaatctcctcgggttcacaccagaagagctgcatgctattctgggggttcagcccgacaccgaagactag

SEQ ID NO: 17960 - DNA, 507 bp, synthetic construct
  misc_feature 1..507: note = Description of Artificial Sequence: Synthetic coding sequence
  source 1..507: mol_type = other DNA
atgaatgatttcggtatcaaaaatatggatcaggtggcaccagtggcaaattcttaccggggcactttaaagaggcaacctgcctttgacaccttcgatggctcactgtttgccgtgttcccgtccctgaatgaagagcagactctgcaggaagtccccaccggtctcgactcgattagccatgattccgctaattgcgaattgccgctgctaaccccttgctctaaagcagtgatgagccaggctctcaaggcaaccttctcgggcttcaaaaaggagcagcggaggctcggcatccccaaaaacccgtggctgtggtctgagcaacaggtctgccagtggctgctctgggctacgaatgagttttcccttgtaaatgtaaacctacaacgtttcgggatgaacggacagatgctgtgtaacttggggaaagaacgtttcctcgagctagctcccgatttcgtgggtgacattttgtgggagcatctcgaacagatgatcaagtag

SEQ ID NO: 17961 - DNA, 813 bp, synthetic construct
  misc_feature 1..813: note = Description of Artificial Sequence: Synthetic coding sequence
  source 1..813: mol_type = other DNA
atgaatgatttcggcatcaagaacatggaccaggtggctcccgtcgctaattcttatagaggaactctgaagagacagcccgcattcgatacatttgatgggagcttattcgcagtgtttcccagcctgaacgaggagcagactttgcaggaagtgccaacaggcttggatagtatctcacacgacagtgccaactgcgagttaccattactcactccatgcagcaaggctgtcatgtcccaggcactcaaagccaccttcagcgggttcaagaaggagcagcgaaggctgggcattcctaagaacccttggctctggagtgagcagcaggtgtgtcagtggcttttgtgggctacaaacgaattcagtttggtgaatgtgaacctccagagatttgggatgaacggccagatgttatgtaacctgggaaaggagcggtttctagaactggcacccgacttcgtcggtgacatcttgtgggaacacctggaacagatgataaaagagaatcaggaaaaaaccgaggatcaatatgaggagaattcgcacctgacatccgtcccacattggattaactctaacaccctaggctttggaaccgagcaggccccctacggaatgcagacgcagaattatccgaaagggggcctgttggactctatgtgtccagccagtacccccagcgtgctgtcatctgagcaggagtttcagatgttccccaagagcaggttgtcttcagtctctgtcacctactgctccgttagccaggatttccccggcagcaacctgaatctccttaccaacaactcctag

SEQ ID NO: 17962 - DNA, 570 bp, synthetic construct
  misc_feature 1..570: note = Description of Artificial Sequence: Synthetic coding sequence
  source 1..570: mol_type = other DNA
atgacagagtacaaacttgtagtcgtcggagctggcggcgtcggcaagtccgccctgacaatacaacttatccagaatcacttcgtagacgaatacgaccctacaatagaggactcctacagaaagcaagtggttattgacggggagacttgcctgctggatatcttagacacagcagggcaagaagagtactctgccatgcgcgaccaatacatgcggacaggagaaggtttcctttgtgtgtttgcgatcaacaatacgaagagttttgaagacatacaccaatatcgcgaacaaataaagagggtaaaggatagcgatgatgtccctatggtgttggtggggaacaaatgcgatctcgctgcccgcaccgtcgagtctcggcaagcgcaggatctggcccggagctacggcattccatacattgagacctcagctaaaaccagacagggggtggaagatgccttttataccctggtgagggagatccgtcaacataaattacgaaagctcaacccccctgatgaatcaggcccaggctgtatgtcttgcaagtgtgtcctgagctag

SEQ ID NO: 17963 - DNA, 513 bp, synthetic construct
  misc_feature 1..513: note = Description of Artificial Sequence: Synthetic coding sequence
  source 1..513: mol_type = other DNA
atgaccgagtacaaacttgtcgtcgtcggggcagggggagttgggaagtccgctttgaccattcaactgattcagaatcacttcgtggacgagtacgatcccaccatcgaggactcttaccgcaaacaagtggtaattgacggggagacctgtctcctggatattctggataccgctgggcaggaggagtactcagcaatgcgcgatcagtatatgaggacaggagagggatttctctgtgtcttcgctataaataatacaaaatcttttgaggatattcatcagtaccgcgagcaaatcaaacgcgtgaaggattcggacgatgtgcccatggtgctggtcggtaataaatgtgatctcgcagcgcgaaccgttgaatctaggcaagctcaggacctggcgcgatcatatgggattccatacatcgaaacctctgccaaaacacggcaaggatcccgctcagggtcaagctcctccagtggtacactgtgggacccgcctggacctatgtag

SEQ ID NO: 17964 - DNA, 570 bp, synthetic construct
  misc_feature 1..570: note = Description of Artificial Sequence: Synthetic coding sequence
  source 1..570: mol_type = other DNA
atgaccgaatacaagctggttgtggtgggtgctgggggtgtgggaaagagcgctctcactattcagctcatacagaaccatttcgttgacgagtacgatccaaccattgaagacagctatcgcaaacaggtcgtgatcgatggagagacttgcctgctagatatattggacacagctggacaggaagagtactccgcaatgagggatcagtacatgcgcactggggagggctttctctgtgtttttgccataaacaataccaagtccttcgaagacattcatcagtatagggagcagatcaagagagtcaaagactccgacgacgtgcctatggttcttgtgggaaataaatgtgacctcgcagcgagaaccgtagaatcccggcaggcccaggacctggctcgttcttacggcataccgtacatagaaacgtcggctaaaaccagacagggagttgaggacgccttttataccctggttcgcgaaatcaggcagcacaaactaaggaagctcaaccctccagacgagagcggccccggttgcatgagttgtaagtgcgtcttgtcctag

SEQ ID NO: 17965 - DNA, 513 bp, synthetic construct
  misc_feature 1..513: note = Description of Artificial Sequence: Synthetic coding sequence
  source 1..513: mol_type = other DNA
atgactgaatacaaattagtggtggtgggggcaggcggggtgggtaagtccgccctcaccattcagctgattcagaaccactttgtggacgagtatgaccccaccattgaagactcctatagaaaacaagttgtcatcgacggcgagacctgccttttggatatcctcgatactgccgggcaagaagaatatagcgcaatgcgagaccagtacatgcgaaccggcgagggcttcctctgcgtatttgcaatcaacaatacaaagagtttcgaagatatacaccagtaccgagagcagatcaagcgggtgaaggattctgacgacgtccccatggttctcgtcggaaacaagtgcgatctcgcagcccggactgtggagagcaggcaagctcaagacctggcgcggagctatggaatcccctatatcgaaacctccgctaagactagacaggggtctcgtagcggatcatcttccagttcaggaacactctgggatcctcctggcccaatgtag

SEQ ID NO: 17966 - DNA, 570 bp, synthetic construct
  misc_feature 1..570: note = Description of Artificial Sequence: Synthetic coding sequence
  source 1..570: mol_type = other DNA
atgacagagtataaactggttgtagtcggggcgggcggagtgggtaaatcagccctaacaattcaactcattcagaaccacttcgtggacgagtacgatccaaccatcgaagactcataccgaaaacaggtggtgattgacggggagacctgccttctggatatcctggacactgcaggccaggaagaatacagcgctatgcgcgatcagtatatgagaacgggcgagggttttctgtgtgttttcgctatcaataacacaaaatcctttgaggatatccaccaataccgtgaacagataaagagggtgaaggattctgatgacgttcccatggtcctagtgggaaataaatgtgatctggccgcccggacagtggaatctcgccaggcacaggacctggccagatcctacggcatcccatacattgaaacttccgccaaaactcggcagggagtcgaggatgccttctataccctcgtaagggagataagacagcacaaactccgcaagctcaatccccctgacgaaagtggccccgggtgcatgtcttgtaaatgcgttctatcttag

SEQ ID NO: 17967 - DNA, 513 bp, synthetic construct
  misc_feature 1..513: note = Description of Artificial Sequence: Synthetic coding sequence
  source 1..513: mol_type = other DNA
atgactgaatacaaactcgtggtggtcggcgctggtggagtggggaagtctgcactaacaattcagctcattcagaaccactttgtggatgaatacgatcccaccatcgaggattcatatagaaagcaggtagtcattgacggggaaacctgtttgctggatattctcgatactgccgggcaggaagaatacagtgccatgcgggatcagtacatgcgcaccggagaaggtttcctgtgtgtgttcgcaattaataacacgaagagctttgaggacattcatcagtatagggagcagattaagagagtgaaagactcggacgacgtgccaatggtactggtggggaacaaatgcgatcttgcggcgagaacagtggagagccgtcaagctcaagacctggcgaggagctacggtatcccttacattgagacctccgcaaagacacggcaagggtctagatcaggtagtagttcctcaagtggaaccttgtgggatccccccggacctatgtag

SEQ ID NO: 17968 - DNA, 609 bp, synthetic construct
  misc_feature 1..609: note = Description of Artificial Sequence: Synthetic coding sequence
  source 1..609: mol_type = other DNA
atgttgcccccgggcactgctacactcctgacactgcttctggcagcgggcagcctaggccagaaaccccaacgaccacggcgcccagcttcacctatcagtaccatacaacccaaagccaattttgacgcccagcagtttgccgggacttggctgttggtggcagttggtagtgcctgtagatttctccaggaacaagggcacagggctgaggctactacattgcatgtggctccacagggtactgcgatggccgtctccaccttcaggaagttggacggaatttgctggcaggtccgccagctctatggggatacaggcgttctgggccggtttttactccaggcccgggatgcgcgcggtgcagtgcacgtggtcgttgctgaaacagactatcagtcgttcgcggtgctctacctcgagagagcggggcagctgagcgtaaaactgtacgctagatccctgcccgtcagtgatagcgttttatctggtttcgagcagcgagtccaggaggcccatctgactgaggaccaaatattctacttcccaaaatacggtttttgtgaagccgccgatcagtttcatgtcctcgacgaggtccgcagatag

SEQ ID NO: 17969 - DNA, 522 bp, synthetic construct
  misc_feature 1..522: note = Description of Artificial Sequence: Synthetic coding sequence
  source 1..522: mol_type = other DNA
ggattcctcgttccgctgtggctgatgaggaattgtttcagacttcaagaagaaatgttacagagagaagaggctgagaatacgttacagagcttccgccaagacgtggataacgcatccctcgccaggctggacttagaaaggaaggtcgagtccttacaggaagagatcgcgttcctgaagaagttgcacgaggaagagattcaggaactccaagctcagattcaggaacagcacgtccaaatcgatgtggatgttagcaaacccgatttaactgcggcattgcgcgacgtgaggcagcaatatgagtccgtggcagccaagaatcttcaagaggccgaggaatggtacaagtccaaattcgccgacctctccgaggcagccaatcgtaataacgacgccctcagacaagcgaaacaggaaagtaccgagtatcgccgacaagtgcagagcttgacctgcgaagttgacgcccttaagggcacagtcagcaccaatccagccgttaaagagggaaagtag

SEQ ID NO: 17970 - DNA, 687 bp, synthetic construct
  misc_feature 1..687: note = Description of Artificial Sequence: Synthetic coding sequence
  source 1..687: mol_type = other DNA
atgcgaaactgttttaggctgcaggaggagatgctgcagcgggaagaggcggagaacaccctccagagctttaggcaggacgttgataatgcctccctcgccaggttggatctggaacggaaggttgaaagcctccaggaagagatagcgttcctgaaaaagttgcacgaggaagagatacaagaactccaagctcagatccaggagcaacatgtacagatcgatgtcgacgtgtccaagccagatttgaccgcagcgctgcgggacgtccgtcaacagtatgaatcggtcgcagccaaaaatttgcaggaggccgaggagtggtataagagcaagtttgccgacctaagcgaagcagccaacaggaacaacgacgctctgaggcaggcaaagcaggagtcaactgagtaccggcggcaggtgcagtcccttacttgcgaagttgacgcccttaaaggaactaacgagagcctggaacgccagatgagagagatggaagaaaatttcgccgtggaagccgctaattatcaggataccatcgggagattgcaggatgagatccaaaatatgaaggaggagatggcacgacatctgagggaataccaggatctcctgaacgtaaaaatggcgctcgatatcgaaattgctacataccgcaagctgctggaaggggaggaatcccggtag

SEQ ID NO: 17971 - DNA, 1296 bp, synthetic construct
  misc_feature 1..1296: note = Description of Artificial Sequence: Synthetic coding sequence
  source 1..1296: mol_type = other DNA
atgagcacgcgcagcgtgagtagctccagttatcgacgtatgttcggtgggccagggaccgccagcagaccttcctcttctaggtcgtacgttacaacaagcacacgcacatattccttgggttccgctctgaggccatctaccagtaggagcctctacgccagtagtccagggggcgtctatgcaacccgttcttctgcagtgagactgagaagttctgtcccgggcgtgagactgctgcaggacagcgtggattttagtttggcggacgccatcaatacggaatttaaaaacactagaactaacgagaaggtcgagctgcaagaactgaatgaccgcttcgctaactacattgataaagtaagatttctcgagcagcagaataaaatactccttgctgagcttgagcagcttaaagggcagggaaaatctcgtttgggcgacttatatgaggaggagatgagagagcttaggaggcaagtggaccaactcacaaatgacaaggcccgggttgaagtggagcgggacaacctggctgaagatataatgcgtctacgcgaaaagctgcaggaggaaatgctccagagggaggaggccgaaaacacgctacaatctttcagacaggacgtggataatgcctcactggcccgcttggacctggagcggaaggtggagagtctgcaagaagaaatcgcatttctcaaaaagctgcatgaagaagaaatccaggagctgcaggctcaaatccaggaacagcatgtgcagattgatgtggatgtctctaagcccgacctgacagctgcacttagagatgtgcgtcagcagtatgaaagcgttgcagcaaaaaatctccaggaagccgaggagtggtacaaatcgaagttcgctgacctatccgaggcagctaatagaaataatgacgcgctaagacaggcgaagcaggagagtacagagtacagaagacaggtgcagtcgctgacgtgtgaagtagatgcactgaaaggtacaaacgagagtctagaacgccagatgcgggagatggaggagaatttcgctgtggaggccgcaaattaccaggacacaatcgggaggcttcaggacgaaatccagaatatgaaggaggagatggccagacacctgagagagtatcaagacttactcaacgttaaaatggccctggacatcgaaattgccacttaccgaaagttgctggagggcgaggagagccgtatctcccttcccctgcctaacttcagttcactgaatcttagaggcaaacactttatcagcttatag

SEQ ID NO: 17972 - DNA, 1401 bp, synthetic construct
  misc_feature 1..1401: note = Description of Artificial Sequence: Synthetic coding sequence
  source 1..1401: mol_type = other DNA
atgtccactagatccgtgtctagctcttcatacagaagaatgttcggaggcccaggtaccgcatctagacctagtagctcacggtcttatgttaccactagcacaaggacgtactccctgggtagcgccttgagaccctctacctccagatcactctatgcgtcatcccccggaggagtttacgctactcggtcctccgccgtgagactgagatcatccgtcccaggagtccggctgcttcaggacagcgtggactttagcctggccgacgctatcaatactgaatttaagaacacccgcacgaacgagaaggtagagttacaagaactgaatgatcgcttcgcgaactatattgacaaggtccgttttctggaacagcagaacaaaatcctcctggccgagctggaacaacttaaaggccaggggaagtcaaggctgggagacctttacgaggaggagatgagggagctgcgcaggcaggtggaccagctcacaaatgacaaagcacgagttgaagtggaacgggataatctggcggaggatatcatgcggctgagagagaagctgcaagaggagatgctccagcgggaagaagccgagaacaccctccagagctttcggcaggatgtcgataatgccagtcttgctcgactggacctggagcgaaaggtcgagtctcttcaggaggagattgcttttcttaaaaaattgcacgaggaagagattcaggaactacaggctcagatccaggagcagcatgtccagattgacgttgatgtgtctaaacctgatctcacagctgctctgcgcgacgtgaggcagcaatatgaaagtgtagcagccaagaacttgcaagaggccgaggaatggtacaaatcaaaattcgcagatctctccgaagctgcaaaccgtaacaatgacgccttgcgccaggcgaagcaggagtctacagagtatcggcgccaggttcagtcgctgacctgcgaggttgatgctctgaaaggcaccaatgagtctctcgagcgacagatgcgagagatggaagaaaacttcgccgtcgaagccgccaactaccaagatacgatcggaagacttcaggacgagatacaaaatatgaaagaagagatggcccgtcatctgcgagagtaccaagacttattaaatgtcaaaatggctctggatattgaaattgcaacctaccggaagttgctggagggggaggaaagtagaatttcattgcccttaccaaacttctctagcctgaatctgcgtgagacaaatttggactcactgcccctggttgatacccacagcaaaaggacgctgctgatcaagacggtggaaacacgggatggccaggtgatcaacgagactagccagcaccatgatgacttggaatag

SEQ ID NO: 17973 - DNA, 1224 bp, synthetic construct
  misc_feature 1..1224: note = Description of Artificial Sequence: Synthetic coding sequence
  source 1..1224: mol_type = other DNA
atgttcggagggccaggtactgcttcacgacctagctcttccaggtcctacgtgaccaccagcacaaggacatattctcttggaagtgctctccggccatcaacttctcgatcattatatgcgtcgtcaccgggaggagtctacgccacgcgttcatctgcggtacgattgcgttcctccgttccaggcgtgcggctgcttcaggattccgtggacttttccttggccgatgccattaatacagaattcaaaaacactcgcactaacgaaaaggtggagctgcaggagctaaacgaccgatttgccaattatatagataaggttcggtttctggaacaacaaaacaagattctgttggctgaattggaacagctgaaaggccagggcaagagcaggctaggcgacctttatgaggaggaaatgcgggagctgcggagacaggtcgaccaactaacgaatgataaagctagagtggaggtggaacgagacaatctcgccgaagatattatgcggctcagagaaaagttgcaggaagaaatgctccagagggaagaagctgagaataccctgcaatccttcagacaggatgtggataatgcgtccttggcccggctagacctagagcgcaaggttgagtcgctccaggaagagatagcctttttaaaaaagctccacgaagaggaaatccaggagctgcaggcccagatacaagagcaacatgtccaaattgatgtggatgtaagtaaaccagatctgacagcggctttacgggacgtaagacagcagtatgagtccgtggcagcgaagaatctccaagaagcagaagaatggtataagtcaaagttcgcggacctatccgaggccgccaataggaataatgacgccctccgccaggcaaagcaggaaagcaccgagtatcgaagacaggtgcagtcgctgacatgtgaggtggatgcattgaaaggcaccaatgagtctctagaacgccagatgagagagatggaagaaaactttgctgtggaggccgctaattatcaagatactatcggccgcctgcaggacgagatccagaacatgaaggaggaaatggcacggcacttaagggagtaccaggatctccttaacgtgaagatggctttagatattgagattgccacataccgcaagctgctcgaaggtgaagagagtcgaatcttgtgtctgttccagaccttcccaccttag

SEQ ID NO: 17974 - DNA, 2256 bp, synthetic construct
  misc_feature 1..2256: note = Description of Artificial Sequence: Synthetic coding sequence
  source 1..2256: mol_type = other DNA
atggaagatctgtcctcaccagatagcacacttctgcagggcgggcacaacctgttgtcatcggcctccttccaagaagccgtgacttttaaagatgtgattgtcgacttcactcaagaggagtggaaacagttggaccctgggcagagggatttgttcagggacgtaactcttgagaactacacgcatctggtctcgataggactgcaagtgagcaagccagatgttatttcgcagttggagcagggaactgaaccctggattatggagccctctatacctgtaggcacttgcgccgactgggaaactagactggaaaacagcgtttccgcccccgaacccgatattagtgaggaggagctgtcacccgaagtcatagttgaaaagcacaaacgggatgattcctggagctccaatctgctggagagctgggaatatgagggctccctagagcggcagcaggctaaccagcagacactccccaaagagatcaaagtaaccgagaaaacaattccctcctgggagaaaggcccggtaaacaacgagtttggtaagtcagtcaatgtatcctccaatcttgtaactcaggagccaagtcctgaagaaacctccacaaagcgatccattaaacaaaacagtaatcccgtgaaaaaagaaaaatcctgtaagtgtaatgagtgcggaaaggccttcagctactgtagtgccctgataaggcaccaaagaactcatacaggggagaaaccatacaaatgcaacgagtgcgagaaagcattttcccgaagcgagaatctgataaaccaccaacgcatacacactggcgacaaaccctacaaatgtgaccagtgtggaaaggggtttatcgaaggcccatctcttacccagcatcaacgaatacacacaggggaaaagccttataagtgtgatgagtgcgggaaggctttcagccagaggacgcacctggttcaacatcagcgcatacatactggcgaaaaaccatatacctgcaatgagtgtggtaaggccttttcccagcgggggcatttcatggaacatcagaagattcacacaggtgagaagcccttcaagtgtgacgagtgcgacaaaacctttacgcgctcaacccatctcactcagcaccagaaaatacatacaggagaaaaaacatacaagtgcaacgagtgcggtaaagctttcaatgggccctcaaccttcattaggcatcacatgatccatacaggggagaagccctacgagtgtaacgagtgtggaaaagccttttcacaacactcaaatttgacgcagcatcagaagacacacacgggcgaaaaaccgtatgattgtgccgagtgtggtaagtccttttcctactggtccagtctcgcgcagcacctcaagattcacaccggagagaagccctataagtgcaacgaatgtggtaaggctttttcttattgttcgtccctgactcagcaccgccggatccacacccgggagaagccatttgaatgttctgagtgtggaaaggcattttcttacctgtctaaccttaatcaacatcaaaagactcatactcaggagaaggcatacgagtgcaaggagtgcggaaaagcttttattagaagtagctcgctggcaaaacacgaacggattcacacaggagagaagccataccagtgccatgaatgcgggaaaactttcagttacggcagcagcctgatccaacaccggaagatccacaccggcgagcgcccgtataaatgcaacgaatgcggcagggccttcaaccagaacatccatcttactcaacacaagaggatccacacaggggctaagccgtacgaatgtgcagaatgtggtaaggcttttagacactgttcatccctagctcaacatcaaaagacccatacagaagagaagccttatcagtgtaataaatgcgaaaaaactttttctcaaagctcacacctcacccagcaccagagaattcacactggcgaaaaaccctataagtgcaatgaatgtgacaaggccttctcccggagtacccatctgaccgaacaccagaacacccacaccggcgaaaaaccatataactgtaacgagtgcagaaaaacctttagccagtccacatacttgatccagcaccagcgcatccatagtggagaaaagccattcggctgcaacgactgcgggaaatcctttagataccgtagtgctctgaacaaacatcaaagactacaccctggaatctag

SEQ ID NO: 17975 - DNA, 3201 bp, synthetic construct
  misc_feature 1..3201: note = Description of Artificial Sequence: Synthetic coding sequence
  source 1..3201: mol_type = other DNA
atgccagtgtttcacaccagaaccatagaatctatcttggaacccgtggctcagcaaataagtcatcttgttataatgcacgaggagggcgaagtggacggaaaggctattccagatctgactgcaccggtggccgccgttcaggccgccgtgagcaatctcgtcagagttggaaaggagaccgtgcagactacggaagatcaaatcctgaaaagagacatgcctccggctttcatcaaagtagagaacgcctgtaccaagctcgtgcaggccgctcaaatgctacaatcggacccttacagtgttccggcccgcgactacctcatagatggcagcagaggcattttgagcgggacgtccgatttacttttgaccttcgacgaggccgaagtgcggaaaattattagggtctgtaaaggaattcttgaatacttaacagttgccgaagtcgttgagactatggaagatctggtgacatatacgaaaaaccttgggcctggaatgacgaagatggcaaaaatgattgacgagagacagcaggagctgacgcatcaggagcatagagtgatgcttgtgaattctatgaatacagtgaaagagctgctgcctgttttaatttcagccatgaaaatcttcgtcacaaccaaaaactccaagaatcaggggattgaggaggccttgaaaaaccggaactttaccgtcgaaaaaatgagcgctgaaatcaacgaaatcatccgcgtgctccagctgacatcctgggatgaggacgcatgggccagcaaagatacggaggctatgaaaagggccttggctagcattgactctaagttaaaccaagccaagggctggctgagagatccgtccgcttcaccgggtgacgcaggcgagcaggccattcgccagatccttgacgaagccgggaaggtaggcgagctctgcgccgggaaagaaaggagggagatactgggcacgtgtaagatgttagggcaaatgacagatcaggttgccgatctgcgagccagaggtcaggggtcctctccggtggccatgcagaaggcacagcaagtgtcacaggggctcgatgtcctgactgcgaaggttgagaatgcagcgaggaaactggaagccatgaccaatagcaagcagtcaatcgcgaaaaagatcgatgccgcacagaactggttggcagatcctaatgggggccccgagggagaagaacagatcagaggcgccctggctgaagctcgcaagatagcggagctgtgtgacgaccccaaggagcgcgacgatatcctcagaagcttgggggaaatcagtgctttaacctctaagctggccgaccttcggcgtcagggaaagggcgattcacccgaagctagggccctagccaagcaagttgccactgcactgcagaacttgcagactaaaaccaaccgcgcggtcgctaattcccgcccagctaaggctgcggtgcatctggagggaaagatcgagcaagctcagagatggatagacaaccctacagtggatgacagaggcgtgggacaggcggctataagaggactcgtggctgaaggacacaggctggctaacgtgatgatgggtccctacaggcaggacttgttggccaagtgcgaccgggtggatcagttgacagcccagcttgcagacctggctgctagaggagagggagagtcacctcaggcaagagccctggcctcacagctccaggattctcttaaggacctaaaggcccgaatgcaggaagcgatgacccaagaggttagcgacgtgtttagcgatacgaccaccccaataaagttactcgcagtggccgccactgctccccccgacgctcccaacagggaggaggtcttcgatgaaagggccgccaacttcgagaatcatagtgggaagctcggtgctacagcagaaaaggcggcggccgttggaactgccaataaatctaccgtggagggtatacaggcttcagtcaagactgcccgcgagctcaccccacaagtggtcagtgccgccagaattttgctccgtaacccaggcaatcaggcggcatatgaacattttgaaactatgaaaaaccagtggatagacaatgtggaaaaaatgacaggactagttgatgaggcaatcgatactaagagtctgttagacgcgagtgaagaggcaattaaaaaggatctcgataaatgtaaggttgccatggcaaatattcagcctcagatgttggtggctggagctacttctattgctcgaagagcaaaccgcatccttctcgtggccaagcgagaggtggaaaacagcgaggatcccaagttccgggaggccgtaaaggctgccagtgatgaactgagcaagaccatttcaccaatggtgatggatgccaaggccgttgcaggcaacatttcggacccaggactgcagaagtctttcttggacagcggatatcgcatcctgggggccgtcgcaaaagtgcgggaggcattccagccccaggagccggacttcccccccccacctcctgacctagagcagctgaggttgaccgatgaattagcccctcccaagcctccacttccagagggggaagtaccacctccaaggcctcctccccctgaagaaaaagacgaggagttcccagagcaaaaggctggtgaggtcatcaatcagcctatgatgatggcggcacgccaactgcacgacgaagcccgaaaatggagcagtaaaggcaacgatataatcgcggcggctaaacgcatggccctgttgatggcagaaatgagcaggctcgtacgggggggatcaggcacaaaacgggcgctgatccagtgtgcgaaagacattgctaaggcctctgatgaggttaccagattagccaaggaagtggccaagcagtgcaccgataaacggattcgcacaaatctgctgcaggtgtgcgagcgtattccaaccatcagtacgcagttgaagatcctatcaaccgtgaaagccaccatgctgggccgaacaaacattagcgacgaggagagtgaacaagcaactgaaatgctggttcacaatgcacaaaacttgatgcagagtgtgaaagaaacagtcagggaggcagaggcagcaagcattaagatccgcactgatgccggttttacactgcgatgggtccgcaagacaccctggtatcagtag

SEQ ID NO: 17976 - DNA, 2784 bp, synthetic construct
  misc_feature 1..2784: note = Description of Artificial Sequence: Synthetic coding sequence
  source 1..2784: mol_type = other DNA
atgttgcaatctgatccatacagtgtgcctgctagggattatttgatcgatggatcacgagggatcctgtctggaacctctgacctattgctgacattcgacgaggccgaggtgcgcaagataattagggtatgtaaggggatcctcgagtaccttaccgtcgccgaagtggtggaaactatggaggacctcgtgacgtatacaaaaaacctgggccctggaatgacgaaaatggcaaagatgatcgatgagcgtcagcaggagcttacccatcaggagcatcgcgtgatgctggtaaactccatgaataccgttaaggagctgttgccggttttaatttcagcgatgaagattttcgtgacgactaaaaactctaaaaaccagggtatcgaggaagctttgaaaaataggaattttaccgtggagaagatgtccgcagagatcaatgagatcattagagtcctccagcttacaagctgggatgaggacgcgtgggctagtaaggacacagaagcgatgaagagagctctcgcctccatcgattccaaactgaatcaagcaaaaggctggctacgggacccgtctgctagcccgggcgacgccggtgagcaggctatcaggcagatcctggatgaggcaggtaaagtgggagagttgtgtgctggtaaggaaagaagagaaattctcggaacctgtaagatgctcggccagatgaccgaccaagtcgcagacctgcgagctcgagggcagggatcctccccagtcgccatgcaaaaggctcagcaggtttcccaggggttagacgtgttaacagccaaggtcgaaaatgcagcacgaaagctggaggccatgactaactccaagcagtccatcgcaaagaagatcgatgccgctcagaattggctggccgaccccaacggtgggcctgaaggggaagagcagatcagaggtgcactcgcggaagctcggaaaatagctgagctgtgcgacgaccccaaagagagagatgatatcctccggtccctgggtgaaataagtgctctcacctccaaactcgccgacttgcgccgccagggaaaaggcgactctcctgaagcccgtgccttggcgaagcaggtggcaaccgccctgcaaaatcttcagacaaagacgaaccgcgcagtcgccaacagcaggcctgcgaaagctgccgtgcatctcgaagggaagattgaacaggctcagcgctggattgacaaccctaccgtggatgatagaggtgtcggccaggccgccattagagggttagttgccgaggggcatagactggcaaacgtcatgatgggcccatatcgtcaggatttactggccaaatgcgatcgcgtggaccagctgactgcgcagctggcagatctcgccgcccggggcgagggagaatcccctcaggcccgggccctggcaagtcagttgcaagacagcctgaaagaccttaaagcaaggatgcaagaggccatgactcaagaggttagcgatgtgttctccgacacaacaacaccgattaagctgctcgccgtcgcggccaccgcaccaccggatgcccccaaccgggaggaagtatttgacgaacgggccgctaactttgagaatcacagcggaaaacttggcgctactgctgaaaaagctgccgcggtgggtaccgccaacaagagcaccgtcgagggcattcaagctagcgtcaagaccgccagagagctcactccccaagttgtgagcgccgcacgcattctgttacgaaacccgggcaatcaggcggcatacgaacatttcgaaactatgaaaaatcagtggattgataatgtggagaagatgactggattggtggacgaagccattgacactaaatccctcttggacgcctctgaagaagccattaaaaaagatctggacaagtgtaaggttgcaatggcgaacatacagccccagatgctggtggcaggcgccacctcaatcgctaggagggccaacaggatactcctggtggcaaagcgggaggtcgagaatagcgaagaccctaaatttcgtgaggccgttaaggccgccagcgacgaattaagcaagacaatctccccaatggtcatggacgctaaggccgtggcgggcaatatttcggaccccgggttgcagaagagttttctggacagcggatatcgaatcctgggggcggttgccaaggtcagagaagctttccagccgcaggagcccgacttccctccacctccccccgacctcgagcaattacggttaacagatgaactggcaccccctaaaccaccccttcctgagggagaggttccacctccccgaccacccccacccgaggagaaggacgaggagtttccagaacaaaaggccggtgaagttattaaccagcctatgatgatggctgctcgccagctgcacgacgaggcacggaagtggagttcgaaacccgggatccccgctgctgaagtcggtatcggcgtcgtcgcagaggctgatgccgcggacgcagcagggtttcccgtgcctcccgacatggaagatgactacgaaccagaactcctgctgatgccatcaaatcaaccggtgaatcagccaattctggcagccgcacagtccttgcaccgagaagctacaaagtggtcaagcaaaggaaacgacataatcgccgctgctaagcggatggccttactgatggctgagatgtcccgtctcgtaaggggcggatcagtacccaggacttctcccagaccgcagatgaggtag

SEQ ID NO: 17977 - DNA, 984 bp, synthetic construct
  misc_feature 1..984: note = Description of Artificial Sequence: Synthetic coding sequence
  source 1..984: mol_type = other DNA
atgccagtgtttcatacacgcaccatcgagagcatcctagaacccgtggcacagcaaatcagtcacttggtgattatgcatgaggaaggagaggtggatggaaaagcaattcctgacctgacggcccccgtggcagccgtgcaagcggcagtatccaacctcgtgcgagttggcaaggagaccgtacagacgacagaggatcagattctaaagcgtgacatgcctcccgcctttatcaaggtggagaatgcgtgcactaagctggtgcaagcagcacagatgctgcaaagtgatccctatagtgtacccgccagagactacttgatcgatggttctcgcggcattctatccgggacctccgacctgctcttgacctttgacgaggcagaggtgcctccacccaggccacccccgcctgaggagaaagatgaagagttcccagagcaaaaggccggggaagtgatcaatcagcccatgatgatggccgccagacagctacacgatgaggctcggaagtggtcctccaaaggcaacgatataatagctgccgcaaagagaatggccctcctcatggccgagatgagccggctggtgagaggaggctctggtactaaacgggccttaatccaatgtgccaaagatatcgcaaaagcatctgatgaggttactagactggcaaaggaggtggctaagcagtgtaccgacaagaggatcaggaccaatctgctacaagtctgtgagagaattcccaccatctctacccagcttaaaatcctctccactgtaaaggcgacaatgctggggcggacgaatatcagcgatgaggagtctgaacaggcaacagaaatgttagtccacaacgctcagaacttaatgcaaagtgttaaggagaccgttcgcgaggcggaagccgctagcattaaaatccgaacagatgccggttttactttgcggtgggtccgcaaaaccccctggtaccagtag

SEQ ID NO: 17978 - DNA, 2421 bp, synthetic construct
  misc_feature 1..2421: note = Description of Artificial Sequence: Synthetic coding sequence
  source 1..2421: mol_type = other DNA
gggcagatgaccgatcaggtggccgacttgagagcaagaggacagggctcaagtcctgttgccatgcagaaggcacagcaggtttcccaggggctcgacgttttgaccgctaaggtggagaatgccgcacggaagctggaagccatgacgaattcaaagcagagtatcgcaaagaagattgacgccgcccagaattggttagctgatccaaacgggggccccgagggtgaggagcagataaggggggccctagcagaggcccgaaagattgctgaactgtgtgacgatcccaaagaacgggacgatatcctaagatccctgggcgaaattagtgcacttacaagcaaactggccgatctccgacggcagggcaagggcgatagcccagaggcacgtgctctggcaaagcaggtggccaccgcactgcagaacctccagaccaagacaaaccgggccgtagccaattctcgacctgcaaaagccgctgtgcacctcgagggcaagatcgaacaggcgcagaggtggattgacaaccctacagtggacgaccgcggggtcgggcaagccgccatccggggcttggttgccgaagggcatcgcctggcaaacgttatgatgggtccataccggcaagacttactcgcaaagtgtgatcgggtggatcagcttactgcacagctggccgaccttgcagctcgaggggagggagagtccccccaagccagagctctggcctcacagttgcaggactcattaaaagatttgaaggccagaatgcaggaagcaatgactcaggaggtgtcagacgttttctccgacacaaccacccctattaaactccttgcggtcgccgcaacagctccgccagacgcccccaaccgagaagaagttttcgacgaacgcgccgctaactttgagaaccacagtgggaaactgggcgctaccgctgagaaggcagctgctgtcggcactgccaacaagagtacagtcgaaggtatacaggcctccgtgaaaacagcccgcgagctgaccccacaggtagttagcgcagctcgaattcttttgagaaacccagggaaccaggcagcctatgagcactttgaaacgatgaaaaaccaatggattgacaatgtggagaagatgacaggactggtggatgaggctatagataccaagagcctcctggacgcttccgaagaagccattaaaaaggacctcgataagtgtaaagttgccatggccaacattcagccccagatgctagtggcaggggccacatctatcgcccggcgggccaataggattctactcgttgctaaacgagaggtcgagaatagtgaggatccaaaatttagagaggcagtcaaggcggccagcgatgagctctcgaaaacaatttctcctatggttatggacgccaaagcagtggcaggaaatatctctgacccaggccttcaaaaatccttcctggattctgggtatagaattctcggcgccgtggctaaagtgcgggaagcgtttcagccccaggagcctgattttccgcctcctccacctgatttggaacagttgcggctgaccgacgagctggccccccctaaaccgcccttgcccgaaggcgaggttcctccccctcgtccccccccaccagaagagaaggacgaggagttccccgaacaaaaggcaggtgaagtgattaatcagcccatgatgatggctgcccgtcagctccacgatgaggcaagaaagtggtcaagcaagccagggatcccggcagcagaagtgggaatcggagtcgttgcggaggctgatgctgcggacgccgcaggttttccagtgcccccagacatggaggatgactatgaaccagagctccttttgatgccatcaaatcagcctgtgaaccagcctattttggccgcagcccagtctcttcatcgggaggcgacaaagtggtccagcaagggcaatgacataatagcagcagccaagcggatggccctgctcatggctgagatgtctcggctggtacgaggcggatccggcaccaaaagagccttaatccagtgcgccaaagacattgctaaggccagtgacgaggtgacaaggctggctaaggaggtcgctaagcagtgtacggacaaacggatacgaacaaacttgctgcaggtatgcgagagaattcccacaatttctacgcagctgaagatactctctacagttaaagccacaatgctcgggaggacgaacatttctgatgaagagtcagaacaggctacagagatgttagttcacaacgcacagaatttgatgcagagcgtgaaagaaaccgtgcgggaggccgaagccgcaagcattaagatacgcacggacgcagggttcaccctgcggtgggtccgcaaaacaccatggtaccagtag

SEQ ID NO: 17979 - DNA, 3021 bp, synthetic construct
  misc_feature 1..3021: note = Description of Artificial Sequence: Synthetic coding sequence
  source 1..3021: mol_type = other DNA
atgccaccagccttcatcaaggtcgagaatgcatgcacgaagcttgttcaggccgcccaaatgcttcagagtgacccatacagcgtgccagcccgggactatcttattgacgggtctcgggggattttatccggtacatccgatcttcttctgactttcgacgaggcagaagtgcgaaagataattagagtctgcaaaggcattctggagtatctgacggtagcagaggttgtggagactatggaagacttggttacctacacaaagaatctcgggccgggaatgacaaagatggcaaaaatgattgatgagagacagcaagaactgactcaccaagaacatagggtgatgctggtgaactccatgaataccgtgaaagagctcctgccagtactgatatccgccatgaaaatttttgtgacaaccaaaaattcaaagaatcagggaatcgaagaggcactgaaaaatagaaacttcaccgttgaaaagatgagcgcggagataaacgaaattatcagggtattgcaactgacctcctgggacgaagacgcctgggcgtcaaaagataccgaggcgatgaagagagctctcgcatctattgatagcaaactgaatcaggccaagggctggttgcgggatcctagtgcctctcccggggatgcaggtgaacaggcaatccgccagattttggacgaggcgggaaaggttggggagctgtgcgccggaaaggaaaggcgtgaaattttgggcacatgtaaaatgttggggcagatgaccgatcaggttgcagacctgcgcgcaaggggccaggggtcatctcccgtggcaatgcaaaaggctcagcaggtgtctcagggcttagacgtgctgactgctaaagttgagaacgctgcaaggaaactggaagccatgacaaattcaaagcagagtattgctaagaaaatcgatgcggcccaaaattggctggccgaccccaacggtggacccgaaggtgaggagcagatacgcggcgctctggccgaagcacgcaaaatcgcggagttatgcgatgacccaaaagaacgggatgatatcctgcgttctctaggcgaaattagcgccctgacatctaagctcgccgatctcagacggcagggaaagggagattcgccggaagcccgggcactggccaagcaggtggccaccgccctgcagaacctgcagaccaagacaaatcgggccgtagcaaacagccggcccgctaaggctgctgttcaccttgaaggaaaaatcgaacaggcgcagcggtggatcgacaatcctacagtggacgataggggcgtggggcaagctgccatacgcggcctggtggccgaagggcatcgcttagcaaatgtgatgatgggcccatataggcaagatctactcgccaagtgcgacagagtggatcagctcactgcccagttggccgacttagcagcacggggtgagggcgaatcaccgcaagccagggctctagccagccaactgcaggatagcctgaaagatctaaaagcgcggatgcaagaggcaatgacgcaagaggttagcgatgtattttctgacacaactactcccattaagctgctggcggtagctgcgacagccccaccggacgccccaaatcgggaggaagtgtttgacgagagggcggcaaatttcgaaaatcactctggaaaactgggcgcaacagcggagaaggcagccgctgtgggaacggctaacaagagtactgtagagggtatccaggccagcgttaagaccgccagggagctcactccacaggtagtcagcgcggcccgcatccttttacgcaatcctggcaatcaggctgcctacgagcacttcgaaaccatgaaaaaccagtggatcgataacgttgagaagatgactgggctggttgacgaggccatcgacaccaagtcattgctggacgcttccgaggaggctatcaaaaaagatctcgacaagtgtaaagtcgcaatggctaatatacagccacagatgttggtggcaggtgctacatccattgcacgtcgtgctaacaggattctgttagtggccaaacgcgaggttgaaaacagcgaggaccccaagttccgggaagcggtgaaagctgcttcggatgaactcagcaagaccatcagccctatggtgatggacgcgaaggccgtcgcagggaatatctctgatcccggcctgcagaagtcattcctcgacagcggttaccggattctgggcgccgtggccaaagtgagggaagcctttcaaccccaggagcctgacttccctccacctccccccgatcttgagcagctgcgcctcacggacgaactagcaccgccgaaaccacctctgcctgagggcgaagttccacccccacggccaccgcctcctgaagagaaggacgaggagtttcctgagcagaaagctggcgaggtgataaatcagccaatgatgatggcagctcggcaactgcatgatgaggcaaggaagtggtcttccaagggcaacgatataatcgccgctgcaaaaaggatggctctactaatggctgaaatgtcccgattggtccgcgggggctcaggcactaagagagccctgatccaatgtgctaaagacattgctaaagctagcgatgaggtaacgcgtcttgcaaaggaagtcgcaaagcagtgtacagacaagcgtatccggactaacctgctccaagtttgtgagagaattccaacgataagtacacagttaaaaatcctgagtacggtcaaggccaccatgttagggcgcaccaacatctctgatgaagagtcagaacaagccacagaaatgctcgttcataacgcacagaatctgatgcagtcagtcaaggagacagtgagagagctgaagctgctccagagcaaattcgaacagatgctggatctacactgtgcgggcctcgagaggcttccaggcactagtcgacacctggcggaacccggttggcaccgaaatctgtactag

SEQ ID NO: 17980 - DNA, 570 bp, synthetic construct
  misc_feature 1..570: note = Description of Artificial Sequence: Synthetic coding sequence
  source 1..570: mol_type = other DNA
atgacagagtataaactcgtggtcgtcggtgcaggaggcgtcggcaaatctgccctcaccatacagctgatacaaaatcattttgtcgatgagtatgaccctaccatagaggattcttaccgaaagcaggtcgttatcgacggggaaacctgtctgctagatatcctggatacagctggacaggaggagtacagcgcgatgagggaccaatacatgcggacgggcgagggctttctctgcgtgttcgcgatcaacaacactaagagcttcgaagatatccatcactacagagaacaaatcaagcgggtcaaagactcggaggacgtaccgatggtgttggtgggtaataagtgtgacttaccttcccggacggtggatacaaagcaggctcaggatcttgccagaagctacggcattccatttattgagaccagtgccaaaacacggcagcgcgtggaagacgctttttacacactggtgagggagattagacagtatcgtcttaagaaaatttccaaagaagaaaagacccccggctgcgtcaagattaagaagtgcataataatgtag

SEQ ID NO: 17981 - DNA, 567 bp, synthetic construct
  misc_feature 1..567: note = Description of Artificial Sequence: Synthetic coding sequence
  source 1..567: mol_type = other DNA
atgactgaatacaaacttgtcgtcgtgggtgccggcggggtcggcaagagtgccctgactattcagctgatccagaatcactttgtggatgagtatgatcccacaatcgaggattcttaccggaagcaagtggtgattgacggagagacatgcctgctggacatcctcgatacagctggccaggaagagtactcagctatgcgggaccagtacatgcgaacaggtgaagggtttctctgcgtgttcgcgatcaataacacaaaatcttttgaggatattcaccactatcgagaacagattaagcgggtgaaggacagtgaagatgtcccaatggtactggtgggaaacaagtgtgatctgccatcacgcacggtggataccaagcaagcccaggatctcgccaggtcatatgggattccctttattgaaactagtgccaagactaggcagggagtagatgatgctttctataccttggtccgcgaaataagaaaacacaaggagaaaatgtctaaggacggcaagaagaagaaaaaaaagtctaagactaaatgcgtgattatgtag

SEQ ID NO: 17982 - DNA, 228 bp, synthetic construct
  misc_feature 1..228: note = Description of Artificial Sequence: Synthetic coding sequence
  source 1..228: mol_type = other DNA
atgaccgagtacaagctcgtagtggtgggagccggcggcgtggggaagtcagcgctcacaatacagttgatacagaatcattttgtggatgagtacgatcccaccattgaaggggttgacgacgccttttatacgttggtgcgcgagatccggaaacacaaggagaagatgtcgaaggatgggaagaagaagaaaaagaagtcaaagactaaatgtgtgatcatgtag

SEQ ID NO: 17983 - DNA, 2931 bp, synthetic construct
  misc_feature 1..2931: note = Description of Artificial Sequence: Synthetic coding sequence
  source 1..2931: mol_type = other DNA
atgaggggtgcccggggcgcctgggacttcctgtgcgttctgttattgttactgcgcgtgcaaaccggatccagtcaaccgtctgtgtcccctggggagccctcacctcctagtatccacccaggtaaaagcgatcttatcgtccgcgtcggcgacgagatcaggctcttgtgtactgatcctggcttcgtcaagtggacctttgaaatactggatgagacgaacgaaaataagcagaacgagtggattacagaaaaggccgaggccacaaataccggtaagtatacatgtactaacaaacatgggctgtccaactctatctacgttttcgttcgcgatcccgcaaaactgttcctggtcgatcgatctctctacgggaaagaggataacgatactcttgtgagatgtccactgacagatcctgaggtgactaactactccctgaagggatgtcaggggaagccgctgccaaaagatttaaggttcatccccgaccccaaggctggcatcatgatcaaaagtgtgaagcgggcataccatagattgtgcctacactgctctgttgaccaggagggcaagtccgtcctaagcgagaagttcattctgaaggtgcgaccggctttcaaggcagtccccgtcgtatccgtttccaaagccagctaccttctgcgcgagggagaagaatttacagtgacatgcaccatcaaggacgtgagttcttccgtttacagtacttggaaacgcgaaaattcgcagaccaagctgcaagaaaagtacaactcttggcatcacggggacttcaactatgagcgacaggccacattgaccatttcaagcgcccgtgttaacgactccggggtattcatgtgctatgcaaacaatacatttggatcggccaatgtgaccactaccctcgaagtggttgataaaggcttcattaatatctttccaatgataaatacaacagtgttcgttaatgacggcgagaatgtggacctgatcgtggagtacgaggctttccccaaacctgagcatcaacagtggatttatatgaatcgtaccttcaccgataagtgggaggactatcctaagagtgaaaacgagtctaatattaggtacgtgagcgagttgcacctgacccgtttgaagggtacagaaggagggacttatactttcctcgtctctaatagcgacgtcaacgcagccattgccttcaacgtgtatgtaaatacaaaacccgagattctgacctacgaccggttggtgaatggaatgcttcagtgtgttgcggctggcttccccgaaccaactatcgattggtacttttgccccggcacagagcagagatgctccgctagcgttttgccagttgatgtgcagacgctgaattctagtggtcctcccttcggaaagctggttgtgcaatctagtattgatagctccgctttcaaacataacggcacagttgaatgtaaggcgtataatgacgtaggaaaaacaagcgcttatttcaatttcgccttcaaaggcaacaacaaagaacagatacacccgcacaccctgttcaccccactgctcattgggtttgttatcgtcgccggaatgatgtgcattatcgtaatgatattgacatacaaatacctccagaagcctatgtatgaggtgcaatggaaagtggtggaagagattaacggtaataattatgtatatattgaccccacacaactgccctacgatcacaagtgggagttccctcggaatagactttctttcgggaagaccctcggtgccggtgcctttggcaaggtggttgaggccaccgcttatgggttaattaaaagtgacgccgccatgaccgtggctgttaaaatgcttaaaccgtcagcccatctgacggagcgcgaggccctaatgtcagaactgaaggtgctgagttacttggggaaccacatgaacattgttaaccttctgggcgcatgcacaattggcggtcctacgcttgtcatcaccgagtactgttgctatggagacttgctcaactttttacggagaaagagagatagcttcatctgctccaagcaagaggatcacgctgaagctgccttgtacaaaaacctcttacactcgaaagagtcctcatgctcagactctactaatgagtatatggacatgaaacccggagtgtcctatgtggtgcccacaaaggctgacaaacgacgtagtgtccgtatcggatcttatatagaacgggacgtcacccctgccataatggaggacgacgaattggccctggatctggaagatcttctgtcattttcctatcaggtggcaaaaggtatggctttcctcgcaagcaaaaactgcatccatcgagacctggcggctcggaacatcttactgactcacggccggatcactaagatatgcgactttggcctggcacgagacataaaaaacgattctaactatgtagtgaaaggaaatgctcgcctgccagtgaagtggatggcgcccgaatcaatctttaactgtgtttacacatttgagagcgatgtgtggtcttacgggatattcctctgggagttgttctcactggggagctcgccatatccaggaatgcctgtggactcaaaattctataaaatgattaaagagggttttcgcatgctgtcccccgagcatgcgcctgcagagatgtacgacatcatgaagacttgctgggatgccgaccccctaaaaagacccacattcaaacaaatagttcagctcatagaaaagcagatttccgaaagcacaaaccatatttactctaacttagcgaattgttccccaaaccgtcagaaacccgttgtcgatcacagtgttcgcatcaactcagtggggtctaccgcctcgtcctctcagcccctgctggtgcatgacgacgtttag

SEQ ID NO: 17984 - DNA, 2919 bp, synthetic construct
  misc_feature 1..2919: note = Description of Artificial Sequence: Synthetic coding sequence
  source 1..2919: mol_type = other DNA
atgcgtggcgcacgcggagcctgggattttctgtgtgttcttcttcttctgctgagagtgcagactggaagctcccagcccagcgtgtcccccggtgagcccagccctccatcgattcatcctggaaaatccgacctcatcgtgagagtcggcgatgaaatcagactgctctgcacagaccccgggttcgtgaaatggacttttgaaattctcgatgaaacaaacgagaataagcagaacgaatggattaccgagaaggctgaggccaccaacaccggcaaatatacctgtactaataaacatggcctctctaactccatatacgtgtttgttcgcgatcccgccaagctatttctagtggaccgttccctgtatgggaaggaggataatgacacattagttcgctgccccctgaccgatcccgaggtgactaactattcactgaaaggatgccagggaaaacccctccctaaagacctgcgtttcattcccgatcccaaagctggaataatgattaaatctgtgaagcgtgcctaccaccgactgtgcctgcactgcagtgtcgaccaggaaggaaagagcgtgttaagtgagaagtttatcctcaaggtgcgcccagcattcaaagcggtgcctgtggtgtctgtgtctaaagccagttacctgttgagggagggtgaagagttcaccgtgacttgtactatcaaagacgtttcctcatcggtgtactcaacatggaagcgagaaaattcccagacaaagctccaggagaagtataattcttggcatcacggagacttcaactacgagcggcaagctaccctgacaatcagtagcgctcgtgtaaatgatagcggcgtattcatgtgctacgccaacaataccttcggatccgcgaacgtgaccacaacacttgaggtggttgataagggcttcattaatattttcccaatgatcaataccaccgtgttcgtgaatgacggtgaaaacgtcgatctgattgtggaatacgaagcatttccaaagcctgaacaccagcagtggatttacatgaacagaacatttacagataaatgggaggactaccctaagtcggagaacgaaagtaacataagatacgtgagcgaactgcatctcaccagacttaagggcactgaaggtgggacctatacctttttggtgagtaattccgatgtcaacgcagccatcgctttcaacgtgtacgtcaacacgaaaccagaaattctcacttatgatcgattagtgaacgggatgctccagtgcgtggcggcaggttttcctgaaccaaccatagactggtacttttgccccggtactgagcaacggtgctcagccagcgtacttccagtggacgtgcagacactgaacagcagcggccccccattcggcaagctggtcgtgcaaagtagtatcgacagctcggcctttaaacacaatggcactgtggaatgtaaagcctataacgatgtcggcaaaacctcagcctacttcaacttcgcatttaaggagcagattcaccctcacaccctgttcacccccctgctcatcgggttcgtaattgtggccggcatgatgtgcattatcgtgatgattttgacctataaatatctgcagaaacctatgtatgaagtgcagtggaaagtagtcgaagagattaatggcaataattacgtatacattgacccgactcagcttccttatgatcacaagtgggagtttccccggaatcgattgagttttggaaaaactctgggggccggtgcttttggaaaggttgtggaggctaccgcttatggcctaatcaaatcggacgcagccatgaccgtggcagtgaagatgctcaaaccgtcggcccatctcactgaaagagaagctctgatgagcgaattgaaggtgttgtcttacctggggaaccacatgaatatcgtgaacttactcggtgcatgtacgatcggcgggccaacccttgtgatcactgagtattgctgttatggagatctactgaacttcctcaggaggaaacgtgactccttcatctgctccaaacaagaggatcacgcggaagcagccctttataaaaatctactgcactccaaggagtccagctgttctgattccacaaatgaatacatggatatgaagcccggagtttcatatgtggttcccaccaaggctgacaaacgaagatccgtccgaatcgggtcatatatcgagagagacgtgacacccgcaataatggaagacgacgagctggcactcgatctcgaagacctgctctcattctcctaccaggttgctaagggcatggccttcttggcttctaagaattgtatccaccgagacttggctgctaggaacattttgctcacccacggtagaatcactaagatctgcgactttggcctggctcgcgacataaaaaatgactccaactacgtggtgaaaggcaatgcacgactacccgtgaagtggatggcgcctgagtccatttttaattgtgtctacacctttgagagcgacgtgtggagctacggaatatttttgtgggagctcttcagtctcggatcgtcgccctaccccggtatgcccgtcgacagcaaattttacaagatgatcaaggaagggttcaggatgctgagtccagagcacgcgcctgcagaaatgtacgacataatgaaaacgtgttgggacgcggatcccttaaagaggcctacattcaagcaaatagtgcagctgatcgagaaacaaatcagcgagagtactaatcacatttactcgaacttggctaattgcagccctaataggcagaagcccgtggttgaccacagtgttaggatcaactctgtgggatcaacagcctcaagctcccagcccctgctggtacatgatgacgtttag

SEQ ID NO: 17985 - DNA, 1242 bp, synthetic construct
  misc_feature 1..1242: note = Description of Artificial Sequence: Synthetic coding sequence
  source 1..1242: mol_type = other DNA
atgcgaggagcacggggagcctgggattttctatgcgtattgctcttactgctccgcgtgcaaactggcagtagccagccatccgtgagcccaggagagcctagccctcctagtatccatcctggcaaaagtgatctcatcgttcgcgtgggagatgagattcggctgctgtgtacagaccctggattcgtcaaatggacatttgagatcttagacgagactaacgagaacaagcagaacgaatggattacagagaaagcagaggcaacaaataccggcaagtacacatgcactaacaagcacggcctctccaattcaatttacgtattcgtaagagaccccgcaaagctgttcctggtagatagatcgctgtatgggaaggaggacaatgacacactggtaaggtgccctctgactgaccctgaagtgacgaactattctctcaaaggatgccaaggcaaaccgctgcccaaagacctgcgttttatccccgacccaaaggccgggataatgataaagtccgtgaagcgcgcataccaccgcctatgcctgcactgctccgtggaccaggaaggaaagtctgtgctgtccgaaaagtttatcctcaaggtgaggccggcctttaaggccgtacccgtggttagcgtgagcaaggcgtcgtatctcctgagagaaggtgaggaattcaccgtgacttgtacaatcaaagatgtttcctcctcagtttattccacctggaaaagggagaactcgcagactaaactgcaggagaaatacaattcctggcaccacggcgacttcaactacgaaaggcaggcaacgctgaccatctcatctgcccgtgttaacgacagcggggttttcatgtgctatgccaataacacgttcgggagtgcgaacgtgaccaccaccctcgaggtggtggataagggattcattaacatatttccaatgattaacaccaccgtatttgttaacgatggggagaacgtggacctcatcgtggagtacgaagccttccccaaaccagagcaccaacagtggatttacatgaatagaacttttaccgataagtgggaagattatccaaagtccgaaaatgaaagtaacatcagatatgtgagcgaactccatctcactcgccttaaaggaaccgagggaggcacatacaccttcctggtatcaaactcagacgtgaacgcagctatagctttcaatgtctatgttaactctaagctgtag

SEQ ID NO: 17986 - DNA, 1212 bp, synthetic construct
  misc_feature 1..1212: note = Description of Artificial Sequence: Synthetic coding sequence
  source 1..1212: mol_type = other DNA
atggcatcggaactggctatgagtaattctgatcttcccactagcccactcgccatggagtacgttaacgacttcgatctgatgaaatttgaagtcaaaaaagaaccggtggagaccgataggatcatcagccaatgtggaaggctgatcgctggaggttccctatcctccacgccaatgagcacgccctgtagcagtgtgcctccgtctccttctttctcagccccgtcgccagggtcaggctccgagcagaaagcacatcttgaggactactattggatgactggctatccacagcagttaaatccagaagccttagggttctctccagaggatgcggttgaggctctgatttccaattctcaccagctgcagggcgggttcgacggctatgccagaggagcacaacagctggctgctgccgcgggagctggtgctggggctagtctgggcggaagcggcgaggaaatggggcctgcagcagcggtcgtaagcgcggtcatagctgccgcagccgcgcagtcaggggccggaccgcattaccatcaccatcatcaccatgctgccggacaccaccaccaccctactgccggggcccctggggccgctggcagcgctgccgccagcgcaggcggcgccggtggggctgggggtggcggccccgcatctgcgggtggagggggcgggggaggcggcggggggggtggtggtggtgccgcaggcgccggtggtgctcttcatccacaccatgccgcgggcggactgcactttgacgatagattcagcgatgagcagctagtgaccatgtccgtgagggaattgaataggcaactgaggggggtgagcaaagaagaagttattagactgaaacagaagcgccgtactcttaagaaccgaggctacgcacaaagttgcaggttcaagcgagttcagcagcgccacgtcctggaatcagagaagaatcagctgttgcagcaagtggatcatctgaaacaggagatttctagactagtacgcgagagagacgcctataaagaaaagtacgagaagctggtgtcttccggattcagggagaacggcagttcatccgacaacccgagctcgccagagtttttcatcactgagccaacaagaaaactcgagccatctgtgggatacgcaacattctggaagccgcagcaccgagtgctaacttccgtcttcaccaagtag

SEQ ID NO: 17987 - DNA, 1122 bp, synthetic construct
  misc_feature 1..1122: note = Description of Artificial Sequence: Synthetic coding sequence
  source 1..1122: mol_type = other DNA
atggcttctgaactggccatgagtaattccgacttacccacctcacctttagctatggaatacgttaacgactttgatctgatgaaattcgaagttaagaaagagccggtagaaaccgatcgcattatttctcagtgtggtaggcttatagcaggtggcagtctatcaagcacaccgatgtctactccatgttcctcggttcccccaagccccagcttcagtgctccctccccaggctctggatccgaacaaaaggcccacctcgaggattactattggatgaccggctatcctcagcagttgaaccctgaggccctgggattttccccggaggatgccgtggaggcgcttatctctaacagtcatcaactgcaggggggatttgatggatatgcacgaggagcacaacaacttgccgctgctgccggagcaggcgccggggcatccctagggggcagcggggaagaaatggggcctgccgccgccgttgtgtccgcggtcatcgctgccgccgcagcccagtccggcgccggtccgcattatcaccaccatcatcaccatgccgctggccaccatcaccatcctaccgccggagcccctggggcagctggctcagcagcagcatcagccggaggcgctggcggtgccggtgggggggggcccgcatctgctggagggggagggggcgggggagggggaggaggaggcggaggtgcagctggcgcggggggagctcttcacccacaccacgccgcgggcggcctccattttgacgaccgtttttcagatgagcagctggtgacaatgagtgtcagagagctgaataggcagttgaggggggtgagcaaggaggaggtcattagactaaagcaaaagagacgaactctgaaaaaccgaggctatgcacagtcctgccggtttaagcgggtgcagcagaggcacgtgctggagtctgaaaagaaccagctgctgcagcaggtagaccacttgaaacaggagatttctcggcttgtaagggagagggatgcttacaaagagaagtacgaaaaactcgtcagcagcgggtttagagaaaatgggtccagttccgacaacccatccagcccagagttcttcatgtag

SEQ ID NO: 17988 - DNA, 1062 bp, synthetic construct
  misc_feature 1..1062: note = Description of Artificial Sequence: Synthetic coding sequence
  source 1..1062: mol_type = other DNA
atggcggcagaattggcgatgggtgcagagctgcctagtagccccctcgcaattgaatacgtgaatgatttcgacttgatgaagtttgaggtgaaaaaagagccaccagaagctgaacggttctgccaccgcttgccaccaggtagcctgtcaagtacaccactatcgaccccctgtagttcggtcccttcatccccctccttctgcgcaccctctcccggcacagggggggggggaggagctggcggaggcggcggaagttctcaggccggcggtgcaccaggacctcctagcggggggccaggcgccgtgggcggaacttctggcaagcctgcactggaggacttgtactggatgtccgggtatcagcatcacctgaaccccgaggctctgaacctgacgcctgaagatgcggtggaggcactgatcggatccgggcaccatggagctcatcatggcgcacaccatcctgcagccgccgccgcatatgaagccttccggggccccggtttcgcaggaggaggaggagctgacgacatgggcgccggacaccatcacggcgcccatcatgccgctcaccatcaccatgccgctcaccatcaccatcatcaccaccaccatcatggcggagccgggcacgggggcggcgccggccaccacgttaggctggaagagcgcttcagtgatgatcaactcgtttccatgtctgtccgggagctgaaccgacagctgaggggattttccaaggaggaggtaattaggctcaaacagaaacgacggaccctcaaaaatcggggatacgcacagtcatgccgattcaagcgagtgcagcagagacacattttagaatcagagaaatgccaattacagtcccaggtagagcagctcaaattagaagtgggtcgtctcgccaaagagcgagatttgtacaaggaaaaatacgagaaactggctggtagagggggccctggcagcgccggcggcgccggcttcccaagagagccatctcctcctcaggctgggccagggggggccaagggaaccgccgacttttttctgtag

SEQ ID NO: 17989 - DNA, 972 bp, synthetic construct
  misc_feature 1..972: note = Description of Artificial Sequence: Synthetic coding sequence
  source 1..972: mol_type = other DNA
atggctgccgagttgagcatgggtcctgagctgcccacctcacctcttgctatggagtatgttaatgacttcgacttgctgaaattcgacgtgaaaaaggaacctttgggaagagccgaaagacctgggcgcccatgtactagattgcagccggccgggagtgtttcatcgaccccgctgagcaccccttgcagttcggtgccctctagcccgtccttctctcccacagagcagaaaacccacttggaagacttatactggatggccagcaactaccagcagatgaatccggaggccctaaaccttaccccagaggatgcagtggaagcacttatcggttctcacccggtgccccaacctctgcagagctttgactcctttagaggcgcacatcatcatcatcaccatcaccacccccatccacaccatgcctacccgggtgctggcgtggcccatgacgaactgggcccacatgcacatccacatcaccaccatcaccaccaggcaagtccccctccatcttctgctgctagtccagcccagcagctgccaacaagtcaccccggacccggcccccatgcgaccgcgtcagctactgcagcaggtggcaatgggagtgtggaggaccgcttctctgatgaccaactggtgtctatgagcgtccgggagttaaaccgtcatctcaggggtttcacgaaggacgaagtaattagactgaagcaaaagaggcgcactcttaagaaccgtgggtacgcccagtcctgtaggtacaagagggtccagcaaaagcaccaccttgagaatgagaaaactcagctgatccagcaggtggaacagctcaagcaggaagtgtctagattggccagggaaagggatgcttataaggtgaaatgcgagaaactggccaattctggcttccgggaagcggggtctactagcgatagcccaagttcgcccgagttctttctgtag

SEQ ID NO: 17990 - DNA, 972 bp, synthetic construct
  misc_feature 1..972: note = Description of Artificial Sequence: Synthetic coding sequence
  source 1..972: mol_type = other DNA
atggctgcagaactgtcgatgggacccgagctgccaacgtcaccactggcaatggaatatgtgaatgacttcgatctgctgaaatttgacgtcaaaaaggagcccttagggagagctgagagaccagggcggccttgcaccaggttgcaaccagcagggtcggtgtcatccacccccctgtcaactccctgctctagcgtaccctcttccccttcatttagtcccaccgaacagaaaacgcaccttgaagacctgtactggatggcatctaattatcaacagatgaatcctgaggccctgaacctgacgcccgaggatgccgtcgaggctctcatcggatctcaccccgtgccccagccccttcaaagttttgacagctttcgcggggcacaccatcaccatcatcatcaccaccctcatccccatcacgcgtacccaggggctggagtggcacacgacgagctcggaccacatgcccatccccaccaccatcaccaccatcaggcctcacccccgccatcaagcgcagcctcaccagctcaacaactcccaacttcccatccaggtcctggcccacacgccactgctagcgcaacagctgccgggggaaatgggagcgtggaggatagattttcagatgatcagctcgtctcaatgagcgtgagggagctgaataggcatctccgggggtttaccaaggacgaggtgattcgcctgaaacagaaaaggagaacgctgaagaatcggggatatgcgcagtcttgtcggtataaaagagttcagcagaagcatcatctggaaaacgagaaaacgcagctaatccagcaggtcgagcagttgaagcaggaggtttctcggctcgccagagaacgagacgcatataaggttaaatgcgaaaagttggcgaattctggatttagagaggccggatccacatccgactcaccctcatcacccgagtttttcctgtag

SEQ ID NO: 17991 - DNA, 1233 bp, synthetic construct
  misc_feature 1..1233: note = Description of Artificial Sequence: Synthetic coding sequence
  source 1..1233: mol_type = other DNA
atggcgaaacgatctcgcagcgaggatgaagatgatgacctacaatacgcggatcacgattatgaggtcccccagcaaaagggtctgaagaagctctggaatagggtcaagtggactcgtgacgaggatgacaagctcaaaaagctcgtcgaacagcatgggacagatgattggacactgatagcctcacatttgcaaaaccggtcggacttccagtgccaacatcgttggcagaaggttttgaaccccgaattgatcaagggcccttggaccaaggaggaggatcagagggtcatcgaacttgttcagaagtatggaaaaaaacgcaagatgcgcgtggggcacagcccagggtcagaactgagggatgggagcctgaatgatggaggcaatatggcgctgaaacacactccgctcaaaacattaccctttagtccctcccagttttttaatacgtgcccaggaaacgagcagctgaacattgaaaatccaagctttacctccacaccaatatgcggccaaaaggccctaatcaccaccccccttcacaaagagacaacgccaaaggaccagaaggagaacgtaggttttcggacacctacaatccggaggagcattcttggcactaccccacgcacacccactccttttaaaaatgcgttggccgcccaagagaaaaagtacggaccccttaagatagtaagtcagccacttgcattcctggaagaagacatccgtgaagtgctgaaggaagagacagggacagatctgtttctgaaagaagaggacgagccagcttacaagtcctgtaaacaagagaacacagcgtccggtaagaaggtgcgaaagagcttggtgctggacaattgggagaaagaagagtctggcacacagctgctgactgaagatatctccgatatgcagagcgagaaccgcttcactacctcactgctgatgatcccccttctggaaatccacgacaatcgttgtaatctgatccccgagaagcaggacattaattcgaccaataaaacctacaccctcacaaagaaaaaaccgaacccaaatacctccaaagtggttaaactcgagaagaacctgcagtcaaactgcgaatgggagaccgtggtttacggaaaaacagaggaccagctcattatgacggaacaagccaggcgttatcttagtacatacaccgcgaccagcagcaccagccgagcgcttatcctgtag

SEQ ID NO: 17992 - DNA, 2259 bp, synthetic construct
  misc_feature 1..2259: note = Description of Artificial Sequence: Synthetic coding sequence
  source 1..2259: mol_type = other DNA
atggccaagcgtagcagatcggaagacgaggacgacgacctccagtatgcggatcatgactacgaagtaccccagcaaaagggtctcaagaagctctggaacagagttaaatggactagagatgaggacgataaactgaaaaaactggttgagcagcacggaaccgatgattggacactcatcgctagccacctgcagaacagaagtgattttcagtgtcagcaccgctggcagaaggtgctcaatcctgagttgattaaaggtccttggactaaagaggaggaccagcgtgtcatcgagctagttcagaaatatggaccaaagaggtggtccctgattgccaagcatcttaaaggtagaatcgggaaacagtgtagagagaggtggcataatcatctgaaccctgaggtaaaaaagtcaagctggactgaggaggaggacagaattatttacgaagcccacaaacgcctggggaaccgatgggccgagatcgctaaacttctcccaggacggacggataattccattaaaaaccattggaatagcaccatgaggcgaaaggtggaacaagagggttatctgcaagacggtatcaagagtgagcgaagttcctcgaagttacagcataagccctgtgccgctatggatcacatgcagacacagaatcagttttacattccagttcagattccgggctaccagtacgtgagtccagaagggaattgtatcgaacacgtgcaaccgacgtccgctttcatccagcagccttttatcgacgaagaccccgacaaggaaaaaaagattaaagagctagaaatgttgctcatgtctgctgaaaacgaggtgagacggaagcggattccatcccagcctggctcatttagcagctggagcggatctttcttaatggatgataacatgagcaacaccttgaactccctggatgaacacactagcgagttctattctatggatgagaatcaacctgtgagcgcacagcagaacagccccacaaagttcctggctgtggaagcgaacgcagttctctcgagtctgcaaactataccagagtttgccgaaacattagaactaatcgagtcagaccctgtggcctggagcgatgttacaagcttcgacataagcgacgcggccgcatcccccattaagagcacacccgttaaactgatgagaatccagcacaatgagggcgctatggagtgtcagttcaacgtgtccctcgtgcttgaagggaagaaaaatacctgtaacggaggaaactctgaggcagtaccgctgacttcacccaatatcgccaaattttcaacaccgcctgcaattcttcgcaagaagaggaagatgcgggtgggacactctccaggatctgaattgcgagatggaagtcttaacgacggcggcaacatggcgctgaaacacacgccgctgaagactctgcccttcagcccgtcacagttttttaacacatgtccgggcaacgaacagctgaacattgaaaaccccagtttcacatccacaccgatttgcggccagaaagcactgattaccactccgctccataaagagacgaccccaaaggaccagaaagaaaacgtcggatttaggacccccactattagacgaagtatactgggcacaaccccgcgcactcctacccccttcaaaaatgccttggcagcccaagagaagaagtatggaccactgaagatcgtgtctcaacccctggctttccttgaagaagatatacgagaagtgctgaaagaggaaactggcacagatctctttctgaaggaagaagacgagcctgcatacaagtcatgtaaacaggaaaacactgcttctggaaaaaaggtgagaaaatctttagtactggataattgggaaaaggaggaaagtggaacccagttgctaactgaggacatatcagatatgcaaagcgaaaaccggtttaccactagcctgctcatgattcccctgctcgagattcatgataatcgctgcaatcttatccctgagaagcaggatatcaactctacaaacaagacctacactctcaccaagaagaaacctaatcccaacacgtccaaagtggttaagcttgaaaagaatctgcagtcgaattgtgaatgggagacggtagtttatggcaagaccgaggaccagctcatcatgaccgagcaggctaggagatacctttctacctacacagctacaagttccacaagccgggccttaatcctgtag

SEQ ID NO: 17993 - DNA, 2079 bp, synthetic construct
  misc_feature 1..2079: note = Description of Artificial Sequence: Synthetic coding sequence
  source 1..2079: mol_type = other DNA
atggccaagcgatcccggtcagaggacgaggatgacgatctgcaatatgcggatcatgattacgaggttcctcagcaaaaaggactcaagaagctgtggaatcgggtgaaatggacgagagatgaggatgataaactcaaaaaactagttgaacagcacggaaccgatgactggactcttatcgcctcacatctgcaaaatcggagcgattttcagtgccagcatcggtggcagaaggtgctcaaccccgaattgatcaaagggccatggactaaggaagaagaccagcgtgtgattgaactggtgcagaaatatgggccaaaaagatggagcctgatcgcaaaacacctgaagggaaggataggtaagcaatgcagagaaaggtggcacaaccatctcaatccagaggttaaaaagtcaagttggaccgaagaagaagataggataatttatgaagcccataagaggttagggaacaggtgggccgagatcgccaaactcttacccggcagaacagataacagcatcaagaaccattggaacagtaccatgcgaagaaaggtggaacaggaaggctaccttcaggacggcataaaatcagaaaggtcttccagcaaactgcagcataaaccgtgcgcagccatggaccacatgcaaacacagaatcagttttacatcccagtgcagatccctgggtaccaatatgtttccccggaagggaattgtatcgagcatgtccagcccacttccgccttcattcagcagccatttatcgacgaggaccccgacaaagagaagaaaatcaaagaattagagatgctgctcatgagcgcagagaacgaggttagacggaagaggatcccctctcagccagggagtttttcttcatggagcgggtccttcctgatggacgataacatgtctaacactctgaacagcctggatgaacatacgagcgagttctactccatggatgagaatcaacctgtttccgcacagcagaacagccctaccaaattcctcgctgtggaggcgaacgctgtgctgtcgtcgctgcaaactatcccagagttcgcagaaacattagagctgattgagagcgaccccgttgcatggagcgatgtgacaagctttgatatttctgacgccgccgccagccccataaagagcactcccgttaagttgatgcgcatacagcataacgagggcgcaatggaatgccagttcaatgtgagcctggtgcttgagggtaaaaagaatacatgtaacggcgggaatagcgaggctgttccgctgacatctcctaacatcgcaaagttctccaccccaccagccattctaaggaaaaaaagaaagatgcgcgtggggcactcaccaggcagcgaactgcgtgatggctctttgaacgacggcggcaatatggccctgaagcatactcccctaaagacacttcctttctctccaagtcagttctttaacacttgtcccggtaacgagcagcttaatatcgagaacccatcctttacaagtacacctatctgcggccagaaagctctgatcacaacccccctccataaggaaactacaccaaaggatcagaaggaaaatgtcggttttcgaacaccaaccatccgaagaagcattcttggcaccactccaagaactccaactccattcaaaaacgccttagctgcacaggagaagaaatacggaccccttaagattgtttcgcaacctctcgcattcctcgaggaggacatacgcgaggtcttgaaggaagagaccggcaccgatttgtttctcaaagaggaggatgaaccagcctataagtcctgcaaacaagaaaacaccgcctcgggaaaaaaggtgcggaagtctctggtgttagataattgggagaaggaggaatccggtacccaacttttgacagaggatattagcgatatgcagtcgaattgcgaatgggagactgtggtctacggcaaaactgaagatcagctgatcatgactgaacaggcgcgccgctatttgtctacttacaccgctacctcatcaactagtagagccctgattctgtag

SEQ ID NO: 17994 - DNA, 711 bp, synthetic construct
  misc_feature 1..711: note = Description of Artificial Sequence: Synthetic coding sequence
  source 1..711: mol_type = other DNA
atgtgcgtgtgcgcgggctgtcgcgccgctccttcacgcaggggcgctggacctttgcaagtcgcgggcggatggagcgagggcgcagatatggattacgattcatatcaacattacttctacgactacgactgtggggaggacttctaccgttcaaccgctccctctgaggacatttggaaaaaattcgagctggttcctagtccgcctacgtccccgccctggggcctcggccccggggccggcgatcctgcacctggaattggccctcctgagccatggccgggaggatgcaccggcgacgaggccgagtctaggggccattctaaaggttggggacgtaactatgctagcataatccgtagagactgcatgtggtctgggtttagcgcccgggaaagactggagcgagccgtgtccgatcggttagccccaggagccccgcgcgggaacccacccaaagcctctgccgcccccgattgtaccccctcactggaggccggaaacccagcccccgctgccccgtgccctctgggcgagccgaaaacccaggcctgtagcggtagcgagtctccgtctgatagcggaaaggatctgcccgagcctagtaagcggggacctccccatgggtggccgaagctgtgtccttgtctccgctctgggatcggctcgtctcaggcactgggtccatccccaccactgttcggatag

SEQ ID NO: 17995 - DNA, 1095 bp, synthetic construct
  misc_feature 1..1095: note = Description of Artificial Sequence: Synthetic coding sequence
  source 1..1095: mol_type = other DNA
atggactatgactcatatcaacattacttttatgattacgattgcggggaggatttctacaggagtacagcaccctcggaagacatttggaaaaagttcgaattagtcccaagcccacctacatctccaccatggggacttggacctggagctggcgaccccgcaccgggcatcggtcccccagagccctggcccggaggttgtaccggagatgaggctgagagccgcgggcactccaagggctggggccggaattatgcttccattatcaggcgggactgcatgtggtccggcttttcagcccgagagcgcctagagcgagccgtctcagacagattggcccctggggcccctcgcggcaatccgccaaaggccagcgccgctccagattgcacccccagcctggaagcgggcaatcctgcccctgctgccccctgcccattgggggaacctaaaacacaggcgtgttccggatctgagagtccctccgatagcgaaaatgaggaaattgacgtagtaacagtcgaaaagcgccagtcactggggatcagaaagccggtgactatcactgtacgcgcggaccccctcgacccatgcatgaagcatttccatatctctattcaccagcaacaacacaattatgccgcccggtttccccctgagagctgctcgcaggaggaggcaagtgagcgtgggcctcaagaagaagtgttggagagagacgcagcaggggagaaggaagacgaggaggacgaagagatcgtctcacccccacccgtggaatcagaagccgctcagtcctgccacccgaagccagtctccagcgacacggaggatgtaacgaagaggaagaaccacaacttcctggagaggaagagacgcaacgatttacggtcaagatttctcgctctgagagaccaagtgcccactttagccagttgcagtaaggccccaaaagtagtgatcctgagcaaggcccttgaatacctgcaggcattagtaggggctgaaaaacggatggcaaccgaaaaacgccaattgagatgtcgccagcagcagctgcagaagcggatcgcatacctgactggatactag

SEQ ID NO: 17996 - DNA, 1185 bp, synthetic construct
  misc_feature 1..1185: note = Description of Artificial Sequence: Synthetic coding sequence
  source 1..1185: mol_type = other DNA
atgtgtgtgtgcgcggggtgccgagccgcaccttctagaagaggcgcaggtcctctgcaggttgccggaggctggtctgaaggggcagacatggattatgacagctatcagcactacttctatgattacgactgtggagaggatttttaccgatcgaccgcaccatcagaagatatttggaaaaagtttgagctggtgccttctcctcccacttcaccgccctgggggctcggcccaggcgctggtgaccccgcacccggaattggtcctcccgaaccctggcccgggggatgtaccggtgacgaagcggaaagtcgggggcacagtaaggggtggggcaggaactacgctagcatcatcagacgggactgcatgtggagtggcttcagcgcgcgcgagcgcctcgagagagcagttagcgacaggctggcccctggtgccccccgcggaaacccccctaaggcatcggcagctcctgactgtactccctccttggaagcaggaaatcccgctccagccgccccctgcccgttaggcgaacctaaaacgcaggcatgcagtggttccgaatcccctagcgattccgagaacgaagagattgatgttgttactgtggagaagcgccagagccttgggattcgcaaaccggtgactatcactgttcgcgctgaccctctggatccctgtatgaagcatttccacatctctatccatcagcaacagcataattatgcggcgcgctttccacctgagtcctgttctcaggaggaggcctcagagcggggaccccaagaggaggtgctagagcgcgacgctgcgggggagaaagaagatgaggaggatgaggagatagtgtcacctccaccagtggaatccgaggcagcccagagttgtcatcccaagcccgtaagcagcgataccgaagatgtgaccaaaaggaaaaaccataattttttagaaaggaagcggcggaacgatctcagaagccgcttcctggcgctccgggatcaggtgccgactctagcgtcctgctcgaaggctcccaaggtggtgatcctcagtaaagctctggagtacttgcaggctcttgtgggggccgaaaagcgtatggccacagaaaagcgccagctccgctgtcgccagcaacagctgcagaaaagaattgcatatctcacaggctattag

SEQ ID NO: 17997 - DNA, 621 bp, synthetic construct
  misc_feature 1..621: note = Description of Artificial Sequence: Synthetic coding sequence
  source 1..621: mol_type = other DNA
atggattatgacagttaccaacactacttttatgactacgattgcggggaggacttctacagaagtactgccccctctgaggacatttggaagaaattcgagttagtgcccagtcctcccacttccccgccctggggtctcggccccggagccggggaccccgcccccggaatcggtccacctgaaccatggccgggaggctgtacaggggatgaggcggaatctcgcggccactccaaaggctggggccggaactacgcgagcattatacgcagagactgtatgtggagcggtttttccgcacgcgaacgcttggaaagagcagtgagtgataggctggcgccgggagccccacgaggaaacccccccaaagcttccgctgcccctgactgtacaccttccctagaggctggcaaccctgcgcccgcagctccctgccctctcggcgagccaaaaacccaggcatgctctgggtccgagtcgcctagcgacagcggcaaagacctgcccgaaccctctaaacgcgggccacctcacggttggcctaagctctgcccatgtctgcggagcggaattggttcaagccaggcattgggcccatcgccccccctatttgggtag

SEQ ID NO: 17998 - DNA, 303 bp, synthetic construct
  misc_feature 1..303: note = Description of Artificial Sequence: Synthetic coding sequence
  source 1..303: mol_type = other DNA
atggattatgactcctaccagcactatttttacgattatgattgtggggaagatttctaccgttctaccgcgccttccgaggatatatggaaaaagttcgagctggtgccgtcgccacccactagccccccctggggactgggaccaggcgcgggggacccagcgcctggcattggtccccctgagccatggccaggcggctgcaccggtgacgaggctgagagtagggggcactccaaggggtggggcagaaactatgcgagcataattaggcgcgattgcatgtggtcaggtttcagctag

SEQ ID NO: 17999 - DNA, 642 bp, synthetic construct
  misc_feature 1..642: note = Description of Artificial Sequence: Synthetic coding sequence
  source 1..642: mol_type = other DNA
atgccaaggcgcgccgagaattgggatgaggcggaagtaggtgctgaggaggccggtgtggaagagtacggacccgaggaagatggaggcgaagagtctggtgcggaggagagcggcccagaagagtcgggccccgaagagctgggggccgaggaggagatggaggcgggccggcctcgtccagtcctgcggtccgttaattctcgggaaccatcccaggtgatattctgcaaccgaagtccaagagtcgtcctgcccgtctggctgaatttcgatggcgagcctcagccctatcccaccttaccccccgggacgggcaggcggatacactcttacaggggccatttatggctgttccgagacgctggcacccacgacggcctgctggtcaaccagaccgagctgttcgtcccctcattgaatgtagacggccagcccatctttgctaacattacacttccagtctacaccctgaaagagcgctgcctgcaggtggtgaggagcctagtcaagccagagaattatcgccgactggacatcgttaggtccctgtatgaagacctagaggaccaccccaacgtgcagaaggatctggagagactcacacaggaacgaattgctcaccagcggatgggggattag

SEQ ID NO: 18000 - DNA, 519 bp, synthetic construct
  misc_feature 1..519: note = Description of Artificial Sequence: Synthetic coding sequence
  source 1..519: mol_type = other DNA
atgcctcgacgcgccgaaaactgggacgaggctgaggtcggggcagaagaggccggagtggaagagtatggccctgaggaggacggcggcgaggagagcggagccgaggaatctggccccgaagaatcaggccctgaagagctaggcgctgaggaagaaatggaagccggcaggccccggccggttttgcggagtgtgaactcccgggaaccatcccaggttattttctgtaataggtctcctcgagtggtactccccgtgtggctgaactttgatggagagcctcagccttaccctaccctgccgcccggtacaggtcgtcgaatccactcctaccgcgtgtacaccctgaaggagaggtgcttgcaagtagttagaagcctggtcaagcccgaaaactatagaagattagacattgtgaggtcgctatacgaggatctggaagaccatcctaacgttcagaaagacctcgagagattgactcaagagcgcatcgctcatcagaggatgggtgattag

SEQ ID NO: 18001 - DNA, 396 bp, synthetic construct
  misc_feature 1..396: note = Description of Artificial Sequence: Synthetic coding sequence
  source 1..396: mol_type = other DNA
atgcccagaagagcggagaattgggacgaggctgaggtcggagccgaggaggctggggttgaggaatatggcccagaggaggactcctatcgggggcacttatggctgttccgtgacgccgggacacatgatggactccttgttaatcagacggaacttttcgtgccatctctcaatgtcgacggccagcctatatttgccaacatcaccctgcccgtttacacactcaaagaaagatgtcttcaggtagtgcgaagccttgtcaaacctgaaaattatcggagactcgatattgtgcggtcactgtacgaagaccttgaagatcatcctaacgtgcagaaggatctagagaggctcacccaagagaggattgcacatcaaagaatgggagattag

SEQ ID NO: 18002 - DNA, 1281 bp, synthetic construct
  misc_feature 1..1281: note = Description of Artificial Sequence: Synthetic coding sequence
  source 1..1281: mol_type = other DNA
atggtgcacttttgtgggctgttgacactgcaccgggagcccgtgccactcaaatccataagtgtttcagttaatatctatgaatttgtggcaggcgtgtcggccacccttaactacgaaaatgaggagaaggtgcccctggaagcttttttcgtattccccatggatgaagacagcgccgtgtacagtttcgaagcccttgtagatgggaaaaaaattgtggcggagcttcaagataaaatgaaagctcggacgaactacgaaaaggccatttcccagggacaccaggctttcctgcttgaaggtgattcatcatctcgggatgtgttcagttgtaacgtgggcaatcttcagcctggatcaaaggccgcggtgaccctgaagtatgtgcaggagctgcctcttgaggctgacggagccctgcgattcgtgctgcctgccgtgttaaatccccggtaccagttctcaggatcgtccaaagactcatgcttgaacgtcaaaacccccatagtacccgttgaggatttgccctacaccctcagcatggtcgccacgatcgactcacagcacggcattgagaaagtccagtctaactgtcctctttcgcctacagaatatctcggcgaggataaaactagcgctcaggtctccttggctgccggtcacaaatttgaccgagatgttgaactcctgatctactataacgaagtccacacccccagcgtcgtgctagaaatgggaatgccaaatatgaagccaggccacctaatgggggacccttccgcgatggtgagcttctatcccaacatccccgaggaccagcccagtaacacctgcggagagtttatttttctgatggatcgcagtgggtcaatgcagagtccaatgtcctcccaggatacaagccagctgagaattcaagccgccaaggaaactttgatattgttgctcaagtcattaccaataggctgttacttcaacatctatggctttggctccagttatgaagcatgcttccctgaaagcgtcaagtacacacagcagactatggaggaagctttggggagagtcaaacttatgcaggctgacctgggagggactgagattctcgcgccactgcagaatatttatcgtgggccttccatccctgggcaccctctgcaagtattcgagcggccctacactcttaccgtgcttctcctgcacctgtccccggagggaaacctctgcgtcattcgaccacggcactccagatggacaattaccgtctccgtggggtag

SEQ ID NO: 18003 - DNA, 2361 bp, synthetic construct
  misc_feature 1..2361: note = Description of Artificial Sequence: Synthetic coding sequence
  source 1..2361: mol_type = other DNA
atggtgcacttttgcggtctactgaccctacatcgcgagcctgtcccgctcaagtccatttcggtgtccgtcaacatatatgaatttgtggcaggtgtaagtgcaacgcttaactacgagaatgaggaaaaggtgcctctggaagccttctttgtgtttcctatggacgaggactctgccgtgtattcctttgaggccctggtggatggaaaaaagattgtcgctgaattgcaggataagatgaaagcgcgaaccaactacgagaaagcgatatctcaaggtcaccaggccttccttctggaaggagatagctcttcaagggacgtgttttcctgtaatgtcgggaacctgcagcccggatcaaaggccgcggtgacactgaagtacgttcaggaattacccctggaggcagatggcgcgttgagattcgtgcttccggcagttctcaatccgcggtatcagtttagcggcagcagcaaggatagttgtctcaatgtcaaaacaccaatcgtgcccgtcgaggatttgccatacactctgtcaatggtggcaacaatcgatagtcagcatggcatagagaaagtgcaatcaaattgtccactgagccctacagagtacctgggcgaggataaaaccagtgcacaggtaagcctcgctgctggacataaattcgatagagacgtggagttacttatatactataacgaggtccatacccctagcgttgtgctggagatgggcatgccaaacatgaagcccgggcacctaatgggggacccttcagccatggtgagtttttatccaaatattccagaggatcagcccagtaacacctgcggtgaattcatctttctcatggataggagcggatccatgcaatccccaatgagcagccaggacacaagtcaacttaggattcaggcagcaaaggaaacgctgattctcctgctgaaaagcttgcctataggatgttacttcaacatctacggctttgggtctagctacgaagcctgctttcctgaatccgttaagtacacacaacaaaccatggaggaagctctggggcgagtgaagctgatgcaagccgacctcggtggaaccgagattctggccccgctgcagaacatctaccgagggccctcgataccgggccaccccttacaattgttcgtcttcactgacggcgaggtaactgacacatttagcgtgataaaggaggtacgcatcaaccgacagaagcacagatgcttttctttcggcatcggagaaggcacctctacatccctcataaaaggtattgcacgggcgagcgggggtaccagcgaatttatcaccggcaaggacagaatgcaatctaaggctctccgaaccctgaaaaggagtctgcagcctgtggttgaggacgtgtccttatcttggcatcttcctccagggctaagcgcaaagatgctctctcccgagcagacggtcatatttagaggccagagacttatatcttatgctcagcttacaggtaggatgcccgctgctgagaccactggggaggtgtgcctgaaatatacattacaggggaaaacttttgaggataaggttacattccctttacagcccaagcctgacgtgaacctgactatccaccggctggccgccaaaagcttgctccagaccaaagatatgggactcagagagacccctgccagcgacaagaaagacgccttgaacctgtctctagaaagcggtgttattagctctttcacagcattcattgctatcaataaggagctgaacaagccagtgcaggggccactggcccaccgcgacgtccctaggcccatcctgttaggcgcctccgccccccttaaaatcaaatgccaatccggattccgaaaggccctgcacagtgacagacccccctctgcttcccagccgaggggggagctgatgtgctacaaagcaaaaacatttcagatggatgactatagcctctgtggcttgatctctcacaaagaccagcattcccctgggttcggggagaaccaccttgtgcagctaatctatcaccagaatgcaaatggctcatgggatctcaacgaggatttggccaagatcctgggaatgtctcttgaggagatcatggccgcgcaaccagctgaattggtggactcctcaggttgggcaacaatcctcgccgttatttggttacatagtaacggtaaggatcttaagtgcgaatgggagctgctggagaggaaggcggttgcgtggatgagagcgcacgccggctccactatgccgtccgtcgtgaaggccgccataacgtttctgaaatccagtgttgaccctgcaattttcgctttttag

SEQ ID NO: 18004 - DNA, 1248 bp, synthetic construct
  misc_feature 1..1248: note = Description of Artificial Sequence: Synthetic coding sequence
  source 1..1248: mol_type = other DNA
atggttcacttctgtggccttctgacattgcaccgcgagccggtcccgctaaagagcatctccgtttcagtgaacatctacgagttcgtagcgggggtgagtgccacactgaactatgagaatgaagaaaaagtccctcttgaggctttttttgtcttcccaatggacgaggactcagccgtgtactcttttgaggctctcgtggatggtaaaaaaatcgtggccgagctgcaggacaaaatgaaggcacggactaactatgagaaagccattagccaaggacaccaagcatttctgctggagggcgactctagtagtagggacgtttttagctgcaatgtgggtaacctacagccggggagtaaagccgccgttaccctaaagtacgtccaagagttgccactagaggctgatggcgccctcagatttgtgcttcccgccgtactgaaccctaggtatcagttcagtggtagctccaaggactcatgtctcaacgtcaagacaccaatcgtgccggtcgaggacctgccgtatacactgagtatggtcgccaccattgacagtcagcatggcatcgagaaggtgcagagcaactgtccgctttcacctaccgagtatctcggggaggataagactagcgcgcaagtgtcacttgctgccggtcacaagtttgaccgcgacgtggagctcctgatttactacaatgaagtccatacaccatctgttgtgttagagatggggatgcctaacatgaagcccggtcacctcatgggtgaccctagcgcaatggtctccttttacccaaacatccctgaggatcagccctcaaacacctgcggagagttcatcttccttatggacaggagtggtagcatgcagtcacctatgagcagtcaggatacatcccaactgcgcatacaggccgccaaggagacccttattctgctgctcaaatcccttccgatcggctgctactttaacatatacggcttcggtagcagttacgaggcgtgctttcccgagagtgtgaaatacactcagcagacaatggaggaagcactgggcagagtgaagttaatgcaggccgatctgggaggtacggaaatccttgcccctctgcagaacatctaccgggggccaagtataccaggacaccctctgcagttatttgtcttcactgatggggaagtaaccgatacgtttagcgtgataaaggaggtgcgtatcaatagacaaaagcaccggtag

SEQ ID NO: 18005 - DNA, 2361 bp, synthetic construct
  misc_feature 1..2361: note = Description of Artificial Sequence: Synthetic coding sequence
  source 1..2361: mol_type = other DNA
atggtgcacttctgcggcctgttgaccctgcatcgggagcccgtgcctctaaagtcgatcagcgtgtcagtgaatatttacgaattcgtggctggcgtgagcgctacgcttaactatgagaatgaagaaaaagtgccactagaagccttcttcgttttccccatggacgaagacagtgcagtgtattccttcgaagctttagtggacggtaagaagattgttgcagagctgcaggacaaaatgaaggcaagaacaaattacgaaaaagctatttctcaaggccaccaggcttttctgctggaaggagactccagttctagggacgtattcagttgtaatgtcggtaatctgcagcctggatccaaggctgcagtgactctcaaatacgtgcaagaactccccctggaagcggatggggctttgcggtttgtactcccagctgtcctgaaccctcgatatcaattttctggttcatctaaagacagttgtctaaacgtcaagactcctattgtcccagttgaggatctgccctacaccctatctatggtggcgacaatagacagccagcacggtattgaaaaagtacaatctaattgtcctttgtctcctactgagtaccttggggaagacaagactagtgctcaggttagcctggcggccggccacaaatttgatcgggatgtggaactgcttatctattataacgaagtccacacgccatcggttgtccttgagatgggaatgccaaacatgaagcccggtcacttgatgggagacccatcagctatggtgtcattttaccctaatatacccgaagatcaaccatcaaacacttgcggagagtttatctttctgatggacaggagcggttctatgcagagccccatgagctctcaggatacttctcagctgaggatacaggctgccaaggaaacccttatcttactattaaagtccctgcccattggctgttacttcaatatatatggcttcggttcaagctacgaggcctgcttcccggagtccgtgaagtatacacaacagacaatggaagaagccttggggagggtcaagctgatgcaagccgacctgggaggaacagaaatcctggctcctctgcagaacatctaccggggcccaagcattcccggtcaccctctgcagctgttcgttttcacggatggcgaggtgacagatactttcagtgtcatcaaggaggtcaggatcaatagacagaagcaccgatgctttagcttcggcataggagaaggtacttccacaagcctgataaagggcattgcccgggcgagtggcggaacctccgaatttatcacaggtaaagaccgcatgcagagcaaagcactccggacactgaagcgctctcttcaaccggttgtcgaagatgtctcactgtcatggcacctgccacctgggctttctgcaaagatgctgagccccgagcagactgttatcttcagagggcaaagactaatatcctatgcccagctgacggggcgcatgcccgctgctgagactactggcgaggtttgcctgaaatacacactgcaaggtaagacgttcgaggacaaagtcacctttccgttgcagcccaagcctgacgtcaaccttaccatacatcggttggccgccaagagtcttcttcagacaaaggacatgggtctcagggaaacaccagcatccgataaaaaggatgctcttaatctgtcccttgagtccggggtcatttcctcatttacagccttcattgcaatcaacaaagagctgaataaaccagtccaggggcctcttgcacacagagacgtacctcggcccatactactcggcgcatcagccccacttaagatcaaatgtcagtctgggtttaggaaggccctccactcagatcgaccaccttctgccagccagccgcgtggtgagctgatgtgctataaagccaaaacatttcagatggatgattatagcttgtgcgggttaatatctcacaaagaccagcactctccaggctttggtgagaaccacctcgttcagctgatctaccatcagaacgccaacggatcttgggatttgaacgaagacctggcgaaaattcttggcatgagtctggaggagattatggctgcccaaccggccgaactggtggatagcagcggttgggcaactatcctcgcggtgatctggctgcattccaacggtaaggacctgaaatgtgagtgggagttgctggagcgcaaagctgttgcttggatgcgcgcccatgctggctcaacgatgccatccgtggtgaaggccgccatcacttttttgaaatcctccgtggatccggcgatctttgctttttag

SEQ ID NO: 18006 - DNA, 1248 bp, synthetic construct
  misc_feature 1..1248: note = Description of Artificial Sequence: Synthetic coding sequence
  source 1..1248: mol_type = other DNA
atggtgcatttctgtgggctcttaacccttcaccgcgaaccagtgccgctaaagagcatctccgtgtcagtgaatatttatgaatttgtcgccggcgtttcggccactctgaactacgagaacgaagaaaaggttccattggaggccttctttgtgttcccaatggatgaggactcagccgtgtactctttcgaagcacttgtggatggtaagaagatcgtggctgagttgcaggacaaaatgaaggctagaaccaattacgagaaggccatttcacaggggcaccaagcttttctactggagggcgatagctcatctcgggatgtgttttcctgtaacgttgggaatttgcaaccggggagtaaggctgccgtcacgttgaagtatgtccaagaacttccattggaggctgacggggctctgcgatttgttctgcctgctgtactgaatcccagataccagttctcggggagcagcaaggactcttgcctgaacgttaagacccccatcgttccagttgaggatcttccatacaccttaagtatggtggcaacaatcgactctcagcatggcatcgaaaaagtacagagtaattgtcctctgagcccaacggagtacctcggcgaggacaaaacatccgcccaggtctccttagctgcaggccacaaattcgatagagatgtcgagctgctgatttattacaatgaggtgcataccccatctgtggtgcttgagatgggaatgcctaatatgaagccaggccatttaatgggggacccaagtgcaatggtgtctttttatcctaacatacccgaggaccaaccatcaaatacgtgcggtgagttcattttcctcatggaccggagtgggtccatgcaatcccctatgagtagtcaggacacctcgcagctgcggattcaggcagccaaggagacactgattcttcttctgaagtccctgccaatcggctgttactttaatatttacggatttggtagctcctatgaagcatgctttccggagtccgtcaaatatacccaacagaccatggaagaggccctggggagggtcaaactgatgcaggcggatctgggcgggactgagatcttagccccactgcagaacatatatcgcgggccaagcattcccggtcaccccttgcagttgtttgtgtttactgatggtgaggtcaccgacacattcagcgtcattaaagaagtgcgcataaaccggcagaagcaccgatag

SEQ ID NO: 18007 - DNA, 2301 bp, synthetic construct
  misc_feature 1..2301: note = Description of Artificial Sequence: Synthetic coding sequence
  source 1..2301: mol_type = other DNA
atggccgctctgagcgggggaggaggcggaggcgcagagcccggccaggctctcttcaacggcgacatggaacccgaagccggcgcaggagccggggcagcggcttcctctgcagctgacccggcgatacctgaagaggtgtggaacattaaacagatgatcaagttgacccaggagcacatagaggcgctcttggataaattcggaggagagcataatcccccaagtatctacctcgaggcctatgaagagtacacttccaaattagacgccctccagcaaagggagcagcaacttctggaaagtctcggtaacggcaccgacttctccgtttcaagttcggctagtatggatacagtcacgtcttcaagcagctcctcactaagtgtgctcccttccagcttaagtgttttccagaaccctaccgatgtcgcaaggtcgaaccctaaaagcccacagaagcctattgtgagagtgtttctgcccaacaagcaaagaaccgtggttccagctaggtgcggagttaccgtgcgggactctctcaagaaagcgctgatgatgcgggggctcattcccgagtgttgcgccgtgtatagaattcaggacggggagaagaagcctattggttgggatacagatatttcatggctgacaggagaggagctgcacgtggaggttctggagaacgtaccactcactacacacaatttcgtgaggaagacgttttttactctggcattctgcgacttttgccgaaaactgctgttccaggggtttagatgccagacatgcggttacaaattccaccagcgttgttctacggaagtcccgctcatgtgtgtgaattatgaccagctggatttgctgttcgtgtccaagtttttcgagcaccatccgatacctcaagaagaagcttctctagcggagacagccctaacaagcggctcctctcctagcgctccagcctcagacagcatagggccccaaatcttaacttccccatctccaagcaagtctatacctattccacagccctttagaccagctgacgaggatcacagaaatcagttcggacagagagataggtctagctcagccccaaacgtgcatataaacactatcgaacctgtgaacattgacgaccttatccgagatcagggattcagaggggacgggggcagcacaacaggactttccgccacgcctccagcttccttacccggctcgctgacaaatgtaaaagccctgcagaaatcccctggacctcagagggagcgcaaatcctcgtctagctccgaggacagaaataggatgaaaacactgggccggagggactcctctgacgactgggagatccctgacggccagattaccgtaggacagcgaatagggtctggatccttcggaactgtgtacaaggggaagtggcatggggatgtcgctgtaaaaatgctcaatgtgacagccccaacaccccagcagcttcaggccttcaaaaatgaagttggggtcctcaggaagactcgacacgtcaatattttgctatttatggggtactccacaaaaccacagcttgccattgtgactcagtggtgcgaaggcagtagcctttatcaccatcttcatatcatcgagaccaaatttgagatgattaagctcattgacatagctagacagaccgcccagggaatggactatcttcacgcaaagtcaattattcacagggatctgaaatcaaacaatatcttcctccatgaggatcttacagtcaaaatcggcgattttgggctcgcaacggtgaagtccaggtggagcggctcacaccagtttgagcaattgagtggttccatcctgtggatggctcccgaggttattaggatgcaggacaaaaatccttactctttccagtccgacgtgtacgcgtttggaattgtgctgtatgagttgatgaccggccagctgccttatagcaacataaacaaccgcgaccagatcatttttatggtagggagaggatacctctccccagatttgtccaaggtaaggtccaattgccctaaggccatgaaacgcctgatggcagagtgtctgaaaaaaaagcgcgatgaaaggcccctgttcccccagattctcgcgtccatcgaattgctcgcccgttccttgcccaagatccaccgttctgcaagcgaaccaagccttaatagggccggcttccagaccgaggacttcagcctgtatgcatgtgcctcaccaaaaacaccaattcaggcgggcggttacggtgctttcccagttcattag

SEQ ID NO: 18008 - DNA, 1947 bp, synthetic construct
  misc_feature 1..1947: note = Description of Artificial Sequence: Synthetic coding sequence
  source 1..1947: mol_type = other DNA
atggagcacatccagggtgcttggaaaacgatttcaaatggcttcggattcaaggacgctgtctttgatggcagcagttgcatcagccccactatagtccagcagttcggctaccaaagacgcgcttctgacgacgggaaactaacagacccatctaagactagtaataccatccgagtgttcctgcccaacaagcaacgcaccgtggtgaatgtgcggaatggcatgagcctgcacgattgcctcatgaaggccttaaaggttaggggcctccagcctgagtgctgcgccgtgttccgcctccttcatgagcataaaggcaagaaagcgcgcctggactggaatacagacgccgcctctctcattggggaagagttgcaggtggatttcttggatcacgtgcctctgacgacacataactttgcacggaaaacatttttaaagcttgccttttgcgatatctgccagaagtttctgctcaacgggttccggtgccagacatgtgggtacaaatttcacgagcattgcagcaccaaggtgcccaccatgtgtgttgactggagcaacatccgacagcttctgcttttccccaattcaacaataggagatagtggcgtccccgctctgccctcccttacgatgagaaggatgcgagaatctgtctctagaatgccagtaagctctcagcaccgttatagcacaccacacgcctttactttcaatacctcgtctcccagcagcgaaggaagtctgtctcagcggcaaaggtccacctccacccctaatgtgcatatggtatctaccacccttccagtcgacagtcggatgatcgaggatgccatccggagtcattcagaatccgcctcaccctctgcgctctcaagcagccccaataacctctctcccaccggatggagccaaccgaagaccccagtgcccgctcaacgggagagggcacctgtgtccggaacacaagagaagaacaaaattcgtcctcgagggcagagagatagtagttactattgggagattgaagcatcagaagttatgctgagcacccggatcggcagcggctccttcggcactgtctataaagggaagtggcatggcgacgtggccgtcaagattttgaaagttgttgacccaaccccagagcagtttcaggccttccggaatgaagtcgccgtactcaggaagacacggcacgttaatatactcctgttcatgggctacatgacaaaagacaatctcgccatagtcacccagtggtgtgaaggtagctccctctataaacatctccatgtacaggagaccaaattccagatgttccaactgatcgatatcgcaagacagaccgcccaaggaatggactacctgcacgcaaagaacatcatccaccgggatatgaagtctaataacatcttccttcacgagggcttaacagtcaagatcggcgactttggcctggcaaccgttaaatccaggtggtctggctctcagcaggttgagcaacccactgggagcgttctgtggatggccccagaagtgatccgtatgcaagacaataatccatttagtttccagtcggatgtgtattcttatggcattgtcctgtacgagttgatgactggggagttaccgtactcccacatcaacaaccgcgaccagattattttcatggttggccgcggctatgcctcccctgatttgagcaaattgtacaagaactgcccaaaggctatgaagagattggtcgccgactgcgtaaagaaagtgaaggaagagagacctctgttccctcagattctgagcagcatcgaattgttgcagcactcactccccaagataaaccgctcggcctcagagccttctcttcaccgtgctgcccatactgaggacatcaatgcctgcacactcacaaccagccctaggctgcctgtgttttag

SEQ ID NO: 18009 - DNA, 2007 bp, synthetic construct
  misc_feature 1..2007: note = Description of Artificial Sequence: Synthetic coding sequence
  source 1..2007: mol_type = other DNA
atggagcatatacagggcgcatggaaaactatttctaacgggttcggcttcaaagacgccgttttcgatggctcttcttgtattagcccaaccatcgtgcagcaattcggataccaacggagagcctcagacgatggtaaacttaccgacccttctaaaacctcaaacactattagagtgttcctgcccaacaagcagagaaccgtggtgaacgtgcggaacgggatgtcccttcacgattgtctgatgaaagccctgaaagttcgcgggctccagcccgagtgctgcgcagtgttcagacttctccatgagcataaggggaagaaggctcgcttggactggaataccgacgcagccagcttgatcggggaagagctccaggtcgattttctcgaccacgtgccgttgacaacccacaactttgcccggaaaaccttccttaaactggcattctgcgacatctgccagaagttcctgctgaatgggttcagatgccagacctgcggatataagttccacgaacattgctccaccaaagtgcccacaatgtgtgtggattggtcaaacattagacagctgcttctctttccgaattccaccattggagacagtggggtccccgcgctgccatctctaacaatgaggcggatgagagaatcagtgagcagaatgcctgtttcatcccaacataggtattcgactccgcatgccttcacatttaacactagcagcccgagttctgaagggtctctatctcagaggcagaggagtacaagcaccccgaatgtacacatggtcagcaccacgctgcctgtggatagtaggatgatagagaataacaatctatctgctagcccacgggcgtggagcagacggttttgcctccgtggtcgggacgctataaggtcccacagcgaaagcgcatcaccatctgccttgtcaagcagcccaaacaacctttctcctaccggctggtcacaacccaagactcccgtccctgcccagagagagagagcccccgttagcggaacacaagagaaaaataagattaggccacggggacaacgggactcatcctactactgggagatagaagcaagcgaggttatgctgtctacgcgaatcggcagcggcagctttggcactgtttataaaggaaaatggcatggtgatgtggcggtcaagattctcaaggtcgtcgacccgaccccggagcagtttcaggcttttcggaacgaagtcgccgtgctcaggaagacacgacacgttaatatcctcctgtttatgggatatatgaccaaggacaatttggcaatagttacccagtggtgcgaaggaagctctttatacaaacatctgcacgtgcaggagactaagtttcaaatgtttcagctgatagacatcgctaggcagaccgcccaggggatggactacctccatgctaaaaacatcatccaccgcgacatgaagtccaacaatatcttcctgcacgagggcctaacagtgaagatcggggatttcgggctggccacagtcaagtctaggtggagtggtagtcagcaagtggaacaacctactggctccgtgctttggatggctccagaagtcatccgaatgcaggacaacaacccattttcattccagtctgatgtttacagttatgggattgtgctctacgagcttatgactggtgagcttccttacagccacatcaacaatcgcgatcagatcatcttcatggtaggacggggatacgcaagcccggatctctccaagctatacaaaaattgcccaaaagctatgaagcgcctggttgctgattgtgtcaaaaaggttaaggaagagcggccattattccctcaaatcttgtcatccatagagcttctgcaacacagtctaccgaaaattaacagaagcgccagcgagcctagccttcatcgcgctgcccatacagaagacattaacgcctgtactctcaccaccagcccccggctaccggtgttttag

SEQ ID NO: 18010 - DNA, 1302 bp, synthetic construct
  misc_feature 1..1302: note = Description of Artificial Sequence: Synthetic coding sequence
  source 1..1302: mol_type = other DNA
atgtgtgtcgattggtccaacatacgacaattgttctcccaacacagatacagcacacctcacgcattcactttcaacacttccagcccctcctctgaagggtcattgagccagcgccaaaggtcaacttctacaccaaacgtccacatggtctctactaccctcccagtggattctaggatgatagaggacgccattcgaagtcactccgagagcgccagtccctcagccctgtcgagtagcccaaataatttatctcctaccggctggtcacagcctaaaaccccagtccccgcccagcgcgagcgcgcgccagttagcggtacccaagagaaaaataaaatccggcctagggggcaacgggactcctcttactactgggagatcgaggcaagcgaggtgatgctgtccacgcgcatcggcagcgggtcatttgggacagtttacaaaggcaagtggcatggggacgttgcagtgaagattcttaaggtggttgaccccactccagagcagttccaggcgttccggaacgaagttgcagttctccgcaagacccgtcatgtgaacattctcctgttcatgggctacatgacgaaagacaatctggcaattgtgacacagtggtgtgaggggagtagtttgtataagcacctgcacgttcaggaaacgaagttccagatgtttcaattaatcgacatagctcggcagacagcgcaaggaatggactatctgcacgctaagaatatcattcaccgagacatgaagtccaacaatattttcctgcatgagggcctgaccgtgaagatcggcgactttggacttgctacggtaaagtcgagatggagcgggtcacagcaggtggaacagcctactggctctgtgctgtggatggccccagaagtaattaggatgcaggacaataacccattctcattccaatccgacgtctactcctatgggatcgttctgtacgaactgatgactggagaacttccatatagccatattaacaacagggaccagatcattttcatggttggcagggggtatgccagccctgatctctccaaactgtacaagaattgccccaaagcaatgaaaaggctggtggcagactgcgtgaaaaaggtcaaagaagagcgccccctgttcccccaaatactatcttctatagaactcttacagcactcattaccgaagatcaatcggtctgccagtgaaccctcgctccatagagccgcccacaccgaagacatcaatgcatgcaccctgactacttctcccagacttcccgtcttctag

SEQ ID NO: 18011 - DNA, 1704 bp, synthetic construct
  misc_feature 1..1704: note = Description of Artificial Sequence: Synthetic coding sequence
  source 1..1704: mol_type = other DNA
atgatggcgaatagccagatccttttgcgccaagccacgttaagcgtctttagttgtagaacctctaaggagcaatgtaaaaaagcccgcctggattggaacaccgatgctgctagtctgatcggcgaagaactgcaggtggactttctcgatcatgtgccccttacgacgcacaactttgctagaaagacttttctaaagctggccttttgtgacatctgccagaaatttcttcttaacggattcaggtgccagacgtgcggatataaattccatgaacactgttccaccaaggttccgacaatgtgtgtggattggtcaaatatccgccagttactactctttcccaattcaaccatcggggattctggtgtacccgctttgccaagcctcacaatgagaaggatgcgcgaaagcgtttcaagaatgccagtgagcagccagcaccgatactcaactccacatgcttttacattcaacacttcctccccttctagtgagggtagtctgtctcagagacagaggagcaccagtacccctaatgtacatatggtaagtacaacccttcctgtagactctagaatgatagaggatgctatcagatcccactctgagtcagccagtcccagcgctctgtcctccagcccaaacaatctaagccctacaggctggagtcagcctaaaactcccgtcccagcccagagggagcgggctcccgtgtcgggcacccaggaaaagaataaaatacgtccaagagggcaacgtgactccagctactactgggaaattgaggccagtgaggtgatgctgtccacacgaatcgggtccggatcctttggcacggtctacaagggaaagtggcacggcgatgtggctgttaagatcctgaaggtggtcgatccaactcccgagcagttccaggccttccggaatgaagtcgccgtcctccggaagacacggcatgttaacattcttctgttcatggggtacatgactaaagataatctggcaattgtgacgcagtggtgcgagggcagctctctgtataagcacctccatgtgcaggagaccaagttccagatgttccaactaattgatattgctcggcaaacagcgcagggtatggattatctccacgctaaaaacattattcacagggacatgaaatccaacaacattttccttcatgagggtttgactgtgaaaatcggagacttcgggttagccacagtaaagagcagatggagcggatcgcagcaggtagaacagccgactggtagcgtcctttggatggcacccgaggtgatcagaatgcaagataacaaccccttctcgttccagagcgatgtgtactcctacggtattgtattatatgaactgatgaccggcgagctcccttattcacatatcaacaatcgcgatcagatcatcttcatggtgggtcgtggctatgccagcccggatctgagcaagctgtacaaaaactgccctaaggctatgaaacgcttggtggccgactgtgtgaaaaaggttaaggaagagagacccctcttccctcagatcctgtctagtatcgaactgctccagcactccctccccaaaattaatagatcagctagcgaaccttccctgcatcgagctgcccatactgaagacatcaacgcttgcaccctgacaaccagtccaaggctccctgtcttttag

SEQ ID NO: 18012 - DNA, 1611 bp, synthetic construct
  misc_feature 1..1611: note = Description of Artificial Sequence: Synthetic coding sequence
  source 1..1611: mol_type = other DNA
atgggttctaacaagagtaaacctaaggatgcctcgcagagacgacggtccttggagccagccgaaaacgtccacggggctggagggggagcctttcctgcgtctcagacccccagtaaacccgcctcggctgatgggcaccgcggaccctccgcagcttttgctcccgccgctgcggagcctaaactgttcggtgggttcaattcaagcgatacagtcacaagcccacagagggctggaccgctcgctggaggagtaacaacctttgttgcattgtatgactatgaaagtcggacagaaacagacttgagctttaagaaaggagaacggctgcaaattgtgaacaatactgagggcgattggtggcttgcgcacagcctgagcacaggacaaacaggatacattccgtccaactacgtggccccctctgattctatccaagccgaagagtggtactttggtaagattacccgacgggagtccgaaagactgcttctcaacgcagagaaccctaggggaacatttctggtgagggaatctgaaacaacaaaaggcgcctattgcctgtctgttagtgatttcgacaacgccaaggggcttaatgtaaagcattataagatccgaaagttggatagtggaggcttttatatcacgtctagaactcagtttaattcactccagcaattggtggcttactattcaaaacacgcagacggtctatgccaccgcctgaccacggtatgtcccacgtcaaagccgcagacgcaaggcctggccaaagacgcatgggagatcccacgggagtcactccgtctagaagttaaactaggacaaggctgcttcggggaggtgtggatggggacgtggaatggaaccaccagggttgccattaagacactcaaaccagggaccatgtcgccggaggcctttctgcaggaagctcaggtgatgaaaaagttgcggcatgagaaactggtgcaactttacgccgtggtctcagaagagccaatttacattgttaccgagtacatgagcaagggctccctcctcgacttcctgaagggcgaaacaggcaagtatctgaggctgcctcaactagtggatatggctgcacaaattgccagcggcatggcatacgtcgagaggatgaattacgtgcaccgagacctgagagcagccaatatcctggtaggagaaaacctagtctgcaaggtcgccgacttcggactcgctcgtctgatagaggataatgaatataccgcccggcagggcgccaagtttccaatcaagtggactgcaccggaggctgccttatacgggcggtttaccatcaaaagcgatgtgtggtcctttggcatcctcctcacagaactgacaacaaaaggcagggtgccctatcccggcatggttaacagagaggtactcgaccaggtggagaggggatatagaatgccttgcccccctgaatgtcccgaatctctgcatgatctcatgtgtcaatgctggaggaaagagcctgaggagcgcccaacattcgagtatctgcaagcatttcttgaagattatttcacatctaccgagccacagtaccagccaggggaaaatctgtag

SEQ ID NO: 18013 - DNA, 1629 bp, synthetic construct
  misc_feature 1..1629: note = Description of Artificial Sequence: Synthetic coding sequence
  source 1..1629: mol_type = other DNA
atgggaagcaataagtcaaaacccaaagacgcctcacagcggagacgtagtcttgaaccggcagagaacgtccacggggcaggtgggggtgcctttccagcttcccagacgccctccaagcctgcctcagccgacggtcatagaggaccctcagcggctttcgcccctgcggctgctgaacccaaactgtttggtggcttcaattcgagcgatacagttacaagtccccaaagggctggcccactggccgggggagtgacaactttcgttgcactgtatgattacgaatccaggacagaaaccgatctgtctttcaagaagggggagaggctgcagattgtgaacaacacacgcaaggtggatgtccgggaaggagattggtggctggcacattcactctccaccggccagaccggatacattcctagtaattatgtggccccctccgactctatacaggccgaagagtggtacttcgggaaaatcactcgccgagaatctgaacgattgctgctaaatgctgagaatcctcggggcacgttcctggtccgagaatcagagacgacaaaaggcgcctactgcctctccgttagtgacttcgataacgccaagggactcaacgtcaaacactataaaatacggaagctagattcaggggggttctacatcactagccggacccagtttaacagcctgcagcaattagtggcgtactactccaagcatgcagacggcctgtgccatagactgacgacagtctgtcccaccagcaaacctcaaacccaagggttggctaaggacgcttgggagatcccccgggaatctcttcgactggaagtgaaattaggacaagggtgctttggtgaggtttggatgggcacctggaacggcaccactagagtggccattaagacactgaagccggggacgatgagcccagaagctttcctgcaggaggcccaggtgatgaagaaactgaggcatgagaagctggtacagctgtacgcggtggtctccgaagagcccatctacattgtcaccgagtacatgtctaaaggcagcttgctggactttttgaagggcgaaacagggaaatacttaaggttgccccaattagtggacatggccgctcagatcgcatccggtatggcgtatgtcgagcgtatgaactacgttcatagggacctgcgcgctgctaacattcttgtcggagagaacttggtgtgtaaggtggctgatttcggcctcgcacgcctcatagaggacaacgagtataccgcacgtcagggcgccaaatttccaatcaagtggaccgctcccgaggctgctctgtatggtcgattcacgattaagagcgacgtgtggagtttcggaattctgttgactgagctgacaacaaaaggaagggtaccttatcccggtatggtgaacagggaggtactggaccaagtggaaaggggttatcgcatgccgtgccctcccgaatgcccagaaagcctccatgatctgatgtgccaatgttggcgcaaggaacctgaagaaaggcctacatttgaatacctccaagcgtttctagaagattactttactagtacagagccgcagtaccagcccggtgagaacctttag

SEQ ID NO: 18014 - DNA, 1611 bp, synthetic construct
  misc_feature 1..1611: note = Description of Artificial Sequence: Synthetic coding sequence
  source 1..1611: mol_type = other DNA
atggggtctaataagtcgaagccaaaggatgccagccaaagacgcaggtccctggagcccgcggaaaacgtgcacggtgccggcggaggggcgttccccgcatcgcagaccccatccaagccagcgtccgcagacggccaccgagggcccagtgcagcgtttgcccccgccgctgccgaacccaaactattcggaggtttcaattcatcagatactgtgacgtctccccagagagcaggcccccttgctggaggcgtaaccacatttgtggccctgtatgattacgaaagtcggacagagactgacctgagcttcaagaagggtgagcggctgcaaatcgtcaacaacactgaaggggattggtggctcgctcattcgctgagcacaggacagacaggctacattccctccaactacgtggcccccagtgattctattcaagccgaagaatggtactttggaaagataaccaggcgcgaatccgaaagactactgttaaacgctgagaatcctagagggactttcctggtgagagaatcagaaacaaccaagggcgcttactgcctctcagtgtccgattttgacaacgccaaaggcctcaatgttaaacattacaaaatcaggaagctggattcaggaggtttctatatcacatcacgcacccaattcaactctctgcagcagctggtcgcttattattcaaagcacgcggacggcttgtgccaccggttgacaactgtctgccccacttccaagccgcaaacccaggggctcgcaaaagatgcctgggagatcccaagagaatcactgcgactggaggtcaagctgggccagggctgttttggagaggtgtggatgggaacttggaacggaactactcgcgtggccataaaaacattgaagcccggtacgatgagcccagaggctttcctgcaggaagcgcaggtgatgaagaaactgagacatgagaaactggtccaactgtacgctgtcgtgagtgaggagccaatttacatagtcactgagtacatgtcaaaggggtctctgttggactttttgaagggagagacgggcaagtacttgaggctgccgcagcttgtcgatatggctgctcagatcgcctccggcatggcatacgtggagaggatgaactatgtccacagggatctgcgagcggctaacatactggtgggggaaaacttagtttgtaaggtcgcggacttcggactcgctagactgatcgaggataacgagtacacagctcgacagggggcgaagtttcctatcaaatggactgccccagaggctgccctctacgggcggtttactataaaatctgacgtgtggagcttcggcatactccttactgagttaacaaccaagggacgagtgccctatcccgggatggtaaatagagaagtgttagaccaggtagagagggggtatcgaatgccatgcccccctgaatgtcccgaaagtttgcacgatttgatgtgtcagtgttggcggaaggagccagaggaacgccctaccttcgagtacttgcaggccttcttggaggattactttacgagtacagaaccacaataccagccgggagagaacctgtag

SEQ ID NO: 18015 - DNA, 1611 bp, synthetic construct
  misc_feature 1..1611: note = Description of Artificial Sequence: Synthetic coding sequence
  source 1..1611: mol_type = other DNA
atgggatccaacaagtcgaagcccaaggacgccagtcagagaaggcgttcacttgagccagcagaaaatgtccatggcgcagggggtggcgcctttcctgcttcacaaaccccaagcaagccagcgtcagccgacggccatcgggggccttccgccgcttttgctccagccgctgcagaacctaaactgttcggcggatttaattcaagtgacacggttactagtcctcagagagccggacctctggccggtggggtaactacattcgttgctttgtatgattatgagagcagaacggaaactgacttatcctttaagaaaggcgaacggcttcagatagtgaacaacacggagggagactggtggctggcccattcgctatccactgggcaaactggctacatcccgagtaattatgtagctccaagcgactccattcaggccgaggagtggtattttggaaaaattactcgcagggaaagcgaaaggttgctgctcaacgcggaaaatccacgtggaacttttctcgtgcgcgagtccgaaacaacgaaaggtgcctattgcctttctgtcagtgactttgataacgccaagggactgaacgtaaaacactataagattagaaaactggactctggagggttttacattacatcccggacccagttcaattctttacagcaacttgtggcctactatagcaagcacgctgatggactctgccatcggctcactaccgtgtgtcctacatccaagccgcagacacaagggctggccaaagatgcatgggaaataccgagagagagcctgcgcctggaagtgaagcttggccaggggtgctttggcgaagtctggatggggacttggaacggcactactcgcgtggcaatcaagactctgaagcccggcacaatgtcccctgaggccttcctacaggaagctcaagtaatgaaaaaactgcggcatgagaaattggtgcagctgtatgctgtcgtgtctgaagagccaatatatattgtgaccgagtacatgtctaagggctcattgctggatttcctgaagggcgaaaccgggaagtatctacgtctgccacagctcgtcgatatggcagcccagatcgccagtgggatggcctatgtagaaaggatgaattacgtacatcgcgacctgcgggctgcaaatattctggtgggcgagaatttggtctgtaaagtggccgacttcggcctggccaggctgatcgaggacaatgaatacacagctagacagggagcgaagttccccatcaaatggactgccccagaggccgccctgtacgggaggttcaccatcaagagcgacgtctggtcctttggaatcctgcttacggaactcactactaagggccgggttccctacccaggaatggttaatcgcgaggttctggaccaggtggaaagaggctacaggatgccatgccctccagaatgcccagagtcgctacatgacctgatgtgtcagtgctggaggaaggagcccgaggagaggcctaccttcgagtacttgcaagcctttctggaagattactttacttccacggaaccgcagtaccaaccgggggaaaatttatag

SEQ ID NO: 18016 - DNA, 1611 bp, synthetic construct
  misc_feature 1..1611: note = Description of Artificial Sequence: Synthetic coding sequence
  source 1..1611: mol_type = other DNA
atgggctcaaacaagtcaaaaccaaaggatgctagccagcggcgacgtagcctcgagccagcagaaaacgtccacggagctggcggcggggccttccccgcgtctcagacacccagcaagccagctagcgcagatggacatagggggccgtccgccgcctttgccccagccgccgctgagccaaaacttttcggcggcttcaatagttcggatacggtgaccagcccacaaagggctggacccctggccggaggcgttaccacattcgtggccttgtacgactatgagtcaagaactgagacagacttgagcttcaagaagggcgagcgcttgcagatcgttaacaataccgaaggggactggtggctggctcactctttgtcaacagggcagactggttatattcctagcaactatgtcgcaccgtcagattcaattcaggcagaggaatggtatttcggcaaaattactagacgcgagtctgaacgactactcttaaatgccgagaatccacgagggacatttctggtcagggagtctgaaaccactaagggcgcctattgcctgagcgtcagtgatttcgacaatgctaagggactcaatgtcaagcattataagatacgtaagctggacagcggtggattctacatcacctctaggactcagtttaatagcttgcagcagcttgtggcctactattctaagcacgccgacggcctctgtcataggctgactaccgtatgccctacgtctaaacctcaaacacagggtctcgctaaggatgcttgggaaatccctcgcgaaagcctcaggctggaggtcaaactggggcagggatgttttggggaggtctggatgggtacctggaatgggacgacacgggtggcaataaagactctcaaacccggcaccatgagccccgaagcctttcttcaggaggcccaggtcatgaaaaaactccggcatgagaaactggtgcagctgtatgccgtggtgtccgaggaacccatttacatcgtcaccgagtatatgagtaagggttcactcctcgatttcctgaagggagagaccgggaaatacttacgactcccacagctcgtggatatggcggcccagatcgcaagcggcatggcttatgtggaacgcatgaattacgtacacagagatttaagggcggcaaacatcttggtaggcgaaaacttggtttgtaaagtggccgactttggattggcccggctgatcgaagataatgagtatacagccaggcagggcgcaaaattcccaatcaagtggacagcaccagaagcagcactgtacggccgattcactattaagagcgatgtctggagctttgggatcctgctgactgaactaacaacaaaaggaagagtgccctaccccgggatggtaaatagggaagtcctcgatcaggtggaaaggggctaccgcatgccctgtcctcctgaatgtcccgagtccctgcacgacttgatgtgccagtgctggaggaaggagccagaagagcggcctacatttgagtaccttcaggcctttcttgaggattatttcacatccaccgaacctcaatatcagccaggagagaacctatag

SEQ ID NO: 18017 - DNA, 423 bp, synthetic construct
  misc_feature 1..423: note = Description of Artificial Sequence: Synthetic coding sequence
  source 1..423: mol_type = other DNA
atgcccctggttaagcgaaatattgatcctaggcatttatgtcatacagctctgcctcgcgggattaagaacgaacttgagtgcgtgacgaacatttcactggccaacattattaggcagctatccagcctgtccaaatacgcggaggatatttttggcgagcttttcaatgaggcacacagtttctcgttccgcgtcaactccctgcaggagcgcgtggatagactatcagtgtccgtgactcaactggatcccaaggaagaagagttatctctgcaggacataaccatgagaaaagcattccggagcagcacaatccaggatcagcagctgttcgatcggaaaaccctgccgatccccctccaggagacctatgatgtctgtgagcaacccccccccttaaacattctcacaccatattag

SEQ ID NO: 18018 - DNA, 1680 bp, synthetic construct
  misc_feature 1..1680: note = Description of Artificial Sequence: Synthetic coding sequence
  source 1..1680: mol_type = other DNA
atgcctctggttaaacgaaacattgaccctagacatctttgtcacaccgcgttgcccagggggatcaaaaacgagctcgaatgtgttacgaacatcagtctcgctaatatcatccgccagctgagcagcctgtccaagtatgcggaagacatctttggcgagctcttcaatgaagcacactcctttagttttcgcgtgaactccctccaggagagggtggatcgcctgagtgtaagcgtaacccagctggatcccaaagaggaagaattaagcctgcaggacatcacgatgcgcaaagccttccgcagctctacaatccaggatcagcaactgttcgataggaagacattacccattcccctccaggaaacgtacgatgtttgcgaacagcccccacccctgaacatcctgaccccttatcgggatgacggcaaggaaggcctcaagttctacaccaacccatcttatttttttgacctctggaaggaaaaaatgctacaggatacagaggataagagaaaggaaaaacgaaaacagaaacaaaaaaacctggaccggccacacgagcccgaaaaagtaccacgggctccccacgaccgccggcgagagtggcagaagctggcgcagggaccggagctggcagaagacgacgcaaatctattgcacaaacacatagaagtggcaaacggccccgcttctcacttcgaaacccggccccaaacatacgtcgaccacatggacgggtcatacagcctgtccgctttacctttttcacagatgtcagagctcctaacaagagcggaagagagagtcctggtgagacctcacgagcccccacccccaccacccatgcacggagctggtgatgccaagcccatcccaacctgtatttcatcagccacgggattgattgaaaatcggcctcaatcgcccgccacgggacggacgcctgtctttgtgtcccctactcccccaccaccgcctccaccactgcctagtgccctaagtacttccagcttgagagcatccatgacaagtacaccgccacccccggtcccaccaccgccgccaccaccagccactgccttgcaggcgcctgccgtgccgccaccgccagccccgctgcagatagctcccggagtcttacacccagccccccctccgattgcccctccactggtacagccttccccccctgtggccagggcggctccggtgtgcgaaacagtgccagtacatcccctcccgcaaggcgaggtgcaaggtctccctccccctccacctcccccgcctttgccgccccctggaattcgaccctcctcccccgtgaccgttacagcactcgctcatcctccttccggcctgcatccgacaccctcaacagcaccaggccctcatgtgccgctgatgcccccttcgcccccaagccaagttatccctgcatctgagcccaagagacatccttctactctgcctgtgatctccgatgcgcggagtgtattactggaggcaatccggaaaggtatacaactgcgcaaggtggaggagcagcgcgagcaggaggccaaacacgaaaggatagagaatgatgtggcaactatcttgagccgtaggatcgccgtggagtattctgactctgaagacgacagcgagttcgacgaggtcgactggttggagtag

SEQ ID NO: 18019 - DNA, 423 bp, synthetic construct
  misc_feature 1..423: note = Description of Artificial Sequence: Synthetic coding sequence
  source 1..423: mol_type = other DNA
atgcctctggttaagcgcaatatcgacccccgacacttatgccacaccgctttgccgcggggaataaagaatgagcttgaatgtgttactaatatttctttggcaaatatcatacgacaactcagtagcctaagtaaatacgcagaggacatcttcggggagttatttaatgaagcacattccttcagctttcgcgtgaattccctgcaagagagagtcgaccggcttagcgtttccgtgactcagttagatcccaaagaagaagagctcagccttcaggacataactatgcggaaggctttcagatcatcaaccatacaggaccaacagctctttgatcggaagactcttcctatccctctgcaggagacctatgacgtctgtgagcagccgccgcctcttaacatcttaaccccctattag

SEQ ID NO: 18020 - DNA, 1680 bp, synthetic construct
  misc_feature 1..1680: note = Description of Artificial Sequence: Synthetic coding sequence
  source 1..1680: mol_type = other DNA
atgcccttggtgaaacggaatatcgaccccaggcacctgtgtcacacagctctgccaagagggattaagaacgaacttgaatgcgttacaaacatttcattagcgaacattattcgtcagctgagttcactctccaagtacgccgaggacattttcggggagttgttcaatgaggctcattccttctcctttcgagttaactctctccaggaaagagtggataggctctcagtgagcgttacccagctagaccctaaagaagaagagctgagccttcaagacatcaccatgcgcaaagcctttcgcagttccaccattcaagatcaacagctctttgaccgcaagactctcccaatccccctccaggaaacatatgatgtgtgtgagcagccgccacccctgaacatcctgactccctatcgggacgacggaaaagagggcttgaaattctataccaatccctcttatttttttgacttgtggaaagaaaaaatgctccaagataccgaggacaaaaggaaggagaaaaggaagcagaagcagaagaacctggatcgtccacacgaacctgaaaaggtccctagggccccccatgacaggagaagagaatggcagaaactggctcagggtcctgaactcgcggaagatgacgctaacctgttgcacaaacacattgaagtcgccaacggccctgcatcccactttgagacacgaccgcaaacctatgtcgatcacatggacggtagctactctttgtctgccctgccctttagccagatgtctgaattgctgacacgcgcagaagaaagggttctggtccgcccacatgaacctcctccccctccacccatgcacggagccggtgacgccaagcccattcctacctgcatctccagtgctacaggtttgatcgaaaatcgaccccagtccccagccactgggaggactcctgtgtttgtgagccctaccccccctcccccacccccgcctctcccctctgctctctcaacatcctccctgcgcgcctctatgaccagcactccaccccctcctgttcccccccctcctcctcctcctgctactgctctgcaggctcctgctgtcccaccccctccagcgccgcttcaaatcgcacctggggtgctgcaccctgcaccgccgcccatcgcccctcctttagtccagccctctccacccgtggctcgtgcagccccagtgtgcgagaccgtccccgtgcaccccctaccacagggggaggtccagggcttgcctcctcctcctcccccccctcctctgccaccacctgggatccgtccttcctcgcctgtaaccgtgacagccctcgctcacccgcctagcggcctgcaccccaccccctctacagcccccggaccacacgtgccactgatgccaccttctccgccgagccaggtaatccctgctagtgagccgaagaggcacccctctacactgcccgttatctcagatgcccgctctgtccttttggaagcgattcgaaagggcattcagttacggaaggttgaggagcagcgtgagcaggaggctaagcacgagcgcatagaaaacgacgtcgcaactattctatccaggaggatcgccgtagaatatagtgattccgaggatgactcagaatttgatgaagtcgattggctcgagtag

SEQ ID NO: 18021 - DNA, 1680 bp, synthetic construct
  misc_feature 1..1680: note = Description of Artificial Sequence: Synthetic coding sequence
  source 1..1680: mol_type = other DNA
atgcccctggtgaagcgaaacatcgatcccagacacctgtgccatacggcacttccaaggggaatcaaaaatgaactcgagtgcgtaactaacatatccctggctaacataatccgtcagctcagttcgttgtctaaatatgcggaagacatctttggtgagttgttcaacgaagcccacagcttctctttccgcgtcaatagcctacaggagagggtggataggttatcagtctcagttacacagctggatccgaaagaggaagagctgagtctgcaggatattacaatgcgtaaggctttccgatcttcaaccattcaagatcagcagttgtttgatagaaagaccttgcctatccctcttcaggagacttacgatgtgtgtgaacaaccacctcccttaaacatcctaaccccctacagggacgatgggaaagaaggattaaaattctacaccaatcctagctattttttcgatctgtggaaggaaaagatgctacaggatacggaggataaacgaaaggaaaagcgtaagcaaaagcagaagaatctggacagaccccacgaaccggagaaggtccctcgagccccacacgaccgaaggcgcgaatggcaaaagttggcacagggtcccgagcttgcggaggatgacgctaatctcctgcataagcatattgaagtggccaatggacctgcctctcacttcgaaacacgcccacagacgtatgtcgatcacatggacggatcctactcccttagcgccttgccattctcacaaatgtcggagttgctcaccagagccgaggaaagagtcctggtgcggccacacgaacccccacctcccccgcctatgcacggggctggtgacgccaagcctattcctacgtgtatctcttccgcaactggtctcatagagaatcgtcctcagtctcctgccactggcaggactccggtgtttgtatctcccacgcctcccccaccacctccacccctgcccagcgcactgtcgacatccagcctcagagcctccatgaccagtacccctcctccacctgtaccacctccaccccctcctcctgctaccgccctacaggcccccgccgtgccgccaccccctgctcccttacagattgcgcccggagttttacatccggccccaccgccaatagcacctccgctcgtgcagccatccccccccgtggctagagctgctccggtctgtgagacagttccagttcacccactaccacagggagaagtgcaaggattgccaccacctcctcccccgccacccctacccccaccaggtatcagaccatcaagtcctgtcaccgtgaccgccttagctcacccaccaagcgggctgcacccaaccccctccacagcccccggacctcacgtccccctaatgcccccctcaccaccaagtcaggtgatcccggcttcagagcccaagagacacccatccactttgcccgtgattagtgacgctcgctccgtgctgctggaagccattcgtaaagggatccagctcaggaaagtagaggaacaaagggagcaggaagccaaacacgagcgcatcgaaaacgatgtggccacaatcctgtctaggcggattgccgtggagtattccgactcagaggacgatagcgagttcgatgaggtagactggttagagtag

SEQ ID NO: 18022 - DNA, 1680 bp, synthetic construct
  misc_feature 1..1680: note = Description of Artificial Sequence: Synthetic coding sequence
  source 1..1680: mol_type = other DNA
atgcctctggtgaagcggaacatcgatcctcggcacctttgtcatactgcactgcccaggggaatcaaaaatgaattggagtgcgtgacaaacatcagcctggccaacataatacgacagttgagcagcctttctaaatacgccgaggacatctttggtgagctgttcaatgaggcccattcatttagcttccgggtgaactcattgcaggaaagagtggatagactctcagtcagcgtgacacagttggaccccaaggaggaggaacttagcctccaggacattacaatgcggaaggcctttcggtcctctactatacaggaccagcagctctttgacaggaagaccctgcctatcccgctgcaggagacatacgatgtctgcgagcagcccccccccttgaacatcttgactccctatcgcgatgacggtaaggagggactcaaattctataccaatccgtcctactttttcgacctgtggaaagaaaagatgttgcaggacacggaggataaacggaaagagaaacggaaacagaagcagaagaacttagatcggcctcacgagcctgagaaagtaccgagagcacctcatgatagacgcagggaatggcagaagctcgcccagggccctgaattagccgaagatgatgctaacctgctccataaacatattgaagtcgctaatggccctgccagtcattttgaaacgaggccacagacgtatgttgatcacatggacggatcatactcactgtctgccctgccattttctcaaatgagcgagctgttgactcgcgccgaggagcgcgtgctcgtgcgaccacacgaaccacccccaccacccccaatgcacggcgcaggagacgcaaaaccaatacctacttgtatcagcagcgcaacagggctgattgagaaccgcccccagagccccgcaaccgggcgcacgccagtgttcgtgtctcctactcctcctcccccacctccccctctaccaagcgctcttagcacttcttcgcttagagccagcatgacctccactcctccaccccctgttcccccccctcccccaccccccgctacagctctgcaggccccagccgtgccgccacctcccgcgcctctccaaattgcccccggcgtgttacaccctgcccccccacccatagccccccctctggtgcagccaagcccacctgtggccagagctgcaccagtgtgcgaaacagtgccggtgcatcctctgccacagggggaggtgcagggtctcccaccgcctccccctccgcccccacttcctccacctgggattagacctagtagcccagtcactgtgaccgcgttagcccacccaccttcaggtcttcaccccactccctccactgcgcccggaccgcatgtacccctgatgccgccctctcccccctctcaggtgatccccgcgtctgaacccaaaagacatcccagcactctacccgtcatctctgacgccagatctgtcctgcttgaagccatcaggaagggcatccagctacgcaaagttgaagagcaacgggaacaagaggccaaacatgagcgaatcgaaaacgatgtcgccacaatcctaagcaggaggatcgctgtggaatactctgattccgaagacgactccgagttcgacgaggtggactggctggagtag

SEQ ID NO: 18023 - DNA, 1680 bp, synthetic construct
  misc_feature 1..1680: note = Description of Artificial Sequence: Synthetic coding sequence
  source 1..1680: mol_type = other DNA
atgcccctagtcaaaaggaatatcgaccctcgacacctgtgtcacacagccctacccaggggcatcaaaaacgaattagagtgtgtgacaaatattagcctagcgaatataatacggcagctctcatcactgagcaaatacgccgaagacatctttggcgagctgttcaatgaagcacatagtttctcctttcgcgtgaacagcttgcaggagcgggtcgaccgtctgagcgtgagtgtgacacaactggatccaaaggaggaagaactctctctgcaggacatcacaatgaggaaagctttccggtccagcacgatccaggatcaacagctgtttgacagaaagaccttgcccattcctctgcaggagacctatgacgtctgtgaacagccaccccccctcaatattctcacaccctatcgagacgatggaaaagagggtttgaaattctacaccaatccctcttacttcttcgacctgtggaaagaaaaaatgttgcaggatacagaggacaaacgcaaggagaaacgtaagcagaagcagaagaatctagatagaccccatgaaccagagaaggtgccacgtgccccacacgacaggagacgcgagtggcaaaaactggctcagggtccagagctggccgaggacgacgccaacctcctccacaagcacattgaagtcgctaacggcccagcctcccactttgaaactcgaccccaaacctacgtagaccacatggacgggagctattccctgtctgctctaccattcagccagatgtctgaactactgacgcgggcggaagaaagagtgctggtgcgtccacatgagcctcccccacctccacccatgcacggggccggagatgccaaacccattcctacctgtatcagttctgccactgggctgatcgaaaaccggccacagagtcccgctacaggcaggacgccagtgtttgtctctcctacaccaccaccccctcccccaccactgccctctgccctcagtacatcttccctgagagctagtatgacgagtacaccacccccgccggtccctcctcccccacctcccccggcaacagccctgcaggcccccgctgtccctcccccgcccgcgcctctgcaaatcgcccccggcgtccttcaccctgccccgccccccatcgctccaccgttggtgcagccaagccctcccgtggcccgcgctgcaccagtgtgtgagactgtgcccgtacatccactcccacagggagaggtgcagggcctccccccgcctcctccaccgccgcccttgccgccacccggtatccgtcctagctcacccgttactgtgacggccctggcccaccctcctagcgggcttcatcccacaccttccacggcaccaggccctcatgtgccacttatgccgccctccccaccgagtcaggtgatccctgcctccgagccaaaacgccacccaagcacgctgccagtcattagcgacgccagaagtgtgctcctggaagccattcggaaaggaatccagctacgaaaagtggaagagcagagggagcaggaggctaagcacgagaggatcgagaacgatgtcgcgactatcctgagccgccgcatcgccgttgagtattccgattctgaggacgactccgagtttgacgaggtagactggctggaatag

SEQ ID NO: 18024 - DNA, 270 bp, synthetic construct
  misc_feature 1..270: note = Description of Artificial Sequence: Synthetic coding sequence
  source 1..270: mol_type = other DNA
atgccattggttaaacgcaatatcgatccccggcacctctgccatacagccttgcctaggggcataaaaaatgagctcgagtgtgtgacgaatatctctctcgccaacattattaggcagttgagcagcctatccaaatacgcagaggacatctttggcgagctcttcaatgaggctcatagcttttcatttcgtgtcaattcgctgcaagagagggtcgataggctgtctgtttccgttacccaactggatcccaaagaagaggagtag

SEQ ID NO: 18025 - DNA, 543 bp, synthetic construct
  misc_feature 1..543: note = Description of Artificial Sequence: Synthetic coding sequence
  source 1..543: mol_type = other DNA
atgcctctcgtgaaacggaatatcgaccctaggcacctgtgtcataccgcactgcctcgcggcattaaaaacgaacttgagtgcgtgactaatatcagcctcgctaacatcattcgccaactgagtagcctgtcgaagtacgccgaagatatttttggtgaactgttcaatgaggctcactcctttagcttcagggtaaactctctgcaggaacgcgtggacagactatcagtgagtgtaacccaactggatcccaaggaagaagagctaagtctgcaggacatcaccatgcgaaaggctttcagatcctcaacaattcaagatcagcagctgtttgaccggaaaaccctcccaatccctctgcaagagacctacgatgtgtgtgaacaaccccctcctttgaatattctgacgccttacagagacgacggtaaggagggcctcaagttctatacaaaccccagttatttttttgacctgtggaaagaaaagatgctgcaggataccgaggacaagcgaaaggaaaagaggaaacagaagtag

SEQ ID NO: 18026 - DNA, 270 bp, synthetic construct
  misc_feature 1..270: note = Description of Artificial Sequence: Synthetic coding sequence
  source 1..270: mol_type = other DNA
atgcctttggttaaacgaaacatcgatccacgacacctgtgccataccgcactcccccgcggcatcaagaacgaactagaatgtgtcaccaacatcagtttggcaaacattatccggcagctttcttcactctccaaatatgcagaggatatctttggggaactgtttaacgaggcccactcctttagctttcgcgtgaactctttgcaagaaagagtggacaggctgagcgtgtcagtgacgcaactcgatccgaaagaggaagagtag

SEQ ID NO: 18027 - DNA, 1497 bp, synthetic construct
  misc_feature 1..1497: note = Description of Artificial Sequence: Synthetic coding sequence
  source 1..1497: mol_type = other DNA
atgcccctggtgacaaggaatattgaacccagacatctttgcagacagaccctacctagcgtgcggtctgagttagaatgcgtgacaaatatcacgctggcaaacgtgattcggcaactgggaagtctatcgaagtacgctgaagatattttcggcgaactgtttactcaagccaatacattcgcaagccgcgttagctcgttggctgagagggtggaccgcttacaagtgaaggttacccagctggacccaaaagaagaagaggtgtcgctgcaagggataaatacgagaaaggcttttaggtcaagcaccatccaggaccaaaagctgtttgaccgtaattcactacctgtaccggtgctggagacttataacacttgtgatactccgcctccactcaataacctcaccccataccgagacgacggcaaagaagctctgaagttttatacggaccccagttatttttttgacctctggaaggaaaaaatgctgcaggacacaaaagatataatgaaagaaaaaaggaaacacaggaaggagaagaaggataatccaaatagggggaacgtcaatcctcggaaaatcaagacgcgaaaggaggagtgggagaagatgaaaatgggacaggaattcgtcgaatcgaaggagaagctgggcacttctggctacccacccaccttagtctatcagaacggaagtataggatgcgtggagaatgtcgatgcctcgtcctaccctccccctccacagtccgactctgcttcgagcccctctcctagcttcagcgaagataatctgcctccccctcctgcggaattcagctatccagttgataaccagcgggggtccggcttggccggccccaaacgaagcagtgtggtgtcaccatctcatccgccgccagccccacctcttggctcacccccgggcccaaaacctggctttgctcccccccccgctcctccaccgccccctccccctatgatcggtattccacctccacccccacccgtgggcttcggcagtccgggaacacctccccctccctcaccgccatccttcccccctcatcctgacttcgcagcccctcctccgccaccaccgcctcccgcagccgattatcccacactgccccccccacccctcagccaacccaccgggggtgcccctcctcccccccctcctcccccgccccccggcccaccacctccaccatttacgggagctgacggccaacctgccatcccacctcctctcagcgatacaacaaaaccaaaatcctccctccctgcagtttcggacgcaagatctgatctcctgtccgctatcagacagggattccaactacggagagtagaagagcagcgagagcaagagaaacgagatgtggttgggaacgatgtcgcgaccattttatcacgccgcatcgcagtagaatactccgactctgaggacgattccagtgagttcgacgaggatgactggtcggactag

SEQ ID NO: 18028 - DNA, 846 bp, synthetic construct
  misc_feature 1..846: note = Description of Artificial Sequence: Synthetic coding sequence
  source 1..846: mol_type = other DNA
atgcctctggtgacccgcaacatcgaaccacggcacctgtgtcgtcagactctaccttctgtacgctccgagctggaatgtgttacaaatattaccttagctaacgtgatccgccagcttggctccctgagtaaatacgcggaggatatcttcggagagctgtttacacaggctaatacgttcgcgtcacgcgtgtcatccctcgccgagcgcgttgatcgactgcaggtgaaagtcactcagctggacccaaaagaagaggaggtgagccttcagggtatcaatacacgcaaggcctttaggtccagtacaatccaggatcagaagctatttgacagaaactcattgcctgtgccagtgcttgagacttataatacgtgcgatactcccccccccctgaataacctcactccatatcgggatgacgggaaggaggccttgaagttttatacagacccttcctacttcttcgatctgtggaaagagaaaatgctccaggataccaaggatattatgaaggagaagcggaagcaccggaaggaaaaaaaggacaaccccaataggggtaatgtcaatcccagaaagatcaagactaggaaagaggagtgggagaagatgaagatgggacaagagttcgtggaaagcaaagaaaaactggggacatccggttaccctccaacacttgtctaccaaaatggttctatcggatgcgtagagaacgttgatgcctcgagttatcccccgccaccccaaagtgacagcgccagcagcccatctccctcttttagcgaagacaatctgccaccaccacccgcagagttcaggttcagtgcggcccagggttag

SEQ ID NO: 18029 - DNA, 1533 bp, synthetic construct
  misc_feature 1..1533: note = Description of Artificial Sequence: Synthetic coding sequence
  source 1..1533: mol_type = other DNA
atgccagtgcctccgccacctgcccccccccctcctcctaccttcgctttagctaacaccgagaaacccacgctaaataaaaccgagcaggccgggcgaaatgctttgttatctgatatctctaagggaaagaagttaaagaagacagtaacaaatgatagatcggccccgattttggataagcccaaaggagctggtgctggtggcggcgggggagggtttggggggggcggcggctttggcggcggaggaggcggaggcggtgggggcagcttcggggggggaggcccccctggcctgggcggtctgtttcaagccggaatgccaaaattgaggtctacagctaacagggacaacgattccggtggaagtagacctccacttctgcctcccgggggcaggtccaccagcgcgaaacccttttcgcctccttctggcccaggaaggtttcccgtcccttcccctgggcaccggagcggcccacctgagccccagagaaaccgaatgcctcctcctagaccagacgtggggtctaagcccgactcaatccccccacccgtaccatctaccccaagacccattcagtctagtccccacaaccgaggcagtcctccggttcctggtggaccaagacagcctagcccaggccccacacctccccctttccctggaaatcgcggcaccgcacttggtgggggaagtatccgccagtcacctttatcgagctccagtcctttctctaatcgcccacccctgcctccaaccccttccagggctttagacgataaaccgccaccgccccctcccccagtcgggaatcgtccctctatccatagggaggccgtcccccctcctcctccacagaacaacaaacccccagttccctctacccctcgtccttctgccagctctcaggcccctcctcctcctcctccacctagtcgtccggggcctccaccactcccccccagcagttcaggaaatgatgagacccctagattacctcagcgaaatctgtctctttcgagcagcactcctccattacctagccctggaaggagcggtcctttgccaccgcccccctcggagcgtccaccccctccggttagagatcctccaggaagatccgggcccttaccccccccgccccccgtctcacgaaatggctccacctcccgtgcgcttcccgccacaccccagctcccatctagatcaggagtagactctcctagatcgggcccacgaccccccttaccccccgatcgtccttcagccggggcccctccccctcctccgccaagcacgagcattcgaaatgggttccaggattcgccatgtgaagatgagtgggaatctaggttctattttcaccccatctccgacttgccacccccagagccatacgtccagactacaaagtcgtaccctagcaaattagccagaaatgaatcccgatctggctccaacaggagagagcggggtgctccccctttgccccccatcccccggccacctaagcaggcagctgagtag

SEQ ID NO: 18030 - DNA, 1512 bp, synthetic construct
  misc_feature 1..1512: note = Description of Artificial Sequence: Synthetic coding sequence
  source 1..1512: mol_type = other DNA
atgccagtccctcctccgccagcaccaccacccccaccaacgttcgctctggccaacactgaaaaaccgactctgaataagacagaacaagccgggcggaatgctctgctctccgatatatcaaaggggaagaagctgaaaaagacagtgactaacgatcggagcgcgcccatcttagacaagcctaaaggtgcgggagcaggcggtggcggggggggattcggcggtggtggcggatttggcgggggcggggggggtggcggcggaggatcttttggggggggtggccccccaggtctgggcggactcttccaagccggaatgccaaaactacgctccacagcgaacagggacaatgatagcgggggctcacggcccccactgctgcctcctggaggacggagcacgtccgcaaaacccttctctccacccagtggaccaggcaggttcccagttcccagccctggccaccggtcaggcccccccgaacctcagcggaaccgaatgccccctcctaggcctgacgtagggtccaaacctgatagcatccctccccccgtccccagtactccccgcccgatccagtcgtcaccgcataaccgcggttccccaccggtacctggcggacctcgacagccatcgcccgggcctacacctcctccattcccaggaaaccggggcaccgccctcggcggcgggagcatccggcagtcccctttatcctcttcctccccgttctcaaatcgacctccgctgccaccaacaccatctagagcactcgatgacaaaccgcccccaccccctcctcccgtggggaatagaccttcaattcaccgagaagccgtgccacctccacctccccagaataacaagccccctgttccatctactcctcgcccctccgcttcatcccaggcgcccccacctcctcctcctcccagtcgccctgggcccccaccactgccaccctcaagctccggcaatgacgagacaccccggcttccccagaggaatctgtctctgtccagttcgactccccccctcccaagcccaggacgatctggacccctgccaccgccaccctccgaacggcctccacctcctgttagggatccccctggccgctccgggccactaccccctcctccaccagtttctcgcaacggcagtacaagccgggccttgcccgccactccgcagttgcctagccggagtggcgtagatagccctaggagtggccctcggccgccactacctccggatcggccaagtgcaggcgcgcctccccctccccctcccagcaccagcatcagaaacggattccaagactcaccgtgcgaggatgaatgggaatcccgcttttacttccatcccatttcagatctcccaccgcctgaaccttatgtacagacaacaaagagttaccccagtaaattggccagaaacgagagcagatcagggtcaaatcggagggaacggggcgcccctcccttgccccccattcccaggtag

SEQ ID NO: 18031 - DNA, 1512 bp, synthetic construct
  misc_feature 1..1512: note = Description of Artificial Sequence: Synthetic coding sequence
  source 1..1512: mol_type = other DNA
atgcccgtgcctccacccccagctccaccaccaccgccaacatttgccctagccaatactgaaaagccaactcttaataaaacagagcaggcaggccgcaacgctcttctctcagacatatctaagggtaagaagctcaaaaagacggtcacaaacgatcggagcgctcccatattagacaaacctaagggcgcaggcgccggcgggggtggaggcggctttgggggaggaggagggtttgggggcgggggagggggcgggggcggggggtcttttggcggggggggcccaccgggactcggcgggctcttccaagcaggaatgcctaaactcagatctaccgctaaccgtgataatgactccggaggcagtaggcctcctttgctccccccgggtggccgaagcacctctgcaaaacccttcagccccccctccggccctgggcgcttccctgtgccctctcctggacacagatctgggccacccgagccccaacgaaaccgtatgcctcccccacggcccgatgtgggtagcaaacctgactcgatcccccctcccgttccctcgactcccagaccaatacagagctcaccccacaaccgcggatctcctcctgtccccgggggcccccggcagccttcccctggacccactcctcctcctttccccggaaatcgcggaacagcccttgggggaggctcaattagacagagtccactctcctccagttcccctttctccaatcgaccacccctgccgccaaccccctctagggccctagacgataaacccccaccccctccgcctcccgtgggaaaccgcccctcaattcatagggaagccgtccctcctcctcccccacagaacaataagccacctgtgcctagcactcctcggccaagcgccagctctcaggcgcctcccccgccgcctccaccatccaggccaggaccaccccccctgcctccatccagttctggcaacgacgaaactcccagactgcctcagcgcaacctgagcctgtcatctagtactcctcctctgcccagccccgggcgatcaggacccctcccaccaccaccaagcgagaggccacccccacccgtcagagatccccccggtcgatcggggcccctgcccccaccacccccggtgtctcgaaacggttccacctctagagcactgcccgctaccccacagctaccttcaagaagtggcgttgactcaccacgcagtggacccagacctcctctgccgccggatcgccctagcgccggcgctccaccacccccccccccgagcacatcaatcaggaacggtttccaggacagcccttgtgaagacgaatgggagagtagattctactttcaccctattagcgacttgccacccccagagccctatgtccaaaccaccaaatcctatccctccaagttagctcggaacgagtcccgctcgggctctaatagaagagagcggggtgctccgcctcttcctccgatccctaggtag

SEQ ID NO: 18032 - DNA, 1512 bp, synthetic construct
  misc_feature 1..1512: note = Description of Artificial Sequence: Synthetic coding sequence
  source 1..1512: mol_type = other DNA
atgccagtgccccctccccctgcacctcccccacccccgacattcgccttagccaacacagaaaaacccacactcaacaagacagagcaagccggtcggaacgccttactatctgacatttccaaagggaaaaagttaaaaaaaacggtgactaacgataggtcggctcctatcttggacaaaccaaagggagccggcgctgggggtggaggcggaggattcggtggcgggggcggattcggggggggcggaggcgggggtggcggtggatctttcggaggcggaggccctccaggattaggcggactctttcaagcgggtatgcctaagcttagatcaacggcaaaccgggacaatgactctggtgggagtcgacctccactcttaccgcccggaggccggtcgacatctgcgaaacctttcagccctccctctggaccaggtaggttcccagtcccttcccctggccatagaagcggcccgccagaaccccagagaaatagaatgccacccccccgccccgatgttggatctaagccagattcaatccccccgccagtccctagcactccccggcccattcagtctagcccacacaaccgagggtcccctcccgtgccaggtggacctcgacagcccagtccaggaccaacaccaccgccatttcccggcaatcgcggaactgctttgggggggggctccattaggcagagccccctctccagcagctcccctttttcaaacaggccacccctaccccccacccccagtagagccctcgatgataagccgccccctccccccccaccagtgggcaacagaccgagcatccatagggaagccgtgccccctcctccgccccagaacaacaagccacctgtgccatccactccccgccctagtgccagtagtcaggctcctccaccacctccgccccctagcagacccggcccacctcctcttcccccatcctccagtggcaatgatgagacgcctaggctcccgcagcgaaatctgtcgctttcatcaagtaccccaccacttccatcaccagggcggtcagggcccctgccaccacccccctccgagcggcctccgccacccgtgagggacccaccgggcagaagcggccctctgccgccgcccccacctgtgagccggaatggcagcacaagccgggcattgccggccacacctcagctgcccagtaggagcggtgtggactccccacggtctggccctcgaccaccactccctcccgaccggccatcagcgggcgctccccctccaccacctccctccacaagcatccggaacggatttcaggatagcccctgtgaagacgagtgggagagtagattctacttccaccccatcagtgatttgcctccacccgagccttatgtacaaaccaccaagagctatccttcaaagttggcccggaacgaaagtaggtctggaagcaaccgccgggagcggggtgctccacccctaccccccataccccgttag

SEQ ID NO: 18033 - DNA, 1080 bp, synthetic construct
  misc_feature 1..1080: note = Description of Artificial Sequence: Synthetic coding sequence
  source 1..1080: mol_type = other DNA
atgccggtgccccccccaccagcccctcctccacctccaacatttgcgctcgccaataccgagaaacccacactgaacaaaaccgaacaagcagggaggaatgccctcctgtccgacatcagtaagggcaaaaagctgaaaaagactgtgaccaacgaccgttcagcgcctatcctcgataaacctaagggtgccggggctggcggcggcggcggagggttcggaggcggcgggggctttggcggcggcgggggcggcggcgggggaggatccttcggaggaggagggccgcccgggttaggcgggcttttccaagcagggatgcctaagctgaggtccacagccaaccgagacaacgactccgggggatcacgaccacctttgctgcctccgggcggaaggtccacatctgccaagcctttctcacctccaagcggaccagggagattccctgtgcccagtccggggcaccggtctgggccccctgagccacagagaaataggatgccacctcccaggcccgatgtcggaagtaaaccagatagtattcccccacctgtccctagcacccccaggcccattcagagtagtccccacaaccgaggttcaccccctgtacccggcgggccccgccaaccgtcgcctggaccgaccccaccgccccccccacccgtgcgcgatccccccggtaggtcaggtcccctgcccccgcccccaccggtgtctagaaacgggtcaactagcagggccttaccagccactccacagttaccatccaggtctggcgtcgactctcctcgatctggccccagacctccgctaccccctgaccggccaagtgcgggggccccacccccaccaccgccttccacatcaatcagaaatggtttccaagattctccgtgcgaagacgagtgggaatcaaggttctacttccaccccatatccgacttacctccccccgagccatacgtgcagactaccaagtcttatccaagcaaattagcgaggaacgagagcaggagcggttccaacaggcgcgagagaggcgccccccccctacctcccatacctaggtag

SEQ ID NO: 18034 - DNA, 1482 bp, synthetic construct
  misc_feature 1..1482: note = Description of Artificial Sequence: Synthetic coding sequence
  source 1..1482: mol_type = other DNA
atgcccgtgcctccacctcccgcacctcctccacccccgacctttgccttagccaacaccgaaaaaccgactctgaataagaccgaacaggcggggcggaacgccctgctgagcgacatttcaaaaggcaaaaaactaaaaaaaacggttaccaacgacaggagcgctcctatcctggacaaacctaaaggggcaggggccggcggtggcggaggcgggttcggcggtggcgggggttttggaggcgggggcggtggaggaggcggcgggagcttcggcggcggtggccctcctggactaggtgggctctttcaggctgggatgcctaaactccgatctacggcaaaccgggacaacgactccggaggatcacggcctccgctactgcctcccgggggtaggagtacctccgccaagcccttcagccccccttccggccccgggcggttcccagtgcctagccctggacaccgatccgggccgcctgagccacagcgaaacaggatgcctcccccacggcccgacgttggcagcaagcctgattctattcccccgcccgtcccatctacccctcggcctatccagtctagcccacataaccgcggcagcccccctgtgcctggcggaccacgccagccctcccccggccccacacccccccccttccctggcaacaggggaaccgcgttagggggagggtctattcgccagtctcccctgagcagctcttcacccttcagcaacaggccacctctgccgccgactcccagtagggcactagacgacaagcctccgcccccaccacctcccgtggggaaccgtccatcaattcaccgagaggctgtgccacctccacccccgcaaaacaataagccaccggtgcctagtacgccccgccccagtgcatcctcacaggcccctcctccgcctccacctccctccagaccgggacccccgcctttgcccccttcctcatctggaaacgatgaaacaccacggctgcctcagagaaatctttccctctcatcttccacaccacccctgccatcacccggtcgaagcggtccgctcccaccgcccccttccgaaaggcctccaccgcccgtcagagaccctcccgggaggagtggccccctgccccctccgccaccagtgtctagaaacggcagtaccagccgggcgctgcctgccacaccccagttacctagcaggtctggcgtggattctccgaggagtggtccacgccctccattgccccccgatcggccatccgcaggtgcgcccccaccccctccgccttcaactagcatacggaatgggttccaggattccccttgtgaagacgagtgggagtcaagattttatttccatccgatcagcgatctaccccccccagagccgtacgtccagaccacgaagtcctatccttctaagctggcacgtaacgaaagcagatcagaatatttctgtcagggcttctag

SEQ ID NO: 18035 - DNA, 303 bp, synthetic construct
  misc_feature 1..303: note = Description of Artificial Sequence: Synthetic coding sequence
  source 1..303: mol_type = other DNA
atgcccgtgcccccgcctccggccccacctcccccccctaccttcgctctggccaacactgaaaaacccacactaaacaaaacagagcaagcaggcaggaacgcattgctgagcgacatttcaaaagggaagaaactcaaaaagaccgtcaccaatgaccgcagtgcacctattctggataagcccaagggggcaggagcagggggggggggtgggggtttcggcggtggcggtggcttcggtggaggcggcggcggcggaggcggtggttccttcggcggaggcggacccccgggtctgtag

SEQ ID NO: 18036 - DNA, 1647 bp, synthetic construct
  misc_feature 1..1647: note = Description of Artificial Sequence: Synthetic coding sequence
  source 1..1647: mol_type = other DNA
atgaaaactctcgaaacccagcctcttgcccctgactgctgccccagcgatcaggatcccgcacccgcacacccctcgccccacgcttctccgatgaacaagaatgctgattcggagctgatgccaccgccccccgaacgcggcgacccaccacgtctcagtcccgatcctgtggccggcagcgcagtgagccaggagctgagagagggagaccctgtctccttgagtacccctctcgagactgaattcgggtcaccatccgaactgtcaccccgtatcgaggaacaggagctgagtgaaaatacttccttgccagcagaggaagcaaacggctcattgtcggaggaagaagctaacgggccagagctgggatccggtaaagcgatggaagatacctccggcgagcccgctgccgaagacgagggggatacggcgtggaactacagcttctctcaactgccgcggttcttatcgggatcttggtctgaattctctactcagcctgagaatttcctcaaaggatgcaagtgggccccggacggctcttgcattctcacaaattcagcggacaatatactccgaatatacaaccttcctcctgagctgtaccatgaaggcgagcaggtcgaatatgcagaaatggtgccagtgctgcggatggtagagggcgataccatatatgactattgttggtattcattgatgtcatcggcacagcctgacacctcctatgtcgcatcaagttctagggaaaatccaatccacatctgggatgccttcacaggtgaacttagagcgtctttccgagcctacaatcatctcgatgagctgaccgcggcccattctttgtgcttcagtcccgatggaagtcaattattttgcggcttcaatagaacagtgagggtcttttccaccgcaaggccagggcgtgactgcgaggtacgtgctactttcgctaaaaagcagggtcaaagtggaatcatctcctgcatcgctttctcacccgcacagccattatatgcctgtggaagctacggtcggtccctgggtttatacgcctgggatgatggatcaccgctggccttgctgggcggccaccaggggggtatcacgcatctctgttttcacccagatggaaataggttctttagcggcgcacgtaaggacgctgagcttctttgctgggacctcaggcagagcgggtatcctctctggtctctgggccgtgaggtgaccactaatcagcgcatttatttcgacctggatccaaccggacagttcctggtctcaggatccacgtccggggccgttagcgtctgggatactgacggtccgggcaatgatgggaagccggagccggtcttgtctttcctgccacagaaagactgtaccaacggagtatccctgcacccgagtctgcccttgctggccaccgcatccggacagagggtttttcctgagcctactgaaagcggggacgaaggcgaggaactaggcctaccactgctgagtacaaggcacgtgcaccttgagtgtaggctgcagctatggtggtgcggcggcgccccagactccagcattcccgacgatcaccaaggcgaaaaaggccaggggggaaccgagggaggagtgggcgagctgatctag

SEQ ID NO: 18037 - DNA, 1647 bp, synthetic construct
  misc_feature 1..1647: note = Description of Artificial Sequence: Synthetic coding sequence
  source 1..1647: mol_type = other DNA
atgaagacccttgagacccagccgctcgctcctgattgctgcccctccgatcaagatcctgcaccggcccacccatcacctcacgcctctcctatgaacaagaacgctgattccgaacttatgcctcctcctccagaaaggggtgatcctccaaggctgagtcctgaccctgtggccggcagcgcagtttcccaggaactccgggagggcgaccccgtgtctctctctacccccttagagaccgaattcggcagcccaagtgagctgtccccccggatagaagagcaggagctgagcgagaatacaagccttcctgcagaagaggcgaatggaagtctgtccgaagaggaagccaatggtccggagctcggcagcggtaaggccatggaggatactagcggggaacctgcagccgaggacgaaggagacactgcatggaattattctttcagtcagctgcctcgcttcctctcaggctcttggagtgagttttctacacagcctgaaaactttcttaaggggtgcaaatgggcaccggatggcagctgtatcctcacaaattccgccgataacattttacggatttacaatctgcccccggaactctatcacgagggtgagcaggtggaatatgcggaaatggttcctgtgctgcggatggttgagggagacaccatctatgattactgctggtattccctgatgtcctctgctcagcctgatacaagctacgtcgcaagtagctctcgggagaatcctatacacatctgggacgcattcactggagagctgcgcgcaagcttcagagcatataaccacttggatgagttgacagccgctcacagtctctgctttagccccgatggctcccaactgttctgcgggttcaacaggacagtgcgcgtattcagtacagctcgccctggcagagattgcgaagtgcgtgctaccttcgcgaagaagcaggggcaatctgggattatatcatgcatcgcctttagcccagctcagcctctttacgcctgcggaagttacggaagatctctcggactatacgcatgggatgatggatcccccctggccctgctaggcggccaccagggcggaatcacacatctgtgctttcacccagatggaaacagatttttctccggagcacggaaagacgccgagcttctctgctgggatctgcgccagtcaggataccccctgtggtctctaggtcgagaggtgaccacaaaccagagaatttatttcgacttagatcctactggtcagttcctggtgagtggctccacctccggagcagtatctgtgtgggacactgatggacccgggaatgatggcaagcctgagccagtactgagtttccttccccagaaagactgtacaaatggcgtttcactacatcctagcctcccccttctggccaccgcctcaggccagagagtcttccctgagccgaccgagtctggggacgagggtgaggagcttgggctgccactcttatccactcgccacgtccatctggagtgccgactgcaactttggtggtgcggaggcgctcccgacagcagtatcccagatgaccaccaaggcgagaaaggacaaggcggcacagaggggggagtcggggaactgatttag

SEQ ID NO: 18038 - DNA, 1647 bp, synthetic construct
  misc_feature 1..1647: note = Description of Artificial Sequence: Synthetic coding sequence
  source 1..1647: mol_type = other DNA
atgaaaacattagagactcagcctctggcaccagactgttgccctagcgatcaggacccggccccagctcatccctctccacacgccagccctatgaacaagaatgcagacagcgaactaatgccaccccctcccgaacgcggagacccaccccggctctcccccgaccctgtggccggtagcgccgtgagccaggaactacgagagggggatcccgtcagcctgagtacacctcttgagaccgaattcgggagtccctccgaattgtccccccgtatagaggagcaggagcttagcgagaataccagcttgcccgccgaagaggcaaacggatccctgtccgaggaggaagcgaatgggcctgaactggggagcgggaaagcgatggaggataccagtggtgaaccggctgccgaggatgaaggcgacaccgcttggaattactcattctcccagcttccgagattccttagcggctcctggtccgaattttcaacacagcccgaaaacttcttgaaaggctgtaagtgggcacctgacggatcctgcattctgactaactctgcagataacatcttgcggatctacaacttaccgccagagctttatcacgaaggggaacaggtagaatacgccgagatggtccccgtacttagaatggtagaaggcgacacgatctacgattattgctggtactccttgatgtcgtctgctcagccagataccagttacgtagcatcctcatcccgcgagaaccctattcacatttgggacgcctttacaggtgaactgagggcgtccttcagggcttacaatcatctggatgaactcacagccgcacactccctttgcttctccccggatggatcccaactgttctgcgggttcaatcgcacagtgcgtgtcttctctaccgcccggccaggaagggattgtgaagtgagggcaacttttgcaaagaagcaagggcagagcgggattatatcatgtattgccttctcccctgctcagccgctgtatgcctgtggaagttacggacgctcactgggactgtacgcgtgggacgatggatccccgttagctctgctgggcggccaccagggcggtatcactcatctatgcttccatccggacggcaaccgtttttttagtggagcacggaaggatgcagaactcttatgctgggatctcaggcagagcggttaccctctgtggtccctgggcagagaggtgacaaccaatcagcgcatctattttgacctggaccccacgggccagttcctagtcagtggttccacatctggggccgtgagcgtgtgggatactgatggcccaggaaatgatgggaagccagagcctgttctgagttttttgccccagaaggactgtacgaacggcgtgagcctgcatccctccctgccacttctggccacagctagcggacagcgggtgtttcccgaacccactgagtcaggtgacgagggggaggaactgggactgccactactctcgacacggcatgtgcatctagagtgtcgcctgcaactctggtggtgcgggggcgccccggacagttcaataccagatgaccaccagggcgagaagggtcagggggggaccgaaggcggggttggagagctgatctag

SEQ ID NO: 18039 - DNA, 567 bp, synthetic construct
  misc_feature 1..567: note = Description of Artificial Sequence: Synthetic coding sequence
  source 1..567: mol_type = other DNA
atgaagacattagagacccaaccccttgcccctgattgttgtccctcagaccaggatcccgctcctgctcagcccgacacttcctacgtggccagcagttccagagagaaccccatccacatctgggatgcttttacaggtgaattgcgagcatccttccgtgcctataatcaccttgacgagctcactgccgcccatagcctgtgtttttcccctgacgggtcacagcttttctgtggcttcaataggacggtcagggtgttctctaccgcgaggcctggtcgcgactgcgaagtaagagctaccttcggcaaacacttatgtttgcaggggcgccggagggggaagggcactgcaacatgcacgggggcattttgcgagcccggtgccacctgcggtggtagtcgcaggcccctctacggccccgggtctagatgctccccagttgggaggggtgccaaccgacttagagctgggcggaagccctctcagggacagcccgcgggtcaaaggacggcctcatttcttaattcttatccagtctcatgcggcgcttttggcctctag

SEQ ID NO: 18040 - DNA, 1647 bp, synthetic construct
  misc_feature 1..1647: note = Description of Artificial Sequence: Synthetic coding sequence
  source 1..1647: mol_type = other DNA
atgaaaactcttgagacccaaccattagcgcctgactgctgcccttcagaccaggaccctgccccagctcatccatcaccccacgcctccccaatgaataaaaacgccgattcagaactaatgcctcccccaccggagagaggcgatcctccccgcctatcgcccgaccctgtggccgggtctgccgtttcccaagaactgcgggagggtgaccccgtgagcctctctacgcccctggaaacagagtttgggagtcccagtgagctctcccctcggatcgaagaacaggaactgagtgaaaacaccagcctgcccgccgaggaagctaacggaagcctgtctgaggaggaggccaacggccccgaactgggttccggaaaggccatggaggatactagtggagagcctgcagctgaagacgagggcgacaccgcctggaactacagcttttcccagctgcctagattcctgtcaggctcgtggtctgagttctcaacccagcccgaaaacttcctgaagggctgtaagtgggctcccgacggatcgtgtattctcacgaacagtgcagacaacattctacggatatataacctaccacccgagttgtatcacgaaggggagcaggtagaatacgcggaaatggtgcccgttctccgaatggtggagggcgacaccatctacgactactgctggtatagcctgatgagctccgcgcagcctgacaccagttatgtcgcttcaagtagtcgagagaaccctatccacatctgggacgcgttcaccggcgagcttagggccagcttccgtgcatataatcatctggatgagcttacagctgcccattcattatgcttcagtcccgatggatctcagctgttctgcggctttaataggactgtgcgcgtgttctccactgccagacccggacgggactgtgaggtgcgggctaccttcgccaagaagcagggccaatcagggataattagttgtatcgccttctctccagcacagcccctgtacgcatgcggcagctatggccggtccctcggtctgtacgcctgggatgatgggtcccctctagccctgctgggtggtcaccaaggcggcatcacgcacctgtgctttcatccagacggcaatagattcttctccggggcacgaaaagatgcggagctcctgtgttgggacctgcggcagtcggggtaccccctttggtctcttggcagggaagttacaacaaatcagaggatctattttgacttggacccaaccggccagttcctggttagcggcagtacaagcggggccgtcagcgtatgggacacggacggccctggcaatgacggcaagccggagcctgtactgtcttttcttccacagaaagactgtactaacggagtgtccctgcatccatccctccccctcctggctacagcctccggtcagagagtgtttcccgagccaacggagagcggagacgaaggagaagaacttggcctcccactcctgagcacccggcacgtccacctcgagtgcaggctgcagctgtggtggtgtggaggggcaccagactcaagcattcctgacgatcaccagggcgaaaagggacaaggtgggactgaggggggagttggggagctgatctag

SEQ ID NO: 18041 - DNA, 1299 bp, synthetic construct
  misc_feature 1..1299: note = Description of Artificial Sequence: Synthetic coding sequence
  source 1..1299: mol_type = other DNA
atggacaccgagaagagtggcaaacgagaatttgacgtcagacagaccccccaggtcaacatcaatccattcacccctgactcgctgttactgcactccagtggacaatgcagacgcaggaaaagaacttactggaatgactcttgtggcgaagatatggaggctagcgattacgaactcgaagatgagactcggcctgcaaagcgtattacaatcacagagagtaatatgaaaagtagatataccactgagtttcacgagctggagaaaattggatccggagagttcggcagcgtgtttaaatgtgtgaaaagactcgacggctgcatttacgccataaaaagaagcaagaagccactagccggatccgtcgatgagcagaacgccttgcgtgaggtgtacgcccatgctgtgttggggcagcatagccatgttgtgcgctactttagtgcgtgggcagaagatgaccatatgcttattcaaaatgagtattgtaacgggggttcccttgccgatgctatcagcgaaaattaccgcatcatgagttactttaaggaggcagagctcaaggacctgctgctgcaggtcggacgcgggctgagatacatccactcgatgagtctggttcatatggacatcaaaccaagtaacatattcatttccaggactagcattccaaatgccgcgtccgaggagggggacgaggatgattgggcatcaaataaagtaatgtttaagataggggacctggggcacgtgactagaatttcgtcaccccaggttgaagagggcgacagcaggttccttgcgaatgaggtactgcaggagaattacacacacctgcccaaagctgatattttcgctctggccctaaccgttgtgtgcgccgccggcgccgaaccactaccacgcaacggtgatcagtggcacgagattcgtcaggggagactgccccggataccacaggtactgtctcaggagttcaccgaattactgaaagtgatgatccacccagatcccgagcgcaggccttctgcaatggccctagtaaagcattcagtacttttgtcggcctcacgcaaatctgcggagcagctccggattgagcttaatgccgagaaatttaagaattccctactgcagaaggagttgaaaaaagcgcagatggccaaggcagctgctgaggagagggccctttttaccgaccgcatggccacacggtccacaacccaatccaataggacatcccggcttatcggtaagaaaatgaatcgaagcgtgtcactgacaatctattag

SEQ ID NO: 18042 - DNA, 1941 bp, synthetic construct
  misc_feature 1..1941: note = Description of Artificial Sequence: Synthetic coding sequence
  source 1..1941: mol_type = other DNA
atgtccttcctctctagacaacagccacctcccccacgccgcgcaggtgcggcatgtactttgcggcagaagctgatattttccccatgctctgattgcgaagaagaggaagaagaggaggaagaggagggtagcgggcactctaccggagaagactccgccttccaagagcctgattctcccttacctccagcccggtctcccaccgagccagggccagagcgacgacgatcgcccggtcccgctcctggcagccccggggagctagaagaggatctgctactgccaggggcctgcccaggggctgatgaagccggaggcggagcagaaggcgatagctgggaggaagaggggttcggcagcagttcaccagtcaagtcacccgcagcaccctatttcctgggcagctcctttagtcccgttagatgcggagggcccggcgatgcaagccctcggggctgcggggcacggcgcgccggtgaaggaagaaggtcacctaggccagatcaccccggtacaccacctcacaagacttttcggaagcttcgcctcttcgatacccctcacacaccaaagagtctcctttccaaagcccgtggaatcgatagctctagcgtcaaactccgtgggtcctcactttttatggataccgaaaagagcggaaagagagaattcgacgtgcgacagacgccccaagtcaacataaaccccttcactccggattccttgctcctgcattctagtgggcaatgtagacgaaggaaacgtacttactggaatgactcctgcggggaagatatggaagctagtgactacgaacttgaagatgagacaaggcctgcgaaacggatcaccattacggaatctaatatgaagtctcggtataccaccgaatttcacgagctggagaagattggttctggtgagtttggctcggtttttaagtgcgtcaaaaggctggatgggtgcatttacgccataaagcgctcaaaaaagcctctagctggttctgttgacgagcaaaatgctttacgagaagtttacgctcacgccgttcttgggcagcacagccatgtggtgaggtacttttcagcgtgggcagaggatgatcacatgctaattcaaaacgagtattgcaacggcgggagtctggccgacgcaatctcagagaattatagaataatgtcttacttcaaggaggccgagttgaaagatctcctgttgcaggtgggccgcggcctgcggtatattcactcaatgtctttggtacacatggatatcaagccctctaatatttttattagtaggacatctattcctaatgcagcttcagaagagggcgacgaggatgactgggcatcaaataaggttatgtttaaaattggcgacctgggccacgttacgcgtatctctagcccacaggtcgaggagggtgacagccgattcttagccaacgaggttcttcaggagaattatacccaccttcccaaggccgatatttttgctcttgctttgacggtcgtatgtgctgccggagctgaaccgctcccaagaaacggcgatcaatggcacgagatcaggcaggggcgactccctcgcatcccacaggtcctgagccaagaattcactgagttattgaaagtcatgatccatcctgacccagaacgtagaccttctgcgatggctctggtgaagcacagcgtcctactctccgctagcaggaagtcagcggaacagctcaggatcgagctgaatgcagaaaaatttaaaaacagcctgcttcagaaagagttaaaaaaggcacagatggccaaagccgcagctgaagaaagagctctatttacagatcgcatggcgaccagatctacaactcagagcaacagaactagtcgcctgattggcaaaaaaatgaaccggagcgtgtcactcaccatatattag

SEQ ID NO: 18043 - DNA, 1554 bp, synthetic construct
  misc_feature 1..1554: note = Description of Artificial Sequence: Synthetic coding sequence
  source 1..1554: mol_type = other DNA
ctgcaggaccccgcctcaacttgcgtacctgaacctgcctctcagcatactctcaggtcaggccctggctgcctccagcagccggagcaacaaggggtgcgcgatcctggagggatctgggccaagctgggagccgctgaggcctccgctgagcggctgcagggtagaagatcccggggcgctagcggttctgagcctcaacagatggggagcgacgttcgcgaccttaacgccctcctgccagccgtcccatcactgggaggtgggggaggttgcgccctgccggtgtccggggccgcacagtgggctcctgtgctagacttcgctccacccggggcgtccgcctacggatccctgggaggtcccgcacccccacctgccccgccacccccacccccacccccaccacattcgtttattaagcaagaaccttcatgggggggggccgaaccccatgaggagcagtgcctgtcagcgtttaccgtgcatttttcggggcagtttactggcactgccggagcatgcagatatggcccattcgggccaccccctccatcccaggcaagctcgggtcaggcaagaatgtttcctaacgctccatacctgcctagttgtctcgagagccagcccgccattcggaatcagggttactctacagtgaccttcgacgggacccccagctatggccatactccctcacatcacgccgctcagtttccaaaccattccttcaagcatgaggatcccatgggtcagcaggggagcctcggcgaacaacagtacagcgtgccaccccccgtatacggttgtcacacccccacagacagctgtactggaagccaggccctccttctgcgcaccccatacagcagcgacaacctgtaccaaatgacttcccagctggagtgcatgacgtggaatcagatgaaccttggagcgactctaaagggcgtcgcagccggatccagtagctcagttaagtggacggaagggcaatcaaatcattccactggttatgaatccgacaaccatacaacgccaattttatgcggtgcgcagtatcgcatccatacacacggtgtgttcagggggatacaggacgtcagacgggtgcccggtgtggctccgaccctggtccggagtgcgtccgagacatcagagaaaaggccttttatgtgcgcctaccctgggtgtaacaaacgctatttcaaactgagccacctgcagatgcattcccggaaacatactggcgaaaagccttaccaatgtgatttcaaagattgtgaacgcaggtttagtagaagcgatcagcttaagcgccaccaaaggcggcatacaggagtgaaaccctttcaatgtaaaacttgccagcgcaagttctctaggagcgatcatcttaagacccacaccaggactcacaccggaaaaacgagcgaaaagccctttagttgtagatggccatcctgccagaagaaatttgcccgcagcgatgaactggtacgccatcacaacatgcatcaacgcaacatgaccaaactccaattggccctgtag

SEQ ID NO: 18044 - DNA, 954 bp, synthetic construct
  misc_feature 1..954: note = Description of Artificial Sequence: Synthetic coding sequence
  source 1..954: mol_type = other DNA
ctacaggaccctgcgagcacatgcgtaccagagccagcatctcaacacacacttagatccggcccgggatgccttcagcagcccgaacagcagggtgtccgggatccaggcggcatatgggctaagctgggggccgcggaggcctcggctgaacgcctccagggcagacgctctcggggcgcatccggtagtgaacctcagcagatggggagcgatgtgagagatcttaatgcattactgcctgcggtcccgtctctgggtgggggggggggctgtgcacttcccgtgtctggtgcagcacagtgggctcccgtgttagacttcgcgccacccggggccagtgcatacggatcccttggggggccagctccgccacccgccccacctcccccgcctcctccacctcctcacagcttcatcaagcaggaaccatcctggggcggtgctgagccgcatgaggagcagtgcctctcagcatttactgttcacttctctgggcagttcaccggcaccgccggggcctgcaggtacggcccctttggccctccccccccttctcaggcctcctccggccaggcaagaatgttcccaaacgcaccctacctgccttcctgcctggagagccagcccgccattaggaatcaggggtactcgacagtgacctttgacggaaccccttcatatggccataccccatcccatcacgcagcccaatttcccaatcatagtttcaagcatgaggatcccatgggccagcagggttcactaggagagcagcagtattcagtcccccccccagtatatggatgtcacacgcccacggattcatgtaccggaagccaggctctgctgctacgcaccccatacagttccgacaacctgtaccagatgacaagtcagctcgaatgcatgacatggaatcagatgaacttgggagccaccttgaagggatag

SEQ ID NO: 18045 - DNA, 909 bp, synthetic construct
  misc_feature 1..909: note = Description of Artificial Sequence: Synthetic coding sequence
  source 1..909: mol_type = other DNA
atggagaagggctactcaactgtgacattcgatggcacaccttcctatggacataccccttctcatcatgccgcacagttcccaaaccattccttcaagcatgaggaccccatggggcagcaaggcagcctgggcgagcaacaatactctgtacctccgcctgtctatggctgccatacacccactgactcgtgcaccggatctcaagctttgctgctccgtactccatacagtagcgacaatctttaccagatgaccagtcagctggaatgtatgacgtggaaccagatgaacttgggtgccactcttaagggcgttgcggcgggttcctcttctagtgtgaagtggaccgagggacagtcgaaccacagtaccgggtatgaatctgacaaccacacaacgcctatcctctgcggcgctcagtaccggatacatacacacggcgtcttccgcggtatccaagatgtccgcagagtacccggagtggctccaaccctggtgagaagcgcctcggagacttccgagaagaggccatttatgtgcgcctatcccggctgtaataagcgatactttaaactcagtcacctgcaaatgcactctaggaaacatacaggggaaaaaccgtaccaatgcgatttcaaggattgtgagcgaagattctcccgaagtgatcagttaaagagacatcagcgccgccacacgggagtgaagccattccaatgcaaaacgtgtcagcggaagttttctcgtagcgatcaccttaagacacatactagaacgcataccggtgagaagccctttagttgtagatggccatcttgccagaagaaatttgcaaggagtgatgaactggtgcgccaccacaatatgcaccagagaaacatgaccaagcttcaattggctttatag

SEQ ID NO: 18046 - DNA, 1545 bp, synthetic construct
  misc_feature 1..1545: note = Description of Artificial Sequence: Synthetic coding sequence
  source 1..1545: mol_type = other DNA
ttgcaggaccctgcctctacctgcgtgccagaacccgcaagccagcataccctccgctccggccctggctgtctccagcaacctgagcagcagggagttcgagatcccggcggaatctgggccaaactgggcgcggctgaagcttcagccgagcgcctccagggtcgcaggagtcggggagcttctgggagcgaaccacagcaaatgggctccgatgtgcgcgatctcaacgctctgttgcctgcagtgccatctctcggcggaggcggcggttgcgctctgccggtctctggggctgcccagtgggctccagtgctagatttcgcgccacctggcgctagtgcgtacggcagcctcggcggcccggcaccgccaccagcaccaccgcctccacctccacccccccctcactcatttatcaagcaggagcctagctggggcggtgctgagccgcacgaggaacagtgtcttagcgccttcactgtgcacttcagtggccagttcacaggtacagccggggcatgcagatacggtcctttcggtccccctcccccctcgcaagctagttccgggcaagcccgcatgtttcctaacgccccctacctgccaagttgcctagagtcacagccggccatcaggaaccaggggtattcaaccgtgaccttcgatgggacaccctcatacggccatacgccttctcatcacgcggcccaattccccaaccactcctttaaacatgaggaccccatgggacagcagggtagcctcggtgagcagcaatactctgtcccgcctcctgtatacgggtgccacactcctacggacagttgtaccggatcccaagccttgctgcttcgcactccctactcttctgacaacctttaccaaatgacatctcagctcgaatgcatgacatggaatcagatgaatttgggcgcgacactcaaaggtgtggccgcaggttcgtcctcgagcgtaaagtggaccgaggggcagtccaaccatagcactgggtacgagtccgataatcatactactcccatactgtgcggagcccagtatagaatccatactcacggagtgttccgcgggatacaggacgtgcgccgcgtgcccggcgtggccccaacccttgtaaggtctgctagtgagacctctgagaagcgcccttttatgtgtgcataccctggttgtaacaagcggtacttcaagctctctcatcttcagatgcactctaggaagcacacaggggaaaaaccttaccagtgcgatttcaaggattgcgagcgccggtttagccggtcagaccaactaaagaggcaccagcggagacataccggagtgaaaccttttcagtgcaaaacctgtcaacgaaagttcagccgatctgaccatctgaaaactcatacacggacccatactggggaaaagcctttcagctgccggtggccctcttgccagaagaagttcgcccgatctgatgaattggtgcggcaccataacatgcaccagcgcaatatgacgaaactccagcttgccctctag

SEQ ID NO: 18047 - DNA, 1494 bp, synthetic construct
  misc_feature 1..1494: note = Description of Artificial Sequence: Synthetic coding sequence
  source 1..1494: mol_type = other DNA
cttcaagatccagcatccacgtgtgttcctgaacccgcctcccaacacacactaaggagcggacccggctgtctccagcagccagaacaacaaggcgtacgagacccaggaggcatctgggcaaagctaggggccgccgaggcatcagccgaacgcctgcagggaagacgatcccgcggggcctctggtagcgagccacaacagatgggttcagatgtccgggatctgaacgctctgttgcctgcagtgccctcactaggtgggggtggtggttgcgccctccctgtttctggggcggcccagtgggcccctgtgctggattttgctccccccggcgcctctgcttacggctccttgggggggcccgcacctcctccagcaccaccccccccgccacctccacccccacactccttcataaagcaagaaccaagttgggggggagctgagcctcacgaagaacaatgtctctctgcttttaccgtgcatttctccggccaattcaccggcaccgctggtgcttgccgatatggcccctttggacctccgccgccgagccaggcttcttccgggcaagctagaatgtttccaaacgctccttatctcccatcatgccttgagagccagcccgccataaggaaccaaggatattctactgtcacatttgatggaacaccatcatacggtcacactccctctcaccacgccgcacaattccctaatcattccttcaaacatgaggatcctatgggccagcagggtagccttggagaacaacaatacagtgttcctccccccgtctatgggtgccacacacctaccgatagctgtacaggatcccaggctttgctgttgcggaccccctacagctcagacaacttgtaccaaatgacatctcaactggaatgcatgacctggaaccagatgaacttgggtgctaccttgaagggacactctaccggctacgaaagcgataatcatactacccccattctgtgtggcgctcaatataggattcatactcacggggtttttagaggcatccaagacgtgaggagagttcctggtgtggccccgacgctggtgcgttctgcgagcgaaaccagcgagaagcggccatttatgtgcgcctatcccggatgcaacaagcgatactttaagctgtctcaccttcaaatgcacagccgcaaacatactggagagaagccctaccagtgcgacttcaaggattgcgagagaaggtttagtagaagcgaccaactaaaacgacaccagagaagacacaccggcgttaagcccttccagtgtaagacttgccagcgaaaattcagtagatctgatcatctcaagacgcacactcggactcacaccggggaaaaacccttctcctgcagatggcccagctgccagaaaaaatttgccagaagcgatgagttagtgcggcaccacaacatgcatcaaaggaacatgacaaaactgcagttggctttatag

SEQ ID NO: 18048 - DNA, 396 bp, synthetic construct
  misc_feature 1..396: note = Description of Artificial Sequence: Synthetic coding sequence
  source 1..396: mol_type = other DNA
atgggacaacagggctccttaggtgagcaacagtactctgtgcccccccctgtttatggttgtcacacacctactgactcttgcacaggctctcaggcactcttgcttagaaccccttactcctcggacaatctgtatcaaatgacctcacagttggagtgcatgacctggaaccaaatgaacctgggtgcgactctgaagggcgtcgccgctggctcgagttcaagtgtgaagtggaccgagggtcagagcaaccactccaccgggtatgaatcggataatcacaccacgccaattctgtgtggcgcacagtatcggatccacacccatggtgtatttagaggaattcaagatgtgcgacgtgtaccaggcgtcgctcccacattggtgcggtag

SEQ ID NO: 18049 - DNA, 537 bp, synthetic construct
  misc_feature 1..537: note = Description of Artificial Sequence: Synthetic coding sequence
  source 1..537: mol_type = other DNA
tgattgggtgctacactgaagggcgtcgcagcaggttcttcatccagcgtgaaatggacagagggacaaagtaatcatagcacgggatacgagtctgataatcacactacaccaattttgtgcggagcccaatacagaatccacactcacggcgtgtttcgggggattcaggatgtacgccgcgttcccggggtcgcgcccacactggtaagaagcgcatccgagacgagtgagaagcggccatttatgtgcgcttaccccggctgcaataagcgctactttaaactgtcccacctccagatgcactcccgtaagcataccggagtgaagccgtttcagtgcaagacctgtcaacggaagttttcccggagtgatcacctgaaaactcacacgcggacacacaccgggaagacttctgagaagccattttcctgtagatggccatcttgccaaaaaaagttcgcacggagtgacgagttggtgagacatcacaatatgcatcaaagaaatatgacaaaactgcaactcgccttgtag

SEQ ID NO: 18050 - DNA, 867 bp, synthetic construct
  misc_feature 1..867: note = Description of Artificial Sequence: Synthetic coding sequence
  source 1..867: mol_type = other DNA
atggaaaaaggctactcgaccgtgaccttcgatggcactcctagctacggccacacaccgtcacatcacgctgcccaattcccgaaccactcttttaagcacgaggatcctatgggccagcaagggtccctcggtgagcaacagtatagcgtcccgcctccggtgtatgggtgccatacccctaccgactcatgtacaggtagccaagccctgctgctgagaaccccatacagttcagataatctgtaccaaatgacatctcagctggaatgcatgacttggaaccagatgaacctcggagcaacactaaaaggccatagcaccggttacgaatcagacaaccacactacccccattctgtgcggagctcagtataggattcatactcacggcgtgtttcgaggcatacaagacgttagaagggtccctggagtcgcacccaccctggttcggagtgcctcagagacaagcgagaaacgaccctttatgtgtgcctacccaggttgtaacaaaagatactttaaattatcccaccttcagatgcacagccgcaaacacacgggggaaaagccgtatcagtgcgatttcaaagactgtgagcgccggtttagtaggtccgaccagctcaagagacatcaacgtagacacaccggcgtgaagccttttcagtgcaaaacctgtcagagaaaattctccaggtctgaccatttgaaaacacacacccggactcacacagggaagacttccgagaagccatttagctgtcggtggcctagctgccagaaaaagttcgcacgttctgatgaactggtccggcaccataacatgcaccaacgcaacatgacgaagctgcagctggcattatag

SEQ ID NO: 18051 - DNA, 1065 bp, synthetic construct
  misc_feature 1..1065: note = Description of Artificial Sequence: Synthetic coding sequence
  source 1..1065: mol_type = other DNA
atgagggcaagacctcaggtgtgcgaggcattgctgtttgcgctggctctgcaaacaggcgtctgctatggtattaagtggctggccttatccaaaaccccatctgccctggcgctcaaccagacccagcattgcaaacagctagaggggctggtgtctgcacaggtacagctgtgccggtcaaacctcgaactgatgcataccgttgttcacgctgcccgtgaggtgatgaaagcgtgtagaagagcctttgcggacatgaggtggaactgcagctcaattgagctggcaccaaactacctgttggacttagagaggggcactagggagagcgctttcgtgtacgccctgtcagccgcagcgattagccacgctatcgcaagggcttgcacatccggagatctccccggctgtagctgcggcccagtgcccggcgagcctccaggtcctggaaacagatggggaggatgcgctgataatttgagctacgggcttctaatgggggctaagttctcagacgctccaatgaaagtgaaaaaaacaggttcccaggccaacaaactcatgcggttgcacaacagcgaggtgggcagacaagcactgagggctagcctcgagatgaagtgtaagtgccacggcgtaagtggttcctgttcaatacgaacatgctggaaaggactccaggagttacaagatgtcgccgctgatctcaagacccggtatctgtctgcaactaaggtggtacataggccgatggggacgcgcaaacatctcgtaccaaaagacttagatatccgacccgtgaaagattctgagctcgtgtatctgcagtctagtcctgacttctgcatgaaaaacgagaaagtgggcagtcacggcacacaggatcgccagtgtaacaagacgtcaaatgggagcgacagctgtgatctgatgtgttgcggccgggggtataacccctacacagaccgggtggtggagcggtgtcactgcaaatatcactggtgctgttatgtgacttgccgacgatgtgaaaggactgtggagcgctacgtctgcaagtag

SEQ ID NO: 18052 - DNA, 762 bp, synthetic construct
  misc_feature 1..762: note = Description of Artificial Sequence: Synthetic coding sequence
  source 1..762: mol_type = other DNA
atgcgggctagaccccaggtgtgcgaagcactgctttttgctttggccctccaaaccggcgtctgttacggaattaagtggctggctttatctaaaacaccaagcgccctcgcgctgaaccagacccagcactgcaagcagctagagggcttggtatctgcacaggtgcagctttgtcgcagcaatctcgagcttatgcatacagtcgttcacgccgctcgggaggttatgaaagcgtgtcggagagcgttcgcagacatgcggtggaattgctcctctattgagctggctcctaactacttactggacctggaacgcggtacccgagaaagcgcctttgtatatgctttatctgccgctgccatctcacacgcaattgctcgggcctgtacgtcgggcgacctcccgggttgctcatgtggcccagtccctggagaaccacctggtccgggaaatcgttggggaggttgcgccgataatctgagctacggattgctcatgggggccaaattttccgacgcgccaatgaaagtcaagaaaacagggagtcaggccaacaagctcatgcgtctacacaattcagaagtgggccgccaagctcttagagcctctctgctggtgaatagcaggtgccaggcatgggaagctgcctgcgccctgcctagtctgggtagccaccaggaacagaaggtctggccaccctggaaggaaggcaggacctcgaaggagactgacaagattaagaacaaccttgcagcctag

SEQ ID NO: 18053 - DNA, 18 bp, synthetic construct
  misc_feature 1..18: note = Description of Artificial Sequence: Synthetic coding sequence
  source 1..18: mol_type = other DNA
atgagagcacgcccttag

SEQ ID NO: 18054 - DNA, 1143 bp, synthetic construct
  misc_feature 1..1143: note = Description of Artificial Sequence: Synthetic coding sequence
  source 1..1143: mol_type = other DNA
atgaagaagtcaataggcattctgtcccccggcgtagccctcggcatggccggaagcgctatgtcctctaagtttttcctggttgccctggctattttttttagctttgcacaggtggtgatcgaggctaacagctggtggagcttggggatgaacaatccggtgcaaatgtcggaagtgtacatcatcggggcacagcctctgtgcagccaactggctgggcttagccaagggcagaaaaaactgtgccatttgtaccaagatcacatgcagtatatcggggaaggtgctaagactggcatcaaagagtgccagtatcagtttagacacaggcgctggaattgttccactgtggataatactagcgtatttggtagagttatgcaaattggaagtcgcgagaccgccttcacatacgcagtgtccgcagctggggtggtcaatgcaatgtcccgggcatgccgagagggagaattgagtacatgtggctgcagtagggcagctcgcccgaaggatttgccacgggattggctgtggggagggtgcggagataacatagactacggctaccgcttcgcaaaggaatttgtcgatgcccgggagagggaaagaatccatgcaaaaggatcctacgaatctgcgagaattcttatgaatttgcacaacaacgaagcgggacgccgaacggtttacaatctcgcggacgtggcttgcaagtgtcatggggttagcggcagctgctccctgaaaacctgttggttacagctcgcagatttccggaaagttggtgacgccctgaaggagaagtacgacagtgccgccgccatgcggctaaactctagggggaaactggtccaggtgaacagcaggtttaattccccgaccactcaggatctggtgtatatcgacccgtcccctgattactgcgttcggaacgaaagcactgggagcctgggaacccaaggtagattatgcaacaagaccagcgaaggcatggacggttgtgaattgatgtgctgtgggcgcgggtacgaccagtttaaaacagtgcagacggaacgctgtcattgtaaattccactggtgttgttacgtgaagtgcaaaaagtgcacagagatcgtggaccagttcgtttgcaagtag

SEQ ID NO: 18055 - DNA, 390 bp, synthetic construct
  misc_feature 1..390: note = Description of Artificial Sequence: Synthetic coding sequence
  source 1..390: mol_type = other DNA
atgaagaagtcgatcggtatactgagcccaggggttgctttaggcatggctgggtccgccatgagcagtaaattcttccttgtggccctggctatctttttctcctttgcgcaggttgttatcgaggccaactcctggtggagcctgggcatgaataatcccgtccagatgtcccaggatgtgggcggacacgggtggctgcgtgcacatgttctgcgtccttggttgcgaccagttcaggatagggctgatggcgccctgcctctccaggtccctttagtgttgctacgacaggtccaagaagtccacggagatcggggtccagtatgcgtccaggtcgtcggcgctactcaacacagcgctcctttgccaggccctgcctatctctag

SEQ ID NO: 18056 - DNA, 1143 bp, synthetic construct
  misc_feature 1..1143: note = Description of Artificial Sequence: Synthetic coding sequence
  source 1..1143: mol_type = other DNA
atgaagaagagcatcggaattctcagcccaggcgtggcgctgggcatggcaggctccgccatgtccagcaaattttttctggtggcattggctatatttttcagtttcgctcaggtagtgattgaagctaactcatggtggtctcttggtatgaacaatcccgtgcagatgtccgaggtgtatatcatcggagctcagcccctgtgtagtcaactggcaggcctgtctcaaggccagaaaaaactctgccacctttatcaggatcacatgcagtacattggagagggcgcaaaaacaggtattaaagagtgccaataccagttccgtcacaggcgatggaactgctctacagtagataatacatctgtttttgggcgcgtgatgcagatcggcagccgcgaaacggcctttacgtacgcggtttccgctgccggcgtggtgaacgcgatgtcaagagcctgtcgagagggtgaattgtcaacgtgcgggtgtagccgcgctgcaagaccaaaggacctcccccgggactggctctggggcgggtgtggggacaacatcgattacgggtatagatttgcaaaagaattcgtggacgcacgcgaaagagagcgcattcatgctaaaggatcttatgaatccgctcgcatacttatgaatctgcacaacaatgaagcaggtcggagaaccgtgtacaatctggcagacgttgcatgcaaatgtcacggagtatccgggtcctgtagtctgaaaacatgttggctacaattagccgactttcgcaaagtgggggacgccctcaaggagaagtatgactccgcagctgccatgcggctgaatagccgtgggaagctcgttcaagtgaatagccgattcaacagcccaactacgcaggacctcgtgtatatcgatccatcgcctgactattgcgtgaggaatgaaagtactggatctctcggcacccaaggccggctgtgtaacaagacttctgaagggatggatggctgtgaactcatgtgctgcggtcgaggttacgaccaattcaaaaccgttcaaaccgaacggtgtcactgcaaatttcactggtgttgctatgttaaatgcaagaagtgcaccgagatagtcgatcaatttgtgtgcaagtag

SEQ ID NO: 18057 - DNA, 645 bp, synthetic construct
  misc_feature 1..645: note = Description of Artificial Sequence: Synthetic coding sequence
  source 1..645: mol_type = other DNA
atggccggcagcgcaatgtccagcaaattcttcttggttgctctggctatcttctttagtttcgctcaggtagtgattgaggctaattcttggtggtcccttggcatgaataaccccgtacagatgagcgaagtttatattattggtgcccagcctttgtgttcgcaactggcaggactgagccaaggccagaaaaagctgtgtcacctctaccaggatcacatgcaatatattggagaaggagccaaaactggcattaaagagtgtcagtaccaatttcgacaccgcaggtggaactgtagcacagttgataacacctccgtgttcggccgggtcatgcagatcgggagccgtgaaacagcctttacctatgcagtgagtgccgccggcgtggttaacgccatgagccgggcctgtagagagggagagcttagcacctgcggatgtagccgggctgcccgccccaaggatcttccaagagactggctttggggcggatgcggcgataacatagattatgggtaccgtttcgctaaagaattcgttgatgcccgggagagggagaggattcatgccaaggggtcttatgagtccgctagaattctcatgaacctgcacaacaacgaggctggacgtagagtgtag

SEQ ID NO: 18058 - DNA, 1098 bp, synthetic construct
  misc_feature 1..1098: note = Description of Artificial Sequence: Synthetic coding sequence
  source 1..1098: mol_type = other DNA
atggcagggagcgcaatgagttccaaattttttttggttgctttagccatatttttttcctttgcacaagtcgtaatagaggccaactcatggtggagtttgggcatgaataacccggtccaaatgagcgaggtgtacattattggggcacagcctctttgcagtcagcttgctggcctctcgcaaggccaaaagaagctgtgtcacctgtatcaggaccacatgcagtacattggggaaggtgccaagaccggaatcaaagagtgtcaataccagtttcgacacagaaggtggaactgctccaccgtggacaataccagcgtgtttggcagagtaatgcagatcggaagtcgagagacggccttcacctatgctgtgagcgcagccggcgtggtcaatgccatgtcaagggcctgtagggagggggagctctcaacctgcgggtgtagtagggctgcgcgcccaaaggatctgccccgggattggctgtggggcggttgtggggacaacatcgattacggctatcgattcgccaaagaatttgtcgatgcaagagagcgcgagagaatccacgccaagggaagctatgagtcggcccgtatcttgatgaacctacacaacaatgaagctgggcgcagaacagtttacaatctagccgacgtagcatgcaaatgccatggagtcagtgggtcttgttccttgaaaacatgctggctgcagttagcggactttcggaaggtgggcgacgctcttaaggagaagtatgatagtgctgccgccatgagacttaactcaagggggaagctggtacaggtcaactcacgctttaacagccctactacacaggatctcgtttacatagatccgagccctgactactgcgtgagaaacgagagcacagggtccctcggcactcagggtcggctgtgcaataagacgtccgaaggaatggacggatgcgagctgatgtgttgcggacgggggtacgatcagttcaagactgtccaaactgaaagatgtcactgcaagtttcattggtgctgttatgtcaagtgcaagaaatgtaccgagatagtggaccagttcgtttgtaagtag

SEQ ID NO: 18059 - DNA, 876 bp, synthetic construct
  misc_feature 1..876: note = Description of Artificial Sequence: Synthetic coding sequence
  source 1..876: mol_type = other DNA
atgcagtacataggtgaaggggcgaagaccggtatcaaggagtgccagtaccagttcaggcaccgtcggtggaactgctccaccgtcgacaacacctctgtgttcgggagagtcatgcagatagggtccagggaaactgcttttacatacgcggtgtccgcagccggagtcgtgaatgccatgagccgtgcctgccgggagggcgagctgtctacttgtggctgttcaagagccgcgagacccaaggacctcccaagggactggctctgggggggatgcggagataatattgattatgggtatagattcgccaaagagtttgttgatgcacgcgagcgggagcgtatacacgcaaaggggagctatgaaagcgctaggatccttatgaacctccataacaacgaggccggccggcgcacagtatacaacctggctgacgtcgcctgtaagtgtcacggagtatccggcagctgttctctcaagacatgctggcttcagcttgcagacttccggaaggttggcgacgcactcaaagagaagtacgactccgcagccgctatgcggctaaactcccgagggaaacttgtacaggtgaattcgcgctttaacagccccactactcaggaccttgtatacatcgatccaagtcctgattattgtgtccgcaatgaatctactggttccctgggcactcagggcaggctttgtaataaaacatcggagggaatggacggttgcgagctgatgtgctgtggcaggggatacgatcagttcaaaactgttcaaaccgagcgatgtcactgcaaattccattggtgctgctatgtcaagtgtaagaagtgcacagaaatcgtcgatcagttcgtgtgcaaatag

SEQ ID NO: 18060 - DNA, 1080 bp, synthetic construct
  misc_feature 1..1080: note = Description of Artificial Sequence: Synthetic coding sequence
  source 1..1080: mol_type = other DNA
atgccgagcctgctattgctcttcaccgccgcattactctccagctgggcgcaattactgacggatgcaaacagctggtggtctctagcactgaatccagtgcagcgacccgagatgtttattatcggggcacagcctgtgtgttcccagctgcccggccttagcccaggtcagcgtaagctatgccaactgtaccaggagcacatggcttatattggagagggcgccaagaccggaatcaaggaatgtcagcatcagttcaggcagcgtcgctggaactgctcgactgctgataacgccagcgttttcggccgagtgatgcagataggctcacgcgagactgccttcacgcacgcagtgtctgccgccggggtggtcaatgccattagtcgggcgtgccgggaaggggagctgagcacctgtggttgctcacggaccgctcgtcctaaagatctgcctcgcgactggctatggggcggttgcggtgacaacgtggagtatggctatcggttcgccaaggagtttgtggatgcccgggaacgtgaaaagaacttcgcgaaagggtcagaagaacagggcagggtactcatgaacttgcaaaataacgaggcaggacggcgtgcagtgtacaagatggcagacgtagcttgcaagtgtcacggggtgtcagggagctgctccctgaaaacatgttggttgcaactggccgaattccgcaaggtgggagaccgcctgaaggagaagtacgatagtgcggccgccatgagggtgacccgaaaaggccgccttgagctggttaattccaggtttactcaaccaacccccgaggacctcgtgtacgtcgatccgagcccagactattgtctcaggaacgagtctacaggttccctggggacccagggcagactatgcaacaagacttctgaaggcatggatggttgcgagctcatgtgctgtgggagaggctataatcagtttaaaagtgtgcaagtggagagatgtcactgcaagtttcactggtgctgcttcgtgagatgcaagaagtgcacagagatagtggaccagtatatctgtaagtag

SEQ ID NO: 18061 - DNA, 1080 bp, synthetic construct
  misc_feature 1..1080: note = Description of Artificial Sequence: Synthetic coding sequence
  source 1..1080: mol_type = other DNA
atgccaagtctgctgctcttatttaccgcggccctcctgtcatcatgggcccagctgctaactgacgctaattcttggtggtctttagcattgaacccagtccagcggccagagatgttcatcattggcgcacaacccgtgtgcagtcaattgcccggtctttctcctggccagcggaagctgtgtcagctgtatcaggagcatatggcatacatcggcgaaggtgccaaaactggaatcaaagaatgtcagcaccagtttcgacagagaagatggaactgctccacagctgacaacgcatctgtgttcggtagggtcatgcaaatcggctcccgagagacggccttcacccatgctgtgtctgccgcaggggtggtgaacgcaatctccagggcctgtagagaaggcgagttaagtacctgtggttgcagccgtacagcacgtcccaaggacttgcctagggactggctctggggcggatgcggggataacgtagaatatgggtacaggtttgctaaggagttcgtggacgctagggaacgagagaagaacttcgccaaaggcagcgaggagcagggccgcgtgttaatgaacctgcaaaataacgaagcgggccggcgcgcggtgtacaaaatggccgatgtggcctgcaaatgccacggcgtgtccggatcttgtagtctgaagacctgttggctgcaacttgccgagtttagaaaggtcggcgataggctcaaagagaagtatgactcggcagcagccatgcgcgtgacaaggaaagggagactcgaactggtgaacagtcgatttacccagcccacacctgaggacctcgtctacgtggacccttcccccgactattgtctcagaaacgagagtactggtagtcttgggacacaagggcggctgtgtaataaaacttctgagggtatggacggctgtgagctcatgtgctgcggtaggggctataaccaatttaaaagtgtccaggtcgaaagatgtcactgtaaattccactggtgttgcttcgtgcggtgtaagaaatgtacggagattgtcgatcagtacatctgcaagtag

SEQ ID NO: 18062 - DNA, 1080 bp, synthetic construct
  misc_feature 1..1080: note = Description of Artificial Sequence: Synthetic coding sequence
  source 1..1080: mol_type = other DNA
atgcctagtctccttcttttgtttaccgcagccctcttgtcctcttgggcccaactgctgactgatgcaaacagttggtggtcacttgcactgaatcccgtgcagcggccagaaatgttcattatcggcgcccagcctgtgtgttcccaattgcctggcctgagccccggtcagaggaaactctgccagctctatcaagaacatatggcttatattggggaaggagccaaaacagggattaaggaatgccagcatcagttcaggcagcgccgttggaattgcagcaccgctgataacgcctctgttttcgggagggtgatgcaaattgggtcaagggagaccgcgttcacacatgcagtcagtgctgccggtgtagtcaatgccatttcgagagcttgccgagagggcgagctgtccacctgcggatgcagtaggaccgcgcggcctaaagaccttccccgggactggctgtggggaggctgcggagataacgtggagtatggttaccggtttgcaaaggagttcgtcgatgcccgcgagcgtgaaaaaaactttgccaaaggtagtgaagaacagggtcgggtgttgatgaacctacagaacaacgaagccggccggcgcgccgtgtacaaaatggccgatgttgcatgtaaatgtcacggtgtgagcggcagttgtagcttaaaaacatgttggctgcagctagcagaattcagaaaagtgggggatcgacttaaagagaaatatgattctgcagcggcaatgcgagtgacccgaaagggtaggctcgagcttgttaattccagatttacgcagcccacgcctgaggatttagtctatgtcgatccaagccccgactactgcctgcgaaatgaatcaactgggagtcttggcacgcagggtagactctgtaacaaaacctcagaaggaatggacggttgcgaattaatgtgttgcggacggggctataatcaattcaaaagcgttcaggtcgagcgttgccactgtaagtttcactggtgctgcttcgtacgttgtaagaaatgcaccgaaatcgtggaccaatatatctgcaagtag

SEQ ID NO: 18063 - DNA, 1398 bp, synthetic construct
  misc_feature 1..1398: note = Description of Artificial Sequence: Synthetic coding sequence
  source 1..1398: mol_type = other DNA
atgacgggtagggcaatggaccctttgccagctgcagcagtcggtgccgcagccgaagcagaggctgacgaggaagcagatccaccagccagcgacctccctacaccacaggcgatcgaaccgcaggccattgtacagcaggtgccagctcctagtcgcatgcagatgcctcaaggcaatcctttgctcctcagccacactctgcaggagctgcttgcccgggacacggttcaggttgaactcattccggagaagaaaggacttttcctgaaacacgtagaatatgaggtcagcagccaaagatttaagagtagtgtgtaccgcaggtacaacgacttcgtggtttttcaagagatgttgctgcacaagttcccttaccgcatggtcccggcgttgccacctaagcgaatgctgggggccgacagagagttcattgaggccaggcggagggccctgaaaaggtttgtgaacctggtcgctaggcaccccctgtttagcgaagacgtggttctcaaactctttttaagcttcagcgggagcgacgtgcagaacaagctcaaggaaagcgcccagtgcgtcggagatgagttcctgaactgcaaactagccacaagggccaaggacttccttcctgccgatatacaagctcagttcgccatttccagggagctgatacggaatatttacaacagcttccacaaactgagggacagagccgagcgtatcgcaagccgagcgattgataacgccgcagatctgcttatcttcggtaaagagctatctgccatcggtagcgacacaacgcctctgccgtcttgggcagctctaaactctagcacttgggggtcactgaagcaggcattgaaaggactgtccgtggaattcgcactcctcgccgataaagccgctcaacagggaaaacaggaggaaaacgacgtagtggagaaactcaatcttttcctagatcttcttcagtcttataaagacctctgtgaaaggcatgaaaagggggtgctccataagcatcagcgggcccttcacaagtattctctgatgaagcgtcagatgatgagtgcaacagcccagaaccgcgagcctgagagcgtggagcagctggaaagcaggatcgtggaacaagagaacgccatacagaccatggagctccggaattacttctctctctactgtttacaccaggagacacaactgatacacgtctatctgcctcttacaagtcacatactccgagcattcgttaactctcaaatccagggtcataaagagatgtctaaagtgtggaatgacctgcgacccaagctcagctgccttttcgccgggccccattctacattaactccaccttgtagccccccagaggacggactctgccctcactag

SEQ ID NO: 18064 - DNA, 174 bp, synthetic construct
  misc_feature 1..174: note = Description of Artificial Sequence: Synthetic coding sequence
  source 1..174: mol_type = other DNA
atgtcatccgtgcagcaacagccgccaccacccaggcgagtgaccaatgtgggttctctcttgctcacaccacaggagaatgaatccttgttcaccttcctgggaaagaagtgcgttacaatgagctctgcggtcgtacagctgtatgctgcggatcgcaacctcagctgctag

SEQ ID NO: 18065 - DNA, 1140 bp, synthetic construct
  misc_feature 1..1140: note = Description of Artificial Sequence: Synthetic coding sequence
  source 1..1140: mol_type = other DNA
atggccagacgctccgcctttccggcagccgctctatggttgtggagcattctcctgtgtctcctagctttgcgcgcggaagccggtccccctcaggaggagtcgctgtatctgtggatcgacgcacaccaggccagggtactgataggattcgaagaggacatcctcattgtatccgagggcaagatggctccattcactcacgatttccgaaaggcccagcagaggatgccagcaatccccgtcaacatccatagtatgaattttacatggcaagctgccggtcaggccgagtatttctatgaatttctgtcactgcgatctctggataagggaataatggccgaccccaccgtaaatgttccgctcctggggacagtaccccacaaggcctcggtggtgcaggttggatttccgtgcctggggaagcaagatggagtagctgccttcgaagtagacgtgatcgtcatgaattccgagggtaacacaatcctgcaaaccccacagaatgctatctttttcaagacttgccagcaggccgaatgtcctggcgggtgtaggaacggcggcttctgcaacgaaaggagaatttgcgaatgccctgacggctttcatgggcctcattgtgagaaagcactttgcacgcctcgttgtatgaatggtgggctttgcgtgaccccaggcttctgtatctgccccccaggcttttacggagtgaattgcgataaagctaactgtagtaccacatgtttcaatgggggtacctgtttctatccaggtaagtgcatatgccctcctggactggagggagaacagtgtgaaatctccaagtgcccacagccctgcagaaacggggggaaatgcatcgggaagagcaaatgtaagtgtagcaaggggtatcagggggatttgtgcagtaagccagtgtgtgagcccggatgtggcgcccacggaacctgccatgagcccaacaagtgccagtgtcaagaagggtggcatggccggcactgcaacaaacgctacgaagcttccctcattcatgctctccggcccgccggagctcaacttagacaacacaccccttctctaaagaaggctgaggaaagacgcgaccctccagagtccaattacatctggtag

SEQ ID NO: 18066 - DNA, 120 bp, synthetic construct
  misc_feature 1..120: note = Description of Artificial Sequence: Synthetic coding sequence
  source 1..120: mol_type = other DNA
aaaaaaaggaaagaaaagaaaagagaaaagcgccgcggaaaggagcgcaaggaattatttaagttggtgtcacatgtgcttgagaataggatgggatggcagcatctaaaatggatgtag

SEQ ID NO: 18067 - DNA, 1095 bp, synthetic construct
  misc_feature 1..1095: note = Description of Artificial Sequence: Synthetic coding sequence
  source 1..1095: mol_type = other DNA
atggctagagcatccgaggccgtgagtaggatactggaggaatggcacaaggcaaaggtagaagctatgactcttgaccttgccctcctaaggagtgtgcagcatttcgccgaggcatttaaggccaaaaatgtgcccctccatgtgctggtatgcaacgccgcgacctttgcgcttccttggtcgctgactaaggacggtctagagaccacattccaggtcaaccatctcggccatttctacctggtgcagctgctgagaatgttttgcgcagcccagttgctgcccgtcagcctctggtccccccagtcccccattgacttacagatcttgaccacgccttgggaaaactggaccagtgtagccagcctgcagcaaaagactactatcggtagatgctggctaatcaccgggccaagctccgctacctcgagcagtcccaccagctgcacagttgcccccactcggggccacgttgagcgatctgcctcctggaagtacgacgtcctccagcactccagccagctcgtgggtgtgcacaccgcagtttatctaggggaagcttttcaccaagtgcatgcgaccggctcgtgccatcaccgtgtactttgttgttgtcctagaaccgggggttcaggacgagacgtgctgcagcaacttttgcctcttcacgctctgaccaggtcctccgaaaggcgtgacggtccagaccccgttggctctgagaggctcatacaagaacgccttgcatctcctgctaaatggtcaagcgaacgtatgggcacccatacgaggccagtttgcgtcccctctcgaaagtgtcagggaccccttcctaatgtgccccccacacagattcggaaatccaagggcaataagagctcccacaaccgcgtgaagaatttgaaataccaatgggaagcaggaaacagctggggcaaggtgagcctgttttgggggtgggcacggcatcgctctctctgttttctggtcgtcgcctgtcttaaggtgaaaacttgtctggtatgcaggtttaggattagccttgagaagcaccaacagttcagttttttctactgctatcggatcgcctag

SEQ ID NO: 18068 - DNA, 570 bp, synthetic construct
  misc_feature 1..570: note = Description of Artificial Sequence: Synthetic coding sequence
  source 1..570: mol_type = other DNA
atggctgcgctcagatatgctgggctcgacgatacagattccgaggatgagttaccacccggatgggaagaaaggaccacaaaggatgggtgggtttactacgctaatcatacagaggagaaaacgcagtgggagcatcccaagaccggtaagcgtaaaagggtggccggggatctcccatatggttgggaacaggagacagatgagaacggacaggtgttctttgttgaccacataaacaaacgcacaacatacttggatccacgactagctttcactgtggacgacaatcccacaaaacccactactcgacagcgctatgacgggagtacgactgcaatggaaattctccaagggagggactttaccggcaaggtggttgtggttactggagccaacagtggaatcggctttgaaactgccaagagcttcgctcttcacggcgcccacgtgattttagcatgccgcaacatggctcgggcgtctgaagccgtttcaagaatactggaagagtggaaaacaaagtaccaccctccacctgagaaatgcaggattaaaatatttcactag

SEQ ID NO: 18069 - DNA, 936 bp, synthetic construct
  misc_feature 1..936: note = Description of Artificial Sequence: Synthetic coding sequence
  source 1..936: mol_type = other DNA
atggccgcactccgatatgccggactggatgatactgactctgaagacgagctccctccaggatgggaagagcgtaccacgaaggatgggtgggtatattatgctaaccacactgaagagaaaacgcagtgggaacaccccaaaactggaaagcgaaaaagagtggctggagacctgccatatggttgggagcaggagaccgatgagaatggccaggtgttttttgtagatcacatcaataaacgcacaacgtacctggacccacgccttgcattcactgttgatgataatcccacaaagcctaccaccaggcagagatatgatggtagcactaccgccatggaaattcttcaaggccgggacttcaccggtaaagtcgtggttgtgacaggcgcaaactcaggaattgctaccggcagttgccatcatagagtcttgtgttgttgtccacgaactggcggttccggccgagacgtcctgcagcaacttctccctttgcatgcattgacacggtcgagtgaacggcgcgatggaccggatcctgtgggggcacagcgtgaagcagaccctagaaccgcttggcaacctgttagactttccggtgctcagagcggctgggctcacacccctgctctctgtgtgtctccccatgcatccgctcgggccggcccactcccgaatgttccccccacgcaaatccgcaaaagcaagggtaataaaagttctcacaatcgcgtcaagaacctgaagtatcagtgggaagcaggaaactcatggggaaaggtaagcctgttttggggatgggctcgtcaccggtcactttgcttcttagtagttgcatgtctcaaggtaaagacgtgtctcgtgtgccggtttcgtatcagtctggagaagcaccagcagttctcctttttttactgttatcgcattgcctag

SEQ ID NO: 18070 - DNA, 705 bp, synthetic construct
  misc_feature 1..705: note = Description of Artificial Sequence: Synthetic coding sequence
  source 1..705: mol_type = other DNA
atggccgctcttcgctacgcagggctagacgacacggacagcgaagatgaacttcctccaggctgggaagagagaactacgaaggatggatgggtgtactacgcaaatcatactgaagagaaaactcaatgggaacacccgaaaacgggcaaacggaagagggtcgcgggcgacctcccctatggatgggagcaggaaactgacgaaaatggccaagtgttcttcgttgatcacatcaataaacgcacaacttacctggacccgagacttgcttttaccgtcgatgataaccctactaagccaacaacgcggcaaagatatgacggatcaacgaccgcaatggagatactgcagggcagggactttaccggtaaagtcgtggtggttaccggcgctaattcagggatcggtttcgagacagcgaagagctttgctctgcacggggcacatgttatcctggcatgccggaatatggccagagcatctgaggccgtgtccagaatcctggaagagtggcaacagggtgctgcgactacagtctattgcgctgcggtgccggagctcgaaggcctaggcggcatgtattttaacaattgctgtcgctgcatgccatccccagaggcgcaatctgaagaaactgccagaactctgtgggcactttccgaaaggctgatccaggagcgattggggtcccagagcggatag

SEQ ID NO: 18071 - DNA, 1245 bp, synthetic construct
  misc_feature 1..1245: note = Description of Artificial Sequence: Synthetic coding sequence
  source 1..1245: mol_type = other DNA
atggccgccttacgctacgcagggctggacgacacagatagcgaggacgaattgccccctggatgggaagaacgcaccacaaaagacgggtgggtgtattatgccaaccatacggaggaaaaaactcagtgggagcaccctaagaccggaaagcgcaaacgcgtggcaggagatctcccctacggatgggagcaagaaaccgatgagaacggacaggttttcttcgttgaccacatcaacaaaaggacaacctatctcgacccgcggctcgcctttaccgtagatgataatcccaccaaaccaacgacacgccaacgctatgatggctccaccacggccatggagattctccaggggagggattttacagggaaggtcgtcgttgtgaccggtgcaaactcaggcattgggtttgagaccgcaaaatcttttgccttacacggggcacacgtgatcttggcctgccgtaatatggcccgggcgtctgaggctgtctcaagaatcttggaagagtggcacaaggctaaggtagaagctatgactctggacctggctctcctgcggagtgtgcagcactttgctgaggccttcaaggccaagaacgtaccactccacgttctggtgtgtaatgcagccaccttcgccctgccctggtccctcaccaaggatggccttgagacaaccttccaggtgaatcacctggggcacttttatctcgtccagcttctacaagatgtgttatgccgatctgccccggcccgcgtgatagtcgtctcgtctgagtcccacagatttaccgatattaacgacagtctagggaagctggattttagccgcttgtcccccaccaaaaatgattactgggctatgctggcctataataggtccaagctttgcaacattctctttagcaacgaacttcaccggagactgagccccaggggtgtcacgtccaacgctgtgcatcctggtaatatgatgtactccaatatccatagatcctggtgggtgtacaccttgctattcacactagcccgtccattcacaaagagtatgcagcagggcgcagcgaccacggtctattgcgccgcggtccctgagttggagggccttggcggcatgtacttcaataattgctgtagatgcatgccaagtccagaagcccagtctgaagaaacggcccgaacactttgggccctgtctgaaagactgatacaagagagactggggagccagagcggatag

SEQ ID NO: 18072 - DNA, 642 bp, synthetic construct
  misc_feature 1..642: note = Description of Artificial Sequence: Synthetic coding sequence
  source 1..642: mol_type = other DNA
atggcggccctccggtacgccgggctcgatgacaccgactctgaggacgagctccctccaggttgggaggagcgcacaaccaaggacggatgggtgtactatgcaaatcataccgaggagaagacacagtgggaacatcctaaaaccgggaagaggaaaagggtggcaggagatcttccctacgggtgggagcaagagacagacgaaaatgggcaggtgttttttgtggatcatatcaataagagaaccacctacttggatcccaggctcgcgttcaccgtagacgataatcccaccaaacctacaaccagacaacggtacgacggaagtacaaccgcaatggaaatactacaaggacgggattttacaggtaaggtagtggtggtcacaggggccaactcaggaattggaaaggccagctgccatgtcggcaggatccttaagcacactcgcgtggaagagctatcactcttgcctacggcaatcaatcgcgaattgcctcccccctgcaccgttctgctaagtcaaaattggcgcgtgtgggagggctgcacctctactacggcagctgcggcgtgtccccaccagaaacttcgagccaaacgccggcccggaccctgcggtaggagtgctcggggctag

SEQ ID NO: 18073 - DNA, 1245 bp, synthetic construct
  misc_feature 1..1245: note = Description of Artificial Sequence: Synthetic coding sequence
  source 1..1245: mol_type = other DNA
atggccgccctgaggtatgcaggcctggatgacactgatagtgaggatgagttgccgcctggatgggaggaacgtaccacaaaggatggctgggtgtattacgctaaccatacagaagagaagacccagtgggaacaccctaaaacaggtaaacggaagagagtagccggggatttaccttatggatgggaacaggaaacagacgaaaatggccaggtgtttttcgtcgaccacatcaataagcggactacatacttggatccgagactcgcctttacagttgacgataaccctaccaaacccacaactcggcagcgctacgatggatctacaactgctatggaaatattgcagggaagagactttaccggtaaagtcgtcgtagtcacaggcgctaattcaggcatcggatttgagacagctaagtcattcgcattgcatggggctcatgttatactggcctgtagaaatatggcccgagcttccgaggccgtgagcagaattcttgaggagtggcataaggccaaagttgaggcaatgaccctcgatctggctttactgaggagtgtccaacatttcgccgaggcctttaaagctaagaatgtccccttacacgtcctggtatgcaacgccgcgacctttgctctaccctggtcacttacgaaagacggtctcgagaccacctttcaggtaaatcaccttggacatttttaccttgtgcagctgctccaggatgttttatgtcgctccgcccctgcacgggtgatcgtcgttagctcagagagccatcgtttcaccgacatcaacgattctctagggaagttggattttagtcgcttgagccctactaagaacgattactgggcgatgctcgcctataatcgatcaaagctgtgcaacatactgttttcgaatgaactgcaccggcgcctcagcccaaggggggtaactagcaacgcagtccacccaggtaatatgatgtatagcaatatccatcgatcctggtgggtttacactttactgtttaccctggccaggccattcacaaaaagcatgcagcagggcgcagctaccaccgtatattgtgccgcagtaccggagctggagggactgggcggaatgtatttcaataattgttgtagatgcatgcctagtcctgaagctcagtcggaagagacagccaggaccctgtgggctttgtctgagagactgatccaggaacgcctagggtctcagagcggctag

SEQ ID NO: 18074 - DNA, 111 bp, synthetic construct
  misc_feature 1..111: note = Description of Artificial Sequence: Synthetic coding sequence
  source 1..111: mol_type = other DNA
atggctgcgctgagatatgcaggcctcgatgacaccgattccgaggatgaactgcctcccgggtgggaggaacgtaccacaaaagatggttgggtgtattatgctaagtag

SEQ ID NO: 18075 - DNA, 1047 bp, synthetic construct
  misc_feature 1..1047: note = Description of Artificial Sequence: Synthetic coding sequence
  source 1..1047: mol_type = other DNA
atggcccactcacagaattcattggaactgccaataaatatcaacgctacacagataaccacggcctacggtcatcgcgcactgccaaaactcaaggaggagcttcagtccgaggacctgcaaacccggcagaaggccttaatggctttgtgtgacttgatgcatgaccccgagtgcatctataaagcaatgaacatcggttgtatggagaaccttaaagcattgctgaaggacagcaatagcatggtccgcattaaaacaacagaagtgctgcacatcaccgcaagccacagcgtaggacgctacgcatttcttgagcacgatatcgtgctcgccctgagtttcctgcttaacgatccctcacctgtgtgccggggtaatctttacaaggcctatatgcagttagtccaagtgccaagaggtgcacaggagataatctcaaagggacttatttcaagcttggtctggaagttgcaggtagaggtggaggaggaggaatttcaggagtttattttggacacgttggtgctgtgtctgcaagaggatgccactgaagctctcgggtctaatgttgtgcttgtgttaaagcagaagctcctctccgccaaccaaaacatccgtagtaaagcagcaagggccctattaaacgtgtcaatctcaagggaaggtaagaaacaggtttgtcattttgacgttattcccattttagtccacttgctcaaagaccctgtggaacacgtgaagagcaacgcggcaggggcacttatgtttgcaacagtcatcaccgaggggaagtacgcagcccttgaggcccaggctattggtttattgcttgaactgttgcacagccctatgacaatcgccaggctgaatgccacgaaggctctaacaatgcttgcagaggctcccgaaggacggaaggccctgcagacccacgtccccacattccgcgctatggaagtcgaaacatatgagaaaccacaggttgctgaggctctgcagcgggccgctcggatcgccattagcgtgatcgagttcaagccgtag

SEQ ID NO: 18076 - DNA, 1131 bp, synthetic construct
  misc_feature 1..1131: note = Description of Artificial Sequence: Synthetic coding sequence
  source 1..1131: mol_type = other DNA
atggtcgtcgttgccgctgcaccgaatcctgcggacggtaccccaaaggtgctgttgctctccgggcagcctgcctcggccgcaggcgcacccgccgggcaggctctcccgctgatggtgcccgcccagcgaggcgccagtcctgaagcagcttccggcggactacctcaggctaggaagcgccaacgcctaactcatttgtcccctgaggaaaaggccctccgcagaaagctgaaaaatagggtcgctgcccagacagcgagggaccggaaaaaagcgcgcatgtctgagctggagcagcaggtcgtagatctggaagaagaaaatcagaagctactgctggagaatcagttgctgcgggaaaaaacacacggcctcgtggtcgagaaccaggaactgaggcagcgcttaggaatggacgcgcttgtggcagaagaagaggctgaggccaaggggaacgaggtcaggccagtcgccggaagcgctgaatcagccgcgggggccggcccggtggtaactccccccgaacacctgccaatggacagtggaggaatcgattcaagcgattccgagtccgatatcctccttggcatcctcgacaatctggatccagtcatgttctttaagtgtccaagtcccgagcccgccagtctcgaagaactccccgaggtctaccccgaggggccttcgagcctacccgccagcctctccctgtcagtgggaaccagctcagccaaacttgaagccatcaatgagcttatcagatttgaccacatctacaccaagcctctggtcctcgaaatcccttctgaaaccgaatcccaggccaacgtggtagtgaaaattgaagaggcgcctcttagccccagtgaaaatgatcatccggagtttattgtgtcagttaaagaagaacccgtggaagacgacctggttcctgagcttggcattagtaacttattaagctctagtcactgtccaaagccctcttcctgcttgctcgacgcttattccgattgtgggtacgggggaagcctgtccccctttagtgatatgtctagtctgctgggcgtcaaccatagctgggaggatacctttgcaaatgagctttttcctcaattaatttctgtctag

SEQ ID NO: 18077 - DNA, 801 bp, synthetic construct
  misc_feature 1..801: note = Description of Artificial Sequence: Synthetic coding sequence
  source 1..801: mol_type = other DNA
atggttgtggtcgcagctgcccccaaccccgccgatggcaccccaaaggtgcttttgctaagtggtcagccggctagcgccgctggtgcgccggctgggcaggccctgccgctgatggttcctgcccagcggggtgcaagccccgaggctgcctccgggggattgcctcaagcccgcaaaagacagagattgacccacctcagcccagaggaaaaggcgctgagacgaaaactcaagaatcgggtcgctgcccaaaccgctcgggatcgaaaaaaagccaggatgtctgagctggaacaacaggtggttgacttggaggaagaagtaaagctgttgaagaatcagaaactgctactagaaaaccagcttctgcgagagaaaacacacggactggtggtggaaaaccaggagctgcgccagaggctcggaatggacgcacttgttgctgaggaggaagctgaggcaaaaggtaacgaggtgcggccagtggccggctcagcagagtcagctgcacttaggctgcgggcgccactgcagcaggtgcaagcccagctttcgcctctacagaacatcagtccttggattctcgcagtgctgactctccagattcagtccctcattagctgttgggctttttggacgacttggacccaaagctgctcatcgaacgccctcccccagagcctgccggcctggaggtcgtcccagcgctccactcagaaagatccagtcccctatcaaccgcccttcctgtgccagtggggtcgccatcagcctagctggaagcctcttatgaattag

SEQ ID NO: 18078 - DNA, 636 bp, synthetic construct
  misc_feature 1..636: note = Description of Artificial Sequence: Synthetic coding sequence
  source 1..636: mol_type = other DNA
atgcgcgcccccgtcttccaagcactgctgctttgtggcagacgcctggtggtccagccattgaactcggacatgaggaaactgaaaaaccgcgttgcagctcaaacggccagggatcggaagaaggcgagaatgtctgaactcgaacaacaagtagtcgatctggaggaggaaaaccagaagctgttgctagagaaccagctcctccgggaaaaaacccacggtttggtggtagagaaccaggaactgcggcagcgtctaggaatggacgccctggttgctgaagaggaggccgaggccaagggaaacgaggtgaggcctgttgctggaagtgctgagtccgccgccctgcgcctgagagcgccactccagcaggtccaggcacagctctcaccactacaaaatatctcgccctggatactggctgtgctcactctccaaatccaatctctaattagttgctgggctttctggactacctggacacaaagctgcagcagcaatgccctgccgcaatccctgccagcctggaggtcatcccagaggtctacccagaaagatccggtgccttaccagccaccattcctatgccagtggggtagacaccagccaagctggaagccattgatgaattag

SEQ ID NO: 18079 - DNA, 822 bp, synthetic construct
  misc_feature 1..822: note = Description of Artificial Sequence: Synthetic coding sequence
  source 1..822: mol_type = other DNA
atggctgcagccgatggtgcactgcctgaagctgctgccttagagcagcctgcggaactgcccgcaagcgtgcgtgcctcaatcgagcgtaaaagacagagggctctaatgcttcgacaagctagactggccgctagaccctactccgcgacagctgctgcagctaccggaggcatggccaatgtaaaggccgccccaaagattattgacaccggaggaggcttcatcctggaggaagaggaggaggaggaacagaaaatcggaaaggtcgtgcaccagcctggccccgtgatggagtttgattacgtgatttgcgaggagtgcggcaaagagtttatggacagctatttgatgaaccacttcgaccttcccacctgtgataactgtcgggatgctgacgataaacacaaattgatcacaaagaccgaggccaagcaggagtacttattgaaagactgcgatctggaaaagcgcgagcctcccctgaagtttattgtgaaaaagaacccacaccactctcagtggggtgatatgaagctttacctgaagctgcagatcgttaaacggtccttggaagtgtggggctcccaggaggctctggaggaagctaaagaggttagacaagagaaccgcgagaaaatgaagcagaagaaattcgataaaaaggtgaaagagctgagaagggcagtgagatcctccgtgtggaaacgggaaaccatcgtgcatcagcatgaatacgggcccgaagaaaacttggaggatgatatgtataggaaaacctgcactatgtgcgggcatgaactgacctatgagaagatgtag

SEQ ID NO: 18080 - DNA, 2823 bp, synthetic construct
  misc_feature 1..2823: note = Description of Artificial Sequence: Synthetic coding sequence
  source 1..2823: mol_type = other DNA
atggccagaaagcgcgctgccggaggagagccaaggggacgcgagcttcgcagccagaaatcaaaggcaaagagcaaggcccgcagggaagaggaggaagaggacgcatttgaagacgagaagccccctaagaagtctctcctgtccaaagttagtcaagggaaaaggaagagggggtgcagccacccaggtgggtctgctgacgggcctgcaaaaaagaaagtcgccaaggttactgttaagtctgaaaaccttaaggttattaaagatgaagcactctcagacggcgacgatctgagagacttccctagtgatctcaaaaaggctcaccatctgaaaaggggcgccaccatgaatgaggactccaatgaggaggaggaagaatcagagaacgactgggaggaggtcgaggagctttctgagcccgtgttgggagacgtccgcgagtctactgcattctctaggagcttgctgcccgtaaaacctgtggagattgagatcgaaaccccagaacaggctaagacacgcgagagatccgagaagattaaattagagtttgaaacttacttgcggagagccatgaagcgattcaataagggtgttcatgaagatacacacaaggttcatctgctttgtctgcttgctaacggattctatcggaacaacatctgcagccaacccgacctccatgcaattgggctgagcattataccagctcgcttcacacgcgttcttccgcgggatgtagatacttactacttgagcaatctggtcaagtggttcatcgggacgtttacagtgaatgcagaactctcggcttcagaacaagataatttgcaaacaactctagaaagaagattcgccatttacagcgctcgggatgacgaagagctcgtccacatttttctattgattcttcgggccctccagctgctcactcgcctcgtattgtcactgcaaccaattccactaaagagcgccacggcaaagggaaaaaagcccagcaaagagagactcacagcagacccaggaggcagctcagagacatcatcacaagttctcgagaaccatacgaagcctaaaacctctaagggcacaaagcaggaggagacatttgcaaagggcacctgccgccccagtgcaaaggggaagcgcaacaagggaggtcggaagaaacgctcaaagcccagtagcagtgaggaagacgagggacctggcgataagcaggaaaaagcaacacaacgcaggcctcacggccgcgaaagaagggtcgcatcacgggtgagttataaagaggagtcaggatccgacgaggcgggcagcgggtcagattttgagctgtcttcaggcgaagcctcggatccaagcgacgaagatagcgaaccaggaccccctaaacagcgtaaggccccagccccccagagaaccaaggctggcagcaagagcgccagccggactcataggggtagtcataggaaggacccctccctgcccgcagcttcatcttctagcagttcctcgaaacggggcaagaagatgtgttcagacggggagaaagccgaaaagcgctccatcgccggcatcgatcagtggctggaggtattttgtgagcaggaggagaagtgggtgtgcgtggattgtgttcacggcgtggtcggtcagcctctgacatgttataagtatgccaccaagccaatgacctacgtagtcggtatcgattcggatggctgggtgcgcgacgtcacccagcggtacgaccctgtttggatgacggtgacgcgcaagtgccgcgtcgacgccgagtggtgggccgagacattgaggccctaccagtctccctttatggaccgcgagaaaaaagaggacctggaattccaggcaaaacacatggatcagcccctgccaacagcaatagggctttacaaaaatcaccctttatatgcgttaaagcgacacctactcaagtatgaagcaatctacccagagactgccgccatcctcggttactgcagaggagaggccgtgtactcgagagactgcgtccacacactacactcaagagacacctggcttaaaaaggcgcgagtcgtacgactcggcgaggtgccttataagatggtgaaaggtttttctaaccgggcccggaaggctcgcttggcagagccacagcttagagaggaaaatgatctggggttgtttgggtattggcaaacagaggagtatcagccaccagtggcggtcgacggcaaagtacccaggaacgaatttggcaatgtctatttatttctgccttctatgatgccgatcggctgcgtgcagctcaatcttcccaatttacatcgcgtggctagaaagctcgacattgattgtgtacaggctattacagggtttgacttccatggcggatattcacatcccgtaaccgatggatacatcgtctgtgaggaattcaaggacgtactcttgacagcctgggagaacgagcaggccgtcatcgaacggaaagaaaaagagaaaaaggagaagcgtgcgcttggcaattggaagttactggccaaaggattgctgatcagagaaaggcttaagaggcggtacggccctaaatctgaagccgcagccccccacacggatgctgggggaggcctcagctcggacgaggaagagggtacatcatctcaagctgaagccgcccggatattggcggcatcctggccccagaacagagaggatgaagaaaagcagaagttaaagggggggcctaagaagaccaaaagggagaagaaggccgccgctagtcatctgtttccatttgaacagctttag

SEQ ID NO: 18081 - DNA, 2712 bp, synthetic construct
  misc_feature 1..2712: note = Description of Artificial Sequence: Synthetic coding sequence
  source 1..2712: mol_type = other DNA
atggcaaggaaaagagccgccgggggagaacctcgcggccgtgagttgcggagccagaagagcaaggcaaagtccaaggcccgcagagaggaagaagaagaagatgccttcgaagacgaaaagcctccaaaaaagtcccttctgagtaaagtctcgcaaggcaagcggaaaagaggatgcagccacccggggggaagtgccgacgggcccgccaagaagaaggttgcgaaggtgacagtgaaatcagagaacttgaaggtgatcaaagacgaggcactgtccgatggcgatgatttacgcgactttcccagtgacctgaaaaaggcgcatcacctcaagaggggtgctaccatgaatgaggacagcaatgaggaagaggaggaatctgagaacgattgggaggaagctaagacccgagagagaagtgaaaagatcaaactggagttcgagacctacctgagaagagccatgaagaggttcaacaagggggttcatgaagatacccacaaggtgcatttgctgtgcctcctggccaatgggttctacagaaataacatatgctctcaaccagacctgcacgctattggactctcaataatacccgcccgctttaccagggtgctacctagagacgtggacacctactacctgagtaacttggtgaaatggtttattggtacgtttacagtaaatgcagaactctcagcctctgaacaggacaacctgcagactaccctcgagagaagatttgcgatttactcagcgagggacgatgaggagctagtgcatatctttttacttatcctcagggcgctacagctcctgaccaggctggtcttgagcctgcagccaatccctctgaagtctgctacggcaaaggggaaaaaaccctctaaagagcggctgacagcggacccaggcggttctagtgagaccagctctcaagtcctggagaaccacactaagcccaaaacgtcgaagggaaccaagcaggaagagacatttgccaaaggcacatgtagaccatctgcaaagggaaagaggaacaagggtgggcggaaaaagaggtccaagccatcgagctccgaggaagacgaaggacccggtgataaacaggaaaaggctactcaaaggcgcccacatggaagggaacgcagggtggctagtagagtgtcatataaggaggagagcggtagtgatgaggctggttcaggttctgattttgaactcagctctggagaagccagcgatcccagtgatgaagatagcgagcccgggccaccgaagcaacgtaaagcgccagccccccagcgtactaaagccggatccaagagtgcctctagaacgcaccgcggatcacaccggaaagatccttcactgcccgctgcaagcagtagctcttcctcttccaagagaggcaaaaaaatgtgttctgatggtgaaaaagcggagaagcgttccatcgcgggaatcgatcaatggttggaggtgttttgtgagcaggaggaaaaatgggtctgcgttgattgcgtgcacggagtcgtcggacaacctctgacctgttacaagtatgccaccaagccaatgacatacgtggttggaatcgactctgatggctgggttagggatgtcacgcaaagatatgatcctgtgtggatgactgtgacgcgtaagtgtcgcgtggatgcggaatggtgggctgaaacactaagaccataccagtctccatttatggatagagaaaaaaaggaagacctggaattccaggcaaagcacatggaccagccgctcccaaccgctatcggactgtacaaaaatcatcccttgtatgcactgaagcgacatctgctgaaatacgaggcaatatatcccgaaaccgccgcgattctgggctattgtcggggcgaggccgtctacagtagagactgcgtgcacactctgcactcccgggacacttggttgaaaaaggccagagtggtcagactgggggaggtgccgtacaagatggtcaaggggttcagcaacagggctcgcaaggctagactcgcagaacctcaactgcgagaagagaacgacctgggcctgtttggatactggcagaccgaggagtatcagccacctgtggccgtcgacggaaaggtgccccggaatgagttcggtaatgtctacttgtttctgccctccatgatgccgatcggctgtgtacagctgaacctccctaatctgcatagggtggcaaggaaactggatattgactgtgttcaggcgatcaccgggttcgacttccacggaggatacagtcatcccgtgacggacgggtatattgtctgcgaggagttcaaggacgtgctgctcacagcctgggagaacgagcaagcagtcattgagaggaaagaaaaagaaaaaaaggagaagcgtgcactgggtaattggaagctgctcgctaagggtctgctcatccgcgagagattaaaacgccgatatgggccaaagtcggaggcagccgcacctcacaccgacgcaggaggaggactatctagcgacgaggaggagggtacttcctcccaggccgaggcggcccgaatcctggcggctagctggccccaaaacagagaggacgaggagaaacaaaagctcaaaggaggacctaagaagacaaagcgcgagaaaaaagcggccgcgtctcacctgtttccctttgagcaactgtag

SEQ ID NO: 18082 - DNA, 423 bp, synthetic construct
  misc_feature 1..423: note = Description of Artificial Sequence: Synthetic coding sequence
  source 1..423: mol_type = other DNA
atggccaggaaacgagcagccggtggcgagcctcgcggtcgagagttacgcagtcagaagtcgaaggccaaatcaaaagctagacgagaagaggaggaagaggatgcattcgaagatgagaaaccaccaaagaagtctctcctgtcgaaggttagccagggcaagcgtaaacgcggctgctcacatccagggggctcagcagacggtccagctaagaaaaaagttgccaaggtcacagtgaagagcgagaacctgaaggttattaaagatgaggctctgtcagatggagatgatctaagagatttccccagcgaccttaaaaaggcccaccatcttaagaggggggctactatgaatgaggacagtaacgaagaggaagaagaaagcgagaacgactgggaggaggtcgaggtgaagaggtag

SEQ ID NO: 18083 - DNA, 507 bp, synthetic construct
  misc_feature 1..507: note = Description of Artificial Sequence: Synthetic coding sequence
  source 1..507: mol_type = other DNA
atggcgaggaaacgtgcggcaggaggagaaccgaggggtcgggaactgagaagtcagaaaagcaaggcgaagtcaaaggccagacatgctttcgaagatgagaagcccccaaagaaatcattactgtccaaagtaagtcagggcaaacgcaagcgtggctgttcccaccctggcggctctgcagacggaccagccaaaaaaaaggtggccaaggtcacggtgaaaagcgagaacctcaaggtcattaaggatgaggctctttccgacggggatgacctgcgagactttccatctgaccttaagaaagctcaccacctgaagcgcggagcaactatgaatgaagatagcaacgaggaggaagaggagtcagagaatgactgggaggaggttgaagagctctcagagcctgtgcttggagacgttcgggaatcgaccgctttcagccggagcctactaccagtaaaaccggtcgagatcgagattgaaacaccagagcaggccaagtag

SEQ ID NO: 18084 - DNA, 462 bp, synthetic construct
  misc_feature 1..462: note = Description of Artificial Sequence: Synthetic coding sequence
  source 1..462: mol_type = other DNA
agcagcagtaaacgtggcaagaagatgtgttcagatggcgaaaaggccgagaaacggtctatagctggtattgaccaatggctggaagtcttttgcgaacaggaggagaagtgggtgtgcgtcgactgtgtccatggcgtggtaggacaaccgttaacttgctacaagtacgcgactaaacccatgacatacgtggtgggcattgacagcgatggatgggtgcgtgatgtgacccagcggtatgaccccgtgtggatgacagttacccgcaagtgcagggtggatgccgaatggtgggctgaaacactgcggccataccagagccccttcatggatcgcgaaaaaaaggaggacctggagggcttgtgtgcccactccgcgtttcaggggcacgttgccgaagaatctaaatctggtgaggcctggcggtccactctgcaagacggcgagaggctgttctag

SEQ ID NO: 18085 - DNA, 177 bp, synthetic construct
  misc_feature 1..177: note = Description of Artificial Sequence: Synthetic coding sequence
  source 1..177: mol_type = other DNA
atgtgctccgatggcgagaaagccgagaagagaagtattgcgggcatcgaccagtggctggaagtgttctgcgagcaggaggagaaatgggtgtgtgttgattgcaggtgcggaggacccgcttcagacctactgcaggtgcgccaccaggctcacgacctttgcggcggacattag

SEQ ID NO: 18086 - DNA, 231 bp, synthetic construct
  misc_feature 1..231: note = Description of Artificial Sequence: Synthetic coding sequence
  source 1..231: mol_type = other DNA
aaagccacccagagaaggccccatggccgtgaacggcgagtcgctagccgagtgtcttacaaggaggagtccggttccgatgaagctggcagcggaagcgatttcgagttaagctcaggtgaggcatcagaccccagcgacgaggactctgagccagggccccccaagcagagaaaagcccccgccccgcagcgcaccaaggcggggtcaaagagtgcatctagaacctag

SEQ ID NO: 18087 - DNA, 849 bp, synthetic construct
  misc_feature 1..849: note = Description of Artificial Sequence: Synthetic coding sequence
  source 1..849: mol_type = other DNA
atggagggcgacttcagcgtgtgtaggaattgcaaaagacatgtggtctccgctaactttacattacacgaagcttactgcctgcgttttctcgtcctctgccccgagtgtgaagagcctgtgcctaaagaaaccatggaggaacactgcaagctagagcatcagcaagccaatgagtgtcaggaacgaccagttgagtgtaaattctgtaaattggacatgcaactgtctaagctcgaacttcacgagagttactgtggatctagaactgagttatgtcagggttgtggccaattcattatgcatcgaatgttggcccagcaccgcgatgtgtgccgcagcgagcaagcccagctgggaaagggtgagaggatcagcgccccggaacgggaaatatattgtcattattgcaaccaaatgattcctgaaaacaaatacttccatcacatgggcaaatgttgccctgattccgagttcaagaagcacttcccagtcgggaaccctgagatcctaccctcctctctgcccagccaagcggccgaaaaccagacatctacaatggagaaagacgtccggcccaagacgcgatctatcaacagattcccccttcattccgaatcttccagcaaaaaagcgccgagatccaaaaacaagaccctggatcctctgctcatgagtgagcctaagccccgaacaagctcaccacggggagacaaagctgcctacgacatactgcgtcggtgttcacagtgtggcatactcttgcctcttccaattctgaaccaacatcaggagaagtgtcgctggttagcctcttccaagggcaagcaagtacggaacttttcttag

SEQ ID NO: 18088 - DNA, 906 bp, synthetic construct
  misc_feature 1..906: note = Description of Artificial Sequence: Synthetic coding sequence
  source 1..906: mol_type = other DNA
atggagggggacttttcggtgtgtagaaattgcaaacggcatgttgtttccgcaaactttacgctgcacgaggcttattgcctgaggtttctggtgctctgcccagagtgtgaggaacccgtacccaaggagaccatggaagaacactgtaagcttgagcaccaacaggtgggttgtactatgtgtcaacagtctatgcagaaaagttccctggagtttcataaagccaacgagtgccaggagaggcctgtggagtgcaagttctgcaagctagatatgcagttatccaagctggagctccacgagtcttattgtggatcccggaccgaattgtgtcagggctgtgggcagtttataatgcatcggatgttggcccagcatagagatgtctgccggtctgaacaggcacagctaggaaaaggcgaacgaatcagtgcccccgagagggaaatctactgccattactgcaaccagatgatccccgagaacaagtatttccatcacatgggaaaatgttgtccggatagtgagtttaagaagcacttcccagttggcaacccagagatcctgcccagctctctcccctcccaggcagccgagaaccagacttcaaccatggaaaaggatgtcagaccgaaaacccgctccatcaataggtttcctctacactctgagtcgagtagcaagaaggcaccccgcagcaaaaataagactctggatccgctacttatgtcggaacctaagcctcgtacatcatctccacggggggataaggctgcctatgacattctgcgcaggtgctcccaatgtggaatcctcctccctctgccgatcctgaaccaacaccaggaaaaatgtcggtggctggcaagcagcaaaggcaagcaggtgcgtaactttagctag

SEQ ID NO: 18089 - DNA, 600 bp, synthetic construct
  misc_feature 1..600: note = Description of Artificial Sequence: Synthetic coding sequence
  source 1..600: mol_type = other DNA
atgtccttgcattacggttgctgctgtcccgaatgcacctccgtggcgatcaaagagatgatgtgggtgattaggcctcgggtggcctgtgttgtgaaagatgccggcagtgcaggcgaacggatttcagccccagaaagagagatatactgtcattattgtaatcaaatgatccctgagaataagtactttcaccatatggggaagtgctgtcctgattctgagtttaaaaagcacttccctgttgggaatcctgagattcttcccagcagtctaccctcacaggccgccgagaatcaaacttccactatggaaaaggacgtacggccaaagaccaggtctattaaccgatttccacttcactctgagagctctagcaaaaaggccccccgcagtaaaaataagaccctggaccctctgctgatgagcgagcccaaacctaggacatcttcaccgagaggcgataaagccgcttatgatatcctcagacggtgtagccagtgtgggattttgcttcctctgcccattctgaaccagcatcaggaaaagtgccggtggcttgcctccagcaaaggcaagcaagtgcggaatttctcttag

SEQ ID NO: 18090 - DNA, 495 bp, synthetic construct
  misc_feature 1..495: note = Description of Artificial Sequence: Synthetic coding sequence
  source 1..495: mol_type = other DNA
atggaaggggacttttccgtgtgtaggaattgcaagcgccatgttgtttcagcgaattttacattgcatgaagcatattgtctgcgtttcctggtcctatgccccgaatgtgaagagcctgtgcctaaggagacgatggaggaacactgtaagctcgagcatcagcaggtcggatgtacaatgtgtcagcagagtatgcaaaagagctccttggaatttcataaagccaatgagtgccaggaacggccagttgagtgtaaattctgcaaacttgacatgcaactgagcaagctggaactgcatgaatcatattgcggctcccggactgaactgtgccagggatgcggacagtttatcatgcacaggatgttagcacagcatagagacgtgtgtagaagtgaacaggctcagttgggaaaagagacctcacctgacccaggtaagtgcctctccattactgtggctgccgccttaagcgctcatctgtggccctag

SEQ ID NO: 18091 - DNA, 906 bp, synthetic construct
  misc_feature 1..906: note = Description of Artificial Sequence: Synthetic coding sequence
  source 1..906: mol_type = other DNA
atggagggggatttttccgtctgcaggaactgtaagcggcatgtagtgagcgcaaatttcaccttgcatgaagcttattgcctgcggtttctggtgctatgtccggagtgtgaagagccagtcccgaaagagacaatggaggaacactgcaaacttgagcaccagcaggtgtctgagatgggatcaggccgagggaagtgctcaattctccctgcccggaaaaaggccaacgaatgccaggaaagaccagttgagtgtaagttctgcaaactcgatatgcaattgtcgaagcttgaactgcatgaaagctattgcgggagccgaaccgaactgtgtcaaggctgtggacagtttattatgcataggatgctggcgcagcacagagatgtgtgcaggagtgaacaggcacagcttggaaaaggcgaaagaattagtgcaccagagagggagatttattgccactattgtaatcaaatgattcctgaaaataaatattttcaccacatgggcaagtgttgtccggattccgaatttaagaagcattttcccgtaggtaatcccgagatactgccttcttctctcccatcccaggctgctgagaatcaaacctccactatggagaaggatgtgaggcccaagacacggtctattaatagattcccccttcactccgagagttcatctaaaaaagcaccacgtagtaagaacaagaccctggaccctctactcatgtctgagcccaagccgagaaccagttccccgagaggggacaaggcagcatacgacatactccggcgatgtagccagtgcggtattcttcttccgctccccatcctcaaccagcatcaagaaaaatgccgatggcttgcttccagcaaggggaaacaggttaggaatttcagttag

SEQ ID NO: 18092 - DNA, 1494 bp, synthetic construct
  misc_feature 1..1494: note = Description of Artificial Sequence: Synthetic coding sequence
  source 1..1494: mol_type = other DNA
atgacctttaatagctttgagggatcaaaaacttgcgttcccgccgatattaacaaggaggaagaatttgttgaagagtttaaccgactaaagacctttgctaactttccaagcggctcccctgtttcagcttctacacttgctcgggcaggatttctatatactggggagggtgacacagttcgctgtttctcctgccatgcggcagttgacagatggcagtacggagactccgccgtggggcgccatcggaaagtatctcctaattgtagattcatcaacgggttctacctggaaaatagcgctacgcagtctactaattcaggcatccagaacggccagtataaagtggagaactaccttggttcacgcgatcatttcgcattggataggcccagcgagactcacgccgattatctgttgagaacagggcaggtggtggacattagcgacacaatatatccccgaaatccagcaatgtactcagaagaagcgcgactgaaaagtttccagaattggcccgattacgctcatctgacacctcgcgaactcgcctcagccggattgtattacacgggaattggtgatcaggttcagtgcttctgttgcggcggcaagctcaagaactgggagccctgcgacagagcctggtcagagcacaggcgccatttccccaactgcttctttgtgctagggcggaacttgaacattcgatccgagtctgacgccgtgagcagcgacagaaactttccaaattcaactaatctgccacgcaacccttcaatggccgactatgaagcacgcatttttacatttgggacatggatctacagcgtcaataaagaacagctggcgagggccggattttacgctctcggcgaaggtgataaggtcaaatgttttcactgtgggggcggactgacagactggaaaccatctgaggacccctgggaacagcacgccaaatggtaccccgggtgcaagtacctgctggaacagaagggacaagagtacattaataacattcacctaactcactctctggaagaatgcctcgtcagaacaaccgaaaagaccccttctctgacacggcgcatcgacgatacgatttttcagaaccctatggtacaggaggcaatcaggatgggtttttcctttaaggatataaagaagattatggaggagaaaatccagatcagtggttcaaactacaagtcactggaggtgctggtcgcagacctggtaaacgctcagaaggactctatgcaagatgagtcatcgcagacttctctacagaaagagatctccactgaggagcaactgcggcgcctgcaggaagagaagctctgtaaaatatgcatggacagaaacattgcaatcgtatttgtgccctgcggccacctggtgacctgcaaacaatgcgccgaggctgtggacaagtgtcctatgtgttataccgtgatcacctttaagcagaaaatatttatgtcctag

SEQ ID NO: 18093 - DNA, 1494 bp, synthetic construct
  misc_feature 1..1494: note = Description of Artificial Sequence: Synthetic coding sequence
  source 1..1494: mol_type = other DNA
atgaccttcaattcatttgaaggctctaaaacgtgtgtgcctgcagatattaataaagaggaggagtttgtcgaagaatttaatagacttaaaacatttgctaactttcccagcgggtcacccgttagtgcaagcaccctggcccgagcaggcttcctgtacactggggaaggcgataccgtgcgctgcttcagctgccatgcagctgtcgatcgctggcagtatggagactctgcggtcggccgacataggaaggtgtcaccaaactgtagattcattaacggtttctatcttgagaatagcgctacacagagtactaactctggcatccagaatggacagtacaaggtcgaaaattacctcggatctagggaccacttcgctcttgaccgccctagcgagacacacgcagactacctcttgcgaaccggccaggttgtggacattagtgatacaatttacccccgcaaccctgccatgtactcagaggaggcgaggctgaagtccttccagaactggcctgactacgcacatctgacacccagagagctggcctctgccggcttgtattatactggcatcggcgaccaagtgcaatgcttctgctgtggcggcaaactgaaaaactgggagccatgcgaccgggcgtggtctgaacacaggagacactttccaaactgtttcttcgtgctgggcagaaacctgaacatccggtccgagtctgacgctgtttcttccgatcggaactttccaaactccacgaacctgcctcggaatccgtctatggccgactatgaagctcggatttttacattcgggacctggatttactccgtgaataaggagcagcttgcacgagcaggcttctacgcactgggcgaaggagacaaagtgaagtgcttccattgtgggggcggactgaccgattggaaaccaagtgaggatccatgggaacaacacgctaagtggtatcctggatgtaaatacctgctcgagcagaagggacaggaatacattaataatattcatctcacccactctctggaggaatgtctcgtgcgaacaactgagaaaactcccagcctgacaagacgtatagacgacaccatcttccagaaccccatggtgcaggaggcaatccggatgggattcagcttcaaggacataaaaaagataatggaagagaagatccagattagtggctctaactacaagagcctggaggtgctggtagctgatttagtcaacgctcaaaaagatagcatgcaggatgaatctagtcagacatctctgcagaaggaaatttctaccgaagagcagctccggcggttacaggaagagaagctctgcaaaatctgcatggaccggaacatcgcaattgtttttgtgccctgtgggcatttggtgacgtgcaaacaatgtgccgaggcagtggataaatgtcccatgtgctataccgtgatcacattcaagcagaagattttcatgagctag

SEQ ID NO: 18094 - DNA, 51 bp, synthetic construct
  misc_feature 1..51: note = Description of Artificial Sequence: Synthetic coding sequence
  source 1..51: mol_type = other DNA
atgacctttaactcattcgagggctcaaaaacatgtgtgcctgctgattag

SEQ ID NO: 18095 - DNA, 471 bp, synthetic construct
  misc_feature 1..471: note = Description of Artificial Sequence: Synthetic coding sequence
  source 1..471: mol_type = other DNA
atgacctttaactcctttgagggcagcaaaacttgcgttcctgctgatatcaataaagaagaggagttcgtggaggagttcaaccgtcttaaaacattcgcaaattttccaagcggtagccctgtgagcgcttccaccctagctcgggcagggttcctatatacaggcgaaggagataccgtccgctgtttctcctgtcacgcggcagtggaccgatggcaatacggggattccgccgttgggcgccatcggaaggtgtcgcctaactgccggttcattaacggattctacctggagaattccgcgacacagtctacgaacagcggcattcaaaatggccaatataaggttgaaaactacctcgggtctcgagaccatttcgccctcgatcggccatccgagacccacgctgattacttgttacgtacagggcaggtcgtagatatttctgataccatctatcctcggtag

SEQ ID NO: 18096 - DNA, 1494 bp, synthetic construct
  misc_feature 1..1494: note = Description of Artificial Sequence: Synthetic coding sequence
  source 1..1494: mol_type = other DNA
atgacgttcaactcttttgagggcagcaaaacctgtgtgcctgcagacatcaacaaggaagaggagtttgtggaagagttcaaccggctgaagaccttcgcaaatttcccttccgggagcccggtgagcgccagcacactcgcccgcgcaggctttttatacacaggcgagggcgataccgtgcgctgctttagctgtcacgcagcagtggatcgttggcagtacggtgactcggccgtgggtcggcatcggaaggtgtcgccaaactgtcgttttattaatggcttctacctggagaattctgccactcaaagcaccaactcaggtatccagaatggacagtacaaggtggagaattacctgggaagcagagatcactttgctttggacagaccctcagaaacacacgctgactatctgcttcggaccggtcaggtggttgatattagcgacacgatctacccccgcaatcccgctatgtattctgaggaagcccgcctcaaatcattccaaaattggcccgactatgctcacctcacgcctagagaactcgcctctgccggactctattacactggcatcggagaccaggttcagtgtttttgctgcggcgggaagctaaaaaattgggaaccctgcgatcgggcctggagcgaacacaggaggcactttcctaattgcttcttcgtcctcggccgcaatctgaatatcaggagtgaaagtgatgcagttagctcagaccgcaactttccaaacagtactaatctcccacggaacccatcaatggcagattatgaagctcgcatcttcaccttcggaacatggatatactccgtcaacaaggaacagttagctcgcgctgggttctacgcactgggcgaaggcgacaaggttaaatgcttccactgcggcggaggcctgacggattggaagccgagcgaggatccatgggagcagcatgccaagtggtaccccggatgcaagtatctcctggagcagaagggccaggaatatattaacaatatacatcttactcattctctcgaagagtgcttggtgcggacaaccgagaagaccccatccctgaccagaaggattgacgacacaatctttcagaatcctatggtacaggaggccataaggatgggttttagctttaaagatatcaagaagattatggaagaaaaaatacagatctctggcagcaactataaatccttggaagtactggttgctgaccttgttaatgctcagaaagatagtatgcaagatgaatcttcccagaccagtctccagaaagagataagtactgaggaacagctgcggagattacaggaggagaaattgtgcaaaatctgcatggacagaaatatcgccatcgtattcgtgccttgtggacatctggtgacatgcaaacagtgtgccgaagccgttgataaatgtccaatgtgctatacagtcattacatttaagcagaagattttcatgagctag

SEQ ID NO: 18097 - DNA, 2568 bp, synthetic construct
  misc_feature 1..2568: note = Description of Artificial Sequence: Synthetic coding sequence
  source 1..2568: mol_type = other DNA
atggtagtgatggctcggctctcacggcctgagagaccagatctggtctttgaagaagaggaccttccctacgaagaagaaattatgcggaaccaattttcggtcaagtgctggctcaggtacattgagttcaaacagggggcgcccaaaccccgactgaatcaactgtatgaacgggctctaaaattacttccatgcagctataaattgtggtatcgttatctcaaagcaagaagagcccaagtgaaacacagatgcgtgacagatcctgcctatgaggatgtgaataattgtcatgagcgagcctttgtatttatgcacaaaatgccacgtctgtggctagactattgccagttcctaatggatcagggccgcgtgacccacacccggagaacttttgatcgcgccttgcgagccttgcctattacccagcactcccgtatctggcccttgtacctcagatttctgcgctctcatcccctcccggagactgctgtgcgaggataccgccgttttctgaaattgagcccggaaagtgcggaggagtacatcgagtatctcaaatccagcgaccggctcgatgaagccgcacaacgcctggccaccgtggttaatgacgagagatttgtctccaaggcagggaaatctaattatcaactgtggcacgaactgtgcgacctgatcagccagaaccctgacaaggtgcagtccctaaatgtcgatgctatcattcgggggggcctgactagatttactgatcaactggggaaattatggtgcagcctggcggactactacatacgctccggacacttcgaaaaggcccgtgacgtgtacgaagaggcaattaggacagtcatgactgttagagacttcactcaggtgttcgatagctatgcacagtttgaagagtctatgatcgccgccaaaatggagactgcgtctgagctgggcagggaggaggaggatgatgtggatttggagctcaggctggcccggttcgagcagctgatatcacggagaccccttttactaaactctgtactcctccggcaaaatccccaccatgttcatgagtggcataagcgtgtggcccttcatcaagggcgacctcgcgagatcatcaacacctataccgaggctgtgcagaccgtggatcccttcaaggctacagggaaaccccacactctctgggtggcattcgctaagttttatgaggacaacgggcagctcgatgatgccagagtgatccttgaaaaggccaccaaagttaactttaagcaagtcgacgatctcgcgtccgtttggtgccaatgcggtgaattagagctgcgccatgagaattacgatgaggctctgcgtttgctccgcaaggcaaccgcattgccagcacgtagggctgaatattttgatgggtctgagccagtgcagaatcgcgtgtacaagtccctgaaggtgtggagtatgttggcagaccttgaagaatcgctgggcacctttcaaagcactaaggccgtatatgatagaatcctggatctcagaatagctaccccacagatagtgatcaattatgccatgttcctggaagagcacaaatatttcgaggaaagctttaaggcctatgaacgtggcatctcgctgttcaagtggcccaacgtgtcagatatctggtccacctatctgactaagtttatagcccgttatggggggagaaagctcgagcgtgcgcgggacttgttcgagcaagccctggatggctgcccaccgaaatacgctaagacactctatctgctctatgcacagctggaagaagaatgggggttggctcgacatgccatggcagtgtacgaaagagccacccgggcggtggaaccagcacagcagtatgacatgtttaacatatacataaagcgggctgctgagatctacggggtgacacatacaaggggcatttaccaaaaggcgattgaagttctgtccgatgagcatgctagagaaatgtgtctgcgctttgccgatatggaatgtaagcttggcgagatcgacagggcgcgagccatttactcgttctgtagccagatttgcgatccccggactaccggagccttctggcaaacctggaaggatttcgaggtccgccacggcaacgaagataccatcaaagagatgcttcggatacgtagatccgtccaggccacatataatacccaggttaattttatggcttcacaaatgcttaaggtgtccggtagcgctaccggaacagtgtcagatcttgctcctggacaatctggaatggacgacatgaagctactggagcaacgggctgaacagctggccgctgaggctgagcgggatcagcctctcagagcacagtctaagatcttgtttgtccggagcgatgcatctagggaagaactagctgagctcgcacaacaggttaacccagaagagatccagctgggagaggacgaagatgaggacgagatggatcttgaaccaaatgaagttaggttggaacagcagtctgtgcccgccgcagttttcggcagtctgaaagaggactag

SEQ ID NO: 18098 - DNA, 2559 bp, synthetic construct
  misc_feature 1..2559: note = Description of Artificial Sequence: Synthetic coding sequence
  source 1..2559: mol_type = other DNA
atggccaggctttcgcggccagaacgcccggacttggtcttcgaagaagaagacctaccctacgaagaggaaatcatgcgaaatcagttctcagtgaagtgttggctccgttatatagaatttaaacagggtgcccctaaacctcgcttaaaccaactgtatgagcgagccctcaaacttctgccatgttcctacaagctatggtataggtacctgaaagccaggcgcgctcaagtgaagcacagatgtgtgacagatcctgcttacgaggacgtgaataattgtcatgagcgcgcgttcgtatttatgcacaaaatgcctcgactgtggctcgactactgccagttcttgatggatcagggtcgtgtcacgcatacccggcggaccttcgatagagcacttcgggccctaccgatcacccaacatagtaggatttggccactgtatctgaggtttttgcgctcacaccccctcccggaaaccgcagtacgaggataccgcagatttctgaagttgtctcccgagagcgccgaggaatacatcgaatatttgaagagttccgatagactagacgaagccgcccagagactggccacggttgtaaatgacgagcgcttcgtgtcaaaagctgggaagagtaactaccagttgtggcatgaactttgtgatttgatctctcagaaccccgataaggtccagagcctgaacgtcgacgctatcattagaggcggactgacaagatttacggatcagctgggcaagctgtggtgctcactggcggactattacatacgaagcggccacttcgagaaagcccgggacgtttacgaggaggccattcggacagttatgacagtgcgtgattttacacaggtgttcgactcctacgcccagtttgaggaatctatgatcgctgctaaaatggagaccgcgtccgagctggggcgcgaggaggaggacgacgttgacctcgagctgcggttggcgagatttgaacaattgatctcaaggcgcccactgttgctgaattccgtgctgttgcggcaaaatccccaccacgtacatgagtggcacaagagggtagctctgcaccaaggccgtcccagggaaattatcaatacgtacaccgaagccgtgcagacagtggacccgtttaaggctactggcaaaccacacacactgtgggtggcctttgctaagttctatgaagataatgggcaacttgatgatgcgcgggtcatactcgagaaggccacaaaagtaaattttaaacaggtggatgacctggcatccgtgtggtgccagtgcggtgagctggagttgcgacacgaaaattacgacgaggccctacggctgctgaggaaggccaccgcgctgccagccagacgtgcagaatatttcgatgggagtgaaccggtccagaatcgcgtctacaagagtctgaaagtctggagtatgctggccgacctggaagagtcattaggaacatttcagtcgacaaaagctgtctacgaccgaatcctcgacctccggatcgctaccccacagattgtgattaactacgcgatgtttctggaggaacacaaatactttgaggaatctttcaaggcatatgagcggggtatctccctatttaaatggcccaatgtgtcagatatatggtcaacttacctgacgaagtttattgcgcggtatggaggcagaaaactcgaacgggccagggatctcttcgagcaggccctcgacggttgtcccccaaaatacgcgaagacgctttacctgctatatgcccaactcgaagaggaatggggcctagcacgacatgcaatggctgtctacgagagagcaacccgggctgtagaaccagcccagcaatacgatatgtttaacatctacataaagagagcagcagaaatctacggggtgacacatacacgaggcatttaccagaaagccatcgaggtgcttagtgacgaacacgctagggaaatgtgtttaaggtttgccgatatggaatgtaaactgggggaaatcgatcgcgcccgcgccatttactccttctgcagccagatatgtgacccaagaactactggcgccttctggcaaacttggaaagatttcgaggtgagacacggcaacgaggacactattaaggaaatgttaagaatccggagaagcgtacaggctacatacaacacccaagtgaacttcatggcttcacaaatgttgaaagtgtcgggttcagcaacagggaccgtgtccgacctagcgccagggcaaagcgggatggacgatatgaagctgctggagcaacgtgccgagcagctagctgcagaagccgagagggaccaacctctccgtgcccagtctaaaatcctttttgtgcgatccgacgcctccagggaagagcttgccgaactggcccaacaagtgaacccggaggagattcagctgggggaggatgaggacgaagacgagatggatctggagcccaacgaggtcagattggagcagcagtcggttccagccgccgtgttcggttccttgaaggaggactag

SEQ ID NO: 18099 - DNA, 1902 bp, synthetic construct
  misc_feature 1..1902: note = Description of Artificial Sequence: Synthetic coding sequence
  source 1..1902: mol_type = other DNA
atgcctgaaattcggctgaggcacgtggttagttgctcgtcccaagattcaacgcattgcgcggagaacctgctaaaagctgatacataccggaaatggagggcagccaaagctggagagaagactattagtgttgtcctccagcttgagaaagaagaacagatccattctgtggatattggtaacgatggctccgcctttgtggaagtgctggtcgggagctcagccggcggtgctggtgagcaggattacgaagtcctcttagtgacttccagctttatgtctccatccgagagcaggagtggttctaatcccaacagagtaaggatgttcggccctgacaaactggtgagggctgctgcggagaaacggtgggaccgggtaaaaatcgtgtgttcccaaccctattctaaggacagccctttcggactaagttttgtcagattccattcaccgcccgataaagacgaggcagaggctcccagtcaaaaagtgaccgtcaccaaattgggtcagttcagagttaaagaggaggatgagtccgccaattctctgaggcctggagcgctattcttttctaggatcaacaaaacttctccagtcacagcgtcagatccagcaggccctagttacgcggccgcgacactgcaggcatcttctgccgcctcctcagcatctccagtttcaagagcaatcgggtctacatctaagccccaggagagccccaagggcaaaagaaagctcgatctcaaccaagaggagaaaaagacccccagcaagccgcctgcccagcttagtccctccgtgcctaagcgcccaaaactccccgctcctacacgcacccccgcaacggcccctgtacccgcgagggcccagggggctgtcacaggcaaacctcggggtgaggggactgagccacggcggccccgcgctgggcccgaggaactcgggaagattcttcagggagtggttgtagtactgtcaggcttccagaacccttttagatccgagctgcgagataaggcattagagcttggcgccaagtataggcctgactggacaagagacagcacccaccttatttgcgccttcgctaacactccaaaatactcacaggtcctggggcttggcgggaggatcgtgaggaaggaatgggttctggactgccatcgtatgcgacgacgtttaccttcacaaaggtacctgatggccggacccggtagcagcagtgaggaggatgaagcttcccatagtggtgggagcggcgacgaggcccctaagctgccacagaaacaaccccagaccaagacaaagccaacccaagcagccggtccaagttccccacagaaaccgcctacgcccgaggagacaaaggcagctagcccggtcttgcaggaggatattgatattgagggggtacagtcagagggccaggacaatggcgccgaggatagcggggatactgaggacgaactgcggcgggtggcagaacaaaaagaacaccgactgccccctggtcaggaagaaaacggagaggatccatatgcaggtagcactgatgagaacactgattcggaggaacatcaagagcctccggacttgccagtgccggaactgcccgacttcttccagggaaagcacttctttttatatggtgagttccccggcgacgagcgacgcaagctgattcgctacgtgactgcgtttaacggcgaattggaggacaatatgtcagatcgcgtgcagttcgtgatcactgcccaagaatgggacccctctttcgaggaggccctgatggataaccctagccttgcattcgttaggcctcggtggatctattcatgtaatgagaaacagaaacttctaccacatcaactatatggggtcgtcccccaggcctag

SEQ ID NO: 18100 - DNA, 1944 bp, synthetic construct
  misc_feature 1..1944: note = Description of Artificial Sequence: Synthetic coding sequence
  source 1..1944: mol_type = other DNA
agcacttcaagcttttggccgggcgaagcgcacgatgtagacatgcccgaaatcaggctcagacacgtggttagttgctccagtcaggacagtacccattgcgcagagaaccttctcaaagccgacacctataggaagtggagagccgcaaaggccggagaaaaaacgatctccgtcgtcttgcagcttgagaaggaggaacagatacacagcgtcgacatcgggaatgatgggagcgcctttgtggaggttctggtgggtagttctgctggaggtgccggggagcaggactatgaagtgcttcttgtgacctcaagtttcatgtctccttccgagtcaaggtcgggatcaaaccctaacagggtacggatgttcgggcctgacaaactggttcgtgcagccgcggaaaagagatgggacagggtgaaaattgtctgtagccagccatactctaaggatagtccatttggtttaagctttgttagatttcatagccctcctgacaaggacgaagctgaagccccatctcagaaagtaaccgtgacaaagctgggtcagtttagggttaaggaagaagatgagtctgctaacagtttgaggcccggggctctatttttctcacggatcaacaagacgtcgccagttacggcgtctgaccccgctggccctagctatgccgccgccaccttacaggcctctagcgcagccagctctgcctcaccggtgtctcgtgcaataggctctacctccaaaccccaggaatcccccaagggaaaacggaagcttgatctcaaccaagaggaaaagaagaccccgtctaagccaccggcccaattatccccatctgttcctaaacgtccaaaactgccagcgcccacccgtactcccgcaacagcccctgtgcctgcacgtgcccagggcgctgtcaccgggaagccgcgaggcgaggggacagaaccaagaaggcctcgcgcaggccccgaggaattggggaaaattctgcagggcgtggtggtcgtcctcagtggctttcagaacccctttagatccgaattacgtgataaagcacttgagctaggagcgaaataccgaccagactggaccagagatagcactcacctaatatgcgccttcgccaatactccaaaatactcccaggtgctcggcctaggcggcaggatagtccgaaaagaatgggtgcttgattgtcaccggatgagacggcgactcccaagtcaacgctacctgatggcgggcccaggtagctcatccgaggaagacgaagcttcacattccggggggagcggggacgaagccccaaaacttccacagaaacagccacaaactaaaaccaaacctacccaggctgccggccccagctccccgcagaagcctccgacccccgaggaaactaaggctgccagcccagtccttcaggaagatatcgacatagagggcgtgcagagtgaaggtcaggacaacggggcagaggactctggtgatacagaagacgagctgaggagggtggctgagcagaaagagcataggttaccacccgggcaagaagaaaatggcgaggatccatatgctggaagtacagatgaaaacaccgatagtgaagaacatcaggaacctccagatctccccgttcctgaactcccggatttttttcagggcaaacatttctttttgtacggcgagtttcctggcgacgagcgacgtaaactgattaggtatgtgacagcattcaatggggagttggaggacaacatgagtgaccgcgtccaattcgttatcacagcacaggagtgggatccttccttcgaggaggcgttgatggataatccctccctcgcgttcgtgaggccgcgttggatttacagctgtaacgaaaagcagaaactgctcccccaccagctctacggagtggtcccccaggcgtag

SEQ ID NO: 18101 - DNA, 1203 bp, synthetic construct
  misc_feature 1..1203: note = Description of Artificial Sequence: Synthetic coding sequence
  source 1..1203: mol_type = other DNA
atgccggagattcgcctacgccatgtcgttagttgctcatctcaggactccacccattgtgctgaaaacttacttaaggcagacacgtacaggaagtggagggctgcaaaggcaggagagaaaacaatctcagtcgtactgcagctcgagaaagaggagcagatccactcagtggatataggaaacgacggctcagctttcgtggaagtcctggtagggtcgtccgccggaggggccggggagcaggattatgaagtattattggtaacttcatcgtttatgagcccatcggagagccggagcggatctaatcccaaccgggtgagaatgttcggacctgacaagctcgtcagagcagccgccgaaaagcgatgggatagggttaaaatagtttgttcacaaccatactccaaagacagccccttcgggctgtccttcgtgcggtttcatagtcccccggataaggacgaagccgaagccccaagccaaaaggtgaccgtaaccaaattgggacaattccgcgtcaaggaagaagacgaaagcgccaattctctgcgtcctggtgctctttttttctcccggattaacaaaacttccccagttacggccagtgaccctgctggaccaagctacgctgctgccacactccaggcctcttctgcagcctcaagcgctagccccgtgtccagggctatcggctctacatctaaaccgcaggagtctcccaagggtaagaggaagctggacctcaatcaagaagagaaaaagactccctccaaacctcccgcgcagctgagtccctccgtgcccaagaggcccaagctgccagcccccactagaactccagctacagcacccgtccccgcccgtgcccaaggcgcggttactggaaagccgcgcggcgaggggactgaaccacgtcgaccccgggctgggcccgaagagctgggaaaaattctgcagggggttgttgttgtgctctcagggtttcagaatccttttcgaagcgaactcagggataaggctctggaactgggcgcaaagtatcggccagactggacgcgagactcaactcacctgatttgcgcatttgctaatacccctaaactcccgcaaaaggtgcccccacaacacacgccagaccagaatcaggcacactcaggctcctggacacagctaacacccgaggctcctaatccgtag

SEQ ID NO: 18102 - DNA, 1809 bp, synthetic construct
  misc_feature 1..1809: note = Description of Artificial Sequence: Synthetic coding sequence
  source 1..1809: mol_type = other DNA
atgcctgagattaggctccgccacgtggtgtcgtgttcgagccaagacagcctggagaaagaagaacagatccattcagtagacatcgggaacgatggtagcgctttcgtggaggtcctcgtcggaagcagtgcaggcggagcgggcgaacaggactatgaggtcttgctcgtgacttcgagctttatgtcaccctctgagtccaggtctggcagcaatccaaatagggtccggatgtttggaccagacaagctggtacgcgcagcggctgagaaacggtgggaccgagtaaagatcgtgtgttctcagccctatagtaaagattctcctttcggactgtccttcgtccgctttcattcgccacccgacaaagacgaggctgaggctcccagccagaaagtcacagtgaccaagcttggacagtttagagtgaaggaagaggacgagagcgccaattcactaagacctggcgctctgttctttagtcgaataaataagacttctcccgtaactgccagtgacccagccggaccatcttatgccgccgctacactgcaggccagttctgcagcctcttccgcatcccccgtatctcgcgctataggcagcactagtaagccccaagaaagtccgaaaggaaagcgcaagctcgacttaaatcaggaagaaaaaaagacaccctctaagcccccagcccaattatccccatctgtgcctaagcggcctaaattaccggctcccacgcgcacgccggcaaccgcacccgtccccgcacgcgctcagggtgcagtgactgggaagccccgtggcgagggaactgagccgaggcgcccgagagcaggccctgaagagctcggcaagatcctgcagggggtggtggtggtcctctctggttttcagaacccttttagaagtgagctgagggataaggcactggagttgggcgccaaatataggcccgactggactcgtgacagcacccacctgatctgcgcctttgccaacaccccaaagtacagtcaagttttgggtctcggcgggagaattgtgcggaaagagtgggtcctcgactgccataggatgcgacgtcgacttccgtcacagcgctatctaatggccggcccaggcagctccagcgaggaggacgaagcctcccacagcggcggcagcggggacgaggccccaaagttgccacagaagcagcctcaaaccaaaactaagcctactcaggccgccggccccagcagtccacagaagcctcctacgccagaagagacaaaggcagcttcccccgtccttcaggaggatatagacattgaaggcgttcagagcgagggccaggacaacggcgccgaagatagcggcgatacagaggatgagctccggagggtcgccgagcagaaagagcatcggctaccccccggccaggaagagaatggagaggatccttatgccggttcaactgacgaaaacactgatagtgaggaacaccaggagcctccggatctccctgttccggagctcccagacttcttccagggtaagcacttctttctatacggcgagtttcccggggacgagcgccgcaagctcataagatacgttacagctttcaacggcgagcttgaggacaacatgtccgaccgtgtccaatttgtaattactgcccaggagtgggacccctcttttgaggaagctctcatggataacccctcacttgcctttgtgcggcctcgctggatttattcgtgcaatgagaagcagaaactgctgccacatcagttgtacggtgtcgtcccacaggcatag

SEQ ID NO: 18103 - DNA, 843 bp, synthetic construct
  misc_feature 1..843: note = Description of Artificial Sequence: Synthetic coding sequence
  source 1..843: mol_type = other DNA
atgtgttctgcctttcatcgcgccgagagtgggaccgagcttctggctcgcctcgaggggcgaagctctctcaaagagatcgaacctaatctgtttgccgacgaggacagccccgtacacggcgatatcctcgagttccatgggcctgaaggcaccggcaaaactgaaatgctctaccatcttaccgcccgctgtatcctgcctaagagcgagggtggactcgaggtcgaggtcctgtttatcgacaccgactaccactttgacatgttacgattggtgactatcctggaacatcgcttgagtcagtcgagtgaggaaatcattaagtattgcctggggcgcttctttttagtctattgttcctcttcaactcacctgttgctgacactctattccctggaaagcatgttctgcagccacccgtctctctgtctcctgatcctcgactctttatcagccttctactggattgatagggtcaacggcggcgagagcgtgaacctccaggagagtacgttaagaaagtgctctcagtgtctcgagaaattggtgaatgactatcgtctggtgctatttgcaactacgcagactatcatgcagaaggcatctagttcctctgaggagccttcacacgctagtcgacgattgtgcgatgttgatatagattatcgaccatatttgtgcaaggcttggcagcagttggtgaagcacagaatgtttttctctaaacaggatgactcacaatccagcaatcagtttagtctggtgtcgaggtgtttgaaaagtaactccctcaagaaacattttttcataatcggcgagtcgggtgtagagttctgctag

SEQ ID NO: 18104 - DNA, 1041 bp, synthetic construct
  misc_feature 1..1041: note = Description of Artificial Sequence: Synthetic coding sequence
  source 1..1041: mol_type = other DNA
atggaccttgaccttctggatctaaacccacgaattatagctgccatcaagaaagcgaaattgaaaagcgtgaaggaggtgctccacttctctggaccagatctgaagcgccttaccaatctgtcctctccagaagtgtggcatctgcttcgcaccgcctcactgcacctgcgcggcagctctattttaaccgcccttcaactgcaccagcaaaaagaaagatttcctacccaacaccagaggctttctctgggctgtccggtcctggacgccctgctccgcggagggctgcctctggacggaatcaccgagctcgctggacgcagttcagccggcaagacccagctcgcgttgcagctctgccttgccgttcagtttcctcgccagcacggaggtctcgaggcaggcgctgtgtatatttgcactgaggacgcctttccccataagagactgcagcagctgatggcacaacagcctaggttgaggacagacgtgcccggcgagctactgcagaagctccgcttcggaagtcagatttttatcgagcacgttgctgacgtggatacactgcttgaatgcgtcaacaagaaggtccctgtgctgctgtcccggggaatggcacgactcgtggttattgattccgtggctgcccctttcaggtgtgaattcgatagtcaggcatccgcccctcgggcacggcacctacagagtttaggagcgacactgcgggagctgtcttccgctttccaatccccagttctctgtattaaccaggtgactgaggccatggaggaacagggagctgcccacggtcctttgggcttttgggacgaacgcgtgtcccccgcccttgggataacgtgggctaaccaactgctggtcaggctcttggccgaccggttgcgcgaagaagaggcggccctgggctgcccggccagaacgttacgcgtgctctctgcccctcatctgccaccaagctcgtgctcctatactattagcgcggaaggcgtgaggggtaccccggggacccagtcacactag

SEQ ID NO: 18105 - DNA, 1041 bp, synthetic construct
  misc_feature 1..1041: note = Description of Artificial Sequence: Synthetic coding sequence
  source 1..1041: mol_type = other DNA
atggacctcgatcttctggatttgaatccaaggatcatcgccgctataaagaaggccaaacttaaaagcgtaaaagaggttttgcacttttcaggtccggatctaaagaggctgaccaacttgtcgagtcctgaggtatggcacctccttagaacagcctctttacatctgcgggggtcatcaatcctgactgcactccaactgcatcagcagaaggagaggtttccaacccagcatcaaaggctctccctgggctgccctgtcttggacgccctcttgcgcggtggtctccctctcgatggcataacggagctggccgggcggtcgagcgccggcaaaacccagttagcactgcagttgtgtctggccgttcagttccccaggcagcacggggggctggaagcaggcgccgtatacatctgtaccgaggacgcgttccctcacaaacgcctgcagcaactgatggctcagcagcccagacttcggactgacgtacctggcgaattgctacaaaaacttaggttcggtagccaaatttttattgaacacgtggccgacgtggataccttactggaatgtgtcaataaaaaagtgcctgtgctcttgagcaggggaatggcaagactggtggtgatagactccgtggctgcccccttcagatgtgaattcgatagtcaggcttctgccccccgcgctcgacacttgcaatctttgggggctaccttacgggagctctcctcagctttccagagcccagttctgtgcataaaccaggttactgaggctatggaagagcagggcgctgcccacgggccgctggggttttgggacgagagggtcagtcctgcactaggcattacttgggccaatcagctccttgtacgcctactggcagataggctgagggaggaagaagctgcacttggctgtccagctcgcaccctcagagtgctgtcagcacctcacctgcctccatcgtcatgctcctacactatttcagctgagggggtaaggggcaccccgggcactcagtcgcattag

SEQ ID NO: 18106 - DNA, 1041 bp, synthetic construct
  misc_feature 1..1041: note = Description of Artificial Sequence: Synthetic coding sequence
  source 1..1041: mol_type = other DNA
atggatctggatctcctcgacctgaaccctaggattatcgccgctatcaaaaaagctaagctgaagtccgtcaaggaggttctccacttttctggcccagatctgaagcggctgacgaatctgtccagccccgaggtgtggcatttacttcgcactgcgtccctgcacctccgcggcagctcgattctcaccgcgttgcagctccaccagcaaaaggaaaggttccccactcaacaccaacggctgtctctgggctgtcccgtactggatgccctgcttcggggcgggctccccctcgacggaatcactgagctagcagggagaagctctgctggcaagacccaactggccctgcagctatgtctcgcggtgcagtttccaaggcaacatggggggttggaagctggagctgtctatatttgtacggaggacgcctttccccataaacgactccagcaactaatggcccaacagccgcgactgcgtaccgatgttccgggggaattactgcagaagctccgatttgggagccaaatatttatagagcatgtggccgacgttgacactctcctcgagtgtgttaacaagaaggttcccgttctgcttagcagaggaatggcgcggttggttgtcatcgactctgtcgccgctccttttagatgcgaattcgattcacaggcatcagcaccacgcgccagacacctacaaagccttggcgccaccctaagggaactctcctcagcattccagagccccgtgctgtgtatcaatcaggtgaccgaggccatggaggagcagggcgccgcccatgggccactgggattttgggacgaaagggtttcccccgcacttggtattacctgggcgaatcagctgctggtgcgcctgcttgcggaccggctacgcgaagaggaggccgccctgggctgtcctgcgagaacgttgcgggtactaagcgctcctcacctgccgcccagctcatgctcatataccatcagtgcagagggcgtccgtggcacaccaggaacacaaagccactag

SEQ ID NO: 18107 - DNA, 144 bp, synthetic construct
  misc_feature 1..144: note = Description of Artificial Sequence: Synthetic coding sequence
  source 1..144: mol_type = other DNA
atggacctcgatctcctagatctcaacccacggattatcgcagccatcaaaaaggctaagctaaaaagcgtgaaagaagtcctccatttttcagggccggacctcaagcgcctcacaaacttgtcctcccccgaagtctggtag

SEQ ID NO: 18108 - DNA, 138 bp, synthetic construct
  misc_feature 1..138: note = Description of Artificial Sequence: Synthetic coding sequence
  source 1..138: mol_type = other DNA
atggacctggacttgctagatctgaaccctagaattatcgctgccatcaagaaagctaagctgaagtcggtgaaagaagtgctccacttttctggccccgatctcaagagacttacaaacttgtcctctcctgagtag

SEQ ID NO: 18109 - DNA, 1041 bp, synthetic construct
  misc_feature 1..1041: note = Description of Artificial Sequence: Synthetic coding sequence
  source 1..1041: mol_type = other DNA
atggacctggacctgctcgatcttaacccaagaataatcgctgccatcaagaaggccaagctgaaaagcgtgaaagaggtgttgcatttctctggacctgaccttaagagattgaccaatctctcatctcctgaggtctggcacttgttacgtactgcctctctgcatttgagaggcagctccatcttaaccgcgctgcagttgcatcaacagaaggaacggtttcccacccagcaccagaggctctccctggggtgtcccgtacttgacgccctgctcaggggaggactcccactggacggcattactgagttggcaggtaggtcgagcgctggcaaaacccagcttgctcttcagctgtgtctggcggtgcaattcccacgccagcatggaggcctggaagccggcgccgtgtatatttgtaccgaggacgcgtttccccataaaaggttacagcaactgatggcacaacagcctcgtctgcgaaccgacgtgccgggagaactactacagaaacttcgcttcgggagtcaaatctttattgaacacgtggccgacgtggataccttattggaatgcgtgaacaagaaagtccctgtcctgctcagcaggggtatggcccgcctggtggtcatcgatagtgtggcagctccgttcaggtgtgagttcgactctcaggcatctgcacctcgtgcccggcatcttcaatctctgggggcaaccttgcgtgagctcagttcggcatttcagtcgcccgttctgtgcatcaaccaggtgaccgaggcaatggaagagcagggagccgctcacggacctctggggttttgggacgaaagagtgtcccctgccctgggaattacatgggctaatcagctgctggtcaggcttctggccgaccgactgagggaggaggaggccgctctgggctgcccagcgcgcaccctccgggtgttgtcggcacctcaccttcccccgtcttcttgctcctacacaattagcgccgagggagtgcggggcacccccggaacgcagtcacattag

SEQ ID NO: 18110 - DNA, 1041 bp, synthetic construct
  misc_feature 1..1041: note = Description of Artificial Sequence: Synthetic coding sequence
  source 1..1041: mol_type = other DNA
atggatttggacttgctggacctgaatccccgcatcatcgcagccatcaagaaggccaagctgaagtctgtaaaagaagtcctgcacttctcaggtcccgacctgaagcggctgactaatctctcgagtcccgaggtgtggcatctccttcgcacagcttctctgcaccttcgaggttcatccatcctaacagccctgcagctgcatcagcagaaggagcgttttcccacacagcaccagaggctgtccctgggctgcccagtgttagatgcgttgctgagaggcgggcttcccctggacgggattactgagttagctggacgatcctcagccgggaagacccaacttgccctgcaactgtgcctggcagtgcaattcccccggcagcacggaggtctagaggccggcgccgtttacatttgtacagaagatgcattcccccacaagagactacaacaattaatggcccaacagcccagattgaggacggacgtgccaggtgagctcctgcagaagctgcgcttcggatcacagatatttatagaacatgtcgcggacgtcgacacactgctggagtgtgttaataaaaaagtcccagtgcttctgtcacgtggtatggccagactggttgttattgactctgtggccgcaccatttcgttgtgagtttgactcgcaggccagcgccccccgtgcccgccatctgcagtccctgggggctaccctaagggaactctcctctgccttccagagccccgttctatgtatcaatcaggtaacagaggcgatggaagaacagggagcggcccacggccctcttggattctgggatgaacgggtgagtccagcgctcgggatcacttgggcaaaccaacttttggtacggctgctcgctgacagacttagagaggaagaggcagcgctgggctgtcccgcccgtactttgcgcgtcttgtccgccccacatctacctccatcctcctgtagttacactatctcggctgagggtgtaaggggtacccccgggacccagtcacattag

SEQ ID NO: 18111 - DNA, 309 bp, synthetic construct
  misc_feature 1..309: note = Description of Artificial Sequence: Synthetic coding sequence
  source 1..309: mol_type = other DNA
atggatttggacctccttgatctaaatccccgcattattgccgctataaaaaaggcgaaattgaagtcagtcaaggaggtacttcatttttctggacccgacctcaaaagacttacgaacctctcctctccagaggtgtggcatctcctgaggaccgcgtctctacacctgcgtgggagcagcatactgaccgccctgcaactgcaccagcagaaggagcgatttcctacacaacaccagaggcttagcttggggtgtcccgttcttgacgccttattgcgcgggggcttgccgctggacgggatctag

SEQ ID NO: 18112 - DNA, 186 bp, synthetic construct
  misc_feature 1..186: note = Description of Artificial Sequence: Synthetic coding sequence
  source 1..186: mol_type = other DNA
atggatctagacctgctggacttgaatccacggattatagctgccataaagaaggctaagctgaaatccgtgaaggaggtgctccatttttcagggccagacctgaagcgactaactaacctttcatcgcctgaggtgtggcacctcttacgaactgcttccctacacttaaggggatcttcttag

SEQ ID NO: 18113 - DNA, 339 bp, synthetic construct
  misc_feature 1..339: note = Description of Artificial Sequence: Synthetic coding sequence
  source 1..339: mol_type = other DNA
atggatctagaccttcttgaccttaacccaagaatcatagctgcaatcaagaaggccaaactgaagagtgtaaaagaagtgctccacttctctggcccagacctgaagaggctcacaaatctttctagccctgaggtatggcacttactgaggaccgcctccctgcacttgagggggagctccattttgactgcccttcagctgcaccagcagaaggaacgcttccccacccagcaccagcgactatcgctggggtgcccagtgcttgacgctctattgaggggaggcctcccactggacggtataacagagcttgcgggccgatcctcagctggatag

SEQ ID NO: 18114 - DNA, 1005 bp, synthetic construct
  misc_feature 1..1005: note = Description of Artificial Sequence: Synthetic coding sequence
  source 1..1005: mol_type = other DNA
atggagcggaagatctccagaatacacctcgttagcgaaccatcaattacccatttcttacaagtgtcctgggagaagaccctggagtctgggttcgtcatcacactcacagatgggcactctgcctggactggtacagtgagcgaatccgaaatcagtcaggaggctgatgacatggctatggaaaagggaaagtacgttggggagctgcgaaaagctctgctgagtggcgcaggtccagccgatgtgtacacgttcaatttttctaaggaaagctgctatttcttctttgaaaagaacttaaaggatgtttcttttcgccttggcagtttcaacctggagaaggttgagaaccccgctgaagtgatccgcgagctcatttgctactgccttgacacaatcgctgagaatcaagccaagaacgaacacctccagaaggagaatgaaaggttgctgagggactggaatgacgtacaggggagatttgaaaagtgcgtcagtgctaaggaagcgttggaaaccgatctgtacaaacgatttattttggtgcttaacgagaagaagaccaaaatccgaagcctccacaataaactcctgaacgccgcccaagaaagagaaaaagacattaagcaggagggagagaccgctatttgttctgagatgacggccgaccgggaccccgtgtacgacgaaagcacggacgaagagtcagagaatcagactgatctatccggcctcgctagcgccgcagtgagcaaggatgatagcatcatcagcagtctggacgtcaccgacatagccccaagtagaaaaagacgacaaaggatgcagcggaaccttggaaccgaacccaagatggctccccaagagaatcagctccaagagaaagagaaaccagactcgtcattacccgaaacatcaaagaaagagcatatatcagcagaaaacatgagccttgaaactctgagaaacagtagccctgaggatctgtttgatgagatttag

SEQ ID NO: 18115 - DNA, 1011 bp, synthetic construct
  misc_feature 1..1011: note = Description of Artificial Sequence: Synthetic coding sequence
  source 1..1011: mol_type = other DNA
atggagagaaagatcagcagaatacatctggtgtccgagccaagcattactcatttccttcaggtaagctgggagaaaacgctggaatcagggtttgtgattactctgaccgatggccacagcgcctggaccggcaccgtttcggagtccgagatctctcaggaagcggacgacatggcaatggagaaaggcaagtacgtcggtgagttgagaaaagccctcttgtctggagccggccccgccgatgtgtatacgtttaacttttcaaaagagtcgtgctattttttcttcgagaaaaacttgaaagatgtgtcctttaggcttgggtcatttaatctggagaaggtggagaatccagcagaagtgatacgcgaacttatctgttattgcctcgatactatcgccgagaaccaggccaagaacgaacacctacagaaagaaaatgagagattattgcgcgattggaacgacgtacagggacgatttgaaaaatgcgtcagtgcaaaagaggccttggaaaccgatctctacaaacgattcattctcgtcctgaatgagaagaagacaaagattaggtctttgcacaacaaactcctaaatgccgcacaggaacgcgaaaaagatatcaaacaggagggcgagaccgcaatctgttcagaaatgactgcggatcgggaccctgtgtatgatgagtcaactgacgaggaatcagaaaatcagacagatctaagcggactggccagtgccgcggtcagcaaagatgactctataattagctctttggatgttaccgatatcgctccatccagaaaacgtcgccagcggatgcaacgcaatctggggacagagcctaagatggcccctcaggagaatcaactccaagagaaggaaaattctaggcctgactcgagcctgccagagacctcaaagaaagaacacatctcggccgagaacatgagtctcgagactttaagaaacagtagtcctgaggatctgttcgacgaaatctag

SEQ ID NO: 18116 - DNA, 1005 bp, synthetic construct
  misc_feature 1..1005: note = Description of Artificial Sequence: Synthetic coding sequence
  source 1..1005: mol_type = other DNA
atggaacgcaagatcagccgaattcacctggttagcgagcctagcataacccacttcctgcaggtctcttgggagaagactctagaaagtgggttcgtgataacgctgaccgatggccatagcgcgtggacaggtacggtgtcagagagcgagatctcacaggaggccgacgatatggcgatggagaaaggcaaatatgtgggagagctgagaaaggccctgttgagtggagctggccctgccgatgtctacacattcaatttctccaaggagtcctgttacttcttctttgaaaagaacttgaaagacgtctcttttaggctgggctccttcaatctcgaaaaagtggagaacccagctgaggtcattagagaattaatctgttactgtctggacaccattgctgagaaccaggccaaaaatgagcatctgcagaaggagaatgaacgcctgctgagagattggaacgacgtgcagggaagatttgagaagtgcgtgagtgcgaaggaagccttggaaacagatctctacaaacgcttcatcctggttctgaatgagaagaagaccaagatccgaagtttgcataataagctcttgaacgccgctcaagagcgggagaaggacattaaacaggaaggggagacggccatatgttcggagatgaccgctgaccgcgatccagtgtacgacgagtcaacggatgaagagtctgagaatcagacagatctaagtggcttggcctccgcagctgtctccaaggatgattcgatcatttccagcctggatgtaacggatattgccccctcccggaagagacgacagcggatgcagaggaacctcggtacggaaccaaaaatggcccctcaagagaaccagttacaagaaaaagaaaagcccgacagcagtcttcccgagacctccaaaaaggaacatatttcagcagagaatatgtcgctggagacgcttagaaacagttcacccgaggatttattcgatgaaatatag

SEQ ID NO: 18117 - DNA, 1011 bp, synthetic construct
  misc_feature 1..1011: note = Description of Artificial Sequence: Synthetic coding sequence
  source 1..1011: mol_type = other DNA
atggaacggaaaattagtcgcatccacttagtgagtgagcccagcataactcactttttgcaggtgtcttgggagaaaacattagagtccggatttgtgattacactaaccgacgggcactccgcctggactgggacggtctcagagtcggagatcagtcaagaagccgacgacatggctatggagaaaggcaagtatgttggcgaattaagaaaggctctgctgagcggcgccggaccagccgacgtctatactttcaacttctccaaggaatcgtgctatttcttcttcgaaaagaatctcaaagacgtaagcttccggctgggcagtttcaacctcgagaaggtagagaaccccgctgaggtgattagggagctgatttgctactgtcttgataccattgcagagaatcaggcaaagaatgaacacctgcagaaagagaacgagcgacttcttagagactggaacgatgtgcagggccggttcgaaaagtgcgtctccgcaaaggaagcactggaaactgatctctacaagcgtttcattttggtgttaaacgaaaaaaaaactaaaattaggtcactgcacaacaagcttctcaatgctgcccaggaaagagagaaggatattaagcaggagggagaaacagcaatctgctccgaaatgaccgccgacagagaccctgtttacgatgaatctaccgacgaagagtccgagaatcagacagatttatctgggctggccagtgcggcagtgtcgaaggatgattctataatttctagcctggatgtgactgacattgctccgtcacggaagagacgacagcggatgcagcgtaacttggggaccgagcctaagatggccccacaagagaaccagctacaagagaaggagaactccagacccgacagctccctgccggaaaccagcaagaaggaacacatctcggcggaaaatatgtcacttgaaacattacgtaattcctccccggaggatttatttgatgaaatatag

SEQ ID NO: 18118 - DNA, 186 bp, synthetic construct
  misc_feature 1..186: note = Description of Artificial Sequence: Synthetic coding sequence
  source 1..186: mol_type = other DNA
atgcagcggaacttgggaacagagcccaagatggccccacaggagaatcagcttcaggagaaggaaaactcacggcccgactccagccttcccgagactagcaaaaaagaacacatttccgcagagaacatgagcctagagacgctgaggaatagctcgcctgaggacctgttcgtgtctatttag

SEQ ID NO: 18119 - DNA, 2199 bp, synthetic construct
  misc_feature 1..2199: note = Description of Artificial Sequence: Synthetic coding sequence
  source 1..2199: mol_type = other DNA
atggtgaggagcggcaataaagctgcagtggttctctgcatggatgtgggatttaccatgtccaactcaatccccggaattgagtcccctttcgagcaagccaagaaggtcatcactatgtttgtccaaagacaagttttcgccgagaataaagacgagattgccttagtgttgttcggaacagatggaactgataatccactctccggcggcgaccagtaccagaatatcacggttcatagacatcttatgctgccagactttgatctgctggaagatatcgagagcaagatacaaccgggctcccaacaagctgattttctggatgcactaatcgtgagcatggatgtgattcagcatgagaccatcggtaaaaaattcgagaagcgacacatcgagatttttacagacttaagctcgcggttctcaaagtctcagctggacattataattcacagcctcaaaaaatgcgatatcagcctccagttttttctacccttcagtctggggaaggaagacgggtcaggcgacaggggggatggtccattccgactgggaggacatggaccttccttccccttgaagggcatcacagagcagcagaaggagggcctggagatagtgaaaatggtcatgatctcactggagggcgaagacggactggatgaaatttattctttcagtgaatcattgaggaagctgtgcgtgtttaagaagattgaaagacactccatccattggccgtgtcgtttgacaattggcagtaatcttagtatcaggattgccgcatataagtctattttacaggaacgcgtgaaaaaaacttggactgttgtcgacgcgaagactctgaagaaagaggatatacagaaggaaacagtgtactgcttaaatgacgatgacgagacagaagtcctcaaagaagacatcatccagggatttcggtatggcagcgatattgttccttttagcaaggtggatgaggaacagatgaagtacaagagtgagggcaaatgcttctccgtcctcggcttctgcaagtctagccaagttcagagacgattctttatggggaaccaagtcctgaaagtcttcgccgccagagacgacgaggcagcagcagtggccctgtcttcactgattcatgccctggacgatcttgatatggtagcaatcgtacgctacgcttacgacaagagagcgaatcctcaggtgggggtggcatttccacacattaagcacaactacgagtgcctggtgtacgtccaactaccgtttatggaggacctgcgccagtacatgttctcctctctgaagaactccaaaaagtacgccccgactgaggcccagctgaacgcagtggatgcactgatcgacagtatgagtctggctaaaaaagacgagaagaccgatacacttgaagaccttttccccacaacaaaaatacctaacccgaggttccagcggctcttccagtgcttgcttcatcgagcgctgcacccaagggagccattaccgcctattcagcagcacatctggaatatgctaaaccctccagctgaggtcactaccaaatctcagattcccctgtcaaaaattaagaccctatttccattgattgaagccaaaaagaaggaccaagtgaccgcacaggagatttttcaagacaaccatgaagacgggcctacagccaagaaactaaaaacagagcaagggggtgcccacttctccgtatcgtcattggctgaagggtcggtgactagcgtgggcagcgttaatcccgctgagaactttcgggttctcgtcaagcaaaaaaaagcatccttcgaggaggcatccaatcagttgatcaatcacattgagcagttcttggatacaaatgagacaccatactttatgaaatccatagactgtattcgggcattccgcgaggaggccataaagtttagcgaagaacagcggttcaacaattttctgaaggccctgcaagaaaaggttgagattaagcagctgaatcatttctgggaaatcgtcgtccaggacggaattacactcatcaccaaggaagaggcctccggttcaagcgtgactgctgaggaggctaaaaagtttctggctccaaaggacaagcccagtggggatacagcagctgtctttgaagaagggggtgacgttgacgacctccttgacatgatctag

SEQ ID NO: 18120 - DNA, 2199 bp, synthetic construct
  misc_feature 1..2199: note = Description of Artificial Sequence: Synthetic coding sequence
  source 1..2199: mol_type = other DNA
atggttaggtctggcaataaagcagccgtggtcctgtgcatggacgttgggtttaccatgagtaactccattccaggtatcgagtccccctttgaacaggctaagaaggtgataactatgttcgtgcaaaggcaggtgtttgcagaaaataaggacgaaatcgcactcgtcctgttcggcacagatggtacagacaatcccctttctggcggagaccaataccagaacatcaccgtccacagacatttgatgctgcccgacttcgatcttcttgaggatatcgaaagtaagatccaacccgggagccagcaggcggactttctggatgcactaatcgtgagtatggatgtcatacagcacgagacaattggtaaaaagtttgaaaagaggcacatagagatcttcacagacttgagtagccgcttctcaaagtcacagctggatatcatcatccacagcctgaagaagtgcgatatcagcctacagttttttctccccttttctctcgggaaggaagacggctcgggggatcgcggagacgggccctttcggcttggcggtcatgggccctcttttcctctaaagggtattacagagcagcagaaagaaggcctggaaatcgtgaaaatggttatgatcagcctggagggtgaagacggcttggacgaaatctatagtttctccgagtccctgcggaaactgtgcgtattcaaaaagatagagcgacacagcattcactggccttgccggctgaccatcggaagcaatctctccattcggattgcagcctataagtctattttgcaggaacgcgtcaagaagacatggactgtggtagatgccaagacactgaagaaggaagacatccagaaggagacagtctactgcttgaacgatgacgacgaaacagaggtgctgaaggaagacatcattcagggatttaggtacggtagcgacatagtccctttctctaaagtagatgaagagcagatgaagtacaaaagtgagggcaagtgctttagtgtactcggattttgcaaatcgtctcaggtgcagcgccgattctttatggggaatcaggtgctcaaggtgttcgcagctagggacgacgaagccgccgccgtcgccctgtcatccctcatccacgcacttgacgacctcgatatggtagccatcgtgaggtatgcttacgacaaacgagctaaccctcaggtaggggtggcctttccgcacataaagcacaactatgagtgtctcgtttacgtccagttgccatttatggaagacctgaggcaatatatgttctccagcctgaagaattcaaagaaatatgctccaactgaggcccagcttaatgctgtagacgcgcttattgacagtatgtcactggccaagaaggacgagaaaacagatacgctcgaggacttattccctaccaccaagatcccgaacccaagatttcaacgactattccagtgtctgctccatagagcacttcaccctcgcgaaccacttcccccgatccagcaacacatctggaatatgctcaatccaccggcagaagtgacgaccaagtctcagatccccctcagcaagataaaaactttatttccactgattgaagccaaaaaaaaagaccaggtcacagcacaagaaatttttcaggacaatcacgaggacgggcctaccgctaagaaactgaagacagagcagggaggggcccactttagtgtgagcagcttagctgagggatctgtcactagcgtgggatctgtgaaccctgccgagaatttccgcgtgttggtgaagcagaagaaagcatcctttgaggaagccagcaaccagctgattaaccacatagaacagtttttggacacaaacgaaaccccatacttcatgaaatctatcgactgtattagagcattccgggaggaagccataaaattttccgaagagcagcggtttaataattttctgaaggctcttcaggaaaaggtagaaattaaacaactgaatcatttttgggagatcgtggtgcaggacggcattaccctgataaccaaagaagaagcgagtgggtctagtgtaacagcggaggaagctaagaagttcctggctcctaaagataaaccctccggggacacggccgccgtgttcgaagagggcggcgacgttgatgatcttctggatatgatatag

SEQ ID NO: 18121 - DNA, 1830 bp, synthetic construct
  misc_feature 1..1830: note = Description of Artificial Sequence: Synthetic coding sequence
  source 1..1830: mol_type = other DNA
atgtcaggttgggaatcctattataagactgaaggggatgaggaggccgaggaggaacaggaagagaatctggaagccagcggagactacaaatattcaggtcgagactcattaattttcctggtggacgcttctaaggccatgtttgagagccagtcagaggatgagctgactccctttgacatgtcaattcaatgtattcagtccgtgtacatcagtaaaataatttccagcgatagagacttgctggccgtggtcttttacggcactgaaaaggacaagaattctgtcaattttaagaacatttacgtgctgcaggagctcgacaacccgggagccaaaagaatcctggagctcgaccaattcaaaggacaacagggacaaaaacgctttcaggatatgatgggccatggcagtgactatagcctgtctgaagtgctgtgggtatgtgccaacctctttagtgatgtccagtttaaaatgtcccataaacggattatgctgttcacgaacgaggataacccccatgggaacgactcagctaaagcatcccgggctaggacaaaagccggcgacttacgtgacaccgggatcttccttgacctgatgcatctgaagaaacctggtgggtttgacatcagcttgttttatcgggacatcatatcaattgcagaggatgaagacctgcgagtacattttgaagaatctagcaagctggaggatctgttgaggaaggtacgggccaaagagacccgaaaaagagccctgtcacgactgaaactgaaactaaacaaagatatcgtcatcagtgtcggcatttacaaccttgtccagaaggctctaaaaccaccacctatcaaattgtaccgagagacgaatgagcccgtaaagactaaaacaaggactttcaatacatctacaggggggcttctcctccctagcgacaccaaaaggtcccagatttacggttcaaggcagattattctagagaaggaagaaactgaggaactgaaacgatttgacgaccctggactgatgctaatgggctttaagccccttgtcttgttgaaaaagcaccattaccttaggccatccctttttgtgtatcctgaggagtctctcgtcattggctccagcaccttattttctgcccttctaatcaagtgccttgaaaaggaagtggcagcactgtgtcgttacactccaagacgaaacatccccccctactttgttgccttagtgccgcaggaagaggagctagacgaccaaaaaatccaggtgactcccccgggcttccagctcgtttttctgccctttgctgatgacaagcggaaaatgccatttactgagaaaatcatggctacccctgaacaggtcggcaaaatgaaggcaatagtggagaagctgagatttacctaccggagcgacagctttgaaaatccagtgttgcagcaacacttcagaaaccttgaggctcttgccttagatctgatggagcctgagcaagctgtggacctcactctgcctaaagtagaagccatgaataagcgcctcgggtcattggttgacgagttcaaggagctggtgtatcccccagattataacccggagggtaaagtgacaaagcggaagcacgacaacgaaggctccggtagcaagcggccgaaggtcgaatatagcgaagaagagcttaagacccacataagcaagggtacgctggggaagtttaccgtgccgatgctgaaggaggcatgtagagcatacgggctgaaatccggactgaaaaaacaagaacttctggaggcactgacaaagcacttccaggattag

SEQ ID NO: 18122 - DNA, 1830 bp, synthetic construct
  misc_feature 1..1830: note = Description of Artificial Sequence: Synthetic coding sequence
  source 1..1830: mol_type = other DNA
atgtcagggtgggagtcctactataaaaccgagggagatgaagaggccgaagaagagcaggaggaaaacctggaggcatccggcgactataaatattccggccgtgacagcctgattttcctggttgacgcttccaaagcaatgttcgaatctcaatccgaagatgaactcaccccttttgatatgtccatccagtgtattcaaagcgtatacatcagcaaaatcatctcttcagatagagacctgctggctgtagtgttttacggaactgagaaggacaagaactctgtcaatttcaaaaatatctatgttttgcaggaactcgataacccaggtgctaaacggattctggaactggatcagttcaaaggacagcaggggcaaaagagatttcaggatatgatgggccacggtagtgattatagcctgagcgaagtcctgtgggtgtgtgctaatctattcagtgatgtgcagtttaagatgtctcacaagagaatcatgctttttaccaatgaggacaatcctcacggtaacgattccgcaaaagctagtagggccaggaccaaggctggcgacctccgtgatacaggcatctttctcgacctaatgcacctgaagaaaccaggtgggttcgatatctcactgttctatcgagacatcattagtatcgcagaggacgaggacctgagggtccacttcgaggaaagttctaagctcgaagatcttttgaggaaggtgcgcgccaaggagaccaggaagcgcgctctcagtcgtctgaagctcaagcttaacaaggacatcgtcatctcagttggcatctataacttggtgcagaaggccttgaaacctcctcctattaagttatatagagaaacgaatgagcccgtgaagaccaagacacggacattcaacacgtctaccgggggtctattgctcccgagcgacactaaaagaagtcagatttacgggagccggcagatcatcctggaaaaggaggagacagaggagctaaagcgctttgatgatcccggtcttatgctgatggggtttaagcctctggtcttactcaaaaaacatcactatcttagaccaagtctctttgtataccccgaggagtctctggttatcggctcctctacgctctttagcgcactcctaattaagtgtctcgagaaggaggttgcggctctttgcagatacacccctcgtagaaatattcctccgtacttcgtggccctcgtgccccaagaagaggagttagacgaccagaaaatccaggttacacctcctggattccagcttgtatttctccccttcgctgacgataagaggaagatgccctttacagagaagatcatggccacccccgagcaggtcggaaagatgaaagctatcgtggaaaagcttcgttttacatatcgttcagatagttttgaaaaccctgtgctacagcagcattttaggaatctggaagccctagctctcgacctgatggaacctgaacaggccgtagacctgaccctgccgaaagtagaggccatgaacaagcggctaggctccctggtggacgaatttaaggaattagtttacccacccgactacaacccggaaggaaaggttaccaaacggaaacacgacaacgagggcagcggcagtaagaggccaaaagtcgagtattccgaggaagaattgaagacccatatctccaagggtacccttggcaaatttaccgtgccaatgctcaaagaggcttgtcgagcttacggactgaaaagtggtctgaagaagcaggaactccttgaggcccttaccaaacactttcaggactag

SEQ ID NO: 18123 - DNA, 1674 bp, synthetic construct
  misc_feature 1..1674: note = Description of Artificial Sequence: Synthetic coding sequence
  source 1..1674: mol_type = other DNA
atgagtggctgggaatcttactacaaaactgagggcgacgaagaagcagaggaggaacaggaggaaaatcttgaagcaagtggtgactacaagtatagcggccgggacagcctcatctttcttgtcgatgctagtaaggctatgttcgaatcacaatccgaagatgagctgacccctttcgatatgtccattcaatgtattcagtcggtgtatatttccaaaatcataagttcggacagggacctgctggccgttgtcttttatggcactgagaaggacaaaaattccgtgaattttaaaaacatctacgtcttgcaagaacttgacaatccaggggctaaaaggattctggagctcgatcagttcaaggggcaacagggccaaaagaggtttcaggatatgatgggccatggaagcgactacagtcttagcgaagtgctgtgggtgtgcgccaatctgttttctgatgtgcagttcaaaatgtcccacaagagaataatgttgtttacgaatgaggataacccccatggtaacgattccgccaaagcttccagggctcggacaaaggcgggcgatctgcgggatactggcatctttttggacctcatgcacctcaagaaaccgggaggcttcgatatttcgctgttttaccgagacattatcagcatagctgaagatgaggaccttcgtgttcactttgaggaaagcagcaaactcgaggatctgcttagaaaggtacgcgccaaagagacccgcaaacgggccctcagccggctaaaactcaaactgaacaaggatatcgtcatctcagtgggcatttacaacctggtccaaaaggctctgaaacccccaccaatcaaactgtatagagaaacgaacgagccagttaagacaaagactcgaaccttcaacacctctacaggggggttgctactgccatccgatactaagcggtcacagatttacggaagtagacagatcatactggagaaggaagaaacagaagagttgaaacggtttgacgatccagggcttatgcttatgggattcaagcctttagtcctgcttaaaaagcaccactatctaaggccttcactattcgtctatcccgaggagagcctggtcattggatctagtaccttgttcagtgctcttctgatcaagtgccttgagaaagaagtggccgccctgtgtaggtatacccctagaagaaacattccgccgtacttcgtcgctttggtgccacaggaggaggaattggacgaccagaagatccaagttactccacctgggtttcagctggtttttctccccttcgctgacgacaagcgcaagatgccttttactgagaagatcatggccacaccagagcaggtggggaagatgaaggccatcgtggagaagctccgcttcacctatagaagtgactccttcgagaatcctgtcctgcagcaacacttcaggaatctagaagcgctggcgctggatttgatggagcctgaacaggccgtggacctgactctgccaaaggtagaggctatgaacaaaaggcttggttctctggttgacgaatttaaggagctcgtgtatcccccagactacaacccagagggaaaggtgactaagcgtaaacatgctaagggtcctaggtggagtatccaaaagaggagttag

SEQ ID NO: 18124 - DNA, 1707 bp, synthetic construct
  misc_feature 1..1707: note = Description of Artificial Sequence: Synthetic coding sequence
  source 1..1707: mol_type = other DNA
atgagcggatgggagagttactataagacagagggcgacgaagaagcggaggaggaacaagaggaaaacttagaagcatcaggcgattataagtactctgggagggactctcttatttttctggtcgacgccagtaaggctatgttcgaatctcaatctgaggacgaactaaccccatttgacatgagcatccaagagcttgataaccctggggccaagagaattctcgagctagaccagtttaaaggccagcagggacagaaacggttccaggatatgatgggtcacggaagcgattacagtctgtcagaggtgctctgggtctgcgccaacctcttctctgacgttcaatttaagatgagccacaagcgaatcatgttatttacaaacgaagacaacccccacggcaatgatagtgccaaggcaagccgtgcccgcacaaaagcaggagacttgcgagatacaggtatctttctggatcttatgcatctcaagaaacccgggggcttcgacatcagtttattctaccgggatatcatatcaatagccgaagatgaggatctgcgggtgcacttcgaagagtccagcaagcttgaggatttgctgcgtaaggtgcgagctaaggaaaccaggaaaagggcactgtcgagactgaagctgaagctcaacaaggatatcgtgattagtgttggtatttataaccttgtgcagaaagctctgaagccgccaccaattaagctgtaccgcgagactaatgagcctgttaagactaagactaggacctttaacaccagcacaggagggctcctcttgccatccgatacaaagagatcccagatctatggcagccggcagatcatcctagagaaggaagagaccgaggagctgaaaaggttcgacgacccagggttgatgctcatgggatttaagccgctggtgctgctcaagaaacaccactatctaaggccttcactcttcgtttaccccgaggaaagtctggtcatcggttcatcaacactgttttcagcactcctgataaagtgtctcgaaaaagaagtggccgccctctgcagatatactccccgtcggaatatccctccgtactttgtcgccctggttcctcaggaggaagagctagatgaccaaaagatacaggtcactcccccaggttttcagcttgtgtttctgccatttgcagacgataaaaggaaaatgccattcacagaaaagatcatggccaccccagagcaggtgggcaagatgaaagccattgtagaaaagctgaggttcacctaccgaagtgatagttttgaaaatccagtactccagcagcacttcaggaatttggaagcgcttgcacttgacctgatggagcccgaacaagctgtagacctcaccctgcccaaggtggaagctatgaacaaacggctcggatccctggtggatgagtttaaagaactagtctatccacccgattacaacccagaggggaaggtcactaagcggaaacacgacaatgagggctctgggtcaaagcgtccaaaggttgaatacagcgaagaggagcttaagacgcacatctccaagggtacgctgggtaaattcactgtgcccatgctgaaggaagcctgtcgcgcttacgggctgaagtctggtctcaagaaacaagaacttctcgaagccctcaccaagcatttccaggattag

SEQ ID NO: 18125 - DNA, 1680 bp, synthetic construct
  misc_feature 1..1680: note = Description of Artificial Sequence: Synthetic coding sequence
  source 1..1680: mol_type = other DNA
atgaagaaacaacgtaagaacaaaaagaggacactgaagcaggtgtgtatccagagcgtatacatcagcaaaattatttcttctgatcgagatctgctggctgttgtcttctatgggacggaaaaagacaagaatagcgtcaacttcaagaacatttatgtcctgcaggagctcgataaccctggagccaagcgaatcttggaactggaccagtttaaaggacagcagggccagaagcggttccaggacatgatgggacacggatcagattacagcttgtccgaggtcttatgggtgtgtgctaacttgttctcggatgtgcaatttaagatgagccacaagcggatcatgctattcactaacgaggacaacccccatgggaatgatagtgcaaaggcgtctagggctagaacgaaagccggcgatctgagagacactggcatcttcttggacttgatgcatctaaagaaacccgggggcttcgacattagcctgttttaccgagatataatttctattgccgaggacgaagaccttagggttcacttcgaagaaagttctaagctcgaggacctgctgcgaaaggtgagggctaaggagacccgtaagagggccctgtccaggcttaagctgaagctcaacaaagacattgtgatatccgtaggaatatataacctggtgcagaaagccctcaaacctccacccatcaagctatacagggagaccaacgaaccagttaagaccaaaacaagaaccttcaatacgtctacaggggggctattgttgccgtcagatactaagaggtcacagatctatggttctcgtcagatcattctggaaaaggaggagactgaagagctcaaaaggttcgatgatcctgggttaatgcttatgggctttaaaccgcttgtcctgctgaagaaacatcattatctgaggccatccttatttgtctatccggaggagagtttagtcatcgggagttctacactattctctgccttgcttattaagtgcctcgaaaaagaggtcgctgcactgtgccgatacactccgaggagaaatattcctccatactttgtcgccctcgtaccccaggaggaggagttggacgaccagaagattcaggtcacaccacctggtttccagttggtgtttctaccttttgccgacgacaagaggaagatgcctttcacagaaaagattatggccacccctgagcaggttgggaagatgaaggcgatagtggagaagttacgcttcacatacagaagtgactcctttgagaatcccgtgctccagcagcacttcaggaacctggaggcgctggctcttgatctgatggaacctgagcaagccgtggacttgaccctccccaaagttgaggccatgaacaaaagactagggtccctggttgacgaatttaaggagcttgtgtatccaccggattataatcccgagggcaaggtcactaaacgcaagcacgacaacgagggctctggctccaaaaggcccaaggtggagtatagcgaggaagagcttaagacccacatcagtaaagggactttaggaaaatttaccgttcctatgcttaaagaggcctgcagagcatacggccttaaatccgggctcaagaaacaggaactgctggaagccttgacaaaacactttcaggattag

SEQ ID NO: 18126 - DNA, 1830 bp, synthetic construct
  misc_feature 1..1830: note = Description of Artificial Sequence: Synthetic coding sequence
  source 1..1830: mol_type = other DNA
atgtcaggctgggagagttattacaaaactgaaggtgatgaggaagccgaagaggagcaagaggagaatctcgaagcctccggcgattataaatattcaggccgagactcgctcatattcctcgtggatgcaagcaaagccatgtttgaatcacaatctgaggacgagctgacccccttcgatatgagcatacagtgcattcagagcgtctatatcagcaagattatctcctctgatagggatctactggctgttgtcttctatggaacagagaaagataaaaacagcgttaatttcaagaacatctatgtcctgcaagagctcgacaacccaggcgctaaacggattctggagctggaccaatttaaagggcagcagggccagaagcgttttcaggacatgatgggacacggctcagactatagtctgagtgaggtcttgtgggtgtgcgccaaccttttcagcgatgttcagttcaagatgtcacataaaagaatcatgttgttcacgaacgaagacaacccgcacgggaatgactcagctaaggcatcccgggctaggacgaaggctggcgacctgagggacacagggatcttcctggatttgatgcaccttaaaaagcctggagggttcgacatctccttgttttatagggacatcatctctatcgctgaggacgaggacctgcgggtgcattttgaagagtcgagcaagctcgaagatctgctgagaaaagttagagcgaaggagacaagaaagagagctctcagccggcttaagctgaagttgaataaggacattgtcatctcggtgggcatctacaacctggtgcagaaggctctcaagcccccgcccattaagctgtatcgagagactaacgagcccgttaaaaccaaaacccgcactttcaacacctctactggaggtctcctcctcccgagtgacacaaaaaggagccagatttacggctcaagacaaattattctggaaaaggaagaaaccgaagaactgaaacgattcgatgatcctgggctgatgctgatgggtttcaaaccgctggtgttgttgaagaagcaccattacctgaggcctagtctgttcgtctatcccgaggaaagcttggtgataggcagctccacgctgtttagcgccctgttgatcaagtgtctggagaaagaagtcgcggcactttgccgctatacgccccggcgcaacatccccccttactttgtggccttggtgccacaggaggaagagctggatgaccaaaaaattcaggtgactccacccggctttcaactcgtgttcctcccctttgccgatgataagaggaaaatgccattcactgaaaagatcatggcaacccctgagcaggttggtaagatgaaggccatcgtggaaaagctccgcttcacatatcgatctgacagttttgaaaaccccgtactccaacagcacttccgcaatctcgaggcactagctctagaccttatggaacctgagcaggctgtagacctcacacttcctaaggtagaagctatgaataagaggttaggctcactcgtggacgaattcaaagagctggtgtatccccccgactacaatcccgagggcaaggttactaagcgcaaacatgataacgaagggagtggatccaagaggcctaaggtggagtactccgaagaagagctgaagactcacatctctaaaggcacacttggaaaattcaccgtccccatgctgaaagaggcctgccgggcttatgggttgaaaagtggcctgaagaagcaggagctactcgaagctctcactaaacatttccaggactag

SEQ ID NO: 18127 - DNA, 1431 bp, synthetic construct
  misc_feature 1..1431: note = Description of Artificial Sequence: Synthetic coding sequence
  source 1..1431: mol_type = other DNA
atgatgggtcacggatctgactactccctgtcggaggtcttgtgggtgtgtgcaaacctgtttagcgacgttcagttcaagatgtctcataaaaggattatgctgttcacaaatgaggataacccccacggcaacgacagtgccaaggcaagtagagcccggacaaaggcaggcgatctgcgagacaccggcattttccttgacctgatgcacctgaagaagcctggcgggttcgacatcagtctgttttacagagatattatctcaatcgctgaagacgaagacctcagagtgcattttgaggaatcctcaaaactggaagacctgttacgtaaagtccgagcaaaggagactaggaagcgcgcgctgtcaaggctcaagctaaagctcaacaaggatattgtgataagtgtgggcatatacaacctggtccagaaagcgttaaagcctcctccaatcaagttgtaccgcgagacaaatgagcccgtaaaaactaagacacgtacttttaacacctccaccggtgggctgctgctcccctctgatacaaaacggtctcagatctacggcagtcgacaaattattctggagaaagaggaaacagaggaactcaagcgcttcgacgacccaggattaatgctaatgggctttaaaccactggtgttattgaaaaaacatcactatctgcggccttctctgttcgtataccctgaagagtcgttagtgattgggtcatctacgctgttttccgctctcctgattaagtgtctggagaaggaggttgctgcactgtgtcgttacaccccccggaggaatatacccccatacttcgtggccctggtgccacaggaggaagagctggacgatcagaaaattcaggtgaccccccctggatttcaactggtgtttcttcccttcgccgacgataaacggaaaatgcccttcacagagaaaataatggccactccagagcaggtcggaaaaatgaaggcgattgtggaaaagctgagattcacatatagatccgactccttcgaaaaccccgttctgcagcagcattttcgcaatcttgaggcactggccctcgatctgatggagcccgagcaagctgtggacctgacactgcctaaggtggaggcaatgaacaaacgactgggcagtcttgtcgatgagtttaaggagctggtgtacccccctgattacaatcctgaaggcaaagttactaagcggaagcacgataatgagggcagtggtagcaagcgccctaaagtcgagtactccgaagaggaactaaagacccacatttctaagggcacattgggcaaatttacagtgcccatgctgaaagaggcctgtagggcatatgggctgaagtctgggctgaagaagcaggaactcctcgaggccctgaccaagcatttccaggattag

SEQ ID NO: 18128 - DNA, 741 bp, synthetic construct
  misc_feature 1..741: note = Description of Artificial Sequence: Synthetic coding sequence
  source 1..741: mol_type = other DNA
atggctggtgcccccgacgaacggcgcagggggccagcagctggcgagcaactgcagcaacagcatgtatcatgccaggtgtttcctgagagactggcccaggggaacccacagcaaggattcttctcctctttctttacttccaaccagaaatgccaactgaggctgctgaagacactggaaacaaacccctatgtgaagctactccttgacgctatgaagcattcaggctgcgccgttaacaaggacaggcacttctcatgtgaggactgcaacggaaatgtgtcagggggcttcgatgccagcacgagtcagatcgtgttgtgccagaataatattcataaccaggcccacatgaacagagtggtgacacacgaattgatccacgccttcgaccactgtcgcgcccatgtggattggtttactaatatcaggcacctggcatgctccgaagtgcgcgcagcgaacctgagcggagactgttctctggtgaatgaaattttcaggctccatttcgggctcaaacaacaccatcagacctgtgtgcgggatagggcaacattaagcatcctggccgtgaggaatatttctaaggaagtcgcgaagaaagccgtggacgaagtctttgagtcttgtttcaacgaccacgaaccattcgggagaatcccccacaataagacctatgctcgatatgcccaccgggattttgagaatagggacaggtactacagcaacatttag

SEQ ID NO: 18129 - DNA, 1515 bp, synthetic construct
  misc_feature 1..1515: note = Description of Artificial Sequence: Synthetic coding sequence
  source 1..1515: mol_type = other DNA
atggacccaggccagcagcccccaccacagccagcccctcagggacaagggcaaccacctagccagcccccccagggccagggacctcccagcggcccaggccaacccgccccagccgcgacacaggcagcccctcaggcaccacctgccggacaccagatcgttcatgtaagaggcgatagcgagactgatctcgaggctctctttaacgcggtgatgaaccctaaaacagctaatgttccccagaccgtgcctatgagactaaggaaactaccagacagcttttttaagcccccagagcccaagagccattccaggcaagctagcacagacgcaggcacagccggcgccttgacccctcaacatgtacgggcccactctagccctgccagcctgcagcttggggcagtgtcccctggcaccctcactccaaccggcgtcgtgagcggccctgctgccacccctacggcacagcacctgcgacaatccagctttgaaattccggacgacgttccattacccgcgggttgggagatggctaaaacatccagcgggcaaagatattttcttaaccatattgatcaaacaaccacctggcaggaccctagaaaggctatgctgtcgcagatgaacgttacagctcctactagccctccagtacagcaaaatatgatgaatagcgcatcgggcccactgcccgatggctgggagcaagctatgacacaggacggcgaaatttactacattaaccataaaaacaaaacaacatcttggctcgacccgagattagacccccggtttgctatgaaccagaggatctcacagtcagctccagtgaagcaacctccacctctggctccgcagtcaccccagggaggggtcatgggcggtagcaacagtaaccagcagcagcagatgagacttcagcagctgcagatggagaaggaaagactgaggttgaagcaacaggagctcctacggcaagctatgcggaatatcaatccatccactgccaactcaccaaagtgtcaagaattggccctgcgctcccagttaccaacgctggaacaggatggtgggacccaaaacccggtttcctcccctggaatgagtcaggaattacgcaccatgactacaaacagctcggacccattcctgaattctgggacatatcattcccgagacgagtctaccgatagcggcttgtctatgtccagctattccgtgcctcgcaccccagatgactttctgaacagtgtggacgaaatggatacaggtgacacaatcaatcagtccaccctgcccagtcagcaaaaccggtttccagattatctggaagctattccaggcacgaatgtagatttaggaactctggagggcgacggcatgaatatcgagggcgaggaactgatgccttccctacaggaagccctgagctcagatattttaaacgacatggagagtgtgttggcggcgactaagctggataaggaaagcttcctgacttggttgtag

SEQ ID NO: 18130 - DNA, 1365 bp, synthetic construct
  misc_feature 1..1365: note = Description of Artificial Sequence: Synthetic coding sequence
  source 1..1365: mol_type = other DNA
atggatcctggacaacagccccctcctcaacctgccccacaggggcaaggtcagcctccctctcagcctccgcaaggtcagggcccacctagtggccctggacaacctgccccagcagcgacccaagctgcaccacaggcacctcccgcggggcaccagattgtccatgtcagaggagacagcgaaactgacttggaagctctgtttaacgcggtgatgaatcccaaaaccgccaacgtgccccagaccgttcctatgcggctgcgtaagctgcccgacagtttcttcaaacctccggaacctaagtcgcacagtagacaggcttcaaccgacgccggcactgcaggtgcgctgacaccccagcacgtgcgggcacattcttcccccgcaagcctccaattaggcgccgtgtcccccgggacgctcacccctactggggtggtgagtggccccgcagcaactccaacggcacagcacctccgacagagctccttcgaaattccggacgacgtacctctcccagctgggtgggaaatggccaaaacttcctccggacagcggtactttttgaaccacatcgatcagactacaacatggcaggatccaaggaaggcaatgttgtctcagatgaatgtcacagcacctactagcccgccagtgcagcagaacatgatgaattcagccagcgctatgaaccagcggatctcacagtctgcaccagtgaaacagcccccccccctggcccctcagagcccccaggggggagtgatgggcgggtctaattcaaaccaacaacagcagatgcggctgcagcagctgcagatggaaaaagagaggctccgactgaagcagcaggaattactacggcaggtgcggccgcaggagctggcacttcggagccagctgcccactctcgagcaggacggaggcactcaaaatccagtgtcatctcccggcatgagccaagagctgcgcacgatgactaccaatagctctgatcccttcctaaactctggtacttatcattctcgcgacgagtcgacggattccgggctgtccatgagttcgtattccgtgccccgaacccctgacgactttctgaacagcgtcgatgaaatggacacaggggacacaataaatcagtccacccttccatcccagcagaaccgattccctgattacctcgaggccatcccgggcacaaatgtggacttggggacactggagggagatggcatgaatattgagggcgaggagctgatgccgtccttgcaggaagctctcagctcagatattctaaatgacatggaaagtgttctggctgcgaccaaattggataaagagagcttcttaacttggctctag

SEQ ID NO: 18131 - DNA, 1266 bp, synthetic construct
  misc_feature 1..1266: note = Description of Artificial Sequence: Synthetic coding sequence
  source 1..1266: mol_type = other DNA
atgcggttgagaaaactccccgactcattcttcaaacctccagaaccaaaatctcatagtcgccaggccagcaccgatgcaggcacggctggagcactcaccccccagcacgtgagggctcatagcagccctgcctctttgcagttaggtgccgtgtcacctggaacactgactccaactggcgttgttagcggcccggctgcaacacccacagcgcaacatctgaggcagtcaagtttcgagataccagacgatgttccgctcccagccggatgggagatggctaaaacttcatcaggacaacgctacttcctcaatcacatagaccagactaccacctggcaggatcccaggaaggctatgttatcgcaaatgaacgtgacggctccaacctcgcctcccgtgcagcagaatatgatgaattctgcttccggcccactgcccgatggatgggaacaggctatgacacaggatggggaaatctactacattaatcataaaaataaaaccacgtcctggctagatcccaggttggatcccagatttggcaaggcaatgaaccagaggatatcgcaatccgcgcccgtgaagcaaccacctcctctggcgccccagtcccctcaaggcggggtaatgggaggctctaacagtaaccagcagcagcagatgcgactgcaacagttgcagatggagaaggaacgcctgcgactgaagcaacaggaactactgcgtcaggccatgaggaatatcaatccctctactgccaactcgccgaaatgtcaggaactggcccttagatcacagcttccaacactggagcaagacggagggactcaaaatcctgtctcctctcccggcatgtcgcaagagctccgcaccatgaccaccaattcctcagacccttttctgaatagcggtacttaccacagcagagacgagagcaccgactccggcctgtccatgtctagctactccgttcctagaactcctgacgatttcctcaactctgtcgatgagatggacacaggtgacacaattaaccaaagcacactcccaagccaacaaaaccgctttccggactacctggaagccataccaggaactaacgtcgatctgggcactttggaaggagacgggatgaacatcgagggcgaagaattgatgccctcgctccaggaagcgctgtcttcagacattctcaatgacatggagtctgtcctagcggctaccaagctggacaaggagagcttcttaacttggctgtag

SEQ ID NO: 18132 - DNA, 981 bp, synthetic construct
  misc_feature 1..981: note = Description of Artificial Sequence: Synthetic coding sequence
  source 1..981: mol_type = other DNA
atggcaaaaacctcttccgggcagcggtattttcttaaccatatagaccagactacgacttggcaggaccctcggaaagccatgctgtcccagatgaatgtgacagcacccacttccccgcctgtgcagcagaatatgatgaattccgctagcggcccactaccagacggctgggagcaagctatgacgcaggacggcgagatctactatattaatcataagaacaagactacttcttggctcgatccccggcttgaccctaggttcgccatgaaccagcgcatatcccagagtgcacctgtgaagcagccacctcccctggctcctcagtcgccacagggtggagtgatgggaggaagcaactctaatcaacagcagcagatgagactgcaacagctacagatggagaaggagaggctgcgtctgaaacagcaggagctcctgcgacaagcaatgaggaatattaacccgtccacagcaaactctcccaagtgccaggagctggccttgcggagccagcttcccaccctcgagcaagacggcggcacccagaatccagtaagctcccccggaatgagccaggaactaagaaccatgaccactaacagcagtgatcctttccttaacagcggaacctatcatagtagagacgagagcaccgatagtggactgtctatgtccagctattccgtgcccaggactcctgacgacttccttaactcagtggatgaaatggacaccggcgacacaatcaaccagtctaccctgcctagtcagcaaaatcgtttcccagactacttggaggctatccccggcacaaatgtggacctggggaccctagagggggacggcatgaatatcgagggggaggagctcatgcctagccttcaggaagccctgagttcggacatacttaatgacatggagtccgttctggccgcaacaaaattggacaaagagtcctttctcacatggctgtag

SEQ ID NO: 18133 - DNA, 1467 bp, synthetic construct
  misc_feature 1..1467: note = Description of Artificial Sequence: Synthetic coding sequence
  source 1..1467: mol_type = other DNA
atggatcccgggcagcaaccaccacctcagcctgctcctcagggccaggggcagccccctagccagccgccacaggggcagggtcctccatccggacctgggcagccagcaccagcggctacacaagccgccccacaggctcccccagcggggcaccaaatcgtgcatgttcgtggtgacagtgaaacagacttggaggcccttttcaacgcggtgatgaatccaaaaactgccaacgtgccacaaaccgtccctatgcgcctcaggaagttgcccgatagcttctttaagccacctgagcccaaatcccacagtagacaagcaagcactgacgccggcacggccggcgccttaactccccagcatgtgcgggcacactccagtcctgcgagcctgcagctcggagccgtgtccccgggcaccctaacacctaccggcgttgtatctggccccgccgcaacgccgacggcacagcatttgagacagtcctccttcgaaattcctgatgatgtccctctgcctgccgggtgggagatggctaaaacatcaagcggccaacgctactttttaaaccatatagatcaaacaaccacatggcaggacccacgaaaagccatgctgagccagatgaatgtcacagctcccaccagtcccccagttcagcagaatatgatgaactccgccagcgggccccttcccgacggatgggagcaagcaatgacccaggatggggagatctattacataaaccacaagaataagaccacttcttggctcgatcctcgactcgacccccggttcgccatgaatcagaggataagtcagagcgcccccgtcaagcagccgccacccctagctccacagtccccccaggggggcgtcatgggtggttctaattcaaaccagcagcaacaaatgcgcttgcaacagttacagatggaaaaggagcgtttgcgcctcaagcagcaggaactgctgcggcaggagctggcccttaggagccagctacctacacttgaacaggatggtggaactcaaaatcccgttagctcacccgggatgtctcaggagctgcgtacgatgacaaccaactctagtgatccctttctgaattcagggacatatcactcgcgcgatgagtctacagactccggactgtcaatgtccagctacagcgtcccgcgaacgccagatgactttttgaacagtgtggatgagatggatacaggggacactattaatcagagtactctgcctagtcaacagaataggttccccgactacttagaggcaatacctggcactaacgtcgaccttggaactctggagggggatggtatgaatatcgagggcgaggaattaatgccatccctgcaggaggcgctgagcagtgatatacttaacgacatggagagcgtattggctgcgacaaagctcgataaggagtcatttctgacctggttatag

SEQ ID NO: 18134 - DNA, 1479 bp, synthetic construct
  misc_feature 1..1479: note = Description of Artificial Sequence: Synthetic coding sequence
  source 1..1479: mol_type = other DNA
atggatcctgggcagcagcctccgccccagcccgctccgcagggacagggccagccgcccagccagcccccccaagggcaggggcctccttcgggtcccggtcagcccgcacccgcagcaactcaagccgcccctcaggcacccccggctgggcatcagattgtgcacgtccgcggtgattctgagacagacctggaggctctgttcaacgccgtcatgaatcccaagactgccaatgtccctcagaccgtacccatgagactgcgtaagcttccagacagttttttcaaaccacctgagcccaagtctcatagtcggcaggcctcaacagatgccggcaccgcaggagcccttaccccgcagcacgtgcgcgctcacagctccccagcttctcttcagctaggggccgttagtccgggcactcttacacctactggtgtggtttcaggacccgcagccacgcctacagctcaacacctccgacaatcttctttcgagataccagatgacgtgccccttccagctggctgggagatggctaaaaccagttccggtcagagatacttcctgaatcatattgatcagaccaccacttggcaagaccctcgcaaagcaatgctatctcagatgaacgttacagcacccactagccctccagtgcagcagaacatgatgaactccgcaagcggccctctcccagacgggtgggagcaggcaatgactcaggatggagaaatctattacatcaatcacaaaaacaaaaccacttcctggctggacccacgcctcgatccccggttcgctatgaaccagcggatctctcaatcagcgccagtaaaacaacccccccctctggctcctcagtctccccagggcggtgtgatgggcggctcgaatagcaatcaacaacaacaaatgcgtctccagcaactgcagatggaaaaggaacgcttaaggcttaagcagcaagaactcctcagacaggtgcgaccccaggaactggccctgcgcagtcaactgccaacgctggagcaagatggggggactcagaatcccgtgtcgagtccaggtatgtctcaagaactcaggacaatgaccaccaacagcagtgaccctttcctgaacagtgggacttatcatagtcgcgatgaatccactgattcagggctctctatgagctcttatagcgtacctaggaccccggacgactttctcaattccgttgatgaaatggatacgggtgacacaataaaccaatcgacattacctagtcagcagaaccgctttccagattaccttgaagccattcccgggaccaacgtagacctgggcacccttgagggagacggaatgaacatcgagggcgaggagctgatgccgtccctgcaagaggctctctcctcagatatacttaacgatatggaatccgtactggccgccacaaagctggataaggagtcctttttgacctggttatag

SEQ ID NO: 18135 - DNA, 1353 bp, synthetic construct
  misc_feature 1..1353: note = Description of Artificial Sequence: Synthetic coding sequence
  source 1..1353: mol_type = other DNA
atggaccccggacagcaacctcccccacagcctgctcctcaaggccagggccaacctcccagccaaccacctcagggacagggccctccttccggccccggtcagcctgcccctgccgcaacccaagccgccccccaggccccacccgctggccatcagatcgtgcatgttcgaggcgactcagaaactgatctggaagctttatttaatgccgtcatgaaccctaaaacagccaatgtgcctcaaacggttcctatgcgccttaggaaactgcctgactcctttttcaaacccccggagccgaagtcacactcccggcaggccagcaccgatgccggcacagccggggctctaactccccaacacgtgcgcgcccacagttccccagcatccctacaactcggagctgtatcccccggcactcttactccaaccggtgtggtttccggccctgccgccactccaaccgctcaacacctgagacagagttcctttgaaatcccggatgatgtgcctctgcctgccggctgggagatggccaagacctccagcggccagagatatttcctgaaccacatcgaccagacaactacctggcaggacccaagaaaggccatgttatcgcagatgaacgtcactgctccaacttccccacctgtgcagcaaaatatgatgaatagcgcctctgccatgaatcagaggatatcacagtccgctcccgtgaaacagcctccacctctggctccacaatccccgcaagggggggttatgggtggtagcaattcaaatcagcaacagcagatgcgactgcagcagcttcagatggagaaggaaagactgcggctgaagcagcaagagctgctgcgccaggaattagcactgcgctcccagctgcccacactagagcaggacggggggactcagaaccccgtgagcagtcctggtatgtcgcaggaactgcggacgatgacgactaatagttcggacccttttctcaactctgggacataccacagcagggatgaaagtacggatagcggcctgagtatgtcatcatattcagtcccaagaacacccgacgactttctgaatagcgtcgatgagatggacaccggagacacaatcaaccagagcacccttccgtcccagcagaaccgattccctgactatctcgaagcgattcccggcacaaacgttgatctgggcaccctggagggcgacggaatgaacattgagggcgaagagctgatgccaagtctccaggaggcattgagcagcgatattttgaacgatatggaatcagtactggccgctacaaaactcgataaggagtctttccttacatggttgtag

SEQ ID NO: 18136 - DNA, 1860 bp, synthetic construct
  misc_feature 1..1860: note = Description of Artificial Sequence: Synthetic coding sequence
  source 1..1860: mol_type = other DNA
atggctaatgatatcgacgagctcatcggcattccattccctaaccactcatctgaggtgctgtgttcactaaacgagcaacgccacgatggactgctgtgtgacgtgcttctcgtggtgcaggaacaggaatacagaacccacaggtccgtgctcgccgcctgctctaaatatttcaagaaactttttacggctggcactctcgcgtcacagccatacgtgtacgagatcgattttgtgcagcccgaggctctcgcagctatcctcgaatttgcctacacatcaaccctgaccattacagccggaaatgttaaacacatccttaacgccgcccgcatgctggaaattcagtgtattgtaaatgtgtgcttggagattatggagccagggggagacggaggggaggaggatgataaggaggacgatgacgacgacgaggacgatgatgatgaagaagatgaagaagaagaagaagaggaagaggaagatgatgacgatgacactgaagactttgctgaccaggagaatctgcctgatcctcaggatatatcgtgccatcagtctccctcgaagactgaccacctcactgaaaaggcttactctgataccccccgggattttccagatagcttccaggccggaagtcctggccatttaggtgtcatacgagatttcagcatagagtccctcttaagggaaaatctctaccccaaagctaacataccggacaggaggccaagcctctcaccattcgctcctgatttttttccccatctgtggccaggcgacttcggggcgtttgctcagctgcccgaacagccaatggattcggggcccctcgaccttgttatcaagaaccgtaaaatcaaggaggaggaaaaggaggagcttcctccacctcccccccccccttttccgaacgatttcttcaaggacatgtttcctgacctgcccggaggccccctcgggccaataaaggccgaaaatgactatggcgcatatctgaattttttgagcgcaactcacctcggagggttgtttcctccctggcccctcgtcgaggaacgaaagttgaagccgaaagcgtcgcaacagtgccctatctgccacaaggtcattatgggcgcaggtaagctgcctcggcacatgcggacacacactggtgagaaaccctacatgtgtaccatctgcgaggtcagattcactcgacaggacaagcttaagattcacatgaggaaacacaccggggagagaccttacctgtgcatccactgtaacgctaaatttgtgcataactatgacctgaagaaccatatgcggatccacactggggtacgtccctaccaatgtgaattctgctacaagagcttcacaagatccgatcacctacaccgacatataaagcgacagagctgtcgaatggcccggccacgcagaggcaggaagccagctgcatggcgagctgctagtctgctttttggtcctggtggaccagcccccgacaaagcggcattcgtcatgccacccgcacttggtgaagtgggcggacacctaggtggcgcagccgtatgcctgccaggtcccagtccggcaaagcatttccttgcagcccctaaaggcgcactttctctccaggaactggaacggcagtttgaagagacgcagatgaagctgttcggccgcgcgcagctcgaagcagagagaaacgcgggtggtttgcttgcctttgcactggccgagaatgtggccgccgcccgcccttattttcccctccctgacccttgggcagctggcctagcaggattaccaggtctggccggactcaatcatgtggctagtatgagcgaggccaacaactag

SEQ ID NO: 18137 - DNA, 1860 bp, synthetic construct
  misc_feature 1..1860: note = Description of Artificial Sequence: Synthetic coding sequence
  source 1..1860: mol_type = other DNA
atggcgaacgatatcgacgagctgattggcattccttttccgaatcattcttcagaagttctctgctctctcaatgaacagaggcacgacggacttttgtgtgatgtactgctggtcgtgcaggaacaggaatacaggacccaccggtcggtactggctgcttgcagtaagtattttaagaagttattcacggccggtacacttgccagccagccgtatgtgtacgaaatcgactttgtacagcccgaggcacttgcagccatcctcgagttcgcctataccagtactttgaccattaccgcgggcaacgtgaagcacatccttaatgccgctagaatgctggagatccagtgcatcgtgaacgtgtgtctcgaaattatggaaccaggcggggatgggggggaagaggacgacaaagaggatgacgacgacgatgaggacgatgatgacgaggaggatgaagaggaggaagaggaggaagaggaggacgatgacgacgacacagaggattttgctgaccaggaaaatttgccagatccacaggacatctcttgtcatcagtctccctccaagactgaccacctcactgagaaggcctatagcgacacccctcgcgactttccagacagctttcaggctggcagccccgggcatctcggagtgattagggatttttcaattgagtccctgttgagagaaaacttgtaccccaaggctaacatacccgacaggagacctagcctctcgcccttcgcccccgatttctttccacacctgtggccaggagacttcggggcatttgcccagctgccagaacaacccatggactctgggcccttggacctagtgatcaagaatcgcaagatcaaagaagaggagaaagaagagttgccccctccacccccacctccttttcctaatgacttcttcaaagatatgtttcctgatctgcccgggggacctttaggtcccatcaaagcagagaatgactatggggcttatctgaattttctctccgctacacacctgggagggctctttccaccttggccattagtggaggaacgcaagcttaagcctaaagcctcccagcagtgcccaatttgtcataaggtgattatgggtgccggtaagctaccgaggcatatgagaacacacacgggagaaaagccatatatgtgtactatttgcgaagtcagattcacccggcaagacaaattaaaaatccacatgaggaaacacactggtgagaggccctatctgtgcatccattgtaatgcaaaattcgttcataactatgatctgaagaaccatatgaggatccacacgggggtgagaccttaccagtgcgaattctgttacaagtcgttcacgcgatctgaccacctccataggcatatcaaacgacaatcatgtcgtatggctagacctaggcgtgggcgaaagcccgccgcatggcgtgccgcctccttgctgttcggacctggcgggcccgctcccgataaggccgcttttgtgatgcctccggcgctgggcgaggtgggcggccacctgggcggggcagctgtttgtctgcctggcccttcaccagccaagcatttcctcgccgcacctaaaggggcactatcgctgcaggaactggagcggcagttcgaggaaactcagatgaagctctttgggagggctcagctggaggccgagagaaacgccggtggattgctggccttcgccctagccgaaaacgttgctgccgccagaccatattttcctctgccggatccctgggctgcaggcctcgccggcctgccgggcctcgcaggccttaaccacgtggcctccatgagcgaggctaacaactag

SEQ ID NO: 18138 - DNA, 78 bp, synthetic construct
  misc_feature 1..78: note = Description of Artificial Sequence: Synthetic coding sequence
  source 1..78: mol_type = other DNA
atggcgaatgacatagacgagctgatcgggatacctttcccgaaccacagctcggaggtcctatgttctctgaattag

SEQ ID NO: 18139 - DNA, 57 bp, synthetic construct
  misc_feature 1..57: note = Description of Artificial Sequence: Synthetic coding sequence
  source 1..57: mol_type = other DNA
atggccaatgacattgatgaactcatcggcattccttttccgaaccactcgagttag

SEQ ID NO: 18140 - DNA, 3375 bp, synthetic construct
  misc_feature 1..3375: note = Description of Artificial Sequence: Synthetic coding sequence
  source 1..3375: mol_type = other DNA
atggcagacgggccacggtgcaagcgccgcaaacaggcaaatccgcgacgtaataacgtgactaactacaatacagtcgtggagaccaactccgattcagatgatgaggacaaactccacatcgtcgaagaagagtctgtaaccgacgcagccgattgcgagggtgtccctgaggacgacttacctacagaccagaccgtattaccaggcaggtcatcagagagagagggcaacgccaaaaattgttgggaggacgatcggaaggaggggcaggaaattctgggacccgaggcccaggctgatgaggccggttgtaccgtaaaggacgatgagtgcgagagcgacgcggaaaacgaacagaatcatgaccctaacgtggaggaatttctgcaacagcaggatacagctgtcatattccctgaggctcctgaggaggatcaaaggcagggaacgcctgaggcgagcggccacgatgagaatggcacacctgacgccttctctcagcttctgacatgtccctactgtgatagaggttataagcggttcacctcactgaaagagcatatcaagtaccgtcacgaaaaaaacgaggataattttagctgttctctttgttcctacactttcgcatatagaactcaattggagcgccatatgaccagccataaaagcggtcgggatcaaaggcacgtcacgcagtccggttgcaatcgaaagtttaagtgcaccgagtgcggcaaggccttcaaatacaagcatcatctaaaggaacacctcaggatccactccggagagaagccgtacgagtgtccaaactgtaaaaagcgctttagccattccgggtcttactcatcccacatttcttcaaagaagtgcatctctctcatccctgtcaacggacggccacgcacggggcttaagacgtcccagtgctctagccctagccttagcgcctctccaggcagcccaacgaggccccaaatccggcaaaagatcgagaataaaccactccaggaacagctgagcgtaaaccagatcaaaaccgagcccgtcgattacgagttcaagccaattgtggtggctagcggcatcaactgctccactcccctgcagaacggagtcttcactggcggaggcccgcttcaggccacttcgtccccccagggcatggtacaggctgtggtgctgccaacagtgggcctggtgtcccctattagcataaatcttagtgacattcagaatgtgctgaaggtggcagtggatggcaacgttataaggcaggtcctcgagaataatcaagcgaacttggcgtcgaaggaacaagagaccataaacgcgtctcccatccagcagggaggacatagcgtgatttcagctatcagcctgcctcttgtcgaccaggatggcaccacaaaaatcatcattaactactctctcgagcaaccaagccagctgcaggtggtgccccaaaatttaaagaaagagaatccagtggccactaactcctgcaaaagtgaaaaattgccagaagatctgaccgtgaagagcgagaaagacaaaagctttgagggcggagtgaacgattcaacctgcctcctctgcgatgattgccccggcgacattaatgctttgcccgagttaaagcattacgatttgaaacagccaacgcagcccccccctttgcccgcggcggaagcagaaaaacctgagtcctccgtgagctccgctaccggcgatgggaatctgagcccatcccagcctccgctgaaaaatctattgtcgctgcttaaagcctactacgcactgaacgcacaaccgagcgctgaggagctgtcaaagatagccgacagtgtgaacctgcctttagatgttgtcaagaaatggttcgagaagatgcaggccggccagatctcagttcagtcttccgagccttcttcacccgaacccgggaaggtgaacatccccgccaaaaataacgaccagcctcaaagcgccaatgccaacgaaccacaggatagcacagtcaacctgcagtcccctctgaagatgactaatagtcctgtgttgcccgtgggaagcacaacaaacggttccagatcctctacaccctccccttctcccctgaatctaagtagctccagaaacacccagggctacttgtataccgccgagggtgcccaggaggagccccaggtggagcctcttgacctttccctgcctaagcagcagggagaacttctcgagaggtccaccatcaccagcgtgtaccagaattctgtgtactctgtgcaagaagaacccctcaacttatcctgtgcgaaaaaagagccacaaaaggattcatgcgttactgattccgaacccgtggtcaatgttattccaccaagtgcaaatccaatcaacatcgcaatcccaacggtcaccgcacagctgcctactatcgtggctatagcagaccagaatagcgtgccatgcctacgggccctagctgcaaacaaacagaccatcttgattccccaggtagcatatacctattctaccacggtcagccccgctgttcaagaaccgcctctcaaggtgattcagcctaatggtaatcaggatgagcggcaggacacatcctcagagggcgtttccaatgttgaggatcagaacgattctgatagcacccctcccaaaaagaaaatgcgcaagaccgagaacggaatgtatgcatgcgacctttgtgataagatattccagaagtcaagcagtctcctgagacataaatacgagcacaccggcaaaaggccacacgaatgcggcatctgtaagaaggctttcaagcacaagcaccatttgatcgagcacatgcggctgcattctggcgaaaaaccataccagtgcgacaaatgtgggaaaagattttctcattccgggagttacagtcagcacatgaaccacagatattcctattgtaagcgtgaagccgaggaaagagacagcacggaacaggaggaggcaggaccagagatcttgtccaatgaacacgtcggagccagggcctccccatctcagggcgattctgacgagagggagagcctgacccgtgaggaagatgaggattctgagaaagaggaggaagaagaagataaggagatggaggagctgcaggaagagaaggagtgcgaaaaaccccagggagatgaagaagaggaggaagaagaagaagaggttgaagaggaggaggtggaggaagccgagaacgagggggaagaggcgaagaccgagggcttgatgaaggacgaccgggccgagtcccaggcctcctccctggggcagaaagtgggtgagtcctccgaacaggtcagcgaggagaaaaccaatgaagcctag

SEQ ID NO: 18141 - DNA, 3378 bp, synthetic construct
  misc_feature 1..3378: note = Description of Artificial Sequence: Synthetic coding sequence
  source 1..3378: mol_type = other DNA
atggctgacggtccacgatgcaagcgcagaaagcaagctaaccctaggagaaataatgtcacaaactataataccgtggtggagaccaatagcgatagcgacgacgaggataaactccatattgtcgaagaggagagcgtgaccgatgcagcagactgcgagggagtgcccgaagatgatttgccaaccgaccaaactgtgttgcctgggcgatcatctgagcgggaaggtaacgccaaaaactgttgggaggatgacaccggtaaagaaggacaggagatcctaggtcctgaagctcaggcagatgaggctggctgtacggtgaaagacgacgagtgtgagtccgatgctgaaaacgagcaaaaccacgacccgaatgttgaggagttcctccagcagcaagacaccgccgtgatttttccagaggccccggaggaagatcaaagacagggcacacccgaggcgagtgggcatgacgagaatggaacacccgacgcttttagccagctcctaacctgtccatattgcgatcgtggctacaagaggtttactagccttaaggagcacattaagtacaggcacgagaaaaatgaggacaatttcagctgttctctttgctcctatacgttcgcctatcggactcaactcgaacgccacatgactagtcacaaatccggacgcgatcaacgccacgtgacccagtccggttgcaaccgaaaatttaaatgcacagagtgcggcaaagcctttaaatataagcaccacctgaaggaacacctgaggattcactcaggggaaaaaccctatgaatgtcccaattgcaagaaaagattttcccacagtgggtcttactctagccatatatcatccaagaagtgcatctcactgattcctgttaatggacgtccacggactggactgaagacatctcagtgcagctcaccatcactttccgcgagcccgggctccccgactcgcccacaaataagacaaaagatcgagaacaagccactccaggagcagctctccgtcaatcagataaaaacagaaccggtggactacgagttcaagccaatcgtcgtagcaagcgggatcaactgttctactcccttgcagaacggagtctttaccggcggtgggccattgcaggctacctcctctcctcaaggtatggtacaggctgtggtgctgcccacggtcggcctcgtctcccctatcagcataaacctgtccgatatacaaaacgtgctgaaggtggccgtggacgggaatgtgatcagacaggtcctggagaacaatcaggccaacttagccagcaaggagcaggaaactataaacgcctctcccatacaacaggggggacacagcgtcatatccgctatctctcttcctctggtggatcaggatgggaccacgaagatcattattaattactctcttgagcagccatctcaactgcaggtggtgccgcaaaacttgaaaaaagagaatcccgtcgctacaaacagctgtaagtccgagaaactaccagaagatttgactgtgaagtctgaaaaggacaaatctttcgagggcggagtcaatgactccacatgtctgctgtgtgatgactgtccaggcgacataaatgccttgcctgaactgaaacattacgacttgaaacagcccactcagccccctcccctccccgccgctgaagcggagaagccggaatcatctgtatcctccgcaactggtgatggaaatctcagcccgtcccaaccccccctcaaaaacctcctgagcctgttgaaggcctattacgctcttaacgcccagccaagcgcggaggagctttctaagattgccgattccgtgaatctgccattggatgtggtgaaaaagtggtttgaaaagatgcaggcagggcagatctctgtgcagagctctgaacccagctcccccgagccaggaaaggttaatatcccggccaaaaacaatgatcaaccccaatctgccaatgccaacgagcctcaagactcaaccgtcaacctgcagtcccccctgaaaatgaccaatagccctgtgttacctgttggatccacaaccaatggctccaggtcttctactccaagtccgtcaccactgaatttatcctcaagtaggaacactcagggatatctttacacggctgagggcgctcaggaggagccgcaagtggagccgctcgatctctcactcccgaaacaacaaggagagttgctcgagaggagtaccatcaccagcgtgtaccagaattccgtgtatagtgtgcaagaggagcccctgaatctgagctgtgcaaagaaggagccacagaaagattcatgcgtaactgattcagagccggtcgtcaatgtcatcccgccttccgccaacccaatcaacattgccatccccactgtcactgctcaactacccacaatcgtggccatcgccgatcagaacagtgtgccctgcttgcgcgcgctggccgccaataagcaaaccattttgatacctcaggttgcctacacctactctaccaccgtttctcccgcagtccaggagcctccattgaaggtaattcaaccgaatggcaatcaggatgaaaggcaagatacaagctctgaaggcgtctccaacgtcgaagatcaaaatgacagcgactccacacctccaaagaaaaagatgcgtaagacagaaaatggcatgtacgcttgcgacctgtgtgataaaatttttcagaaatccagtagcctcctccgccataagtacgaacacaccggaaagcggccccacgaatgcggcatctgtaagaaagcctttaagcacaagcaccacctcatagagcatatgcgcctccactcaggagagaagccttaccagtgcgacaaatgcgggaagcgcttcagccacagcggctcctattctcagcacatgaatcacagatattcatattgcaagagggaggcagaggagagggactcaaccgaacaagaagaggcaggccctgaaatcctctcaaatgaacacgtaggggcccgggcctcaccttctcagggcgattctgacgaacgtgagtccctcacccgggaggaggacgaggattctgagaaagaggaggaagaagaggataaagagatggaagaattgcaggaggagaaagaatgtgagaaacctcagggtgacgaagaagaggaggaggaagaagaggaggttgaggaggaggaagttgaggaagcagaaaatgagggtgaggaggcaaaaaccgaggggcttatgaaggatgacagggccgagtcccaggcaagctctctgggccagaaggtcggggaaagcagcgagcaggtgagcgaagagaagaccaacgaagcttag

SEQ ID NO: 18142 - DNA, 870 bp, synthetic construct
  misc_feature 1..870: note = Description of Artificial Sequence: Synthetic coding sequence
  source 1..870: mol_type = other DNA
atggcagacggtccacgttgtaagcggcgtaaacaagcaaatccaagacgtaataatgtgaccaactataacaccgtggtggagactaattccgactcagatgatgaggataaattgcatatcgtagaggaggagagcgtcacggacgctgccgattgcgaaggagtcccggaagatgacctcccgacggaccagaccgtgctacctggtaggtcctctgagcgcgaaggcaatgcgaagaattgttgggaggatgacacagggaaggaaggccaggagatcctcggtcctgaagcccaggctgacgaagctgggtgtactgttaaggatgacgagtgtgaatcagacgcagaaaatgagcagaaccatgatcccaatgttgaggaattcttgcagcagcaggacacagcggtgattttccccgaggcccctgaggaggatcagaggcagggaacaccagaagccagtggacacgacgaaaacggaaccccggacgccttttcacagctgttgacatgtccctattgtgaccgcggttacaaacggttcaccagtctaaaggagcacatcaagtatagacatgaaaagaacgaggataacttttcatgtagtctctgcagttacacctttgcctatcggacccagctcgagcgccatatgacaagtcacaaaagtgggagagatcagcgccatgtaacccaaagcggctgcaataggaaattcaagtgtactgaatgcgggaaagcttttaaatacaagcatcatcttaaagaacatttgcgcattcacagcggggaaaagccttacgagtgcccaaattgcaaaaagcgcttctcgcattctggcagttactctagtcacatcagttag

SEQ ID NO: 18143 - DNA, 2721 bp, synthetic construct
  misc_feature 1..2721: note = Description of Artificial Sequence: Synthetic coding sequence
  source 1..2721: mol_type = other DNA
atgaccagccacaagtctgggcgagaccagagacacgtcacccagagtggatgtaaccgcaaatttaagtgcacagagtgcgggaaggctttcaaatataagcaccatcttaaggagcaccttcggattcactctggcgaaaagccatatgagtgtcctaattgcaaaaaaaggttctctcatagtgggtcttatagttcccacatctccagtaaaaaatgcatttctctcataccagttaacgggagacccagaactgggcttaaaacgtcacaatgtagttctccctcactgagcgcttcccccgggagtcccacgcggcctcagataaggcagaagattgagaataaacctctccaggagcaacttagcgtaaatcagatcaaaacggaaccagtggattacgagtttaagcctattgtcgtggcatctggaataaattgcagtacgccccttcagaacggcgtgtttacaggaggcgggcctctgcaggccacctccagtccacaaggaatggttcaggctgtggtactgccaactgtggggctggtttctcctatctctataaacctctcagacatccagaatgtgctaaaagtggccgtggacggaaatgttatacgccaggtcctcgagaacaatcaagcgaacctcgccagtaaggagcaggagaccatcaatgctagccctattcagcagggtggccactctgtaatctcggctatttccctacccctggtcgaccaggatggcacaaccaagataattatcaactattctcttgaacagccctcccaactccaagtggtccctcagaatctcaaaaaagaaaaccctgtggctaccaattcctgtaagtctgaaaaactgcctgaagatctcaccgtcaagtctgaaaaggacaaatcctttgaagggggggtcaatgactccacctgtctgctctgtgatgattgccccggcgacataaacgcactgccagagctcaaacattatgacctgaaacaaccaacacagcccccacccctgccagctgctgaggccgagaagccagaatccagcgtcagttcagccaccggagacggcaacctgtcaccctcacagcctccactgaaaaacctgctgtcactgctaaaagcctattatgccctgaacgcccagccatcagcagaagaactgtcaaaaattgctgattcggtgaatttgcccctggacgtcgtcaagaagtggttcgagaagatgcaggctgggcaaatctctgtccagtctagcgagcccagcagtcccgaaccgggaaaagtcaacattccggctaaaaataatgaccagccccagtccgccaacgccaacgagccgcaggacagcacagtcaatctgcaatcaccccttaaaatgacaaacagccccgtcctgccggtggggtccactaccaacggaagtcggagctccaccccatctccatcgcctctcaacctatctagctctaggaacacgcagggctacttgtatacggcagagggagcccaggaggagccccaggtggaacctctggacctctcactgcccaaacagcagggggaattactggagcgcagtacaattacctctgtgtaccagaattctgtgtactccgtccaggaggaacctctgaatctaagctgtgcaaagaaggaaccacagaaagatagctgtgtgacggacagcgaaccagtggttaatgtcataccgccatctgctaaccctatcaacattgcaattcccacagtcactgctcaactgccaaccatcgttgccattgctgaccagaacagcgtgccatgtctgagggcactggccgccaataaacagacaattttaataccccaggtggcatatacatacagtacaaccgtgagccctgcggtccaggagcctccacttaaagttatccaaccaaatgggaatcaggacgaacggcaggacacaagttccgagggcgtgtccaatgtcgaggatcagaacgattccgatagtacgccccctaaaaaaaagatgcgcaagacagagaacgggatgtacgcatgtgatctgtgtgacaagatctttcagaaaagcagctcactgctccgccataagtatgagcacactggaaagagaccccacgaatgtgggatctgcaaaaaagcatttaagcataagcatcaccttattgaacacatgaggctgcattccggcgaaaaaccataccaatgcgataaatgcgggaagcgattcagccactcaggctcttactcccagcacatgaatcataggtactcatattgtaagagggaagcagaagagcgggactccacggaacaggaagaagccgggccagagatcctgtccaacgaacacgtgggggcgagagcttcaccttcccagggagattccgacgaacgagaaagcttgacccgagaggaagatgaggattcagagaaagaggaagaagaagaagataaagagatggaagaactgcaggaagagaaagagtgtgaaaagcctcagggcgatgaggaagaagaagaggaagaagaagaggtcgaggaggaggaggtggaagaggcagagaatgagggcgaggaggctaaaacagaaggcctaatgaaagacgaccgggctgagtcacaagcatctagtcttggccagaaagtgggcgaaagctccgagcaagtgtccgaagaaaaaaccaacgaggcgtag

SEQ ID NO: 18144 - DNA, 3327 bp, synthetic construct
  misc_feature 1..3327: note = Description of Artificial Sequence: Synthetic coding sequence
  source 1..3327: mol_type = other DNA
atgaaggtgaccaactacaataccgtggtggagacaaacagtgactccgatgatgaagacaaactgcacatagtggaggaagaatctgtgacagatgcagccgattgcgaaggcgtccccgaagacgacctgcccacagaccagaccgtcctgcctggccgatcttccgaaagagaaggcaacgcgaaaaattgctgggaagacgatactgggaaagaagggcaggagatcctcgggcctgaggcgcaggccgacgaggcgggctgtactgtgaaggatgatgagtgcgagagcgatgccgagaatgaacaaaatcatgatcccaatgtagaggaatttcttcaacagcaagataccgctgtcattttccccgaagctccggaagaggatcagagacaaggtacaccggaggcctcaggacacgacgagaatggcacccccgacgccttctctcagctgctgacttgtccttattgcgaccggggttacaagcgtttcacttccctgaaagagcacattaaatatagacacgagaagaacgaagacaacttttcatgcagtctgtgcagttatacatttgcctaccgtacccagcttgagagacacatgaccagccataaaagtggcagagaccaaagacatgtaacccagtctggctgtaaccggaagttcaagtgcacggagtgcggcaaggcttttaaatataagcatcacctgaaagagcatctgagaattcattccggggaaaagccctatgagtgtccaaattgcaagaaacgcttctcacatagtgggtcatattccagtcacattagctccaagaagtgtattagccttattccagtgaacggcagaccacgcacaggcttgaagaccagtcagtgctccagtcccagcctcagtgctagccccggctctcccacacgcccccagattaggcaaaaaatcgaaaacaagcctctacaggaacaactctccgtgaaccagatcaagacggaaccagtagactacgaattcaagcccatagtcgttgcttctggaattaactgcagcaccccactccagaacggtgtcttcacaggcgggggacccctccaggcgacttcatcgccacaaggtatggtccaggccgttgtgctgcctacagtggggctggtctctccgatttcaatcaacctcagtgacatccagaatgtcctgaaggtggccgttgacggaaatgtcattagacaagtgttagaaaataatcaggccaacttagcttctaaagaacaggaaactatcaacgcaagcccgattcagcaagggggacactccgtgatctctgctatctcattaccactagtggaccaggatgggactacaaagattattatcaactatagtttagaacagccaagccagctgcaggtggtcccccagaacctgaaaaaggaaaatcctgtcgcaaccaactcttgtaagagcgagaaattgcctgaggatttgaccgtgaagagcgaaaaagataaaagtttcgaggggggtgttaatgactccacgtgtctgctgtgcgatgattgtccaggcgatattaatgctctcccggagttgaagcactatgacttgaaacagcccacccagcctccccccctccctgctgctgaagctgaaaagccagagtccagtgtctcaagcgcgactggcgacgggaatctctctccgtcccagcctccgctgaagaacttgttgagcttgctaaaggcttattatgcactcaacgcccagcctagtgccgaagagctgagcaagattgccgactctgtgaacctccctctggatgttgtcaaaaaatggtttgaaaaaatgcaagctggccaaatttccgtacaaagttctgaaccttcttccccggaacctgggaaagttaacattcctgctaaaaataacgatcagccacaatcagctaatgcgaacgaaccgcaggattccactgtgaacttacagagcccccttaagatgacaaactcacctgtcctgccagtcggctccaccacaaatggctcccggtcttccacgccctcaccttcaccacttaatctctcttctagccgtaacactcagggttatctctacaccgcagagggcgcgcaggaggagcctcaggtcgagccactcgacctaagcctgccaaagcagcagggcgagttgcttgaaagatctacaattacaagtgtataccagaatagcgtatatagcgttcaggaggaaccgctcaatctttcatgcgctaaaaaagaacctcagaaggattcttgtgtaactgattcggagccagtggtcaacgtcatccctcctagcgccaaccctattaacatcgccattccaactgtgactgcccaactccccactatcgtggctattgcagaccagaacagcgtgccatgtttgagggccctggccgccaataaacagactattctgatcccccaggtggcctatacttactcaacaactgtcagtcccgccgttcaggagcctcctctgaaggtgatccagcctaacggcaaccaggatgaacggcaggacaccagttcagagggcgtgtcaaatgtggaagatcagaacgacagcgacagcacgcctcccaagaagaaaatgcggaaaaccgaaaacggcatgtacgcctgcgatctgtgcgacaaaatttttcagaagtctagttctttgctacggcacaaatacgaacataccggtaaacggcctcacgagtgcggtatttgtaagaaggcttttaagcacaagcatcacctaatcgagcacatgcgtttgcacagtggggagaaaccatatcagtgcgataagtgtggcaaacggttttcgcactccggctcctactcccaacatatgaaccatcgctattcgtattgtaagcgggaggccgaggaacgtgattccacagagcaggaagaagccggacccgagattctgtcgaacgagcacgtgggcgcccgagcctcgccctcacagggtgattcggatgagagggagtctttgacccgagaggaggacgaggactctgagaaggaagaggaagaggaagataaggagatggaagagttgcaggaggagaaggagtgtgagaagcctcaaggggacgaggaggaggaggaggaagaagaagaagtggaagaggaggaggtggaagaagcagagaacgagggcgaggaagccaagaccgagggactcatgaaagatgacagggcggagtctcaggccagctccctgggtcagaaagtgggggagagtagcgagcaagtttctgaggagaaaaccaatgaagcttag

SEQ ID NO: 18145 - DNA, 3180 bp, synthetic construct
  misc_feature 1..3180: note = Description of Artificial Sequence: Synthetic coding sequence
  source 1..3180: mol_type = other DNA
atggcagatggcccccggtgcaagagacgcaagcaagcgaaccccaggcgcaacaatgtcacaaattataacactgtggtggaaactaattccgactctgatgatgaagacaagctgcatattgtcgaagaggagtcggtgaccgatgccgcagattgcgagggagtgcctgaggacgatctgcctaccgatcagacagtgcttcctggacgttcctctgagcgtgagggaaacgcaaagaactgctgggaggacgatcgaaaggaggggcaggaaatcctcgggccagaggcccaggccgacgaggccggctgtaccgtgaaagatgatgagtgtgaatccgacgccgaaaacgagcagaatcatgacccaaacgtcgaggagtttctccaacagcaggatacagcagtgatttttccagaggctcccgaagaggatcagaggcaggggactccggaggcctcaggacatgacgagaacggcaccccggacgccttctcccagttgttaacttgtccctactgcgacagaggatacaagagatttaccagtctgaaagaacatatcaagtatagacacgagaagaatgaagacaatttctcttgtagtctgtgctcttacacctttgcttatagaacacagctagagcggcatatgacgagccacaagagcggcagagatcagcggcacgtcacacagagtggctgcaaccgaaagtttaagtgtactgaatgtggtaaagcattcaagtacaaacaccatctaaaagaacacctgaggattcatagcggggagaagccttatgagtgccctaactgtaaaaagagattctctcactctggttcctacagctcgcatatcagcagcaaaaagtgcattagcctgatccctgttaacggccgtcctaggacagggctgaaaacctctcagtgttctagcccatcactgtccgcatccccagggtcccctacgaggccgcaaatacgtcagaaaatcgagaacaaaccactgcaggagcaactatccgtgaatcagatcaagacggaacccgtagactacgaatttaagcccatcgtggtggctagtggaatcaattgcagcacaccgctgcaaaatggagtgttcaccggcgggggtccgcttcaagccacctctagcccccaggggatggttcaggcggtggttttgccaacagttggcttggtaagccctatcagcatcaatttgagcgatatccaaaatgtccttaaggtcgccgtcgatggtaacgtgattcgacaagtcttggaaaataatcaggcgaacttggcaagcaaggagcaggaaaccatcaacgccagcccaattcagcagggcggtcactccgttatctccgcgatctccctgccgctggtagatcaggatggaaccactaaaatcattatcaactattccctggagcaaccctcgcagctccaggtggtcccccagaacctcaagaaggaaaatccggttgctaccaattcttgcaaatccgagaagctacctgaagacctgaccgttaaatcggagaaagataagtcttttgaaggtggagttaatgactccacatgcctcttgtgtgatgactgcccaggggacattaacgctctaccagagcttaagcactatgatttaaagcagcccactcagccacctcctttgccagccgccgaggctgagaaacccgagtcatccgtgagtagtgctactggagatggcaatctctctcccagtcagcccccattgaagaacttgctgagtcttctgaaggcatactacgcgctgaatgcccaaccctcagctgaggaactgtctaaaatcgccgactccgtgaacctccccctcgacgttgtgaaaaaatggtttgaaaagatgcaggccgggcagatatcggtccagagctccgagccctcatctcccgaacctggcaaggtgaatataccggccaagaataacgaccagccccagtccgccaatgccaatgaaccgcaggacagtaccgtgaatctgcagtccccgcttaaaatgactaattcacccgtcttacccgtgggcagcacgacaaacggaagccggagttcaacaccatcccctagtccacttaatctctcaagttcacgaaacacacaggggtatctttacacagcagaaggcgcccaagaagagccacaggttgaaccactggacctgtctctgcctaagcagcagggagaactgttggaaagatcaaccatcacatcagtctatcagaattctgtttattctgtgcaggaggagcctctgaacctgagctgcgctaagaaagagcctcagaaagattcctgtgtgacagacagtgagcctgtggttaacgtgattcctccctcagcgaaccctatcaacatagccatcccaaccgtaacagctcagcttccgactattgtcgccatcgccgaccaaaacagtgtcccatgccttagggccctggcggcaaataagcagacaattttaatacctcaggtcgcttacacatactctacaactgtatcgccagctgtgcaggaaccacctcttaaggtcatccagcctaacggcaatcaggacgaacgccaggacacatcgagcgagggagtctcaaatgtggaagatcaaaacgacagcgactctaccccaccaaagaaaaaaatgcgcaaaactgaaaacgggatgtacgcctgtgacttgtgtgataaaatctttcaaaagagcagcagtttgctccggcataaatacgagcacaccgggaaacgaccacacgaatgcggtatctgtaagaaggcattcaaacacaaacaccatctcatcgagcacatgcggctgcatagcggggaaaagccctaccagtgcgataaatgtgggaagagattcagtcacagtggatcctacagtcagcacatgaaccatcggtattcttattgtaaacgggaggccgaggagagggactcaaccgagcaggaggaggcgggccccgaaatcctctcaaacgagcacgttggtgcccgcgcctctcctagccaaggagatagtgacgagagagaatcactcacacgcgaggaggacgaggatagcgaaaaagaagaggaggaggaagacaaggagatggaggaactccaagaagaaaagcataagaaaaagaaatag

SEQ ID NO: 18146 - DNA, 1932 bp, synthetic construct
  misc_feature 1..1932: note = Description of Artificial Sequence: Synthetic coding sequence
  source 1..1932: mol_type = other DNA
atggccgatggacctagatgcaagagacggaagcaggccaacccgcggcgcaataacggtactcccgatgcgttttctcagttgctgacctgtccgtactgcgatcgagggtacaaaagattcacatctctcaaggaacacatcaaatatcgccacgaaaagaacgaggacaacttttcatgcagcttgtgttcttataccttcgcttatcggacccaactcgaacgtcacatgacgtcacacaaaagcggaagggatcaaagacacgtcactcagtcggggtgtaatagaaagtttaaatgtaccgaatgcgggaaagcattcaagtataagcatcacctcaaagaacacctgcgcattcattcaggggaaaagccttacgagtgccctaattgcaaaaagaggttttctcactcaggaagctacagctctcacatttcctccaagaaatgcatctctcttatccctgtaaacggtaggccccgtaccggattgaaaacatcccaatgcagctctccctccctttctgcatccccgggctcaccaacacgaccccagatacgacagaagatcgagaataaaccacttcaggaacagctgtccgtcaaccagataaagactgagcccgtcgattatgaatttaaacccatcgtggttgcctccggcattaactgctctacaccattgcaaaatggcgtgttcaccggcggcggtcctctgcaggctacatcgagtcctcagggaatggtgcaggccgtcgttctaccaaccgtagggctggtgtctcccataagtatcaatctgagcgacatccagaatgttctgaaggtagcggtggatggcaacgtgatccgccaggtacttgagaataaccaggcgaatctggccagtaaggaacaagagaccattaacgctagccccatccaacagggtggccacagtgtgatttctgcaataagtctaccgctcgtggatcaggatgggacaactaagatcataatcaattatagcctggaacagcccagccaactgcaggtcgtaccccagaatcttaagaaggaaaatcccgtcgcaacaaacagctgtaaaagcgaaaagctgccggaggatctcaccgtgaagtcagaaaaggacaagtctttcgagggcggcgtgaatgatagtacttgcctgctgtgtgacgactgtcctggagacataaatgcactgccagagttgaaacattatgatctgaagcagcctacacagccgccaccgctgccggccgccgaggccgaaaaaccggagagctcagtctccagtgcaactggtgacggtaacctctctccatcccagcctccactgaagaacctgctgtccttactgaaggcttactatgcacttaacgcccaaccatcagctgaggagctgtctaagatcgccgactcagtgaatttgcctctcgacgtggtcaagaaatggttcgaaaagatgcaggctggacagatctcggtccaaagctccgagccaagctcccccgaacctggaaaagttaacataccggcaaaaaacaacgaccagcctcagagcgccaatgcaaacgagccacaggatagcaccgtgaacttgcagtctccactgaagatgacaaattcgccagtcctgcctgtggggtctacaacgaatggaagccgatcttctacaccaagcccatccccactgaatttgtcttcctctcggaatacccaggggtatttatatacagcagaaggggctcaggaagagcctcaggtcgagccccttgacttgtctttacccaaacagcagggcgaggaggctaagaccgagggtctgatgaaggacgaccgagccgagtcccaggcgagttccctcgggcaaaaagtgggcgaatctagcgagcaggtgtccgaggaaaaaacaaatgaagcatag

SEQ ID NO: 18147 - DNA, 3174 bp, synthetic construct
  misc_feature 1..3174: note = Description of Artificial Sequence: Synthetic coding sequence
  source 1..3174: mol_type = other DNA
atggccgatggccctcgctgcaagcgccgtaaacaggcaaacccaaggcgaaataacgggaaagaaggccaagaaatactgggcccagaagctcaggcagacgaagccggatgtacagtcaaggatgatgaatgtgaatctgacgctgagaacgaacaaaaccatgatcctaatgtggaggaattcttgcagcagcaggacaccgcagtaatattccccgaggccccggaagaagaccagcgccagggaaccccggaagccagtgggcacgacgagaatgggactcctgatgctttctcccaattgctgacatgtccatattgcgatcggggctacaaaaggttcactagcctcaaggagcatattaagtacaggcacgaaaaaaacgaagataatttcagctgtagcctatgttcctataccttcgcctatcgcactcagctggaaagacacatgacaagtcataaaagtgggagggaccagcggcacgtgacacagagcgggtgtaaccggaagttcaagtgcacggagtgcggaaaggccttcaaatacaaacaccaccttaaggaacatttgcggattcattcaggcgaaaagccatatgaatgcccgaactgcaagaaaagattttcacactctggatcgtactctagtcatatctccagcaagaaatgcatttcactgatccccgttaacggaagaccccgaacaggactgaaaacatcacagtgttccagcccctccctgtcagcgagcccaggaagccctacccgccctcagattcgacagaagatcgaaaacaaacccctgcaagagcaactatcagtaaatcaaatcaagaccgaaccagttgattatgagtttaaacccatcgtggtcgcctccgggataaattgcagcaccccgctccagaacggggtgttcaccggaggtggacctttgcaggctacaagcagtccccaagggatggtccaggccgtggtcttgcctaccgtcggcttagtgagccctattagcatcaatttgtccgatatacaaaacgtcctgaaagtcgctgttgacgggaatgtgatacgtcaggttctggagaataaccaggctaatttagcttccaaagaacaggaaacaataaacgcgagtccaatccaacaggggggtcatagtgtgatatccgccatctcactgccattggttgaccaggacggcaccactaagatcataattaactattctttggagcagcccagtcaactacaggttgtcccccagaacttaaagaaagaaaatccagtcgctaccaactcttgcaaaagcgagaaactgcccgaggacttaacagtgaaatccgagaaagacaagagttttgaagggggcgttaacgactctacatgcctcctctgcgacgactgtcccggagatataaacgcactccccgagctgaaacattatgaccttaagcagcccactcaacctccccctttaccagcagctgaggccgagaagcccgagtcttctgtatcaagcgccactggggacgggaatctgtccccttctcagccgccgcttaaaaacctcctgagcctgctcaaagcttactacgccctgaacgcccagccctctgcagaggagttgtctaagattgctgattcagtgaacctccctctggatgttgtgaaaaagtggtttgagaagatgcaagccggccagatcagcgttcaatctagtgagccaagctcgcctgaacctggcaaggtgaacattccagcaaagaataacgaccaaccccagtctgctaacgctaatgagccccaggacagcaccgtgaacttgcagtcgcccctgaagatgacgaatagtcccgtgttgcccgtaggctcaaccactaacggatctcgctcatctaccccttcccctagcccactgaacctttcaagctctaggaacactcaagggtatctgtataccgcggaaggagctcaggaggagcctcaggtggaaccccttgacctgagtctgcctaagcagcagggcgagttgcttgagagaagtactattacttcagtgtaccaaaacagtgtgtattctgttcaggaggagccgttgaatctatcctgcgccaagaaagagcctcaaaaggatagctgcgttacagatagtgagcccgtcgttaacgtgatcccccccagcgctaatccaatcaatatcgcgataccgaccgtcactgctcagctgcctactatcgtggcgatcgccgatcagaattccgtgccatgtctccgagctctggcggcaaacaagcaaacgatcttgatcccccaggtagcttatacttactctaccaccgtgtctcctgccgtccaggagcccccgctgaaggttatccagcctaatggaaatcaagacgagaggcaagataccagctccgaaggcgtctccaacgtggaggaccagaatgatagcgattctacaccccccaagaagaaaatgcgcaaaactgaaaacggcatgtacgcttgtgatttgtgcgacaagatctttcagaagagttcctccctgttaagacacaaatacgagcacacagggaaaaggcctcacgagtgcggtatctgcaagaaggccttcaaacacaagcatcaccttatcgagcacatgcggcttcacagcggagaaaaaccctatcaatgcgataagtgcggcaaacgtttcagtcactcaggtagctatagccagcatatgaaccataggtattcttactgtaaaagggaggcagaggagcgagattcaacagaacaggaagaggcaggtcccgagatcctctcaaatgaacatgtaggcgcccgagcctctcctagccagggcgattccgacgagagggagagcctgactcgcgaggaagacgaggactctgaaaaggaggaggaagaagaagataaagaaatggaggagctacaggaagagaaggagtgtgagaaaccacaaggcgatgaggaggaggaggaggaagaggaagaggttgaggaggaggaggtggaagaggcagagaatgaaggagaagaggcaaaaactgagggcctgatgaaggacgatagggccgagagccaggcatctagtttgggccagaaagtgggtgaatcaagcgaacaggtctccgaggagaagaccaacgaagcctag

SEQ ID NO: 18148 - DNA, 3048 bp, synthetic construct
  misc_feature 1..3048: note = Description of Artificial Sequence: Synthetic coding sequence
  source 1..3048: mol_type = other DNA
atgatgaacgccagccaaatgcagaagatgtccaagactatgattttaatgttgaaaagcttctataataacaaaacactactgtcattctttctgcgccatttgaagcgcactcgtggaagggcacaccagaagccagtggtcatgatgaaaatggaacaccaaatgcactttcacaattacagccctgtccacatcgtaatcggctacaaacggtttacaagcctaaaagagcatattaagtatcgccacgaaaagaatgaggacaattttagctgctccctctgcagctacacttttgcctatcggacgcaattggagcgtcatatgaccagtcacaagagtggccgcgaccagagacatgtgactcagtccgggtgcaataggaaattcaagtgtacagaatgtggaaaagcatttaaatataaacatcatcttaaagaacatctccgcatccactctggtgaaaagccctatgaatgtccaaactgcaagaaacgtttctcgcactccgggtcttattcttctcacatctcttcgaagaagtgtataagccttatacccgtcaacgggagaccacgaactggactcaaaacaagccaatgctcttcgccctctctcagcgcttcccccgggtctcccaccaggcctcagatcagacaaaagatcgaaaacaagccactgcaggagcagcttagtgtgaaccagattaagaccgagcctgtggattacgaatttaaacccatagtggtagcttccggcatcaactgtagtactccactgcagaacggggtgttcaccggcggaggccccctccaggcgactagctcaccccaagggatggtgcaggcggtagtgctccctaccgttggactggtgagccctatctctatcaacttgtctgatatccagaatgtgctgaaggtggcggtggatgggaatgtcatcaggcaggtgctagagaataaccaggcaaatcttgccagtaaagaacaggagaccatcaacgcaagccctattcagcaaggggggcactctgtcatcagcgccatcagcctgcctctggtagatcaggacggcacaacgaagatcattatcaactattccctggagcagccatcacagctgcaagtcgtgccccaaaatttgaagaaggagaatccagtggccaccaactcgtgcaagtctgagaagcttcctgaagatttgacagtgaaaagcgaaaaagacaagtcattcgaaggcggagtcaatgacagcacgtgtctgctgtgcgatgattgtcccggagacataaatgcacttccggagctcaaacactacgatctgaagcagcccacacagcctcccccactgcctgctgcggaagcggagaagcccgagagcagcgtgagctcggctacaggagatgggaacttgagccctagtcaacctcccctgaaaaatctattgtctctgctgaaagcatactatgcactcaatgcgcagccctctgcagaagagttgtcaaagatcgcagactctgtaaacctccccctagatgtcgtgaagaagtggtttgaaaagatgcaggcaggccagattagcgtgcaatccagcgaaccctccagtccagaaccggggaaagtgaatattccagccaagaataatgatcagccccagagcgccaacgctaacgagccccaagatagcacagttaatctccaaagcccgctgaaaatgacaaattcaccagtgctccctgtgggttctacaaccaatggttctaggtctagcacacccagtccctcgcccctgaatctgagctcatcgcggaatacccagggatacctctacaccgccgagggcgcccaggaggagccacaggtcgaacctctagacttgtcgctccccaagcaacaaggagagcttcttgagaggagcactattacaagcgtgtaccaaaactccgtgtactccgtccaagaagagcccttgaacctatcctgtgccaagaaagagccgcagaaagactcttgcgtcacagattccgaacccgttgtgaatgtgatcccccccagcgcaaacccaatcaacattgcgatccctaccgtcaccgcccagttacctaccattgtggcaattgctgatcaaaactctgtgccttgcctgagggccttggcggccaacaagcagactattttgatacctcaagtggcttacacttacagtactactgtctcgcctgctgttcaggaaccaccattaaaagttatccagcctaacgggaaccaagacgaacggcaagacacatcgtccgaaggtgtctcgaacgtggaagaccagaacgacagtgatagcacccctcctaagaagaaaatgagaaagacagaaaatggcatgtacgcctgcgatctgtgtgataagatttttcaaaagagctcatcattattacgccacaaatatgagcacaccgggaagagaccccatgagtgcgggatatgcaagaaggccttcaagcataagcatcatctgatagagcacatgcgtcttcacagcggagagaagccctatcagtgtgataaatgcgggaagcgatttagtcacagtggcagctactcccagcacatgaatcatcggtatagttattgcaagcgcgaagcggaagagcgagactcaaccgaacaggaggaagctggtcccgagatcctctcaaatgaacacgtaggagccagggcctcccctagccagggcgacagcgacgagcgcgaatccctgacccgcgaggaggacgaagactctgagaaagaagaagaggaggaggacaaggagatggaagagctgcaggaagagaaagagtgcgaaaagccccaaggggatgaggaagaggaggaggaagaggaggaggtcgaggaggaggaggtcgaggaggccgagaacgagggcgaagaagccaagaccgaaggattaatgaaagacgacagggctgagtcccaggcatcctctctgggacagaaggttggcgagtccagtgagcaggtttccgaggagaaaacaaacgaggcttag

SEQ ID NO: 18149 - DNA, 3360 bp, synthetic construct
  misc_feature 1..3360: note = Description of Artificial Sequence: Synthetic coding sequence
  source 1..3360: mol_type = other DNA
atggcagacggccctaggtgcaaacgccggaaacaggccaatcctcgtcgtaataatgtgacaaattataatactgtggtggaaaccaattctgactctgatgatgaggataagctgcacattgtggaagaggaaagcgtgaccgatgctgccgactgcgaaggtgtcccagaagatgacctgccaaccgatcagacagtccttcctggacgaagcagtgagagggaagggaacgcaaagaattgctgggaggacgaccggaaggaagggcaggaaatcctaggtcccgaggctcaagctgatgaggccggatgtacagttaaagacgacgagtgcgagtctgatgcagaaaacgaacagaatcacgacccaaatgttgaggaatttctgcaacagcaggacacagctgtcatattccccgaggcccccgaggaggatcagagacagggaacacctgaggcctctggccatgacgaaaacggcacaccggatgctttcagccagcttctgacctgcccgtattgcgacagagggtacaaaaggttcacgagcctgaaggagcatatcaagtataggcatgagaaaaacgaggacaactttagctgctccctatgctcttatacgttcgcttatcggacccagcttgagcggcacatgacatcacacaagtccggacgcgatcaaagacacgtgacacagagcggctgtaacagaaaatttaaatgtaccgaatgcggtaaggcgttcaagtataagcaccacctgaaggaacacttacgcatccattccggcgagaagccgtatgagtgccccaactgcaaaaaacggttttcccactcaggcagttacagtagccatatatcctccaaaaagtgcattagcctgatacccgtgaacggaaggccacgaacgggactgaaaactagtcagtgcagcagtccatctctatccgcttccccagggagcccaaccaggcctcagatcagacagaagattgaaaataaacccctgcaggaacagctaagtgtaaatcagattaagaccgagccagtcgactacgagttcaaacccatcgtcgtcgcctccggaatcaactgctccacacctctgcagaacggcgtgtttacaggcggtggcccgctgcaggctaccagttccccacaaggcatggtccaggccgtagtgttaccgaccgttggactggtgagccccatttcaattaatcttagtgatattcaaaatgtactgaaagtcgcagtggatgggaacgtgattaggcaagtgctggagaacaaccaggcaaacctggcctcgaaagagcaagaaaccattaatgcaagccctatccagcagggtggccatagcgtaatttctgccatctcccttcctctggtggatcaagacggaactacaaaaatcattataaactacagtctggaacaaccaagtcaattacaagtggttccgcaaaatcttaagaaagaaaatccagtcgccaccaactcctgcaagtcagagaaactgcccgaagatctaacagtgaaatccgaaaaggataaaagcttcgaagggggagtgaacgattctacctgcctcctatgcgacgattgtccaggcgacatcaatgctctgcccgagctgaagcactacgatcttaagcaacctacacagcctccacctctgcctgcagctgaggcggagaagccagagagctccgtgtcttctgcaaccggcgatggcaacctctcccccagtcagccacccctgaaaaacctgttatctctgctgaaagcctactatgccctcaatgcccagccctctgccgaggaactgtccaagattgctgactccgtcaacctgcctctcgatgttgttaaaaaatggtttgagaaaatgcaggctggacagatctcggtccagtcctctgagccttcctcaccggagccaggcaaggtgaacatacctgctaagaataacgaccagcctcagtctgcaaacgccaatgaaccacaggattctacagtgaacctgcagagccccctgaagatgacaaactcacctgtgttgcccgtagggtccacgaccaatggaagtcggtcctctaccccttccccctcaccccttaacctctcatcgtcgcgtaacacccaaggttatctttatacggctgagggagcccaggaggaacctcaggtcgaacctttagatctttcgctccccaaacagcagggggagctgctagagaggagcagcctgccggaacagtgcttgttttgcccaggtaggacattagagcttgtcttaaaaaaagagccacagaaagactcatgtgtcacggactctgaacctgttgtgaatgtgataccaccctcagctaatcccattaacattgcaattccgactgtaacagcccaattgcctacgattgtcgcgatcgcagaccagaatagcgtgccctgcctgagggcactggccgctaacaagcagacaatcttgattcctcaggtggcctatacttattccaccaccgtgtcgcctgccgtgcaagagcccccattgaaagtgatccaaccgaacggcaatcaggacgagcggcaggatacctcaagcgagggagtttcaaacgttgaagaccaaaatgactctgattctactccccctaagaagaagatgaggaagacagagaatggaatgtatgcatgcgatctgtgtgataagatattccagaaaagtagctcactgcttcgccataagtatgagcacacgggaaagcggccacacgagtgtgggatttgcaagaaggcattcaaacataaacaccacctgatagaacatatgcgcctacacagcggagagaagccttatcagtgcgacaaatgtggaaaacggttctcccactctggcagctattcccagcacatgaaccatagatatagctattgcaaacgggaagctgaggaacgcgactccaccgagcaggaagaggcaggacctgaaatcctgtccaacgaacacgtgggcgcgcgggcctcgccatctcagggagattcggatgagagagagtctttgacccgggaggaggacgaggatagcgagaaggaggaagaagaagaggataaagaaatggaggaactacaggaggaaaaggaatgcgagaaacctcagggagatgaggaggaggaagaagaggaggaggaagttgaagaggaggaggtcgaagaggctgaaaacgaaggcgaagaggcaaagacggaaggacttatgaaggatgatcgcgccgagtcacaagcctccagcttgggtcagaaagtgggtgaatcttctgaacaggtgagcgaagagaagactaacgaagcctag

SEQ ID NO: 18150 - DNA, 834 bp, synthetic construct
  misc_feature 1..834: note = Description of Artificial Sequence: Synthetic coding sequence
  source 1..834: mol_type = other DNA
atgaaggtcactaactacaacaccgtggtggagacaaatagtgattccgacgacgaggataagttacatatcgtcgaagaggaaagtgtgaccgacgcagccgactgtgagggcgtgccagaagatgatctgcccacagaccaaacggttctgccaggtcgaagttccgaacgcgagggcaacgctaaaaactgctgggaagacgatactggtaaggagggacaggagatccttggccccgaggcacaagccgacgaagccggatgtaccgtaaaagatgatgaatgtgaatctgatgccgaaaatgagcagaatcacgaccctaacgtggaggaattcctgcagcagcaggacaccgcagtcatctttcctgaggcacctgaagaggaccagagacaaggtacacctgaggcatcgggccacgatgaaaacggcacgcccgatgctttttcacagctgttgacatgtccctattgtgaccgagggtataagcgcttcacctcactcaaagagcacataaagtacaggcatgagaagaatgaggacaattttagctgctctctctgctcttataccttcgcctataggactcagctggaacggcacatgacatcacacaagtcaggccgcgaccaacgacacgtcactcaatcaggttgcaaccgcaagtttaaatgcacagagtgtgggaaagccttcaaatacaaacaccatcttaaggagcacctgcggattcactctggagagaaaccctatgaatgccccaattgtaagaagcgtttttctcactccggctcatactcctctcatatctcatccaagaagtgtatatag

SEQ ID NO: 18151 - DNA, 3315 bp, synthetic construct
  misc_feature 1..3315: note = Description of Artificial Sequence: Synthetic coding sequence
  source 1..3315: mol_type = other DNA
atggcggacggaccaaggtgcaaacgaaggaagcaggccaacccccgtcggaataacgtgaccaactacaacacagtggtcgagacaaactccgactcagatgatgaggacaaacttcacatagtagaagaagaatctgtgactgacgcagctgactgcgagggggtgcccgaggacgacttacccactgaccaaacagtgcttcctgggcggagctccgagcgcgaagggaacgccaaaaactgttgggaggacgacatcaaggacgatgaatgcgagagcgacgccgaaaacgaacagaaccatgaccccaacgtcgaggagtttctgcagcagcaggacaccgctgtgatcttcccagaagcgcccgaggaggatcagcggcaagggaccccagaagcaagcgggcacgacgaaaacgggacacccgacgcgttctctcagctactcacttgcccatactgcgacaggggctataaacgttttacatctctaaaggaacacatcaagtatagacatgaaaagaatgaagataatttttcctgcagcttatgctcatatacattcgcctacagaacacaattagagaggcacatgacatctcacaagtcaggaagggatcagagacacgtgactcagtcagggtgtaaccgcaaatttaaatgcaccgagtgcggtaaagcatttaagtacaaacatcatctgaaggaacaccttcggatacactctggggaaaagccttacgagtgtcctaattgcaaaaagcggttttcacacagcggctcctactcaagccacattagcagcaagaagtgtatctctctgatacctgtcaatggccggcctaggaccggtttaaagaccagccagtgttcctcccctagtcttagtgccagcccaggtagtcctacgcgaccccagatccgccagaagatcgagaataagccgctacaggagcagttgtccgttaatcaaataaagacggagccggttgattatgagtttaaacctatcgtggttgcttctgggatcaactgctccacaccacttcagaatggagtgtttaccggtggaggcccactccaagccacaagcagcccccagggaatggttcaggctgttgtgctgcctaccgttggactggtgagcccaatttccattaacctgagcgatattcagaatgtgttaaaggtggccgtggatgggaacgttatccgccaagtgctggagaacaatcaagcaaatctggccagtaaggagcaggaaaccattaatgcctcccccatccagcagggggggcattcagtaatcagtgctatttcactgccactcgtggatcaggacgggacgacaaaaatcatcataaactattctcttgaacaacctagccagcttcaagtcgtgcctcagaatctgaagaaagagaaccctgttgccactaactcctgcaagagcgaaaaacttccagaggatctgactgtcaaatccgagaaggacaagtcatttgaaggcggtgtcaacgactctacatgcttgctgtgcgatgactgtcccggtgacatcaacgccctgccagaactgaaacactacgatcttaagcaacctacacagcctcctccactcccagctgcggaggcagagaaacctgagagctctgtgagctccgccaccggagatgggaatctgtctccctctcagccgccactgaagaacctactctctttactgaaggcctactacgcactcaacgcacaaccaagcgccgaggagctctctaagattgccgattcggtgaacctgcctctcgacgttgtgaaaaaatggtttgaaaagatgcaagctggccaaatctcagtccaatcttccgagcctagctcccctgaacccggcaaagtgaacatcccagcaaaaaataacgatcagccccagtcagcaaacgctaacgagccccaggacagtacagtgaacttacagtcccccttgaagatgactaactcaccggtactaccggtggggtccactactaacggaagccggagcagcactccatctccaagccctctgaacctgtcatcaagccggaacacccagggctatttgtatactgccgagggggctcaggaagagccgcaggttgaaccccttgacctcagcttgcccaaacagcagggggagctactggagaggagcacaataacaagcgtgtaccagaattcagtatatagcgtgcaggaggaaccccttaacttgagctgcgccaagaaagagcctcagaaggattcctgcgtcaccgactccgagcctgtcgtgaatgttattcctccaagcgctaatcctatcaatatcgccattcccacagtaactgcgcagctgccaacaatcgtggctatcgctgatcagaatagcgtgccttgtttgcgcgctctggcggctaacaaacaaactatcctcatcccccaggtggcttacacttactccacaacggtgtctccggcagtacaagagccacctctcaaggtgatccagccaaatggcaatcaggacgagcgccaagatacaagctccgagggggtgtccaatgtcgaggatcagaatgactctgatagcacaccccctaagaaaaagatgagaaaaacagagaatgggatgtatgcctgcgatctatgtgacaagatctttcaaaaaagcagttcgctgttaagacacaagtacgagcacacaggtaagcgcccccatgagtgcggaatttgtaaaaaggccttcaagcacaagcaccatttaatcgaacacatgagactgcacagcggtgaaaaaccatatcaatgtgacaaatgtgggaagcgtttctcccactcgggatcttactcccagcacatgaaccaccgctattcctattgtaagcgcgaggctgaagagagggacagcaccgagcaagaagaggccggacccgagatcctctccaatgaacacgtgggagcccgggcgtcccctagtcagggcgacagcgatgaacgcgagagtctcacacgcgaggaagatgaggactccgaaaaggaggaagaggaagaagataaggagatggaagaactgcaggaggagaaagagtgcgagaagccccagggtgacgaggaagaagaggaagaggaagaagaggtcgaagaagaagaagtggaagaggccgagaatgaaggtgaggaagccaagacggagggcctcatgaaggatgatagggcggagtctcaagcatcctctttgggacagaaggtcggagagagctccgaacaggtgagcgaggagaaaaccaatgaggcttag

SEQ ID NO: 18152 - DNA, 3645 bp, synthetic construct
  misc_feature 1..3645: note = Description of Artificial Sequence: Synthetic coding sequence
  source 1..3645: mol_type = other DNA
atgaaacaacccattatggcggatggaccccggtgtaaaaggcggaagcaagcaaatcctaggaggaagaatgtcgtcaactatgacaacgttgtcgataccggctccgaaacagacgaggaagacaaacttcacatcgcagaagacgacgggatcgcaaatccgttagatcaagagacatcacctgccagcgtccccaatcatgagagcagccctcacgtctctcaggcattgttgcctcgtgaagaagaggaggatgaaataagggagggtggtgtggagcatccttggcacaacaacgagatcctccaggcttctgtggatggacccgaagaaatgaaggaggattatgataccatgggacccgaggctacgatacaaaccgccatcaataatgggaccgtcaagaacgcaaattgtacaagcgactttgaagagtacttcgccaaaagaaagctggaagagcgagacggacacgccgtgagtatcgaagaatacctgcagaggtccgacaccgccatcatctacccagaagcccctgaggagctttccagattgggtactccagaggcaaacggccaggaggaaaacgatttgcctcccgggacgcctgacgcctttgcacagttgctcacctgcccctactgcgatcgcggttacaaacgactcacttcgctgaaagagcacatcaagtaccgacatgaaaagaatgaagaaaacttctcctgtcctttgtgttcatatacatttgcgtaccgcacacagctggagcgacacatggtgacgcacaaacccggaaccgaccaacaccagatgttaacccaaggtgccggtaatagaaaatttaaatgcactgaatgcggtaaggccttcaagtacaagcaccatctgaaagagcatctgagaatccatagcggggaaaaaccgtatgagtgtcccaattgcaaaaaacgctttagccactctgggtcatacagcagccatatatccagcaagaaatgcattggactgataagcgtgaatggacgaatgagaaataatataaaaacgggatcttcacctaacagcgttagcagttccccaactaacagcgccatcactcagttaagaaataagctagaaaatggtaagccactgagcatgtctgaacaaacgggacttctcaaaatcaagactgagccattggatttcaatgattacaaagttctgatggctacccatggatttagtgggacctctccctttatgaacggcggcttgggagcgacctccccccttggcgtgcacccgtccgcccagtcgccaatgcagcacctcggcgtggggatggaagctccgttgctaggcttcccaaccatgaacagcaacctctcggaggtccaaaaggttctccagatcgtggataataccgtttcccgccaaaagatggactgtaaagccgaggagattagtaaactgaaaggttaccatatgaaagacccttgttctcagccagaagagcagggggtgacctcccctaacatccccccggtggggctccctgtcgtgtcacacaacggcgccaccaaatcgatcatcgactatactctcgaaaaggttaatgaggcgaaagcgtgtcttcagagcctcacaacggactcacggcgccagatatctaacattaagaaggagaagttgaggacactgatagatctggtgaccgatgacaaaatgattgaaaaccataacattagcacaccgtttagctgtcagttttgtaaagaaagtttccctggccctatccctctccaccaacacgaacgatatctgtgtaaaatgaacgaagagatcaaggccgtgttgcagcctcatgagaacattgtgccgaacaaggcaggggtgtttgtggataataaggctcttctcctgtcttccgtgctatctgagaaagggatgacctctcctatcaatccctacaaagatcatatgagtgtcctcaaagcctactacgctatgaacatggaaccaaattctgatgagctcttaaagatttcgatcgctgtggggttgcctcaagaattcgtcaaggaatggttcgagcagcgcaaagtgtaccagtactcgaatagcaggtcccccagtctagagaggagcagtaaaccgctcgctcccaacagcaaccctcctaccaaagattccctgctcccacgcagccccgttaaacctatggactctattaccagtccctcaattgccgaactgcacaacagcgtaaccaactgcgaccctcctctgaggttaacaaaaccatcacatttcactaatatcaaacctgtcgagaaactggaccacagtaggagtaacacaccctccccgttgaacttgtcaagtacttcatctaaaaacagccactccagttcttacacacccaattcatttagtagcgaagaattacaggctgagcctttagatttaagtctgccgaagcaaatgaaggagcccaagagcatcatcgcaacaaaaaacaagaccaaagcaagcagtatttctctcgaccataacagcgtgtctagcagctccgaaaactctgacgaacctcttaaccttactttcattaaaaaggagttcagtaactccaataaccttgataacaaaagcaccaaccccgtcttcagcatgaatcccttttcagccaaacctctgtatactgcgctgcccccacaaagtgccttcccccccgcgacgtttatgccccccgtccagacttccataccgggtctccgcccctacccgggcctagatcagatgtcattcctgcctcatatggcatacacttatccaacaggagctgccacatttgcagacatgcagcagcgcaggaagtaccagcggaagcaagggtttcagggcgaacttctggatggcgcgcaggactacatgtctggcctcgatgacatgaccgacagcgacagttgcctgagccgaaaaaagatcaagaaaaccgagtctggaatgtacgcatgcgacctctgcgacaagacttttcaaaagagttcctcactgctgagacacaagtatgaacatacaggcaaacgcccacatcagtgccagatttgtaagaaggctttcaagcataaacaccatctcatcgagcattctagactccactctggcgaaaagccctatcagtgcgataagtgcgggaaaaggttttcccactcgggcagttactcgcagcacatgaatcataggtactcctattgtaaaagagaagcagaggagcgggaagccgccgagcgggaggccagggagaagggtcatttggagcctaccgaactactgatgaatcgggcttatctgcagtcaatcactccccaggggtattctgactctgaggagcgagaatccatgccgcgcgatggcgagtccgaaaaggaacatgagaaagagggcgaggacgggtacggcaagctgggacgccaggatggcgacgaagagtttgaggaagaggaggaggagagcgaaaataaaagcatggataccgatcccgaaacaatcagagatgaagaggaaacaggcgaccacagcatggacgactcttcggaagacgggaaaatggagaccaaaagcgatcacgaagaggacaatatggaggatggcatgtag

SEQ ID NO: 18153 - DNA, 1275 bp, synthetic construct
  misc_feature 1..1275: note = Description of Artificial Sequence: Synthetic coding sequence
  source 1..1275: mol_type = other DNA
atggctgatggtcctagatgcaagagaagaaagcaggccaatccccgcaggaaaaatgtagtgaactacgataacgtggtcgacacaggctctgaaacagatgaagaagataagttgcacattgccgaagacgacggcatcgccaatcctttagatcaggagacgtctccggctagtgtcccaaatcacgaaagctctccgcacgtgagtcaggctcttctaccccgggaggaagaggaagacgagattcgggagggaggagtggaacatccttggcacaacaacgagattctgcaagcatcagttgacggcccggaggaaatgaaggaggactacgatactatgggccctgaagctacaattcagaccgcaattaacaacgggaccgtcaagaatgcaaattgcacatccgatttcgaggagtacttcgccaagcgaaagttggaggaacgcgacgggcatgcggtgtcgattgaggaatatctgcaacggagcgatactgctataatctatccagaagctccggaggaactcagccgactggggacacccgaggccaacggccaggaggagaacgacttaccgccaggaactcccgacgcctttgctcaactgctgacttgtccctattgcgatagaggatacaaacgcctcacctccttgaaggaacatatcaaatatcggcatgaaaagaatgaagagaatttttcttgtcctctgtgttcctacactttcgcctatcgaacccagcttgaacgccacatggtgacacacaaaccgggaactgaccaacatcagatgctcacacagggggctggaaaccgcaagtttaaatgcaccgaatgtggaaaagcctttaagtacaaacaccaccttaaggaacacctgcgcattcacagtggcgagaaaccatacgaatgcccgaattgtaagaagcggttctctcacagcggcagttatagtagtcacatctcgagcaagaagtgtatcggccttatcagcgtaaatggtcgcatgcgcaacaatattaagacaggcagcagtccaaattccgtgtcatcatctccaaccaactcagccattacccagttacgtaacaaattagagaacgggaaacccctgagcatgagcgagcagaccggactgctgaagtccgggcgtgcacagtggctgaccccactaattcccgctctgttagaggccgaagtagggcgctcccgcggtcagaaaatagagacccttctggcaaacatggttgaacctcgcctgtattag

SEQ ID NO: 18154 - DNA, 1320 bp, synthetic construct
  misc_feature 1..1320: note = Description of Artificial Sequence: Synthetic coding sequence
  source 1..1320: mol_type = other DNA
atgaaacaaccaatcatggccgatggcccccgctgcaagcgaagaaagcaagcaaatcctcgtcgaaagaacgtcgtcaactacgataacgtcgttgataccggaagcgagaccgacgaagaggataaactccacatagccgaagacgacggaattgccaacccactggaccaggaaacatctcccgctagcgtcccaaaccacgaaagctccccccacgtgagtcaggccctcctccccagggaggaggaggaggacgaaatcagagagggcggggttgaacacccatggcacaacaatgaaattcttcaagcctcagtcgatggacctgaagagatgaaggaagattacgacaccatggggcctgaagccaccatacagaccgccatcaataacggcacggtgaagaacgcgaactgcacttccgattttgaagagtattttgccaagcgtaaattggaggaaagggacggccacgcagtatctatagaggagtacctgcagagatccgacactgcaatcatttacccggaggctcccgaggagctctcacgcttgggaacccctgaggcaaacggccaggaggagaatgaccttcctccgggcactccagatgccttcgctcagctgttaacttgtccctactgtgaccgtggctacaagcgattgacgtccctaaaggaacacattaaatacagacacgagaagaatgaggagaacttttcttgcccattatgctcctacacattcgcatatagaacccagctcgaacggcacatggtgactcataagccagggacggatcaacaccagatgcttacgcagggggcagggaatagaaagttcaagtgtaccgagtgtggtaaagctttcaagtacaagcatcatctgaaggagcatttgcggatccactcaggggaaaaaccctatgagtgtccaaattgcaaaaagcgattcagtcattccggttcctattcctcccatatttcgtctaagaagtgtatagggttaatatctgtaaacggacgtatgagaaacaacatcaagacggggtcgtctccaaattcagtgtcttcgtccccgacaaattctgccattacgcagctaagaaataagctggaaaacggaaagccactgtcgatgagcgagcagactgggctgctgaagattaagactgaacccttagatttcaatgattacaaggtactgatggccacccacggattttccggcacatcacctttcatgaacggtggtctgggagccacaagccccctaggagttcacccaagcgcacagtcacccatgcaacacttgtag

SEQ ID NO: 18155 - DNA, 408 bp, synthetic construct
  misc_feature 1..408: note = Description of Artificial Sequence: Synthetic coding sequence
  source 1..408: mol_type = other DNA
atgaagcagcctattatggctgatggtcccagatgcaagcgccgaaaacaagctaacccacggcgcaaaaacgtggtgaattatgacaacgtagtagacaccggcagtgagacagatgaagaggataagctccacattgcagaagacgacggcatcgccaaccctctcgaccaagagacatcgccagcctctgtccctaaccatgagagtagccctcatgtgtcccaggccctgctccctcgcgaggaggaagaggatgagatacgcgagggcggtgtagagcacccctggcacaataacgaaattctgcaggcgtctgtggatggtccagaagagatgaaggaggactatgacacgatgggtcccgaggctactattcagactgcaatcaacaatggaactggatag

SEQ ID NO: 18156 - DNA, 3645 bp, synthetic construct
  misc_feature 1..3645: note = Description of Artificial Sequence: Synthetic coding sequence
  source 1..3645: mol_type = other DNA
atgaagcaacccattatggctgacggaccacgttgtaagcggagaaagcaggctaatcctcgccggaaaaacgtggtgaactacgacaatgtggtagatactggctctgaaacagatgaggaggacaaattgcatattgctgaggacgatgggattgctaatccgctggaccaggagacctcacctgcctccgtgccaaatcatgagtcctcaccacacgtgtctcaggcactattgcctcgggaggaggaggaggacgagattagagagggaggtgtggagcatccatggcataataatgagatccttcaggctagtgttgatggtccggaggaaatgaaagaagactatgacaccatggggccggaggctacaattcagaccgccatcaataacggtaccgtcaaaaacgcaaactgtacgtctgatttcgaggagtattttgccaagcgaaagttagaggagagagacggccatgccgtctcaatcgaggagtatctgcaacgcagcgatactgccattatctatccggaagcaccagaggagctgtcacgtctaggtacaccagaggctaatgggcaagaggagaacgacctgccccctgggacacccgacgcatttgctcagttgctgacatgcccatactgtgaccggggctataagcgcctgactagcctgaaagagcatatcaagtatagacacgagaaaaacgaagagaacttttcgtgcccgctgtgctcatacacctttgcctatcgcacgcaactcgaaaggcacatggtgactcacaagccaggcacagatcagcatcaaatgctgacccagggcgctggcaacagaaagtttaaatgcacagaatgtggtaaggctttcaaatataagcatcacttgaaagaacatctgcggatccattcgggtgagaaaccctacgaatgtcctaattgtaagaagcggttcagccatagcggtagttattccagccatatatcctcaaaaaagtgcatcggcctcatttccgtaaacggtcgcatgaggaataatatcaagaccgggagttcccctaactccgtatcgtctagccccacgaactccgctattacccagctgagaaacaaactggagaatggtaaacccctgtctatgagtgagcagacgggcctgctaaagatcaagacagagccgctcgatttcaatgactacaaagtactcatggccactcacgggttctcagggacctccccttttatgaacggcggtttgggagccacaagcccccttggggtacacccgagcgcccagtcaccaatgcagcacctcggagtgggaatggaagcacctcttctaggcttcccaactatgaatagtaatctctcggaagtgcagaaggtgctgcagattgtagacaatactgtttcacgtcagaaaatggactgtaaggctgaagaaatctccaagctcaagggttaccacatgaaggacccctgctcccagccagaggaacaaggcgtcacttccccaaacattccacctgttggattaccagtggtctctcataacggcgccacaaagtcgatcattgactacactctcgaaaaggttaacgaggcaaaagcctgcctgcagagtcttacaacagacagccggaggcagattagtaacatcaagaaggagaaattgaggaccctgatcgaccttgtgacagatgacaagatgatagagaatcacaacatcagtaccccgttttcctgtcagttttgtaaggaaagttttccgggcccaattcctctccatcagcatgagcggtatttatgcaagatgaatgaagagattaaggccgtgctgcagccccacgagaatatcgtaccaaataaggctggggttttcgttgacaacaaggctctacttctgtctagcgttcttagcgaaaagggcatgactagtccaatcaacccatacaaagatcatatgagcgtgctgaaggcctactacgcaatgaatatggaacctaatagtgacgagctactcaagataagcatagcggtgggcctgcctcaggaatttgtaaaggaatggtttgagcagagaaaggtctatcagtatagcaactccaggtccccgagcctggagcgaagttctaagcctcttgcccctaacagcaatccaccaactaaagatagtctcctgcctcggagccctgtcaaaccgatggacagcattaccagccctagtatcgctgagctgcataactctgttacaaactgcgacccaccactcaggttaaccaagccatctcactttactaacatcaagccagttgaaaaacttgaccactcaagatctaataccccaagcccccttaacctgtccagtacatcgtctaagaactcacactcgtcctcatacacgcccaattcattcagcagcgaagaattgcaggccgaacctttggatctcagtctacctaagcaaatgaaagagcctaagagcatcatagccaccaagaataaaacaaaggcttctagcatctcactcgaccataattccgtatcgagcagttccgagaacagcgatgaaccgctgaacctcacctttattaagaaggaattcagcaattctaacaacttggacaacaagagtactaatcccgtgttctctatgaacccctttagcgccaaacccctgtatacagccctccctccgcagagcgctttcccaccagctacttttatgccgcccgtgcaaacatcaatccctgggctgcgaccgtatcccggcctggaccaaatgtcgttcctcccccatatggcctacacctaccctaccggcgccgccactttcgccgacatgcagcagcgtcgcaaataccagcgaaagcaaggatttcaaggagagctgcttgacggggcccaggactacatgagcggtctggacgacatgacagatagtgattcttgcctgtccaggaaaaaaatcaagaaaacggagtccggcatgtacgcatgtgatctgtgcgacaagacttttcagaaatctagctcactccttagacataaatacgagcacaccggaaagcgccctcatcagtgccagatttgcaaaaaagctttcaaacacaaacatcacctgatagagcattcaaggcttcactccggtgagaaaccctaccagtgcgacaaatgtggcaagcggttctctcacagcgggagctacagccagcatatgaaccacaggtactcctactgcaaacgggaggctgaagagcgcgaagctgctgagagagaagccagggaaaagggccatctcgaacccacagagcttctcatgaacagggcttacctgcagagcatcacccctcagggttactctgactcagaggagagggagtcaatgcccagggacggtgagtctgagaaggagcacgaaaaggaaggggaggatggatacggcaaacttggccggcaagacggggatgaggagttcgaagaagaggaggaagagtccgaaaataaaagtatggacaccgatccggagactattcgcgatgaggaagagacaggtgaccattccatggatgactcatccgaggacgggaaaatggagacaaaatctgatcacgaggaagacaacatggaggacggcatgtag

SEQ ID NO: 18157 - DNA, 2109 bp, synthetic construct
  misc_feature 1..2109: note = Description of Artificial Sequence: Synthetic coding sequence
  source 1..2109: mol_type = other DNA
atgaaacagccgattatggcggacggtccaagatgcaagcggcgaaaacaagctaaccctcgtcggaaaaacgtagttaattacgacaatgtcgtggatacaggaagtgagaccgacgaggaagataaactgcacattgcagaagacgatggtatcgctaacccactggatcaggagacctcccccgcctcagtcccgaatcacgagagcagtccccacgtatctcaggccctgctgccccgtgaggaggaagaggatgaaatcagagagggaggcgtagaacacccctggcacaataacgaaatattgcaggcatccgtggacgggcccgaagagatgaaggaagactatgacaccatgggccccgaagccaccatccagacagcaatcaataatggtaccgtcaaaaacgctaattgcactagcgactttgaagagtactttgctaaacggaaacttgaggagcgtgatggtcatgccgtctccatcgaagaatacttacagagatctgataccgctattatctacccggaagctcccgaagagctgtcccgtctcggaacaccggaggcaaatggccaagaagagaacgacctgccgcccggtacccctgacgcctttgctcagctgctgacatgcccttattgtgaccgcggatataaaagactgacaagcctgaaagagcatatcaaatatcgacatgaaaagaatgaggaaaatttcagttgccctctgtgttcttacacattcgcttataggacgcagcttgaacggcatatggtcacacacaaacccggaacagaccagcatcagatgctaacccaaggcgccggaaatcgaaaatttaagtgcacagagtgcggtaaagcatttaaatacaaacatcatctgaaagaacacctcagaattcacagtggggagaaaccatacgagtgtcccaattgcaagaaacggttctcacacagcggctcctatagctctcacatctcatctaaaaagtgtatcggactcatttccgtgaatggacggatgagaaataacattaaaaccggaagttcacctaattctgtgagctcctccccaaccaattccgccattacacaactgcgaaacaaattggaaaatggtaaaccactcagtatgtctgaacaaaccggtctcctgaagatcaaaactgagcctctcgattttaatgattacaaagtgctgatggccacacacggcttctccgggactagcccattcatgaacggtgggctgggagctacctcacccctaggtgtccacccttcagctcagagcccaatgcaacatttgggggttgggatggaggcccctctcctgggattccccactatgaacagcaacctgtctgaggtgcagaaggtgcttcagatcgtcgataataccgtcagcaggcagaaaatggattgtaaagcggaggagattagcaagctgaaaggataccacatgaaagatccctgttctcagcctgaggaacaaggggttactagcccaaatattccccctgtgggcctccctgtcgtctcccacaatggggccaccaagagcatcatcgactataccctcgagaaggtgaatgaagccaaggcgtgcctgcagagcctgactacagattcacgaagacaaatcagcaacattaagaaagagaaattgagaacacttatcgatttggtcacagatgataagatgatcgaaaaccacaatattagcacccccttctcatgccaattctgtaaggagagcttccccgggcccatcccacttcaccagcacgaaaggtatttgtgtaaaatgaatgaagaaatcaaagccgtgcttcaaccccatgagaacatcgttccgaataaagccggggtatttgtggataacaaagccctgttactgagtagcgttctttcagaaaagggaatgacatctccaatcaacccttacaaagatcacatgtcagtgctcaaggcctactacgctatgaacatggaaccaaatagtgatgagcttctgaaaatttctattgccgtcgggcttccccaggagtttgtgaaagaatggttcgaacagcgaaaagtctatcagtatagtaactag

SEQ ID NO: 18158 - DNA, 276 bp, synthetic construct
  misc_feature 1..276: note = Description of Artificial Sequence: Synthetic coding sequence
  source 1..276: mol_type = other DNA
atgaagcaaccgatcatggctgacgggcctaggtgtaagcgacgcaagcaagccaaccctaggcgtaaaaacgtcgtgaactatgacaacgttgttgatactgggtccgaaaccgacgaagaggacaaactgcacatcgccgaggacgacgggattgctaaccccttggatcaagaaaccagcccagctagcgttcctaatcatgagagcagcccccacgtgtcccaggcactgctgcctagagaagaagaggaggacgaaattcgggaaggatag

SEQ ID NO: 18159 - DNA, 192 bp, synthetic construct
  misc_feature 1..192: note = Description of Artificial Sequence: Synthetic coding sequence
  source 1..192: mol_type = other DNA
atgaaacaacccatcatggctgacggccctaggtgcaagagaaggaaacaggcaaacccacgcagaaaaaacgtagtgaactacgacaacgtcgtggacacaggtagcgagacagacgaggaggataagcttcacatcgcagaggacgatggaatcgcgaaccctctagatcaggagacttctccagcttag

SEQ ID NO: 18160 - DNA, 3573 bp, synthetic construct
  misc_feature 1..3573: note = Description of Artificial Sequence: Synthetic coding sequence
  source 1..3573: mol_type = other DNA
atgaagcagcccatcatggctgatggacctcgctgtaaacgaagaaaacaggccaatccccggcgcaaaaacgtcgtcaactacgataacgtcgttgatactggaagcgagaccgatgaggaagataaattacatattgccgaggacgatgggatcgccaatccgttggaccaggagacctctccggcttcagtgcctaatcatgagtcgtcaccgcacgtttctcaagctttgctgcctcgggaagaagaggaggatgagatacgagaaggcggcgtggaacatccatggcacaataacgagatcctgcaggcctctgtggacggaccagtgaaaaacgcaaattgcacgtcagatttcgaggaatactttgccaaacgcaaattggaggaacgcgatgggcacgccgttagcatcgaagaatatctacagcgctccgacactgctattatatatcccgaggcgccggaggaactatcccgtcttggcacccctgaagccaacgggcaggaagaaaacgatctcccacctggcacgcccgacgccttcgctcaattactgacatgcccatactgtgacaggggatacaagagacttacgtctcttaaggaacatataaagtacaggcatgaaaagaatgaggaaaatttctcctgcccattatgttcctatacgtttgcctataggactcagttggaacgccatatggtcactcacaagccgggaaccgaccaacaccaaatgttgactcagggggcaggcaatcgcaaattcaaatgcactgaatgcggtaaagccttcaaatataagcaccacctgaaggagcacctgcgcatacattcgggcgaaaagccttacgagtgtcctaactgtaagaagcggttttcccacagcgggtcatacagcagccatattagcagcaaaaagtgtatcggacttatctccgtgaacggacgtatgcgcaacaacattaagacggggtctagcccaaacagcgtgtcaagttcacctaccaactccgccatcacacaacttaggaataagctggaaaatggtaaaccactgtcgatgtctgagcagaccggcctcctgaagatcaaaacagagcccctagactttaatgattataaagtgctcatggcaacccacggcttcagtggcacttcaccgttcatgaatggcggtctgggcgccacttcaccactgggcgtccatcccagcgcccagagtccgatgcaacatcttggagtcggaatggaggctccacttctaggatttccgaccatgaattctaatctgtccgaggtgcaaaaagtgcttcagatcgttgacaacactgtttcccgccagaagatggactgtaaggctgaagaaattagcaaactgaaaggttaccatatgaaagacccttgtagccaacctgaggagcagggcgtgacatctccgaacattcctccagtgggattgcccgtggtcagtcacaatggggcaactaagtccattatcgattacacactggaaaaagtgaacgaagcaaaggcatgtctacaatcactcaccaccgattctcgtagacagatatcaaatattaagaaggagaaactgagaactctcatcgacttagtcaccgacgacaaaatgatagaaaaccataatatttcaactccattttcctgccaattctgtaaggaaagctttcccggcccgataccgttacatcagcacgagaggtatctgtgtaaaatgaatgaagaaataaaagctgtgctgcagcctcacgagaacatcgtgcctaataaggccggagtgtttgtcgataacaaagctctgttattatcgtccgtcctctctgagaaaggtatgacctccccgataaacccctataaggaccatatgagtgtgctgaaagcctactatgccatgaatatggaaccaaactctgacgagctgctcaaaatcagtatcgcggtggggctgcctcaagaattcgttaaggagtggtttgaacagcggaaagtgtaccaatattccaactcccggtctccgtcgctggagagatcctctaaaccactggcaccgaacagcaatcctcctacgaaagattcactgctgccacgatctcctgtcaagcctatggatagtatcacaagtccatcaatcgccgagttgcacaattccgtgacaaactgtgacccccctctgagattgactaaaccctctcactttactaacatcaagccggtggaaaagctggatcatagcaggtccaatactccgtcccccttgaatctctcaagtacatcaagcaagaatagtcattcatcctcatatacccccaattctttttccagtgaagagctgcaggctgaaccattggatctgtccttgcctaagcagatgaaggaaccaaaatcgatcatagccaccaaaaacaaaaccaaagcatctagtatcagcctggatcacaatagcgtcagttcttcttcggagaactctgacgaacctttaaatttaacattcatcaagaaggagttctccaattctaacaacctagataacaagtcgaccaaccctgtattctccatgaatccattttccgccaaacccctgtacacagcactgccgcctcagtcagctttcccacctgccaccttcatgccccctgtgcagaccagcattccaggcttaaggccctaccccgggctggatcagatgagcttcctgccccacatggcatacacataccctacgggtgccgccacttttgccgacatgcaacaaaggagaaagtatcaacggaagcagggattccagggggaactcctggatggcgcacaggactatatgagtggcctagatgatatgaccgattcagattcgtgcctcagccggaagaaaatcaagaagaccgagtcagggatgtacgcctgcgatctgtgcgacaagacatttcagaaatctagctccttactccgccacaaatacgagcacacggggaagcgcccccaccagtgccagatttgtaagaaagcatttaagcataagcaccatctgatagaacattccaggctgcactccggcgaaaagccatatcagtgtgacaagtgtggcaagcggttttctcatagtggaagctattcgcagcatatgaatcatagatactcttactgtaagcgggaggcagaggagcgggaggcagccgagcgcgaagcccgtgaaaaaggtcacttggagccaaccgaactcctgatgaatcgcgcttacctgcagtccatcacgccacagggatactcagacagtgaagaacgcgagtctatgccacgggacggggagtccgagaaggagcacgagaaggagggagaggacgggtacggcaagctcggtcgtcaagatggcgatgaggaatttgaggaagaagaggaggagagcgaaaataagtctatggatactgaccccgagaccattagagatgaagaggaaaccggagaccattccatggacgattcatctgaagacggcaaaatggagacaaaatccgaccacgaagaggacaacatggaggacgggatgtag

SEQ ID NO: 18161 - DNA, 3645 bp, synthetic construct
  misc_feature 1..3645: note = Description of Artificial Sequence: Synthetic coding sequence
  source 1..3645: mol_type = other DNA
atgaagcaacctataatggccgacggacctagatgtaagaggcgtaaacaggcaaacccaagacgcaagaatgtggtcaactacgataacgtggtggacaccggcagcgaaactgacgaggaggataagctccatattgccgaggatgatgggatcgctaaccccctggaccaggaaacaagtccagcctccgttccgaatcacgaaagctccccccacgtgtctcaggcgctcctcccacgggaggaagaagaggacgagatacgcgaggggggggtcgaacacccctggcacaacaatgagatcctgcaggcaagcgtcgatggtcccgaggagatgaaagaggactacgacacgatgggcccggaagccacaatccagacggccatcaataatggaacagttaaaaacgccaattgtacgtccgacttcgaagaatatttcgcaaagagaaagctggaggagcgagacggccacgcggtgtccatcgaggaatacctgcagcgcagtgatactgcgattatttaccctgaggctcctgaggagttaagccgtctggggacgccagaggctaatggacaggaggagaatgatctaccaccaggtactcccgacgcttttgcccagctgctgacctgtccgtattgcgaccgcggctataagcggctgaccagtctgaaggagcatatcaagtatcgtcacgaaaagaatgaggagaatttctcttgccccttgtgtagctacacttttgcctaccgcacacagcttgagcggcatatggtcacgcacaaacccggaacagaccagcaccagatgctcacgcagggagccggtaacaggaaatttaagtgtacggagtgcggaaaagccttcaagtataaacaccacttgaaggagcatttacgtattcacagcggcgagaagccgtacgagtgccctaactgcaagaaacggtttagccacagcggtagttatagctcccatattagttccaaaaaatgtataggccttatctcagtgaacggtagaatgcgcaataacattaaaaccgggtccagtccgaactcagtcagcagtagccctaccaatagtgcgattacccagttgcgcaacaaactagaaaacggcaagccactttctatgtcagagcaaaccgggttactgaagattaaaacagagcccttggattttaatgactataaggtcctgatggccactcatggatttagtggcactagcccgttcatgaacggtggattgggtgccacaagccctctgggtgtccacccatccgcacagtcacccatgcaacatttgggggtaggtatggaagcaccgctgttaggatttcctactatgaacagcaatttaagcgaggtccagaaggtcctccagatagtggacaatacagtgtctcgccagaagatggactgcaaggcagaagagatttccaagttgaaaggataccatatgaaagacccatgcagccagccagaagaacagggagtcacctccccgaacattccacccgttggcttacctgtagtatcccacaacggcgccaccaagtccatcatcgactacacattagagaaggttaacgaggcaaaggcttgtctgcaaagcctcaccaccgacagtcggcgacagatatcgaacataaaaaaagagaagctgaggaccttgatcgacctggtaacagacgataaaatgattgaaaaccacaacatttctacccccttctcatgtcaattttgtaaggagtcatttcccgggcccattccactgcatcagcatgagcggtacctgtgcaagatgaacgaggagattaaagcagtgttgcagccccacgagaacattgtgcctaataaggctggagtcttcgttgacaataaggcgttgctgctgagctccgtactcagtgagaagggcatgaccagtcccatcaacccctacaaagatcacatgagcgtgttaaaggcatactacgccatgaatatggagccgaactctgatgagcttcttaagatttcgattgcagtcgggttaccacaggagtttgtcaaggagtggttcgaacagagaaaggtttaccagtacagtaactcccgaagcccgtcactggaacggtcaagcaagcccctggcccctaacagtaaccctcctacgaaagattcgttgttgccacgctcacccgtaaagcccatggattctatcacttcaccatccattgcggaactgcacaatagcgtcacaaactgcgatccaccccttcggttaacaaagcccagccacttcaccaacataaagccggtggagaagcttgaccacagcaggtcaaacacgccatcccctctgaaccttagctccactagctccaagaactcccactcatccagttacactccaaattcctttagctcagaagaacttcaggccgaacccctagatctgtctctgccaaagcaaatgaaagagcctaaatctataattgctacaaagaataaaactaaggcaagctccatcagcctggaccacaactcagtgtcctcttcatccgaaaattcagatgagcccctgaaccttaccttcatcaagaaggaattctctaacagcaacaacctggacaacaagtctaccaatcccgtattctccatgaatccgttttctgcaaaacccctgtatactgccctgccccctcaaagtgcttttccccccgcaacctttatgcctcccgtccagaccagcatccccgggcttagaccttacccaggtttagaccagatgtcttttcttccccacatggcttatacctatcctactggtgccgctacctttgccgatatgcagcagaggaggaagtatcagcgtaagcagggcttccagggtgagctcctggacggtgctcaggactatatgtctgggttggatgacatgacggacagcgactcctgtctgtctcgcaaaaaaattaaaaaaactgagagcgggatgtacgcgtgcgacctttgtgataagacattccaaaaaagttccagcttgctgcggcacaagtacgaacacaccggcaaaaggccacatcagtgccagatctgtaaaaaggcattcaaacataagcaccacttgatagagcattccagactgcacagcggcgagaagccatatcagtgtgacaagtgcggcaagagattcagtcactccgggtcatactcccagcacatgaatcaccgctacagctactgtaagagagaagccgaagaacgggaagcggccgaacgtgaagcccgcgaaaagggccacctggagcctaccgaattattgatgaaccgtgcctatctgcagtccattacccctcaggggtatagcgactctgaggagcgtgaaagcatgcctagagacggtgagtcagagaaagagcacgagaaagagggggaggatgggtacggcaaactagggcggcaagacggagacgaggagtttgaggaggaggaggaggagtcagagaataaatcaatggatactgatcctgagaccatccgagacgaggaggaaaccggagatcacagtatggatgactcctctgaggacggaaaaatggaaactaaatcagaccacgaagaagacaatatggaagatggcatgtag

SEQ ID NO: 18162 - DNA, 1893 bp, synthetic construct
  misc_feature 1..1893: note = Description of Artificial Sequence: Synthetic coding sequence
  source 1..1893: mol_type = other DNA
atgtctatcagcgcattgggtggacgcaccaagggcaaacccctacccccgggagaggaagagaggaataatgtgttgaagcagatgaaggttcggacaacactcaagggcgacaaaagctggattaccaagcaggatgagtctgagggaaggacaatcgaactcccctcgggacgttcacgggctacatccttctccagcgcgggagaggtgcccaaaccccgccctcctagcacacgggccccaaccgggtacatcatacgaggcgtatttacaaaacctattgattcaagctcacagccgcaacagcagttcccaaaggccaacggaacgcccaagtctgctgccagtctggtgcgcacggctaacgctgggcctcccagaccttcttcctccggctacaaaatgacaacggaagactacaagaagcttgcaccctacaatatcaggagaagttcaactagcggagataccgaggaggaggaagaggaagaggtggtaccattcagctccgacgagcaaaaaaggcgaagcgaagccgccagtggggttttacgtcgaacagctcctagggagcactcctacgtcctgagcgccgccaagaagtcaacgggcccaacccaggagacccaggctccttttattgcaaaacgcgtggaggtagttgaggaggacggcccaagtgagaaatctcaggatccacccgcgctagcccggtccacgcccgggagtaatcgctcgagccctggcaataaggacaaagaggctccctgcagcagagagctccaaagggatttggcaggtgaggaggcatttcgagccccgaatacagatgctgccagatctagcgcccaactatccgatggtaatgttggtagcggagcaactggcagtcgccctgaaggcctggcagcagtagacattgggtctgaaaggggatccagcagcgccacatccgtatcagcagtccctgctgataggaagagcaacagtaccgccgcccaggaggacgccaaagccgatcctaagggcgccttggcagactacgagggcaaggacgttgccactagggttggcgaggcatggcaggagcggcccggtgctccccggggagggcaaggcgatcccgccgttcccgcacagcagccagccgacccgtccacacctgagaggcagagctctccaagtggctcagagcagctggtgcgccgcgagagttgtggttcctcagtcctgacagactttgagggcaaggacgttgccactaaagtgggggaagcctggcaagataggcctggagccccaaggggtggccagggagaccccgctgttccaactcagcagcccgccgatccctcgaccccagagcaacagaattccccctcagggtctgagcagtttgttagacgtgaatcttgtacatctagagtacggtctcccagttcttgtatggttacagtgactgtcactgccaccagtgagcaaccacacatctatatccctgctcccgcgtcagagctggattcgagctctacaaccaagggcatcctgttcgtgaaggaatatgttaatgcctctgaagtttcatctggcaagccagtcagtgcacgctactctaacgtgagttctatcgaagactctttcgccatggagaaaaagccaccttgcgggtctaccccatacagcgaaagaacaactggaggaatttgcacttattgcaacagagagatccgcgattgtcccaagatcacattggagcacttaggtatatgttgtcatgagtactgtttcaaatgtggcatatgcagtaaacctatgggagatcttctggatcagatcttcatccacagagacacaattcattgcggcaagtgctatgagaagctattctag

SEQ ID NO: 18163 - DNA, 1407 bp, synthetic construct
  misc_feature 1..1407: note = Description of Artificial Sequence: Synthetic coding sequence
  source 1..1407: mol_type = other DNA
atgactaccgaggactataagaagttggcaccatataacatccggcggagtagtacgtccggcgataccgaagaagaagaagaggaagaagttgtgccattttcgtccgacgaacaaaaaagatcttctcctacacaggaaacacaagcaccattcattgccaagagagtcgaagtcgtagaggaggatgggccctccgagaaatcacaggatccacctgcacttgcgcggagcaccccaggaagtaacagaagttccccaggcaataaagataaggaggccccatgctcacgcgagctgcaacgagatctagcgggggaagaagctttccgcgcacccaacaccgatgccgcaagatcttcggcacagctctcagatgggaacgtcgggagtggagcaaccggatctcggcctgaggggcttgcagccgtggacatcggaagcgaaagagggtcctctagcgcaacctccgtctccgcagttcccgccgatcggaagagtaattcaaccgcagcccaagaagacgccaaggcagacccaaaaggggctctggccgactacgagggaaaggatgtcgccacgcgggtgggagaggcctggcaggaacgtccaggagctccccggggagggcagggagatcccgcagtgcctgcacagcagcccgccgacccttcaacaccagaacgccaatcatctccttccgggtccgagcagctggttcgccgggaaagttgtggctcttctgtcctgacagactttgaaggcaaggacgtggccacaaaggtgggggaagcctggcaggacagacctggagcccctcgtggcggccagggggacccagcggtacctacccagcagccagctgatccctccacaccagagcagcagaattcaccatccggcagcgaacagttcgtgcggagggaatcttgcacttcccgggttcgctccccctcaagctgtatggttaccgtgacagtgactgccaccagcgaacaacctcacatatatatccctgctccggccagcgaacttgattcatcctctaccactaagggcattcttttcgtcaaggagtatgtaaacgcttcagaggtatcatccgggaaacctgtgtctgctcgctactctaacgtttcttccatcgaggactctttcgccatggaaaaaaaacctccctgcggctccacaccttactctgaacgcaccactgggggtatttgcacatactgtaatagagagattcgtgactgtcccaaaatcacgttagagcatctgggaatttgctgtcacgaatactgcttcaagtgtgggatctgctccaagccgatgggtgacttgttagatcagatatttatccacagggatacaattcactgtggcaaatgttacgaaaagttgttttag

SEQ ID NO: 18164 - DNA, 1374 bp, synthetic construct
  misc_feature 1..1374: note = Description of Artificial Sequence: Synthetic coding sequence
  source 1..1374: mol_type = other DNA
atgaccacagaggattataaaaaactggcaccgtataatatccgtaggtcaagcacatcaggtgataccgaggaggaagaagaggaggaagtggtgcctttcagtagcgatgaacagaaaagaagatccgaggcggcgtccggagtgctcagacgaacggctcctcgggagcacagttacgtcctgagcgcagcaaaaaaatccaccgggtcaccgactcaggaaacacaagctccgttcatcgccaagagggtcgaagtagtggaggaagatggcccatccgagaagtcacaagatccacccgccctcgcccggtcaactccgggctccaattcttcacgtggcgaagagatagtccgtctgcaaattctgacgccacgggctggccttagacttgtggccccggacgtcgagggcatgagctctagcgcaactagcgtttctgccgttccagccgataggaagtctaattctacagctgctcaggaggatgccaaggccgaccctaagggtgccctggccgactacgagggtaaggacgttgccaccagggttggggaagcatggcaggagagacctggggctccaaggggtggccagggggaccctgcagtgcccgctcaacagccggcagaccccagcacccctgaaagacagtcttccccatctgggagtgagcagctcgttcgtagggagtcctgcggctctagcgtactgactgacttcgaaggcaaagatgtggccactaaagtcggagaggcatggcaggacagaccgggggctccacgggggggccagggagatcccgccgtgcccacacaacagcctgccgatcccagcacaccggagcagcagaatagcccaagcgggtcagaacagttcgtaaggcgggaaagctgcaccagcagagtgcgaagccccagcagctgcatggttacagttaccgttactgccacttccgagcaaccccacatttacatacccgctcccgcatccgagctggactcttcttccactaccaaagggatcttatttgtgaaagaatacgttaacgccagtgaagtgtcatccgggaaacctgtgagcgcccgatatagcaacgtcagcagcatcgaagactccttcgccatggagaagaagcctccatgcggtagcacaccttactcagaacggacaacaggagggatctgcacatattgtaatcgcgagataagggactgccctaagatcacgctggaacatctgggcatttgttgtcacgagtattgtttcaagtgcgggatatgttcgaaaccgatgggcgatttgttggatcaaattttcatacacagagacactattcattgtggaaaatgctatgaaaagctcttttag

SEQ ID NO: 18165 - DNA, 2070 bp, synthetic construct
  misc_feature 1..2070: note = Description of Artificial Sequence: Synthetic coding sequence
  source 1..2070: mol_type = other DNA
atgagcatctcggcactcggcggccgtaccaagggtaagcccctgccccccggcgaagaagagcgaaataacgtgctgaagcagatgaaggtgcgcactacactcaaaggagacaagagttggatcacgaagcaggatgaaagcgaaggccgaaccatcgagctaccgagtggaagaagccgcgcaacaagcttctcatcggcgggcgaagtgcctaagcctcgccctccaagtacccgcgcccctaccggctatatcatcaggggtgtgtttactaagccaattgactcctcctctcagccccagcagcagtttcccaaggcaaacggcactcctaaaagtgccgcaagtctcgtacgaactgccaatgccggaccacccagaccatctagctccgggtataagatgaccacggaggactataaaaagttggcaccatataatattaggcggtctagcacaagcggggacactgaggaggaggaagaagaagaagtcgtcccatttagttccgacgagcagaaacggcgctcggaagctgcctccggtgtgcttaggcggaccgcaccgagagaacatagctatgtcctgtccgcagcgaaaaaaagtaccggacctacacaggagacccaggctccttttatcgcgaaacgtgtagaggtggtggaagaggatggcccctcagaaaaatctcaggaccccccagccctggcgcggtctacccccggatcaaactctgccgatgggggccgtaccaaagccagcagggctatctggatcgagtgtcttccgagcatgcccagccccgccggctctcaggagcttagttctcggggtgaagagatagttagactccaaatcctgacgcctcgggcaggactgaggctggtcgccccggacgtcgaggggatgagatcgtcacctggtaacaaagataaagaagctccttgctcccgcgaactgcaacgcgatctggcaggagaggaagcatttagggccccgaacacggacgctgcccgatcatccgctcagttgtctgacggcaacgtagggtccggggctactggctcaaggcccgaagggctggctgccgtcgacatcggttcagagagaggcagtagctctgcaacctccgtgtcagccgtgccggcagataggaagtcaaatagtacagcagcacaggaggacgccaaagccgacccaaagggggctcttgcggactacgaggggaaggacgtggcaactcgcgtcggtgaagcttggcaggaaaggccaggggcgcctcggggtgggcaaggcgatccagccgtgccagcccagcagcccgccgatcctagcacccctgaaagacaatcaagccccagcggatcggagcaacttgtacgcagggaatcgtgtgggtcttctgtgctcacagattttgaaggcaaggatgtggccactaaagtgggcgaggcgtggcaggaccggccaggcgcgcccagaggcgggcaaggagaccccgccgtgccaacacagcaaccagccgatcccagcaccccagagcagcaaaactctcctagtggttctgaacagtttgtgcgccgcgagtcctgtactagtagagttcgcagcccctcatcatgtatggtcacggtgacagtcactgctacctcagaacagccgcacatctatattccggccccggcgtctgagctagactcctcaagcaccactaaaggcatattattcgtcaaggaatatgtgaatgcgtcggaggtcagttctggcaagcccgtttccgctcgctactcaaatgttagctctattgaagactcattcgccatggaaaagaagcccccatgcggcagcaccccttatagtgagcggactacagggggaatctgcacttattgcaatcgggagattcgcgattgtcccaaaatcacactcgaacacctgggcatttgttgtcacgagtattgctttaagtgtggaatttgctccaagcccatgggggacctgctggatcagatttttattcatcgcgatacaatccactgtggcaagtgctatgagaagcttttctag

SEQ ID NO: 18166 - DNA, 1359 bp, synthetic construct
  misc_feature 1..1359: note = Description of Artificial Sequence: Synthetic coding sequence
  source 1..1359: mol_type = other DNA
atgcagcgccaggcaccatataacatcaggcggagtagcacttccggcgataccgaggaagaagaagaagaagaggtggtccctttttcctctgatgaacagaagagaagatctgaggccgcaagtggggtactgaggcggacagcgcctcgggaacactcatacgttctttccgcggcgaagaaaagcaccggaagccccacccaggaaactcaggcgcctttcattgccaagcgtgtcgaggtggtggaagaggacggaccaagcgagaaaagtcaggatccccccgcactcgcaagatcgacaccgggatctaacagcagccgcggagaggagatcgtgaggctgcagattctaaccccaagagctggtctccgccttgtagcaccggacgtcgagggcatgtctagtagcgccacatctgtgagtgcagtgcctgcagaccgaaaaagtaactcaaccgccgcacaggaggatgcgaaggcggaccctaagggcgctctggccgattatgaaggtaaggatgtggccacaagggtgggtgaggcatggcaggagcggccaggggctccacggggcggccagggagatccggctgtgcctgcccagcagcccgccgatccgtccactcctgaaagacagtcatcacctagcgggtccgaacagcttgttcggagagagagttgcggatccagcgtactgacagactttgagggaaaggatgtcgctaccaaggtgggtgaagcttggcaagatcgccctggtgctcccaggggggggcagggtgaccctgctgtccctacacagcagcccgcagaccctagcacccccgagcaacagaacagtcctagcggttcagaacaattcgtgcgaagggagtcctgcacctctcgcgttaggagcccatcttcctgcatggttacagtgacggtcactgctactagcgagcaaccacatatatatatccctgcacctgcatctgaattggatagtagtagcaccacaaagggcatcttattcgtgaaagaatatgtaaatgccagcgaggtctcttccggtaagcccgtgtcggcgaggtactctaatgtatcttctattgaagattcattcgccatggagaagaagcctccttgtggcagtactccttatagcgagaggacaactggtggcatttgcacttattgcaatcgtgaaatcagggattgcccaaagatcacattagaacacctcggcatctgctgccacgaatactgttttaagtgcggcatttgcagtaagccaatgggcgaccttctggaccagatctttattcatcgggataccatacattgtggtaagtgctacgagaagttgttttag

SEQ ID NO: 18167 - DNA, 1428 bp, synthetic construct
  misc_feature 1..1428: note = Description of Artificial Sequence: Synthetic coding sequence
  source 1..1428: mol_type = other DNA
tgacgttcttccaccagcggggatacggaggaggaggaggaggaggaagtggtcccctttagcagcgacgagcagaagcgatctttgcgtaggacggccccccgcgagcattcatacgttttgagcgccgctaagaagtccactggcagtcccacccaagagacccaggcaccctttattgccaagcgtgtcgaagtggtggaggaagacggacccagcgagaaatcacaggatccccccgcgctagcaaggtcaactccaggttctaatcgctcctcaccaggaaataaggacaaagaagccccatgcagccgggagctgcagagggatctggctggcgaggaggcattcagagccccgaacacagatgcggctaggagctctgctcagctgagcgatggcaacgtcggcagcggggccaccggctcccgcccagaaggcttggccgcagtagatatagggtcggaaaggggctctagcagcgctaccagcgtctctgcagtgccagccgatcgaaagtcaaactcaacagctgcccaggaagatgcgaaggccgaccccaagggcgcattagccgactatgaaggaaaagacgtcgctactcgcgtcggagaagcctggcaggaaaggccgggtgcaccccgaggggggcagggagaccctgcggtgcccgctcagcagcccgctgatccaagtacccctgaacggcagagctcaccttccgggagtgaacagcttgtccggagggagtcgtgtggatcaagtgtgctcacggactttgagggcaaggatgttgcaacaaaagtcggcgaggcgtggcaagatcggcccggagcacccaggggaggacagggtgatccggccgttcctacccaacagcccgcagacccatccacacctgagcagcagaactctccgtcgggcagcgaacagtttgttagacgtgagagttgcacttcacgagtacgatcaccttcatcctgcatggtgactgtgaccgtgaccgccacaagcgaacagccacatatatatatcccagcacccgcatcagagctggatagctcttctacaacaaaggggatcctcttcgttaaagaatacgtcaatgcctcagaggtctcgtccggaaagccagtaagcgccaggtattcaaatgtctcatcaatcgaggactcttttgctatggaaaagaaaccaccctgcggatcaactccatattctgaaagaacgacagggggaatctgtacatattgtaatcgggaaatacgggactgccctaaaataactctggagcaccttggcatctgctgccatgagtattgcttcaaatgtggtatctgttccaaaccaatgggagacttgcttgatcagatttttattcaccgggacacaattcattgcggcaaatgctacgagaaactgttctag

SEQ ID NO: 18168 - DNA, 1146 bp, synthetic construct
  misc_feature 1..1146: note = Description of Artificial Sequence: Synthetic coding sequence
  source 1..1146: mol_type = other DNA
atgacaacagaggattacaaaaagttggccccctataacattaggcgcagctctaccagtggggacaccgaagaagaagaggaggaagaggtggtacccttctcttctgatgagcagaaacgccgtagtgaggccgcctccggcgtgctgcggcgcaccgccccccgcgaacacagctacgttctcagcgcggctaaaaagtccactggatcacctacccaagagacgcaagctcccttcattgccaagagagtggaggtggtggaagaagacggcccctctgagaagtcacaggatccaccagccttggcccgctctacaccaggatctaactctgcagatggaggtcgtacaaaggcctcgagagcaatatggattgagtgtctgcccagtatgcctagtcctgctggcagtcaggagctgtcgtcccggggcgaagaaattgtccgactgcagatcctcacaccccgcgccggtctgcggctggtggcaccagacgtggagggcatgcgtagctcaccaggtaacaaagataaggaggcaccctgcagcagagaacttcagcgggatctggcaggcgaagaagcctttcgagccccgaatacagatgcagcgaggtccagtgcccagctttcagacggtaacgtggggtccggcgcgacaggatccagaccggaaggccttgctgccgtcgacattggatcagagcgcggctcctcttcagctacgtctgtgtcagcggtgcccgccgaccgcaagagcaatagtaccgcagctcaggaggacgccaaagctgaccctaagggggccttagccgattatgagggcaaggatgtcgcaacgcgcgtcggggaagcctggcaggagcgcccaggtgcccctaggggcggccagggggatcctgccgtgccagcacaacagccagccgatccttccactcctgagagacagtcttctccctcagggtctgagcagctggtgcgccgagagagttgtgggtcgtctgtgctgactgactttgagggcaaggacgtggccaccaaagtgggtgaagcttggcaagatagacctgggcccagctgcacacactctgcaacttgcagatcccagtatccaaggacagctgagcagccccagcgaatatag

SEQ ID NO: 18169 - DNA, 636 bp, synthetic construct
  misc_feature 1..636: note = Description of Artificial Sequence: Synthetic coding sequence
  source 1..636: mol_type = other DNA
gaagaagcttttcgagcccctaacactgacgcagcgcgatcttctgcccagcttagcgatggaaatgttggctctggtgccaccggaagccggcctgaggggctcgccgctgtggacatcggaagcgaaagaggtcggctctgtgccgccgcgtcttttgcatcctttctcgaggatcaagacggccactcagccaatagtcagagctgtaagcctcggcctgccgctatctcctcatccgccacgagcgtctcagcggtgcctgccgaccgcaagtcgaattcgacagcagcgcaggaagacgctaaagcggaccccaaaggagcgctggcagactatgaaggcaaagacgttgccacaagggtgggcgaagcttggcaggagcggcctggcgccccacgcggtggccaaggggatccagccgttccggcccagcagcccgctgatccatccactcccgaacgccagagctctccctcagggtccgagcagctggtgcggagggaatcttgcggcagtagtgtcttgacggatttcgaaggtaaggatgtggccaccaaagttggtgaagcttggcaagacagacccggcgctccacgtggcgggcaaggcgatccggcagtccctactcaatag

SEQ ID NO: 18170 - DNA, 666 bp, synthetic construct
  misc_feature 1..666: note = Description of Artificial Sequence: Synthetic coding sequence
  source 1..666: mol_type = other DNA
tgacttaggaggacggcgcctcgcgaacacagctatgtcctctccgccgctaaaaagtccaccggatccccgacccaggagacacaagccccattcatcgccaagagagtggaagtggtggaggaggacggaccctcagagaaatcccaagatcctcccgcacttgcacgttcgaccccaggctctaactcagccgatggcggtcggaccaaagcaagcagagccatatggattgagtgtttaccttccatgccttctcccgctgggagccaggagctgtcttccaggggcgaagaaatcgtaagactgcagatcttgaccccacgcgctggcctgagactggtcgccccagacgttgaaggcatgcgaagtagccctggcaataaggacaaggaggccccctgttctagggaactgcaaagggatttagccggggaagaagccttcagagcccccaacacagatgcagcccgaagtagcgcgcaactctcagacggcaacgtcggatctggagccactggctcaagaccggagggtctggctgcggttgacatcggttcagagagaggttcttcaagcgccacatcagttagtgccgtgccagctgatagaaagtctaactcaacggctgctcaggaagatgccaaagcagatcccaagggctag

SEQ ID NO: 18171 - DNA, 414 bp, synthetic construct
  misc_feature 1..414: note = Description of Artificial Sequence: Synthetic coding sequence
  source 1..414: mol_type = other DNA
taggtgctcccacgcaggcatcgacataggctgtcacgacgcggctggagatggtggaaacggactggactgctgcgtagagcaagaacacacttactgtggcaggaccctctgcttgcacagactgtgaggatggaagccggtcctaagaggttgggacaatttggtagtagtgcctgtcaagtgtgtctggctcccttaggcgcccggtcatccgggctcccacaggcaaccaagaccaggcggcccccagccccggagtcatctaggggtacatggcttgtcagacgtctgagcgggccccccactcagatgcttcaggctcccgtcccattacagtctttgctgagcttgttgattggcagagccaccgcgcaacaaccaagacgcatgcagagacagacgcagcgttag

SEQ ID NO: 18172 - DNA, 2073 bp, synthetic construct
  misc_feature 1..2073: note = Description of Artificial Sequence: Synthetic coding sequence
  source 1..2073: mol_type = other DNA
atgtcaatcagtgccctgggcggacggaccaaggggaaaccacttcccccaggagaagaggaacgaaataacgtgcttaagcaaatgaaggttaggaccaccctgaagggggataaaagctggattacaaagcaggacgagtccgagggccgcactatagaacttccgtctggcaggtcaagggcgacgtcatttagcagcgccggcgaagtgccgaagccgcgccctcccagtacacgagcccccaccggctacattattcgcggagtgtttacgaaacctatcgactcctcatcccagcctcaacagcagttccccaaggccaatggcactccgaaatctgcggccagtctggtgcggaccgcaaatgccggtcccccccggccaagtagctccggttataagatgaccaccgaagactacaaaaagctagcaccatacaatatccgcaggagctccacgtcaggcgacactgaggaggaggaagaagaggaagttgtgcctttctcctccgacgagcagaagcgcaggagtgaagcggccagcggcgttctgcggaggactgccccccgtgaacacagttacgtgttgtcagccgcgaagaagagtaccggttcccccacacaggagacccaggccccttttatcgccaagcgggtggaggtggtcgaagaggacggccctagcgagaagtcccaggatcccccagcactggcaagatcaactcctgggtccaattccgccgatggaggccgtaccaaagcctcaagggcaatctggattgaatgcttgccctcgatgccctcacccgctgggagtcaggaactgagtagccgaggcgaagagatcgtgaggctgcagattcttaccccgagggcaggcctccggcttgttgctcctgatgtggagggcatgcggagttccccaggcaacaaagacaaggaggccccgtgctctcgcgagcttcaacgggacctggctggtgaggaagcgtttagagctcctaatacagacgccgctaggagcagcgctcaacttagtgatggtaatgtagggtctggagcaacaggctcaagaccagaagggctggcagctgtggacataggatccgagcgggggtcgtcaagtgccacctcagtgtccgccgttccagcagaccggaagagcaacagcaccgccgcacaggaggatgcaaaagccgatcctaagggagccttagcagactatgaaggcaaggatgtggcgacacgggtcggtgaagcttggcaggaacgacccggagcaccccgtgggggccagggggacccagccgtgccggcccagcagcccgccgacccatcgacaccagaacgacagagcagtccttctggctctgagcagctagtgaggcgagagtcatgcggctcttccgtgctgacagatttcgaggggaaagacgtggccaccaaggtgggtgaagcttggcaggaccgccctggcgcacctagagggggacaaggcgatccagcagtccctacccagcagccagcagacccctctacgcccgagcagcagaatagtcccagcggcagcgagcagtttgtgcgtcgggagtcctgcactagccgtgtgcgctccccctcgtcctgtatggtaaccgtgacggtgacagccaccagcgagcagcctcacatttatattcccgcacccgccagcgagctcgatagctccagcaccacaaagggcatcctgtttgtgaaagagtacgtgaacgccagcgaggtgtcttcaggcaagccagtctcagctcgctattccaatgtctcctcaattgaagacagctttgctatggagaaaaagcctccatgtggtagtacgccttactccgaaagaaccacagggggaatatgtacttactgtaatcgtgagattagggactgccccaaaatcaccctcgaacatctcggaatctgctgtcacgaatactgctttaaatgcggcatctgctctaagcctatgggagatctcctggatcagattttcattcatagagacaccattcattgcggtaaatgctacgagaaactgttttag

SEQ ID NO: 18173 - DNA, 993 bp, synthetic construct
  misc_feature 1..993: note = Description of Artificial Sequence: Synthetic coding sequence
  source 1..993: mol_type = other DNA
tagtctgagatggcagcccgggatgagctcggtctcggcggagactcacttgaggctatgcccgttcccgctgctaggggaagacctagaatcactaacgggcccgaggagctcgcggctccgtctcccgctgctcttgctgactatgagggaaaagacgtcgccactcgcgttggcgaggcctggcaagagagacctggggcccctcggggtggccagggcgaccccgctgtgccagcccagcagccggccgacccctctactcctgagcggcaaagttctccgtctggcagcgaacaactggtgcgaagagaatcttgcggatcaagtgtgctcaccgactttgagggaaaggacgtagccacaaaagtgggcgaagcctggcaggacaggccgggagccccccggggcgggcagggggatcccgccgtgccgacacagcagcctgccgacccctccacacccgaacaacagaactcaccttcgggatctgagcagtttgtgagaagagagagttgcacctcgagagtgaggagcccgtctagttgtatggtcacagtgaccgtgaccgccacgtctgaacaacctcatatttacataccagcaccagcgagtgaacttgattcctcctccacaaccaaggggattctcttcgtgaaagaatatgttaacgccagtgaggtgtcatctggcaaacctgtgtccgctaggtattcaaacgtctcatccatcgaagattcttttgctatggagaagaaacctccttgtggcagcacaccctacagtgagaggaccacaggaggtatttgcacttactgcaatcgcgagatccgcgactgccctaagattaccctggagcaccttggaatctgctgtcatgagtattgtttcaaatgcgggatttgtagcaaaccaatgggcgatctcctggaccagatctttatccaccgagacaccatacattgcggaaagtgctacgaaaagctgttttag

SEQ ID NO: 18174 - DNA, 1575 bp, synthetic construct
  misc_feature 1..1575: note = Description of Artificial Sequence: Synthetic coding sequence
  source 1..1575: mol_type = other DNA
atgacaactgaagattacaagaaacttgcaccctacaacatacgacgttcctctacatcaggagacactgaggaggaggaagaagaggaagtggtgccattttccagtgatgagcaaaaaaggaggagcgaggctgcaagcggagtgctgcgacgcaccgctccccgagagcatagttacgtgctgtccgcggccaagaagagtaccggtcccacccaagagacccaggccccgttcatcgccaagagagtggaagtagtagaggaggatgggccaagtgagaagtctcaagatccaccagccctcgccagatctacgcctggctcaaacagttccaggggagaagagatagtgcgcctgcagattttgacccctcgcgccggtctccggctagtggctcctgatgttgaaggcatgcggtcgtcaccaggaaataaggataaggaggctccgtgctcacgcgagctgcagagggatctggctggggaggaggcatttcgcgctccaaacacggacgccgccagatcaagcgctcaactctctgacggcaatgtaggcagtggtgcaactggctctcgcccggagggcctcgccgcggtggacattggttcagagagggggtcctcctctgcgaccagcgtgtctgccgtaccagcagataggaagtcgaactcaaccgccgcacaagaagatgccaaggcggatcctaaaggagcacttgcagactacgaggggaaggacgtggccacacgagtgggtgaggcctggcaggaaagacctggggctccccgcgggggacagggagaccccgccgtgccggctcagcagccagctgatcccagtactcctgagcgccagagcagtccatctggaagtgaacagctggtcagacgggagtcttgtggatcgtcagttctgaccgacttcgaagggaaagatgtcgctaccaaggttggagaggcctggcaggatcgtcctggagcgcctaggggcggccagggcgatcctgccgtacccactcagcaacctgccgacccgagtacaccagagcagcagaattcccccagcggctctgaacagtttgtgaggagggagtcatgcacgtctcgcgtaagaagccctagctcctgtatggttaccgtcactgtcaccgcaacctcggagcagcctcatatctatatcccagctccagcttccgagttggatagcagttccactactaaaggcatcctcttcgtgaaggaatacgtcaatgcctccgaggttagctcgggcaaaccagtctctgctcgctattctaatgtgagctccattgaggactcttttgccatggaaaaaaaacctccttgtggctcgaccccttacagcgagaggactaccggcggcatctgcacttattgcaatcgagagatccgggactgtcccaaaatcacacttgaacatctgggcatctgctgccatgagtattgcttcaaatgtggtatttgctctaagccgatgggcgacctgctggaccagatttttattcatagagacaccatccactgcggcaaatgctacgaaaaactgttttag

SEQ ID NO: 18175 - DNA, 2166 bp, synthetic construct
  misc_feature 1..2166: note = Description of Artificial Sequence: Synthetic coding sequence
  source 1..2166: mol_type = other DNA
atgagcatcagcgccctcggggggcggacaaaaggaaaacccctgccccccggtgaagaggaacggaacaatgttcttaaacagatgaaggtgcgcacaaccctgaagggagacaagagctggattaccaaacaggatgaaagcgaaggtaggacaattgaactcccttccggacgcagcagagctacgtcctttagttccgctggagaggtgcccaaaccacggcccccctcgacgagggcgccaacaggatacattataaggggagtgtttacgaaacccatcgattcatccagccagccccagcaacagttcccgaaagcaaatggaacccccaaaagcgcagccagcctggtccgaactgcgaatgctggaccaccaagacccagctctagtggatataagatgaccaccgaggactacaaaaaacttgccccctacaacatcagaaggagctccacctccggggacactgaagaggaggaggaagaggaggtcgtcccattcagttcggatgaacagaaacgcagaagtgaggccgctagcggcgtcctgagacgaacagccccacgagaacatagttacgtactaagcgctgctaagaagtctactggccctacgcaggagacacaggccccattcatagccaaaagagtcgaggtggttgaggaagatggcccaagcgagaagagtcaggatccacctgctcttgctcgcagcacccccggctcaaattccgcagatggcggccgaaccaaagcaagcagagcgatttggatcgaatgtctgccatcaatgccttctccggccgggagccaggagttatcctcacgtggtgaagagattgttaggctgcagatcctgaccccgcgagccggactccgcctggttgcccccgatgtggaaggcatgaggtcctcgccggggaacaaagacaaggaggctccctgtagcagagaactgcagagagacctggctggtgaagaagcttttcgcgctcctaacacggacgccgcgaggtcttccgctcagctgagcgatggtaacgtggggtctggagcaacagggagccgccctgaggggctggctgccgtcgacattggatccgaacgtggtaggctttgtgccgccgcctctttcgccagttttcttgaagaccaagacggccacagcgcaaattcacagagttgtaaacccagacctgccgccatctcgagttctgcaacctccgtaagcgccgtcccagccgaccgcaagagtaattctacggccgcccaggaagatgctaaggctgatcctaagggcgcattggcggactacgagggcaaagatgtcgctacccgagtgggggaagcctggcaggagcgaccaggcgccccaagggggggacagggggatccagcggtacccgcacagcagcccgctgatccgtcgacccccgagcggcagtcctccccttccggttcagaacagctggtgcggagggaatcatgtggatcatctgtactgacagattttgagggtaaggatgtggctaccaaggtgggggaggcatggcaagatagaccgggtgcccctagaggtggccaaggcgacccagctgtccctacacaacaaccagcagacccatccacgccagagcagcagaacagcccgtctggctctgaacagttcgtgcggcgtgagagttgcacctcaagggtgagaagtcccagcagttgtatggtgacggtaaccgtgacagccacttcagaacagccgcatatttatatccctgccccagcaagtgaactcgattcttcatctactacgaaagggattcttttcgtgaaggagtacgtcaatgccagtgaagtgtctagcggcaagcccgtgtctgcacggtattcaaatgtctcctctattgaggacagctttgctatggagaaaaagccaccctgtggttcaaccccatattccgagcggaccaccggcggcatatgtacgtattgcaatcgggagatccgagactgccccaagattacattggagcacctgggcatttgttgtcacgagtattgcttcaaatgtggcatttgctccaaaccgatgggcgacctgcttgatcaaattttcatacaccgtgataccatccactgtggaaagtgctacgagaagctgttttag

SEQ ID NO: 18176 - DNA, 2079 bp, synthetic construct
  misc_feature 1..2079: note = Description of Artificial Sequence: Synthetic coding sequence
  source 1..2079: mol_type = other DNA
atgtcaatatccgcactgggcggacgcacaaagggcaaaccattaccgccaggtgaagaggagaggaataacgtactcaaacagatgaaagtaaggacaaccctaaagggcgataagtcatggattacgaaacaagatgagtccgaaggacgtactattgaactgccatcgggacgcagtcgcgcaacatcatttagctctgccggcgaagtccccaaaccccgccctcccagcacgcgcgcacccactggctacataattcgaggtgtttttaccaagcctatagatagtagttcgcaacctcagcagcagttccctaaggccaacggcactccaaagagcgctgcaagtctagtaagaacagccaatgccgggccgccacgaccttcctcctctggctacaagatgaccaccgaggattacaaaaagctagcaccatacaacataagaagatccagtaccagcggagacaccgaagaagaggaagaagaggaggtggtgcccttttcatctgatgagcagaagcgcaggagcgaggccgccagcggcgtcttgagacgaaccgccccaagggagcattcttatgtcctttcagctgcaaagaaatcgaccgggcctacccaggaaactcaggcccccttcatagcaaagcgcgttgaggtggtggaggaagacggaccctccgagaaaagtcaggatcccccggccctcgcaaggagtaccccaggatctaatagtgcagacggcggtcgcaccaaagcctcccgggccatttggattgagtgtctccccagtatgcctagcccggccggttcccaggaactgaggagctcccccgggaacaaggataaagaggcaccctgtagtcgtgagctgcagcgtgatctggccggcgaagaggctttcagagcccctaatactgacgctgcccgcagctccgcccaacttagcgacgggaatgtcggatcaggagcaactggatcacggcctgaagggttggctgcagtggacatcggatcggagcggggcaggctctgtgccgccgcatcttttgctagttttcttgaagaccaagacggacactccgcaaacagccagagctgtaaaccccgaccggccgccatctcaagttccgcaaccagcgtatccgctgttccagccgaccgaaagagtaactccacagccgcacaggaggacgctaaagctgatcctaagggagcattagccgattacgaaggaaaggacgtggccacgagagtgggggaggcctggcaggaacggcctggagcccctcgcggggggcagggagatcctgccgtccccgctcagcagccagctgaccccagtaccccggagcgccagtcatctcctagcgggagtgagcaactggtgagacgggaaagttgcggatccagcgtgctcacagattttgagggcaaggatgttgccactaaagtcggcgaggcttggcaagacaggccaggtgcaccgcgaggaggccagggcgacccagccgtccctactcagcagcctgcggacccctccacgcctgagcagcaaaatagcccctcgggatctgagcaattcgttaggagagaaagctgtacctctcgggtccggtccccttcctcctgcatggttactgtgaccgtgaccgccacaagtgaacagccacatatctatataccagcccctgcctccgaactcgacagctcatcgacaaccaaaggaattctatttgttaaggagtacgtgaatgccagtgaggtgagcagtggcaagccagtttctgctagatacagtaacgtttctagcattgaggattcatttgcgatggagaaaaagcccccctgtggtagcaccccttattcagagcgcaccaccggtggcatatgtacctactgcaatagagagattcgggactgcccaaagattacgctggaacatttggggatatgttgtcacgagtattgtttcaaatgtggaatttgctccaaacccatgggggacttgctagaccagattttcattcacagagataccatccattgtgggaagtgttacgagaaactcttctag

SEQ ID NO: 18177 - DNA, 1899 bp, synthetic construct
  misc_feature 1..1899: note = Description of Artificial Sequence: Synthetic coding sequence
  source 1..1899: mol_type = other DNA
atgcagcgggaggagggctttaacacgaaaatggccgacgggcctgatgaatacgacacagaagcggggtgtgtacctctcttacaccccgaggaaattaagcctcaatcccattataatcatggctacggagagccactcggccggaaaacacacattgacgactacagcacctgggatattgtcaaagcaacacagtatggcatctatgagaggtgcagggaactggttgaggccggttacgacgttagacaacctgacaaagaaaacgtgaccctgctgcattgggccgccattaacaatcggatcgatcttgtcaagtactacatctccaagggcgctatcgtcgaccagctggggggagatcttaatagcacgcctctccattgggcaacaagacaaggacacctgtcaatggtcgttcaactcatgaagtacggcgcagatcctagtctcatagatggcgagggatgctcttgcatccaccttgcagcccagtttggtcatacctcgatcgtcgcctatctgattgcaaaagggcaggatgtagacatgatggatcagaacgggatgactccattaatgtgggccgcatatcggacccattccgtggaccccaccaggctgctcttaaccttcaatgtgagcgtcaatctcggcgacaaatatcacaagaataccgcgctgcactgggctgtcttggccggaaacactacagtcatctcactgctactagaggcaggagccaatgtggacgcgcagaacatcaaaggagaatccgcgctggatttggccaagcagcggaagaacgtgtggatgataaatcacctccaggaggcgagacaggcaaaaggatatgacaatcctagcttcctgcggaaactgaaggccgacaaagaatttcggcagaaagtcatgcttggcacccctttcctcgtaatttggctcgtgggttttatcgcagacctaaatatcgatagttggctcattaaaggcctcatgtatggcggagtatgggctactgtgcagttcctgtccaagagcttttttgatcattccatgcacagtgcgctgcctctcgggatctatttggccactaagttctggatgtatgtgacctggtttttttggttctggaatgatctcaattttctgtttatccatctaccattcttggcaaattctgtagccctgttttataacttcgggaagagttggaagagtgatccagggattataaaagctacagaggaacaaaagaagaagacaatagtggagcttgccgagacgggatccctagacctgtctattttctgttccacttgcttgatacgaaaaccagtgcggagcaaacactgcggtgtgtgtaatcgctgcatagctaagttcgatcaccattgcccctgggttggaaattgtgtgggtgccggtaaccacaggtactttatggggtacttgttctttttgttgtttatgatatgctggatgatctacggctgcattagttattggggactccactgcgaaaccacttataccaaggacgggttttggacatatattacacagatcgcgacttgtagcccatggatgttctggatgtttcttaattccgtatttcattttatgtgggttgcagtcctgttgatgtgtcagatgtatcagattagttgtctcgggatcaccactaatgaaaggatgaacgctcgaaggtacaagcatttcaaagtgaccactacctccatcgagagcccatttaaccacgggtgtgttcgaaatattattgacttctttgaattcagatgttgcgggttatttaggcctgtgatcgtcgattggactcggcaatacacgattgaatatgatcaaatatccggctccggataccagctagtttag

SEQ ID NO: 18178 - DNA, 651 bp, synthetic construct
  misc_feature 1..651: note = Description of Artificial Sequence: Synthetic coding sequence
  source 1..651: mol_type = other DNA
atgtccaccataccaaagagggccgtttgtccctttagcacacagaggtacgggatctacgagagatgccgggaactcgttgaagcaggctatgacgtcagacaaccagacaaagaaaacgttacgctgctgcactgggcagcaatcaataaccggatagatttagtgaaatattatattagcaagggcgccatcgtcgaccagctaggtggggacctgaacagcacaccgctgcactgggctacaaggcagggtcacttgtccatggtagtccagctgatgaaatacggcgcagatcccagcctaattgacggggaaggctgtagctgtatacacctggcggcacagtttggtcatacgtccatagtcgcctatctgatcgctaaagggcaagacgttgatatgatggatcaaaatggcatgaccccactcatgtgggccgcgtacagaacacactccgtcgacccgactcgcctgctgctgacatttaacgtctctgtaaatcttggggacaaataccacaagaatactgcgctccactgggccgtgcttgccggcaacacaactgtaatatcacttttgctcgaggcgggcgccaacgtcgatgcacagaacattaaagcaatactgcggtgtcatatggccttatag

SEQ ID NO: 18179 - DNA, 1899 bp, synthetic construct
  misc_feature 1..1899: note = Description of Artificial Sequence: Synthetic coding sequence
  source 1..1899: mol_type = other DNA
atgcagagagaggaaggattcaatactaaaatggccgatgggcccgacgagtacgacaccgaggcaggatgtgtccccttactgcacccggaggaaattaaaccacagagccactacaaccacggatatggcgaacccctgggccgaaaaacccacatcgacgactactccacctgggatattgtgaaagcgacccagtatggtatttatgaacgttgtcgcgaactggtggaggcgggatatgacgttagacagccggataaggagaatgttactctactgcactgggctgcaatcaacaaccgtattgatctcgttaaatactatatatctaagggggcaatcgtggatcagctggggggggaccttaattccactccactgcattgggcaacacgtcagggtcacctgtctatggttgtgcagcttatgaagtacggagctgacccatccttgattgatggggagggatgttcctgcattcatctagcagcccagttcgggcacactagcatcgtagcgtatttgatcgctaagggccaggatgtggacatgatggaccagaatggaatgacaccactgatgtgggccgcatataggacccactctgttgacccaacaaggctgctgctgacctttaatgtgtctgtcaaccttggcgataagtatcacaagaacacagcactccattgggctgtgctcgcggggaatacaactgtaatcagcctccttttggaggcgggagctaacgtcgatgctcagaatattaagggggagtccgcactagatctggccaaacaacgaaaaaacgtctggatgatcaatcatttgcaggaggcaaggcaagcaaagggatacgacaatccaagctttctgcggaagctgaaggccgacaaagaattcagacaaaaggtgatgttaggaaccccttttctggtcatttggctggtggggttcattgcggatttgaatattgattcctggctgatcaaggggttaatgtacgggggagtgtgggccacggtccagtttttatccaaaagttttttcgaccattctatgcactccgccctccctctcggcatctacctggcaacgaaattctggatgtacgtaacttggtttttctggttctggaacgacctcaactttctctttattcatctgccttttctggccaatagcgttgcattattttacaatttcggaaagtcttggaagtccgatcctgggatcattaaagctaccgaggaacagaaaaagaaaacaatcgtcgaactagctgaaactgggtcgctggatctatctatcttctgttccacttgtttaatcagaaagccagtgcgaagcaagcactgcggtgtgtgcaaccgctgtattgcaaaattcgatcaccactgtccatgggtaggcaattgtgtgggcgctggcaaccaccgatacttcatggggtatctgttctttctgctattcatgatctgctggatgatctatggctgcatatcctattgggggctgcattgtgaaactacatacacgaaggacgggttctggacgtatataacacaaattgctacatgtagcccctggatgttctggatgtttcttaatagcgtgttccactttatgtgggtggccgtgctgctgatgtgtcagatgtaccagattagctgtctggggatcacaactaatgaacggatgaatgcccgaaggtataaacacttcaaagtgaccactacgtcgatcgagtcccccttcaaccacgggtgtgtccgtaacataattgatttttttgaattccgatgctgtggcctgttccggcccgtgatcgtcgattggacaaggcagtacaccattgagtatgatcagatcagtggttcaggctatcagcttgtttag

SEQ ID NO: 18180 - DNA, 2667 bp, synthetic construct
  misc_feature 1..2667: note = Description of Artificial Sequence: Synthetic coding sequence
  source 1..2667: mol_type = other DNA
atgctgagccgcctcttcaggatgcacggcctgtttgtggccagccacccctgggaggtgattgtgggcaccgtgaccctgaccatctgcatgatgtccatgaacatgttcaccggcaacaacaagatctgtggctggaactatgaatgtcccaagtttgaagaagatgtgctgagcagtgacatcatcatcctgaccatcacccgctgcatcgccatcctgtacatctacttccagttccagaacctgcggcagctgggcagcaagtacatcctgggcattgctggcctcttcaccatcttcagcagctttgtgttcagcacagtggtgatccacttcctggacaaggagctgaccggcctgaatgaggccctgcccttcttcctgctgctgattgacctgagccgggccagcaccctggccaagtttgccctgagcagcaacagccaggatgaggtgagagaaaatattgcccggggcatggccatcctgggccccaccttcaccctggatgccctggtggagtgcctggtgattggagtgggcaccatgtctggagtgcggcagctggagatcatgtgctgcttcggctgcatgtctgtgctggccaactactttgtgttcatgaccttcttccctgcctgtgtgtccctggtgctggagctgagccgggagagccgggagggccggcccatctggcagctgagccactttgcccgggtgctggaggaggaggagaacaagcccaaccctgtgacccagagggtgaagatgatcatgagcctgggcctggtgctggtgcacgcccacagccgctggattgctgaccccagcccccagaacagcacagctgacaccagcaaggtgtccctgggcctggatgaaaatgtgtccaagagaattgagcccagcgtgtccctgtggcagttctacctgagcaagatgatctccatggacatcgagcaggtgatcaccctgagcctggccctgctgctggccgtgaagtacatcttctttgagcagacagaaacagagagcaccctgagcctgaagaaccccatcaccagccctgtggtgacccagaagaaggtgcctgacaactgctgccggcgggagcccatgctggtgaggaacaaccagaagtgtgacagcgtggaggaggagaccggcatcaaccgggagaggaaggtggaggtgatcaagcccctggtggccgagacagacacccccaacagagccacctttgtggtgggcaacagcagcctgctggacaccagctctgtgctggtgacccaggagcctgagattgagctgccccgggagccccggcccaatgaagaatgtctgcagatcctgggcaatgctgagaagggggccaagttcctgagtgatgctgagatcatccagctggtgaatgccaagcacatcccagcctacaagctggagaccctgatggagacccatgagcggggcgtgtccatccggcggcagctgctgagcaagaagctgtctgagcccagcagcctgcagtacctgccctacagagactacaactacagcctggtgatgggcgcctgctgtgaaaatgtgattggctacatgcccatccctgtgggcgtggccggccccctgtgcctggatgagaaggagttccaggtgcccatggccaccacagagggctgcctggtggccagcaccaacagaggctgccgggccatcggcctgggcggcggggccagcagccgggtgctggctgatggcatgacccggggccctgtggtgcggctgccccgggcctgtgacagcgctgaggtgaaggcctggctggagaccagcgagggctttgctgtgatcaaggaggcctttgacagcaccagcagatttgcccggctgcagaagctgcacaccagcattgctggaagaaacctgtacatccgcttccagagccgctctggagatgccatgggcatgaacatgatcagcaagggcacagagaaggccctgagcaagctgcacgagtacttccctgagatgcagatcctggccgtgtctggcaactactgcacagacaagaagccagctgccatcaactggattgagggccggggcaagtctgtggtgtgtgaggccgtcatcccagccaaggtggtgcgggaggtgctgaagaccaccacagaggccatgattgaggtgaacatcaacaagaacctggtgggcagcgccatggccggcagcatcggcggctacaatgcccatgctgccaacatcgtgacagccatctacatcgcctgtggccaggatgctgcccagaatgtgggcagcagcaactgcatcaccctgatggaggccagcggccccaccaatgaagatctctacatcagctgcaccatgcccagcattgagatcggcaccgtgggcggcggcaccaacctgctgccccagcaggcctgcctgcagatgctgggcgtgcagggcgcctgcaaggacaaccctggagaaaatgcccggcagctggccagaattgtgtgtggcaccgtgatggccggggagctgagcctgatggccgccctggccgccggccacctggtgaagagccacatgatccacaacagaagcaagatcaacctgcaggacctgcagggcgcctgcaccaagaagacagcctag

SEQ ID NO: 18181 - DNA, 2508 bp, synthetic construct
  misc_feature 1..2508: note = Description of Artificial Sequence: Synthetic coding sequence
  source 1..2508: mol_type = other DNA
atgctgagccgcctcttcaggatgcacggcctgtttgtggccagccacccctgggaggtgattgtgggcaccgtgaccctgaccatctgcatgatgtccatgaacatgttcaccggcaacaacaagatctgtggctggaactatgaatgtcccaagtttgaagaagatgtgctgagcagtgacatcatcatcctgaccatcacccgctgcatcgccatcctgtacatctacttccagttccagaacctgcggcagctgggcagcaagtacatcctgggcattgctggcctcttcaccatcttcagcagctttgtgttcagcacagtggtgatccacttcctggacaaggagctgaccggcctgaatgaggccctgcccttcttcctgctgctgattgacctgagccgggccagcaccctggccaagtttgccctgagcagcaacagccaggatgaggtgagagaaaatattgcccggggcatggccatcctgggccccaccttcaccctggatgccctggtggagtgcctggtgattggagtgggcaccatgtctggagtgcggcagctggagatcatgtgctgcttcggctgcatgtctgtgctggccaactactttgtgttcatgaccttcttccctgcctgtgtgtccctggtgctggagctgagccgggagagccgggagggccggcccatctggcagctgagccactttgcccgggtgctggaggaggaggagaacaagcccaaccctgtgacccagagggtgaagatgatcatgagcctgggcctggtgctggtgcacgcccacagccgctggattgctgaccccagcccccagaacagcacagctgacaccagcaaggtgtccctgggcctggatgaaaatgtgtccaagagaattgagcccagcgtgtccctgtggcagttctacctgagcaagatgatctccatggacatcgagcaggtgatcaccctgagcctggccctgctgctggccgtgaagtacatcttctttgagcagacagaaacagagagcaccctgagcctgaagaaccccatcaccagccctgtggtgacccagaagaaggtgcctgacaactgctgccggcgggagcccatgctggtgaggaacaaccagaagtgtgacagcgtggaggaggagaccggcatcaaccgggagaggaaggtggaggtgatcaagcccctggtggccgagacagacacccccaacagagccacctttgtggtgggcaacagcagcctgctggacaccagctctgtgctggtgacccaggagcctgagattgagctgccccgggagccccggcccaatgaagaatgtctgcagatcctgggcaatgctgagaagggggccaagttcctgagtgatgctgagatcatccagctggtgaatgccaagcacatcccagcctacaagctggagaccctgatggagacccatgagcggggcgtgtccatccggcggcagctgctgagcaagaagctgtctgagcccagcagcctgcagtacctgccctacagagactacaactacagcctgctgggcggcggggccagcagccgggtgctggctgatggcatgacccggggccctgtggtgcggctgccccgggcctgtgacagcgctgaggtgaaggcctggctggagaccagcgagggctttgctgtgatcaaggaggcctttgacagcaccagcagatttgcccggctgcagaagctgcacaccagcattgctggcaggaacctgtacatccgcttccagagccgctctggagatgccatgggcatgaacatgatcagcaaaggaacagagaaggccctgagcaagctgcacgagtacttccctgagatgcagatcctggccgtgtctggcaactactgcacagacaagaagccagctgccatcaactggattgagggccggggcaagtctgtggtgtgtgaggccgtcatcccagccaaggtggtgcgggaggtgctgaagaccaccacagaggccatgattgaggtgaacatcaacaagaacctggtgggcagcgccatggccggcagcattggaggctacaatgcccacgccgccaacatcgtgacagccatctacatcgcctgtggccaggatgctgcccagaatgtgggcagcagcaactgcatcaccctgatggaggccagcggccccaccaatgaagacctgtacatcagctgcaccatgcccagcattgaaattggaacagtgggcggcggcaccaacctgctgccccagcaggcctgcctgcagatgctgggcgtgcagggcgcctgcaaggacaaccctggagaaaatgcccggcagctggcccgcatcgtgtgtggcaccgtgatggccggggagctgagcctgatggccgccctggccgccggccacctggtgaagagccacatgatccacaacagaagcaagatcaacctgcaggacctgcagggcgcctgcaccaagaagacagcctag

SEQ ID NO: 18182 - DNA, 798 bp, synthetic construct
  misc_feature 1..798: note = Description of Artificial Sequence: Synthetic coding sequence
  source 1..798: mol_type = other DNA
atgctgagccgcctcttcaggatgcacggcctgtttgtggccagccacccctgggaggtgattgtgggcaccgtgaccctgaccatctgcatgatgtccatgaacatgttcacagagggcacagagaaggccctgagcaagctgcacgagtacttccctgagatgcagatcctggccgtgtctggcaactactgcacagacaagaagccagctgccatcaactggattgagggccggggcaagtctgtggtgtgtgaggccgtcatcccagccaaggtggtgcgggaggtgctgaagaccaccacagaggccatgattgaggtgaacatcaacaagaacctggtgggcagcgccatggccggcagcattggaggctacaatgcccacgccgccaacatcgtgacagccatctacatcgcctgtggccaggatgctgcccagaatgtgggcagcagcaactgcatcaccctgatggaggccagcggccccaccaatgaagacctgtacatcagctgcaccatgcccagcattgaaattggaacagtgggcggcggcaccaacctgctgccccagcaggcctgcctgcagatgctgggcgtgcagggcgcctgcaaggacaaccctggagaaaatgcccggcagctggcccgcatcgtgtgtggcaccgtgatggccggggagctgagcctgatggccgccctggccgccggccacctggtgaagagccacatgatccacaacagaagcaagatcaacctgcaggacctgcagggcgcctgcaccaagaagacagcctag

SEQ ID NO: 18183 - DNA, 57 bp, synthetic construct
  misc_feature 1..57: note = Description of Artificial Sequence: Synthetic coding sequence
  source 1..57: mol_type = other DNA
atgctgagccgcctcttcaggatgcacggcctgtttgtggccagccacccctggtag

SEQ ID NO: 18184 - DNA, 336 bp, synthetic construct
  misc_feature 1..336: note = Description of Artificial Sequence: Synthetic coding sequence
  source 1..336: mol_type = other DNA
atgctgagccgcctcttcaggatgcacggcctgtttgtggccagccacccctgggaggtgattgtgggcaccgtgaccctgaccatctgcatgatgtccatgaacatgttcaccggcaacaacaagatctgtggctggaactatgaatgtcccaagtttgaagaagatgtgctgagcagtgacatcatcatcctgaccatcacccgctgcatcgccatcctgtacatctacttccagttccagaacctgcggcagctgggcagcaagtacatcctgggcattgctggcctcttcaccatcttcagcagctttgtgttcagcacagtggtgatctag

SEQ ID NO: 18185 - DNA, 2667 bp, synthetic construct; identical to SEQ ID NO: 18180
  misc_feature 1..2667: note = Description of Artificial Sequence: Synthetic coding sequence
  source 1..2667: mol_type = other DNA

SEQ ID NO: 18186 - DNA, 2460 bp, synthetic construct
  misc_feature 1..2460: note = Description of Artificial Sequence: Synthetic coding sequence
  source 1..2460: mol_type = other DNA
atgcacagccaccctgtgtacctgctgcctgtgcctgagttcaccagcacctggatcaagatctacttcggctactgctggcccttccacaacttcctgaagttctgcatccagtacagctgccacagcctgctgcggcagagaattgaccggctggaggaggccctgcccttcttcctgctgctgattgacctgagccgggccagcaccctggccaagtttgccctgagcagcaacagccaggatgaggtgcgggagaacatcgcccggggcatggccatcctgggccccaccttcaccctggatgccctggtggagtgcctggtgattggagtgggcaccatgtctggagtgcggcagctggagatcatgtgctgcttcggctgcatgtctgtgctggccaactactttgtgttcatgaccttcttccctgcctgtgtgtccctggtgctggagctgagccgggagagccgggagggccggcccatctggcagctgagccactttgcccgggtgctggaggaggaggagaacaagcccaaccctgtgacccagagggtgaagatgatcatgagcctgggcctggtgctggtgcacgcccacagccgctggattgctgaccccagcccccagaacagcacagctgacaccagcaaggtgtccctgggcctggatgaaaatgtgtccaagagaattgagcccagcgtgtccctgtggcagttctacctgagcaagatgatctccatggacatcgagcaggtgatcaccctgagcctggccctgctgctggccgtgaagtacatcttctttgagcagacagaaacagagagcaccctgagcctgaagaaccccatcaccagccctgtggtgacccagaagaaggtgcctgacaactgctgcagaagagagcccatgctggtgaggaacaaccagaagtgtgacagcgtggaggaggagaccggcatcaaccgggagaggaaggtggaggtgatcaagcccctggtggccgagacagacacccccaacagagccacctttgtggtgggcaacagcagcctgctggacaccagctctgtgctggtgacccaggagcctgagattgagctgccccgggagccccggcccaatgaggagtgcctgcagatcctgggcaatgctgagaagggggccaagttcctgagtgatgctgagatcatccagctggtgaatgccaagcacatcccagcctacaagctggagaccctgatggagacccatgagcggggcgtgtccatccggcggcagctgctgagcaagaagctgtctgagcccagcagcctgcagtacctgccctacagagactacaactacagcctggtgatgggcgcctgctgtgaaaatgtcatcggctacatgcccatccctgtgggcgtggccggccccctgtgcctggatgagaaggagttccaggtgcccatggccaccacagagggctgcctggtggccagcaccaacagaggctgccgggccatcggcctgggcggcggggccagcagccgggtgctggctgatggcatgacccggggccctgtggtgcggctgccccgggcctgtgacagcgctgaggtgaaggcctggctggagaccagcgagggctttgctgtgatcaaggaggcctttgacagcaccagcagatttgcccggctgcagaagctgcacaccagcattgctggcaggaacctgtacatccgcttccagagccgctctggagatgccatgggcatgaacatgatcagcaaaggaacagagaaggccctgagcaagctgcacgagtacttccctgagatgcagatcctggccgtgtctggcaactactgcacagacaagaagccagctgccatcaactggattgagggccggggcaagtctgtggtgtgtgaggccgtcatcccagccaaggtggtgcgggaggtgctgaagaccaccacagaggccatgattgaggtgaacatcaacaagaacctggtgggcagcgccatggccggcagcattggaggctacaatgcccacgccgccaacatcgtgacagccatctacatcgcctgtggccaggatgctgcccagaatgtgggcagcagcaactgcatcaccctgatggaggccagcggccccaccaatgaagacctgtacatcagctgcaccatgcccagcattgaaattggaacagtgggcggcggcaccaacctgctgccccagcaggcctgcctgcagatgctgggcgtgcagggcgcctgcaaggacaaccctggagaaaatgcccggcagctggcccgcatcgtgtgtggcaccgtgatggccggggagctgagcctgatggccgccctggccgccggccacctggtgaagagccacatgatccacaacagaagcaagatcaacctgcaggacctgcagggcgcctgcaccaagaagacagcctag

SEQ ID NO: 18187 - DNA, 1671 bp, synthetic construct
  misc_feature 1..1671: note = Description of Artificial Sequence: Synthetic coding sequence
  source 1..1671: mol_type = other DNA
atggcccggaccaccagccagctgtatgatgctgtgcccatccagagctctgtggtgctgtgcagctgccccagccccagcatggtgaggacccagacagagagcagcaccccacctggcatccctgggggcagccggcagggccctgccatggatggaacagctgctgagcccaggcctggggccggcagcctgcagcacgcccagcccccaccccagcccaggaagaagaggcctgaggacttcaagtttgggaagatcctgggggagggcagcttcagcacagtggtgctggcccgggagctggccaccagccgggagtatgccatcaagatcctggagaagaggcacatcatcaaggagaacaaggtgccctacgtgacccgggagagagatgtgatgagccggctggaccaccccttctttgtgaagctgtacttcaccttccaggatgatgagaagctgtacttcggcctgtcctatgccaagaatggagagctgctgaagtacatcaggaagattggcagctttgatgagacctgcacccgcttctacacagctgagatcgtgtctgccctggagtacctgcacggcaagggcatcatccaccgggacctgaagccagagaacatcctgctgaatgaagacatgcacatccagatcacagactttggaacagccaaggtgctgagccctgagagcaagcaggcccgggccaacagctttgtgggcacagcccagtatgtgtccccagagctgctgacagagaagagcgcctgcaagagcagtgacctgtgggccctgggctgcatcatctaccagctggtggccggcctgccccccttccgggctggaaatgagtacctgatcttccagaagatcatcaagctggagtatgacttccctgagaagttcttccccaaggcccgggacctggtggagaagctgctggtgctggatgccaccaagaggctgggctgtgaggagatggagggctacggccccctgaaggcccaccccttctttgagagcgtgacctgggagaacctgcaccagcagaccccacccaagctgacagcctacctgcctgccatgtctgaagatgatgaggactgctacggcaactatgacaacctgctgagccagtttggctgcatgcaggtgagcagcagcagcagcagccacagcctgagcgccagtgacaccggcctgccccagaggagcggcagcaacatcgagcagtacatccatgacctggacagcaacagctttgagctggacctgcagttctctgaagatgagaagaggctgctgctggagaagcaggccggcggcaacccctggcaccagtttgtggagaacaacctgatcctgaagatgggccctgtggacaagaggaagggcctgtttgcccggcggcggcagctgctgctgacagagggcccccacctgtactacgtggaccctgtgaacaaggtgctgaagggggagatcccctggagccaggagctgcggcctgaggccaagaacttcaagaccttctttgtgcacacccccaacagaacctactacctgatggaccccagcggaaatgcccacaagtggtgcaggaagatccaggaggtgtggaggcagcgctaccagagccacccagatgctgctgtgcagtag

SEQ ID NO: 18188 - DNA, 1599 bp, synthetic construct
  misc_feature 1..1599: note = Description of Artificial Sequence: Synthetic coding sequence
  source 1..1599: mol_type = other DNA
atggcccggaccaccagccagctgtatgatgctgtgcccatccagagctctgtggtgctgtgcagctgccccagccccagcatggtgaggacccagacagagagcagcaccccacctggcatccctgggggcagccggcagggccctgccatggatggaacagctgctgagcccaggcctggggccggcagcctgcagcacgcccagcccccaccccagcccaggaagaagaggcctgaggacttcaagtttgggaagatcctgggggagggcagcttcagcacagtggtgctggcccgggagctggccaccagccgggagtatgccatcaagatcctggagaagaggcacatcatcaaggagaacaaggtgccctacgtgacccgggagagagatgtgatgagccggctggaccaccccttctttgtgaagctgtacttcaccttccaggatgatgagaagctgtacttcggcctgtcctatgccaagaatggagagctgctgaagtacatcaggaagattggcagctttgatgagacctgcacccgcttctacacagctgagatcgtgtctgccctggagtacctgcacggcaagggcatcatccaccgggacctgaagccagagaacatcctgctgaatgaagacatgcacatccagatcacagactttggaacagccaaggtgctgagccctgagagcaagcagggcgtgtctgacctgtgggccctgggctgcatcatctaccagctggtggccggcctgccccccttccgggctggaaatgagtacctgatcttccagaagatcatcaagctggagtatgacttccctgagaagttcttccccaaggcccgggacctggtggagaagctgctggtgctggatgccaccaagaggctgggctgtgaggagatggagggctacggccccctgaaggcccaccccttctttgagagcgtgacctgggagaacctgcaccagcagaccccacccaagctgacagcctacctgcctgccatgtctgaagatgatgaggactgctacggcaactatgacaacctgctgagccagtttggctgcatgcaggtgagcagcagcagcagcagccacagcctgagcgccagtgacaccggcctgccccagaggagcggcagcaacatcgagcagtacatccatgacctggacagcaacagctttgagctggacctgcagttctctgaagatgagaagaggctgctgctggagaagcaggccggcggcaacccctggcaccagtttgtggagaacaacctgatcctgaagatgggccctgtggacaagaggaagggcctgtttgcccggcggcggcagctgctgctgacagagggcccccacctgtactacgtggaccctgtgaacaaggtgctgaagggggagatcccctggagccaggagctgcggcctgaggccaagaacttcaagaccttctttgtgcacacccccaacagaacctactacctgatggaccccagcggaaatgcccacaagtggtgcaggaagatccaggaggtgtggaggcagcgctaccagagccacccagatgctgctgtgcagtag

SEQ ID NO: 18189 - DNA, 1479 bp, synthetic construct
  misc_feature 1..1479: note = Description of Artificial Sequence: Synthetic coding sequence
  source 1..1479: mol_type = other DNA
cgggcccaggatgagggcggccactgctggggcagcgccagcggccgccgcaccctgcggcggcggcgggccgcccagagatgtggcggcggggcccgggcagatgctggccccatggcccggaccaccagccagctgtatgatgctgtgcccatccagagctctgtggtgctgtgcagctgccccagccccagcatggtgaggacccagacagagagcagcaccccacctggcatccctgggggcagccggcagggccctgccatggatggaacagctgctgagcccaggcctggggccggcagcctgcagcacgcccagcccccaccccagcccaggaagaagaggcctgaggacttcaagtttgggaagatcctgggggagggcagcttcagcacagtggtgctggcccgggagctggccaccagccgggagtatgccatcaagatcctggagaagaggcacatcatcaaggagaacaaggtgccctacgtgacccgggagagagatgtgatgagccggctggaccaccccttctttgtgaagctgtacttcaccttccaggatgatgagaagctgtacttcggcctgtcctatgccaagaatggagagctgctgaagtacatcaggaagattggcagctttgatgagacctgcacccgcttctacacagctgagatcgtgtctgccctggagtacctgcacggcaagggcatcatccaccgggacctgaagccagagaacatcctgctgaatgaagacatgcacatccagatcacagactttggaacagccaaggtgctgagccctgagagcaagcaggcccgggccaacagctttgtgggcacagcccagtatgtgtccccagagctgctgacagagaagagcgcctgcaagagcagtgacctgtgggccctgggctgcatcatctaccagctggtggccggcctgccccccttccgggctggaaatgagtacctgatcttccagaagatcatcaagctggagtatgacttccctgagaagttcttccccaaggcccgggacctggtggagaagctgctggtgctggatgccaccaagaggctgggctgtgaggagatggagggctacggccccctgaaggcccaccccttctttgagagcgtgacctgggagaacctgcaccagcagaccccacccaagctgacagcctacctgcctgccatgtctgaagatgatgaggactgctacggcaactatgacaacctgctgagccagtttggctgcatgcaggtgagcagcagcagcagcagccacagcctgagcgccagtgacaccggcctgccccagaggagcggcagcaacatcgagcagtacatccatgacctggacagcaacagctttgagctggacctgcagttctctgaagatgagaagaggctgctgctggagaagcaggccggcggcaacccctgcctgaccggccgcatcatctag

SEQ ID NO: 18190 - DNA, 1290 bp, synthetic construct
  misc_feature 1..1290: note = Description of Artificial Sequence: Synthetic coding sequence
  source 1..1290: mol_type = other DNA
atggcccggaccaccagccagctgtatgatgctgtgcccatccagagctctgtggtgctgtgcagctgccccagccccagcatggtgaggacccagacagagagcagcaccccacctggcatccctgggggcagccggcagggccctgccatggatggaacagctgctgagcccaggcctggggccggcagcctgcagcacgcccagcccccaccccagcccaggaagaagaggcctgaggacttcaagtttgggaagatcctgggggagggcagcttcagcacagtggtgctggcccgggagctggccaccagccgggagtatgccacccgggccaacagctttgtgggcacagcccagtatgtgtccccagagctgctgacagagaagagcgcctgcaagagcagtgacctgtgggccctgggctgcatcatctaccagctggtggccggcctgccccccttccgggctggaaatgagtacctgatcttccagaagatcatcaagctggagtatgacttccctgagaagttcttccccaaggcccgggacctggtggagaagctgctggtgctggatgccaccaagaggctgggctgtgaggagatggagggctacggccccctgaaggcccaccccttctttgaatctgtgacctgggagaacctgcaccagcagaccccacccaagctgacagcctacctgcctgccatgtctgaagatgatgaggactgctacggcaactatgacaacctgctgagccagtttggctgcatgcaggtgagcagcagcagcagcagccacagcctgagcgccagtgacaccggcctgccccagaggagcggcagcaacatcgagcagtacatccatgacctggacagcaacagctttgagctggacctgcagttctctgaagatgagaagaggctgctgctggagaagcaggccggcggcaacccctggcaccagtttgtggagaacaacctgatcctgaagatgggccctgtggacaagaggaagggcctgtttgcccggcggcggcagctgctgctgacagagggcccccacctgtactacgtggaccctgtgaacaaggtgctgaagggggagatcccctggagccaggagctgcggcctgaggccaagaacttcaagaccttctttgtgcacacccccaacagaacctactacctgatggaccccagcggaaatgcccacaagtggtgcaggaagatccaggaggtgtggaggcagcgctaccagagccacccagatgctgctgtgcagtag

SEQ ID NO: 18191 - DNA, 5121 bp, synthetic construct
  misc_feature 1..5121: note = Description of Artificial Sequence: Synthetic coding sequence
  source 1..5121: mol_type = other DNA
atgggcgtgcccaagttctaccgctggatcagcgagcgctacccctgcctgtctgaggtggtgaaggagcaccagatccctgagtttgacaacctgtacctggacatgaatggcatcatccaccagtgcagccaccccaatgatgatgatgtgcacttccgcatcagtgatgacaagatcttcacagacatcttccactacctggaggtgctcttccgcatcatcaagcccaggaaggtgttcttcatggctgtggatggagtggccccccgggccaagatgaaccagcagaggggccgccgcttccgcagcgccaaggaggccgaggacaagatcaagaaggccatcgagaagggggagaccctgcccacagaggccaggtttgacagcaactgcatcaccccaggcacagagttcatggcccggctgcacgagcacctgaagtactttgtgaacatgaagatcagcacagacaagtcctggcagggcgtgaccatctacttcagcggccacgagaccccaggagagggggagcacaagatcatggagttcatccgctctgagaaggccaagccagaccatgaccccaacaccaggcactgcctgtatggcctggatgctgacctgatcatgctgggcctgaccagccatgaggcccacttcagcctgctgcgggaggaggtgcgctttggaggcaagaagacccagagggtgtgtgcccctgaggagaccaccttccacctgctgcacctgagcctgatgagggagtacatcgactatgagttctctgtgctgaaggagaagatcaccttcaagtatgacatcgagcgcatcattgatgactggatcctgatgggcttcctggtgggcaatgacttcatcccccacctgccccacctgcacatcaaccatgatgccctgcccctgctgtatggcacctacgtgaccatcctgcctgagctgggcggctacatcaatgaaagtggccacctgaacctgcccaggtttgagaagtacctggtgaagctgagtgactttgaccgggagcacttcagcgaggtgtttgtggacctgaagtggtttgagagcaaggtgggcaacaagtacctgaatgaagctgctggggtggccgctgaggaggccaggaactacaaggagaagaagaagctgaagggccaggagaacagcctgtgctggacagccctggacaagaatgaaggagagatgatcaccagcaaggacaacctggaggatgaaacagaagatgatgacctgtttgaaacagagttccggcagtacaagaggacctactacatgaccaagatgggcgtggatgtggtgtctgatgacttcctggccgaccaggccgcctgctacgtgcaggccatccagtggatcctgcactactactaccacggcgtgcagagctggagctggtactacccctaccactacgcccccttcctgagtgacatccacaacatcagcaccctgaagatccactttgagctgggcaagcccttcaagccctttgagcagctgctggccgtgctgcctgctgccagcaagaacctgctgcctgcctgctaccagcacctgatgaccaatgaagacagccccatcatcgagtactaccccccagacttcaagacagacctgaatggcaagcagcaggagtgggaggccgtggtgctgatccccttcattgatgagaagaggctgctggaggccatggagacctgcaaccacagcctgaagaaggaggagaggaagaggaaccagcacagtgaatgtctgatgtgctggtatgaccgggacacagagttcatctaccccagcccctggccagagaagtttcctgccatcgagcgctgctgcacccgctacaagatcatcagcctggatgcctggagggtggacatcaacaagaacaagatcaccagaattgaccagaaggccctgtacttctgtggcttccccaccctgaagcacatccgccacaagttcttcctgaagaagagcggcgtgcaggtgttccagcagagcagcagaggagagaacatgatgctggagatcctggtggatgctgagagtgatgagctgactgtggagaatgtggccagctctgtgctgggcaagtctgtgtttgtgaactggccccacctggaggaggcccgggtggtggccgtgtctgatggagagaccaagttctacctggaggagcccccaggcacccagaagctgtacagcggccgcacagccccacccagcaaggtggtgcacctgggggacaaggagcagagcaactgggccaaggaggtgcagggcatcagcgagcactacctgcggaggaagggcatcatcatcaatgagaccagcgctgtggtgtatgcccagctgctgaccggcaggaagtaccagatcaaccagaatggagaggtgcggctggagaagcagtggagcaagcaggtggtgccctttgtgtaccagaccatcgtgaaggacatccgggcctttgacagccgcttcagcaacatcaagaccctggatgacctcttccccctgcgctccatggtgttcatgctgggcaccccctactacggctgcaccggggaggtgcaggacagcggagatgtgatcacagagggccgcatccgggtcatcttcagcatcccctgtgagcccaacctggatgccctgatccagaaccagcacaagtacagcatcaagtacaaccctggctacgtgctggccagccggctgggcgtgtctggctacctggtgagccgcttcaccggcagcatcttcatcggccggggcagcagaagaaacccccacggggaccacaaggccaacgtgggcctgaacctgaagttcaacaagaagaatgaggaggtgcccggctacaccaagaaggtgggcagcgagtggatgtacagcagcgctgctgagcagctgctggccgagtacctggagcgggcccctgagctgttctcctacatcgccaagaacagccaggaggatgtgttctatgaagatgacatctggccaggagaaaatgaaaatggagctgagaaggtgcaggagatcatcacctggctgaagggccaccctgtgtccaccctgagccgcagcagctgtgacctgcagatcctggatgctgccatcgtggagaagattgaggaggaggtggagaagtgcaagcagaggaagaacaacaagaaggtgcgggtgacagtgaagccccacctgctgtaccggcccctggagcagcagcacggcgtcatcccagacagagatgctgagttctgcctgtttgacagagtggtgaatgtgcgggagaacttctctgtgcctgtgggcctgcggggcaccatcatcggcatcaagggggccaaccgggaggctgatgtgctgtttgaggtgctgtttgatgaggagttccctgggggcctgaccatccgctgcagccctggccggggctaccgcctgcccaccagcgccctggtgaacctgagccacggcagccgctctgagaccggcaaccagaagctgacagccatcgtgaagccccagcctgctgtgcaccagcacagcagcagcagctctgtgagcagcggccacctgggcgccctgaaccacagcccccagagcctgtttgtgcccacccaggtgcccaccaaggatgatgatgagttctgcaacatctggcagagcctgcagggcagcggcaagatgcagtacttccagcccaccatccaggagaagggagctgtgctgccccaggagatcagccaggtgaaccagcaccacaagagcggcttcaatgacaacagcgtgaagtaccagcagaggaagcatgacccccacaggaagttcaaggaggagtgcaagagccccaaggccgagtgctggagccagaagatgagcaacaagcagcccaacagcggcatcgagaacttcctggccagcctgaacatcagcaaagaaaatgaggtgcagagcagccaccacggggagcccccatctgaggagcacctgagcccccagagctttgccatgggcaccaggatgctgaaggagatcctgaagattgatggcagcaacacagtggaccacaagaatgagatcaagcagatcgccaatgagatccctgtgagcagcaacagaagagatgaatatggcctgcccagccagcccaagcagaacaagaagctggccagctacatgaacaagccccacagcgccaatgagtaccacaacgtgcagagcatggacaacatgtgctggccagcccccagccagatcccccctgtgtccacccctgtgacagagctgagccgcatctgcagcctggtgggcatgccccagcctgacttctccttcctgaggatgccccagaccatgacagtgtgccaggtgaagctgagcaatggcctgctggtgcacggcccccagtgccacagtgaaaatgaggccaaggagaaggccgccctgtttgccctgcagcagctgggcagcctgggcatgaacttccccctgcccagccaggtgtttgccaactaccccagcgctgtgcccccaggcaccatccccccagccttccccccacccaccggctgggaccactacggcagcaactatgccctgggcgccgccaacatcatgcccagcagcagccacctgtttggctccatgccctggggccccagcgtgcctgtgcctgggaagcccttccaccacaccctgtacagcggcaccatgcccatggccggcggcatccctggaggagtgcacaaccagttcatccccctgcaggtgaccaagaagagggtggccaacaagaagaactttgagaacaaggaggcccagagcagccaggccacccctgtgcagaccagccagcctgacagcagcaacatcgtgaaggtgagcccccgggagagcagcagcgccagcctgaagagcagccccatcgcccagcctgccagcagcttccaggtggagacagccagccagggccacagcatcagccaccacaagagcacccccatcagcagcagcaggaggaagagcaggaagctggccgtgaactttggagtgtccaagcccagcgagtag

SEQ ID NO: 18192 - DNA, 5085 bp, synthetic construct
  misc_feature 1..5085: note = Description of Artificial Sequence: Synthetic coding sequence
  source 1..5085: mol_type = other DNA
atgggcgtgcccaagttctaccgctggatcagcgagcgctacccctgcctgtctgaggtggtgaaggagcaccagatccctgagtttgacaacctgtacctggacatgaatggcatcatccaccagtgcagccaccccaatgatgatgatgtgcacttccgcatcagtgatgacaagatcttcacagacatcttccactacctggaggtgctcttccgcatcatcaagcccaggaaggtgttcttcatggctgtggatggagtggccccccgggccaagatgaaccagcagaggggccgccgcttccgcagcgccaaggaggccgaggacaagatcaagaaggccatcgagaagggggagaccctgcccacagaggccaggtttgacagcaactgcatcaccccaggcacagagttcatggcccggctgcacgagcacctgaagtactttgtgaacatgaagatcagcacagacaagtcctggcagggcgtgaccatctacttcagcggccacgagaccccaggagagggggagcacaagatcatggagttcatccgctctgagaaggccaagccagaccatgaccccaacaccaggcactgcctgtatggcctggatgctgacctgatcatgctgggcctgaccagccatgaggcccacttcagcctgctgcgggaggaggtgcgctttggaggcaagaagacccagagggtgtgtgcccctgaggagaccaccttccacctgctgcacctgagcctgatgagggagtacatcgactatgagttctctgtgctgaaggagaagatcaccttcaagtatgacatcgagcgcatcattgatgactggatcctgatgggcttcctggtgggcaatgacttcatcccccacctgccccacctgcacatcaaccatgatgccctgcccctgctgtatggcacctacgtgaccatcctgcctgagctgggcggctacatcaatgaaagtggccacctgaacctgcccaggtttgagaagtacctggtgaagctgagtgactttgaccgggagcacttcagcgaggtgtttgtggacctgaagtggtttgagagcaaggtgggcaacaagtacctgaatgaagctgctggggtggccgctgaggaggccaggaactacaaggagaagaagaagctgaagggccaggagaacagcctgtgctggacagccctggacaagaatgaaggagagatgatcaccagcaaggacaacctggaggatgaaacagaagatgatgacctgtttgaaacagagttccggcagtacaagaggacctactacatgaccaagatgggcgtggatgtggtgtctgatgacttcctggccgaccaggccgcctgctacgtgcaggccatccagtggatcctgcactactactaccacggcgtgcagagctggagctggtactacccctaccactacgcccccttcctgagtgacatccacaacatcagcaccctgaagatccactttgagctgggcaagcccttcaagccctttgagcagctgctggccgtgctgcctgctgccagcaagaacctgctgcctgcctgctaccagcacctgatgaccaatgaagacagccccatcatcgagtactaccccccagacttcaagacagacctgaatggcaagcagcaggagtgggaggccgtggtgctgatccccttcattgatgagaagaggctgctggaggccatggagacctgcaaccacagcctgaagaaggaggagaggaagaggaaccagcacagtgaatgtctgatgtgctggtatgaccgggacacagagttcatctaccccagcccctggccagagaagtttcctgccatcgagcgctgctgcacccgctacaagatcatcagcctggatgcctggagggtggacatcaacaagaacaagatcaccagaattgaccagaaggccctgtacttctgtggcttccccaccctgaagcacatccgccacaagttcttcctgaagaagagcggcgtgcaggtgttccagcagagcagcagaggagagaacatgatgctggagatcctggtggatgctgagagtgatgagctgactgtggagaatgtggccagctctgtgctgggcaagtctgtgtttgtgaactggccccacctggaggaggcccgggtggtggccgtgtctgatggagagaccaagttctacctggaggagcccccaggcacccagaagctgtacagcggccgcacagccccacccagcaaggtggtgcacctgggggacaaggagcagagcaactgggccaaggaggtgcagggcatcagcgagcactacctgcggaggaagggcatcatcatcaatgagaccagcgctgtggtgtatgcccagctgctgaccggcaggaagtaccagatcaaccagaatggagaggtgcggctggagaagcagtggagcaagcaggtggtgccctttgtgtaccagaccatcgtgaaggacatccgggcctttgacagccgcttcagcaacatcaagaccctggatgacctcttccccctgcgctccatggtgttcatgctgggcaccccctactacggctgcaccggggaggtgcaggacagcggagatgtgatcacagagggccgcatccgggtcatcttcagcatcccctgtgagcccaacctggatgccctgatccagaaccagcacaagtacagcatcaagtacaaccctggctacgtgctggccagccggctgggcgtgtctggctacctggtgagccgcttcaccggcagcatcttcatcggccggggcagcagaagaaacccccacggggaccacaaggccaacgtgggcctgaacctgaagttcaacaagaagaatgaggaggtgcccggctacaccaagaaggtgggcagcgagtggatgtacagcagcgctgctgagcagctgctggccgagtacctggagcgggcccctgagctgttctcctacatcgccaagaacagccaggaggatgtgttctatgaagatgacatctggccaggagaaaatgaaaatggagctgagaaggtgcaggagatcatcacctggctgaagggccaccctgtgtccaccctgagccgcagcagctgtgacctgcagatcctggatgctgccatcgtggagaagattgaggaggaggtggagaagtgcaagcagaggaagaacaacaagaaggtgcgggtgacagtgaagccccacctgctgtaccggcccctggagcagcagcacggcgtcatcccagacagagatgctgagttctgcctgtttgacagagtggtgaatgtgcgggagaacttctctgtgcctgtgggcctgcggggcaccatcatcggcatcaagggggccaaccgggaggctgatgtgctgtttgaggtgctgtttgatgaggagttccctgggggcctgaccatccgctgcagccctggccggggctaccgcctgcccaccagcgccctggtgaacctgagccacggcagccgctctgagaccggcaaccagaagctgacagccatcgtgaagccccagcctgctgtgcaccagcacagcagcagcagctctgtgagcagcggccacctgggcgccctgaaccacagcccccagagcctgtttgtgcccacccaggtgcccaccaaggatgatgatgagttctgcaacatctggcagagcctgcagggcagcggcaagatgcagtacttccagcccaccatccaggagaagggagctgtgctgccccaggagatcagccaggtgaaccagcaccacaagagcggcttcaatgacaacagcgtgaagtaccagcagaggaagcatgacccccacaggaagttcaaggaggagtgcaagagccccaaggccgagtgctggagccagaagatgagcaacaagcagcccaacagcggcatcgagaacttcctggccagcctgaacatcagcaaagaaaatgaggtgcagagcagccaccacggggagcccccatctgaggagcacctgagcccccagagctttgccatgaagggcaccaggatgctgaaggagatcctgaagattgatggcagcaacacagtggaccacaagaatgagatcaagcagatcgccaatgagatccctgtgagcagcaacagaagagatgaatatggcctgcccagccagcccaagcagaacaagaagctggccagctacatgaacaagccccacagcgccaatgagtaccacaacgtgcagagcatggacaacatgtgctggccagcccccagccagatcccccctgtgtccacccctgtgacagagctgagccgcatctgcagcctggtgggcatgccccagcctgacttctccttcctgaggatgccccagaccatgacagtgtgccaggtgaagctgagcaatggcctgctggtgcacggcccccagtgccacagtgaaaatgaggccaaggagaaggccgccctgtttgccctgcagcagctgggcagcctgggcatgaacttccccctgcccagccaggtgtttgccaactaccccagcgctgtgcccccaggcaccatccccccagccttccccccacccacagccaacatcatgcccagcagcagccacctgtttggctccatgccctggggccccagcgtgcctgtgcctgggaagcccttccaccacaccctgtacagcggcaccatgcccatggccggcggcatccctggaggagtgcacaaccagttcatccccctgcaggtgaccaagaagagggtggccaacaagaagaactttgagaacaaggaggcccagagcagccaggccacccctgtgcagaccagccagcctgacagcagcaacatcgtgaaggtgagcccccgggagagcagcagcgccagcctgaagagcagccccatcgcccagcctgccagcagcttccaggtggagacagccagccagggccacagcatcagccaccacaagagcacccccatcagcagcagcaggaggaagagcaggaagctggccgtgaactttggagtgtccaagcccagcgagtag

SEQ ID NO: 18193 - DNA, 1380 bp, synthetic construct
  misc_feature 1..1380: note = Description of Artificial Sequence: Synthetic coding sequence
  source 1..1380: mol_type = other DNA
atgggcgtgcccaagttctaccgctggatcagcgagcgctacccctgcctgtctgaggtggtgaaggagcaccagatccctgagtttgacaacctgtacctggacatgaatggcatcatccaccagtgcagccaccccaatgatgatgatgtgcacttccgcatcagtgatgacaagatcttcacagacatcttccactacctggaggtgctcttccgcatcatcaagcccaggaaggtgttcttcatggctgtggatggagtggccccccgggccaagatgaaccagcagaggggccgccgcttccgcagcgccaaggaggccgaggacaagatcaagaaggccatcgagaagggggagaccctgcccacagaggccaggtttgacagcaactgcatcaccccaggcacagagttcatggcccggctgcacgagcacctgaagtactttgtgaacatgaagatcagcacagacaagtcctggcagggcgtgaccatctacttcagcggccacgagaccccaggagagggggagcacaagatcatggagttcatccgctctgagaaggccaagccagaccatgaccccaacaccaggcactgcctgtatggcctggatgctgacctgatcatgctgggcctgaccagccatgaggcccacttcagcctgctgcgggaggaggtgcgctttggaggcaagaagacccagagggtgtgtgcccctgaggagaccaccttccacctgctgcacctgagcctgatgagggagtacatcgactatgagttctctgtgctgaaggagaagatcaccttcaagtatgacatcgagcgcatcattgatgactggatcctgatgggcttcctggtgggcaatgacttcatcccccacctgccccacctgcacatcaaccatgatgccctgcccctgctgtatggcacctacgtgaccatcctgcctgagctgggcggctacatcaatgaaagtggccacctgaacctgcccaggtttgagaagtacctggtgaagctgagtgactttgaccgggagcacttcagcgaggtgtttgtggacctgaagtggtttgagagcaaggtgggcaacaagtacctgaatgaagctgctggggtggccgctgaggaggccaggaactacaaggagaagaagaagctgaagggccaggagaacagcctgtgctggacagccctggacaagaatgaaggagagatgatcaccagcaaggacaacctggaggatgaaacagaagatgatgacctgtttgaaacagagttccggcagtacaagaggacctactacatgaccaagatgggcgtggatgtggtgtctgaatatgtgtttgccaatgccttcatcctgaagtag

SEQ ID NO: 18194 - DNA, 750 bp, synthetic construct
  misc_feature 1..750: note = Description of Artificial Sequence: Synthetic coding sequence
  source 1..750: mol_type = other DNA
atgctgggcctgaccagccatgaggcccacttcagcctgctgcgggaggaggtgcgctttggaggcaagaagacccagagggtgtgtgcccctgaggagaccaccttccacctgctgcacctgagcctgatgagggagtacatcgactatgagttctctgtgctgaaggagaagatcaccttcaagtatgacatcgagcgcatcattgatgactggatcctgatgggcttcctggtgggcaatgacttcatcccccacctgccccacctgcacatcaaccatgatgccctgcccctgctgtatggcacctacgtgaccatcctgcctgagctgggcggctacatcaatgaaagtggccacctgaacctgcccaggtttgagaagtacctggtgaagctgagtgactttgaccgggagcacttcagcgaggtgtttgtggacctgaagtggtttgagagcaaggtgggcaacaagtacctgaatgaagctgctggggtggccgctgaggaggccaggaactacaaggagaagaagaagctgaagggccaggagaacagcctgtgctggacagccctggacaagaatgaaggagagatgatcaccagcaaggacaacctggaggatgaaacagaagatgatgacctgtttgaaacagagttccggcagtacaagaggacctactacatgaccaagatgggcgtggatgtggtgtctgaatatgtgtttgccaatgccttcatcctgaagtag

SEQ ID NO: 18195 - DNA, 3483 bp, synthetic construct
  misc_feature 1..3483: note = Description of Artificial Sequence: Synthetic coding sequence
  source 1..3483: mol_type = other DNA
tgaacaaatgaagacagccccatcatcgagtactaccccccagacttcaagacagacctgaatggcaagcagcaggagtgggaggccgtggtgctgatccccttcattgatgagcggctgctggaggccatggagacctgcaaccacagcctgaagaaggaggagaggaagaggaaccagcacagtgaatgtctgatgtgctggtatgaccgggacacagagttcatctaccccagcccctggccagagaagtttcctgccatcgagcgctgctgcacccgctacaagatcatcagcctggatgcctggagggtggacatcaacaagaacaagatcaccagaattgaccagaaggccctgtacttctgtggcttccccaccctgaagcacatccgccacaagttcttcctgaagaagagcggcgtgcaggtgttccagcagagcagcagaggagagaacatgatgctggagatcctggtggatgctgagagtgatgagctgactgtggagaatgtggccagctctgtgctgggcaagtctgtgtttgtgaactggccccacctggaggaggcccgggtggtggccgtgtctgatggagagaccaagttctacctggaggagcccccaggcacccagaagctgtacagcggccgcacagccccacccagcaaggtggtgcacctgggggacaaggagcagagcaactgggccaaggaggtgcagggcatcagcgagcactacctgcggaggaagggcatcatcatcaatgagaccagcgctgtggtgtatgcccagctgctgaccggcaggaagtaccagatcaaccagaatggagaggtgcggctggagaagcagtggagcaagcaggtggtgccctttgtgtaccagaccatcgtgaaggacatccgggcctttgacagccgcttcagcaacatcaagaccctggatgacctcttccccctgcgctccatggtgttcatgctgggcaccccctactacggctgcaccggggaggtgcaggacagcggagatgtgatcacagagggccgcatccgggtcatcttcagcatcccctgtgagcccaacctggatgccctgatccagaaccagcacaagtacagcatcaagtacaaccctggctacgtgctggccagccggctgggcgtgtctggctacctggtgagccgcttcaccggcagcatcttcatcggccggggcagcagaagaaacccccacggggaccacaaggccaacgtgggcctgaacctgaagttcaacaagaagaatgaggaggtgcccggctacaccaagaaggtgggcagcgagtggatgtacagcagcgctgctgagcagctgctggccgagtacctggagcgggcccctgagctgttctcctacatcgccaagaacagccaggaggatgtgttctatgaagatgacatctggccaggagaaaatgaaaatggagctgagaaggtgcaggagatcatcacctggctgaagggccaccctgtgtccaccctgagccgcagcagctgtgacctgcagatcctggatgctgccatcgtggagaagattgaggaggaggtggagaagtgcaagcagaggaagaacaacaagaaggtgcgggtgacagtgaagccccacctgctgtaccggcccctggagcagcagcacggcgtcatcccagacagagatgctgagttctgcctgtttgacagagtggtgaatgtgcgggagaacttctctgtgcctgtgggcctgcggggcaccatcatcggcatcaagggggccaaccgggaggctgatgtgctgtttgaggtgctgtttgatgaggagttccctgggggcctgaccatccgctgcagccctggccggggctaccgcctgcccaccagcgccctggtgaacctgagccacggcagccgctctgagaccggcaaccagaagctgacagccatcgtgaagccccagcctgctgtgcaccagcacagcagcagcagctctgtgagcagcggccacctgggcgccctgaaccacagcccccagagcctgtttgtgcccacccaggtgcccaccaaggatgatgatgagttctgcaacatctggcagagcctgcagggcagcggcaagatgcagtacttccagcccaccatccaggagaagggagctgtgctgccccaggagatcagccaggtgaaccagcaccacaagagcggcttcaatgacaacagcgtgaagtaccagcagaggaagcatgacccccacaggaagttcaaggaggagtgcaagagccccaaggccgagtgctggagccagaagatgagcaacaagcagcccaacagcggcatcgagaacttcctggccagcctgaacatcagcaaagaaaatgaggtgcagagcagccaccacggggagcccccatctgaggagcacctgagcccccagagctttgccatgaagggcaccaggatgctgaaggagatcctgaagattgatggcagcaacacagtggaccacaagaatgagatcaagcagatcgccaatgagatccctgtgagcagcaacagaagagatgaatatggcctgcccagccagcccaagcagaacaagaagctggccagctacatgaacaagccccacagcgccaatgagtaccacaacgtgcagagcatggacaacatgtgctggccagcccccagccagatcccccctgtgtccacccctgtgacagagctgagccgcatctgcagcctggtgggcatgccccagcctgacttctccttcctgaggatgccccagaccatgacagtgtgccaggtgaagctgagcaatggcctgctggtgcacggcccccagtgccacagtgaaaatgaggccaaggagaaggccgccctgtttgccctgcagcagctgggcagcctgggcatgaacttccccctgcccagccaggtgtttgccaactaccccagcgctgtgcccccaggcaccatccccccagccttccccccacccacagccaacatcatgcccagcagcagccacctgtttggctccatgccctggggccccagcgtgcctgtgcctgggaagcccttccaccacaccctgtacagcggcaccatgcccatggccggcggcatccctggaggagtgcacaaccagttcatccccctgcaggtgaccaagaagagggtggccaacaagaagaactttgagaacaaggaggcccagagcagccaggccacccctgtgcagaccagccagcctgacagcagcaacatcgtgaaggtgagcccccgggagagcagcagcgccagcctgaagagcagccccatcgcccagcctgccagcagcttccaggtggagacagccagccagggccacagcatcagccaccacaagagcacccccatcagcagcagcaggaggaagagcaggaagctggccgtgaactttggagtgtccaagcccagcgagtag

SEQ ID NO: 18196 - DNA, 1233 bp, synthetic construct
  misc_feature 1..1233: note = Description of Artificial Sequence: Synthetic coding sequence
  source 1..1233: mol_type = other DNA
atgcctgcccgggccctgctgcccaggaggatgggccacaggaccctggccagcaccccagccctgtgggccagcatcccctgccccaggtctgagctgcggctggacctggtgctgcccagcggccagagcttccgctggagggagcagagccctgcccactggagcggcgtgctggccgaccaggtgtggaccctgacccagacagaggagcagctgcactgcaccgtgtacagaggagacaagagccaggccagccggcccaccccagatgagctggaggccgtgaggaagtacttccagctggatgtgaccctggcccagctgtaccaccactggggctctgtggacagccacttccaggaggtggcccagaagttccagggcgtgcggctgctgcggcaggaccccattgaatgtctcttctccttcatctgcagcagcaacaacaacatcgcccgcatcaccggcatggtggagcggctgtgccaggccttcggccccaggctcatccagctggatgatgtgacctaccacggcttccccagcctgcaggccctggccggccctgaggtggaggcccacctgaggaagctgggcctgggctaccgggcccgctacgtgtctgccagcgcccgggccatcctggaggagcagggcggcctggcctggctgcagcagctgcgggagagcagctatgaggaggcccacaaggccctgtgcatcctgcccggggtgggcaccaaggtggccgactgcatctgcctgatggccctggacaagccccaggccgtgcctgtggatgtgcacatgtggcacatcgcccagagggactacagctggcaccccaccaccagccaggccaagggccccagcccccagaccaacaaggagctgggcaacttcttccgcagcctgtggggcccctatgccggctgggcccaggccaccccacccagctaccgctgctgcagcgtgcccacctgtgccaacccagccatgctgcggagccaccagcagagcgctgagcgggtgcccaagggcaggaaggcccgctggggcaccctggacaaggagatcccccaggcccccagcccccccttccccaccagcctgagccccagcccccccagcctgatgctgggccggggcctgcctgtgaccaccagcaaggcccggcacccccagatcaagcagagcgtgtgcaccacccgctggggcggcggctactag

SEQ ID NO: 18197 - DNA, 1071 bp, synthetic construct
  misc_feature 1..1071: note = Description of Artificial Sequence: Synthetic coding sequence
  source 1..1071: mol_type = other DNA
atgcctgcccgggccctgctgcccaggaggatgggccacaggaccctggccagcaccccagccctgtgggccagcatcccctgccccaggtctgagctgcggctggacctggtgctgcccagcggccagagcttccgctggagggagcagagccctgcccactggagcggcgtgctggccgaccaggtgtggaccctgacccagacagaggagcagctgcactgcaccgtgtacagaggagacaagagccaggccagccggcccaccccagatgagctggaggccgtgaggaagtacttccagctggatgtgaccctggcccagctgtaccaccactggggctctgtggacagccacttccaggaggtggcccagaagttccagggcgtgcggctgctgcggcaggaccccattgaatgtctcttctccttcatctgcagcagcaacaacaacatcgcccgcatcaccggcatggtggagcggctgtgccaggccttcggccccaggctcatccagctggatgatgtgacctaccacggcttccccagcctgcaggccctggccggccctgaggtggaggcccacctgaggaagctgggcctgggctaccgggcccgctacgtgtctgccagcgcccgggccatcctggaggagcagggcggcctggcctggctgcagcagctgcgggagagcagctatgaggaggcccacaaggccctgtgcatcctgcccggggtgggcaccaaggtggccgactgcatctgcctgatggccctggacaagccccaggccgtgcctgtggatgtgcacatgtggcacatcgcccagagggactacagctggcaccccaccaccagccaggccaagggccccagcccccagaccaacaaggagctgggcaacttcttccgcagcctgtggggcccctatgccggctgggcccaggccctgtgccaggtgatcaccaccttcatgaccttcctgggcccccaccggctggaccagatgcctcctgaggagctgcagaccagcagcagccggctgggcggccccccctggcagtgcatctag

SEQ ID NO: 18198 - DNA, 1275 bp, synthetic construct
  misc_feature 1..1275: note = Description of Artificial Sequence: Synthetic coding sequence
  source 1..1275: mol_type = other DNA
atgcctgcccgggccctgctgcccaggaggatgggccacaggaccctggccagcaccccagccctgtgggccagcatcccctgccccaggtctgagctgcggctggacctggtgctgcccagcggccagagcttccgctggagggagcagagccctgcccactggagcggcgtgctggccgaccaggtgtggaccctgacccagacagaggagcagctgcactgcaccgtgtacagaggagacaagagccaggccagccggcccaccccagatgagctggaggccgtgaggaagtacttccagctggatgtgaccctggcccagctgtaccaccactggggctctgtggacagccacttccaggaggtggcccagaagttccagggcgtgcggctgctgcggcaggaccccattgaatgtctcttctccttcatctgcagcagcaacaacaacatcgcccgcatcaccggcatggtggagcggctgtgccaggccttcggccccaggctcatccagctggatgatgtgacctaccacggcttccccagcctgcaggccctggccggccctgaggtggaggcccacctgaggaagctgggcctgggctaccgggcccgctacgtgtctgccagcgcccgggccatcctggaggagcagggcggcctggcctggctgcagcagctgcgggagagcagctatgaggaggcccacaaggccctgtgcatcctgcccggggtgggcaccaaggtggccgactgcatctgcctgatggccctggacaagccccaggccgtgcctgtggatgtgcacatgtggcacatcgcccagagggactacagctggcaccccaccaccagccaggccaagggccccagcccccagaccaacaaggagctgggcaacttcttccgcagcctgtggggcccctatgccggctgggcccaggccggcctgctgggcaatgcctttgatggccaccagctgctgcggcccctcatcttctgccaggaccacctgcgggagggcccccccatcggccgcggggacagccagggcgaggagctggagccccagctgcccagcagcctgagcagcatcccctacggcttctgtgaccactgctggaccaaggatgtggatgacccccccctggtgacccaccccagccctggcagcagagatggccacatgacccaggcctggcctgtgaaggtggtgagccccctggccaccgtgattggacatgtgatgcaggccagcctgctggccctgtag

SEQ ID NO: 18199 - DNA, 975 bp, synthetic construct
  misc_feature 1..975: note = Description of Artificial Sequence: Synthetic coding sequence
  source 1..975: mol_type = other DNA
atgcctgcccgggccctgctgcccaggaggatgggccacaggaccctggccagcaccccagccctgtgggccagcatcccctgccccaggtctgagctgcggctggacctggtgctgcccagcggccagagcttccgctggagggagcagagccctgcccactggagcggcgtgctggccgaccaggtgtggaccctgacccagacagaggagcagctgcactgcaccgtgtacagaggagacaagagccaggccagccggcccaccccagatgagctggaggccgtgaggaagtacttccagctggatgtgaccctggcccagctgtaccaccactggggctctgtggacagccacttccaggaggtggcccagaagttccagggcgtgcggctgctgcggcaggaccccattgaatgtctcttctccttcatctgcagcagcaacaacaacatcgcccgcatcaccggcatggtggagcggctgtgccaggccttcggccccaggctcatccagctggatgatgtgacctaccacggcttccccagcctgcaggccctggccggccctgaggtggaggcccacctgaggaagctgggcctgggctaccgggcccgctacgtgtctgccagcgcccgggccatcctggaggagcagggcggcctggcctggctgcagcagctgcgggagagcagctatgaggaggcccacaaggccctgtgcatcctgcccggggtgggcaccaaggtggccgactgcatctgcctgatggccctggacaagccccaggccgtgcctgtggatgtgcacatgtggcacatcgcccagagggactacagctggcaccccaccaccagccaggccaagggccccagcccccagaccaacaaggagctgggcaacttcttccgcagcctgtggggcccctatgccggctgggcccaggccgtgtctgtgccccgctgccccccatag

SEQ ID NO: 18200 - DNA, 594 bp, synthetic construct
  misc_feature 1..594: note = Description of Artificial Sequence: Synthetic coding sequence
  source 1..594: mol_type = other DNA
atggtggagcggctgtgccaggccttcggccccaggctcatccagctggatgatgtgacctaccacggcttccccagcctgcaggccctggccggccctgaggtggaggcccacctgaggaagctgggcctgggctaccgggcccgctacgtgtctgccagcgcccgggccatcctggaggagcagggcggcctggcctggctgcagcagctgcgggagagcagctatgaggaggcccacaaggccctgtgcatcctgcccggggtgggcaccaaggagaccttcagcggggcctgtggggacctgatgctggccggccccaagcgctgctgcagcgtgcccacctgtgccaacccagccatgctgcggagccaccagcagagcgctgagcgggtgcccaagggcaggaaggcccgctggggcaccctggacaaggagatcccccaggcccccagcccccccttccccaccagcctgagccccagcccccccagcctgatgctgggccggggcctgcctgtgaccaccagcaaggcccggcacccccagatcaagcagagcgtgtgcaccacccgctggggcggcggctactag

SEQ ID NO: 18201 - DNA, 1038 bp, synthetic construct
  misc_feature 1..1038: note = Description of Artificial Sequence: Synthetic coding sequence
  source 1..1038: mol_type = other DNA
atgcctgcccgggccctgctgcccaggaggatgggccacaggaccctggccagcaccccagccctgtgggccagcatcccctgccccaggtctgagctgcggctggacctggtgctgcccagcggccagagcttccgctggagggagcagagccctgcccactggagcggcgtgctggccgaccaggtgtggaccctgacccagacagaggagcagctgcactgcaccgtgtacagaggagacaagagccaggccagccggcccaccccagatgagctggaggccgtgaggaagtacttccagctggatgtgaccctggcccagctgtaccaccactggggctctgtggacagccacttccaggaggtggcccagaagttccagggcgtgcggctgctgcggcaggaccccattgaatgtctcttctccttcatctgcagcagcaacaacaacatcgcccgcatcaccggcatggtggagcggctgtgccaggccttcggccccaggctcatccagctggatgatgtgacctaccacggcttccccagcctgcaggccctggccggccctgaggtggaggcccacctgaggaagctgggcctgggctaccgggcccgctacgtgtctgccagcgcccgggccatcctggaggagcagggcggcctggcctggctgcagcagctgcgggagagcagctatgaggaggcccacaaggccctgtgcatcctgcccggggtgggcaccaaggtggccgactgcatctgcctgatggccctggacaagccccaggccgtgcctgtggatgtgcacatgtggcacatcgcccagagggactacagctggcaccccaccaccagccaggccaagggccccagcccccagaccaacaaggagctgggcaacttcttccgcagcctgtggggcccctatgccggctgggcccaggccgtgctcttctctgctgacctgcggcagagcagacatgcccaggagcccccagccaagaggaggaagggcagcaaaggacctgagggctag

SEQ ID NO: 18202 - DNA, 1074 bp, synthetic construct
  misc_feature 1..1074: note = Description of Artificial Sequence: Synthetic coding sequence
  source 1..1074: mol_type = other DNA
atgcctgcccgggccctgctgcccaggaggatgggccacaggaccctggccagcaccccagccctgtgggccagcatcccctgccccaggtctgagctgcggctggacctggtgctgcccagcggccagagcttccgctggagggagcagagccctgcccactggagcggcgtgctggccgaccaggtgtggaccctgacccagacagaggagcagctgcactgcaccgtgtacagaggagacaagagccaggccagccggcccaccccagatgagctggaggccgtgaggaagtacttccagctggatgtgaccctggcccagctgtaccaccactggggctctgtggacagccacttccaggaggtggcccagaagttccagggcgtgcggctgctgcggcaggaccccattgaatgtctcttctccttcatctgcagcagcaacaacaacatcgcccgcatcaccggcatggtggagcggctgtgccaggccttcggccccaggctcatccagctggatgatgtgacctaccacggcttccccagcctgcaggccctggccggccctgaggtggaggcccacctgaggaagctgggcctgggctaccgggcccgctacgtgtctgccagcgcccgggccatcctggaggagcagggcggcctggcctggctgcagcagctgcgggagagcagctatgaggaggcccacaaggccctgtgcatcctgcccggggtgggcaccaagggcctgctgggcaatgcctttgatggccaccagctgctgcggcccctcatcttctgccaggaccacctgcgggagggcccccccatcggccgcggggacagccagggcgaggagctggagccccagctgcccagcagcctgagcagcatcccctacggcttctgtgaccactgctggaccaaggatgtggatgatcctcccctggtgacccaccccagccctggcagcagagatggccacatgacccaggcctggcctgtgaaggtggtgagccccctggccaccgtcatcggccacgtgatgcaggccagcctgctggccctgtag

SEQ ID NO: 18203 - DNA, 588 bp, synthetic construct
  misc_feature 1..588: note = Description of Artificial Sequence: Synthetic coding sequence
  source 1..588: mol_type = other DNA
atgcctgcccgggccctgctgcccaggaggatgggccacaggaccctggccagcaccccagccctgtgggccagcatcccctgccccaggtctgagctgcggctggacctggtgctgcccagcggccagagcttccgctggagggagcagagccctgcccactggagcggcgtgctggccgaccaggtgtggaccctgacccagacagaggagcagctgcactgcaccgtgtacagaggagacaagagccaggccagccggcccaccccagatgagctggaggccgtgaggaagtacttccagctggatgtgaccctggcccagctgtaccaccactggggctctgtggacagccacttccaggaggtggcccagaagttccagggcgtgcggctgctgcggcaggaccccattgaatgtctcttctccttcatctgcagcagcaacaacaacatcgcccgcatcaccggcatggtggagcggctgtgccaggccttcggccccaggctcatccagctggatgatgtgacctaccacggcttccccagcctgcaggccctggccggccccccctggcagtgcatctag

SEQ ID NO: 18204 - DNA, 969 bp, synthetic construct
  misc_feature 1..969: note = Description of Artificial Sequence: Synthetic coding sequence
  source 1..969: mol_type = other DNA
atgcctgcccgggccctgctgcccaggaggatgggccacaggaccctggccagcaccccagccctgtgggccagcatcccctgccccaggtctgagctgcggctggacctggtgctgcccagcggccagagcttccgctggagggagcagagccctgcccactggagcggcgtgctggccgaccaggtgtggaccctgacccagacagaggagcagctgcactgcaccgtgtacagaggagacaagagccaggccagccggcccaccccagatgagctggaggccgtgaggaagtacttccagctggatgtgaccctggcccagctgtaccaccactggggctctgtggacagccacttccaggaggtggcccagaagttccagggcgtgcggctgctgcggcaggaccccattgaatgtctcttctccttcatctgcagcagcaacaacaacatcgcccgcatcaccggcatggtggagcggctgtgccaggccttcggccccaggctcatccagctggatgatgtgacctaccacggcttccccagcctgcaggccctggccggccctgaggtggaggcccacctgaggaagctgggcctgggctaccgggcccgctacgtgtctgccagcgcccgggccatcctggaggagcagggcggcctggcctggctgcagcagctgcgggagagcagctatgaggaggcccacaaggccctgtgcatcctgcccggggtgggcaccaaggtggccgactgcatctgcctgatggccctggacaagccccaggccgtgcctgtggatgtgcacatgtggcacatcgcccagagggactacagctggcaccccaccaccagccaggccaagggccccagcccccagaccaacaaggagctgggcaacttcttccgcagcctgtggggcccctatgccggctgggcccaggccgccggcagtgatgccagctag

SEQ ID NO: 18205 - DNA, 6807 bp, synthetic construct
  misc_feature 1..6807: note = Description of Artificial Sequence: Synthetic coding sequence
  source 1..6807: mol_type = other DNA
atgagcggcctgcacctggtgaagcagggccgggacaggaagaagattgacagccagagggacttcaccgtggccagccctgctgagtttgtgaccaggtttggaggcaacaaggtgattgagaaggtgctgattgccaacaacggcattgctgctgtgaagtgcatgaggagcatccgccgctggagctatgagatgttcagaaatgaaagagccatccgctttgtggtgatggtgaccccagaggacctgaaggccaatgctgagtacatcaagatggctgaccactacgtgcctgtgcctgggggccccaacaacaacaactatgccaacgtggagctgatcctggacatcgccaagagaattcctgtgcaggccgtgtgggccggctggggccacgccagcgagaaccccaagctgcctgagctgctgctgaagaatggaattgccttcatgggcccccccagccaggccatgtgggccctgggggacaagatcgccagcagcatcgtggcccagacagctggcatccccaccctgccctggagcggcagcggcctgcgggtggactggcaggagaatgacttcagcaagaggatcctgaatgtgccccaggagctgtatgagaagggctacgtgaaggatgtggatgatggcctgcaggccgctgaggaggtgggctaccctgtgatgatcaaggccagcgagggcggcggcggcaagggcatcaggaaggtgaacaatgctgatgacttccccaacctcttccggcaggtgcaggccgaggtgcccggcagccccatctttgtgatgaggctggccaagcagagccgccacctggaggtgcagatcctggccgaccagtatggaaatgccatcagcctgtttggccgggactgcagcgtgcagaggaggcaccagaagatcatcgaggaggccccagccaccatcgccaccccagctgtgtttgagcacatggagcagtgtgctgtgaagctggccaagatggtgggctacgtgtctgctggcaccgtggagtacctgtacagccaggacggcagcttctacttcctggagctgaacccccggctgcaggtggagcacccctgcacagagatggtggctgatgtgaacctgcctgctgcccagctgcagatcgccatgggcatccccctgtaccgcatcaaggacatccgcatgatgtatggagtgagcccctggggagacagccccatcgactttgaagattctgcccacgtgccctgcccccggggccacgtgattgctgcccgcatcaccagtgaaaatccagatgagggcttcaagcccagcagcggcaccgtgcaggagctgaacttccgcagcaacaagaatgtgtggggctacttctctgtggccgccgccggcggcctgcacgagtttgctgacagccagtttggccactgcttctcctggggagaaaatcgggaggaggccatcagcaacatggtggtggccctgaaggagctgagcatccggggggacttccgcaccaccgtggagtacctgatcaagctgctggagacagagagcttccagatgaacagaattgacaccggctggctggaccggctgattgctgagaaggtgcaggccgagaggccagacaccatgctgggcgtggtgtgtggggccctgcacgtggctgatgtgtccctgagaaattctgtgagcaacttcctgcacagcctggagcggggccaggtgctgcctgcccacaccctgctgaacacagtggatgtggagctgatctatgagggcgtgaagtatgtgctgaaggtgacccggcagagccccaacagctatgtggtgatcatgaatggcagctgtgtggaggtggatgtgcaccggctgagtgatggcggcctgctgctgtcctatgatggcagcagctacaccacctacatgaaggaggaggtggaccgctaccgcatcaccatcggcaacaagacctgtgtgtttgagaaggaaaatgaccccagcgtgatgaggagccccagcgctgggaagctgatccagtacatcgtggaggatggcggccacgtgtttgctggccagtgctacgccgagattgaggtgatgaagatggtgatgaccctgacagctgtggagagcggctgcatccactacgtgaagaggcctggagctgccctggaccccggctgtgtgctggccaagatgcagctggacaaccccagcaaggtgcagcaggccgagctgcacacaggcagcctgccccgcatccagagcacagccctgcggggggagaagctgcacagggtcttccactacgtgctggacaacctggtgaatgtgatgaatggctactgcctgcctgaccccttcttcagcagcaaggtgaaggactgggtggagcggctgatgaagaccctgcgggaccccagcctgcccctgctggagctgcaggacatcatgacctctgtgtctggccgcatccccccaaatgtggagaagagcatcaagaaggagatggcccagtatgccagcaacatcacctctgtgctgtgccagttccccagccagcagatcgccaacatcctggacagccatgctgccaccctgaacaggaagtctgagcgggaggtgttcttcatgaacacccagagcatcgtgcagctggtgcagcgctacagaagtggcatccggggccacatgaaggctgtggtgatggacctgctgcggcagtacctgcgggtggagacccagttccagaatggccactatgacaagtgtgtgtttgccctgcgggaggagaacaagagtgacatgaacacagtgctgaactacatcttcagccacgcccaggtgaccaagaagaacctgctggtgaccatgctgattgaccagctgtgtggccgggaccccaccctgacagatgagctgctgaacatcctgacagagctgacccagctgagcaagaccaccaatgccaaggtggccctgcgggcccggcaggtgctgattgccagccacctgcccagctatgagctgcggcacaaccaggtggagagcatcttcctgagcgccatcgacatgtatggccaccagttctgcatcgagaacctgcagaagctgatcctgtctgagaccagcatctttgatgtgctgcccaacttcttctaccacagcaaccaggtggtgaggatggccgccctggaggtgtatgtgagaagagcctacatcgcctatgagctgaacagcgtgcagcaccggcagctgaaggacaacacctgtgtggtggagttccagttcatgctgcccaccagccaccccaacagaggcaacatccccaccctgaacaggatgtccttcagcagcaacctgaaccactacggcatgacccacgtggcctctgtgtctgatgtgctgctggacaacagcttcaccccaccctgccagaggatgggcggcatggtgtccttccgcacctttgaagattttgtgcgcatctttgatgaggtgatgggctgcttcagtgacagccccccccagagccccaccttccctgaggccggccacaccagcctgtatgatgaggacaaggtgcccagagatgagcccatccacatcctgaatgtggccatcaagacagactgtgacattgaagatgaccggctggccgccatgttccgggagttcacccagcagaacaaggccaccctggtggaccacggcatccggcggctgaccttcctggtggcccagaaggacttcaggaagcaggtgaactatgaggtggaccggcgcttccaccgggagttccccaagttcttcaccttccgggcccgggacaagtttgaggaggaccgcatctaccgccacctggagcccgccctggccttccagctggagctgaacaggatgaggaactttgacctgacagccatcccctgtgccaaccacaagatgcacctgtacctgggcgccgccaaggtggaggtgggcacagaggtgacagactaccgcttctttgtgcgggccatcatccgccacagcgacctggtgaccaaggaggccagctttgagtacctgcagaatgaaggagagcggctgctgctggaggccatggatgagctggaggtggccttcaacaacaccaacgtgaggacagactgcaaccacatcttcctgaactttgtgcccaccgtcatcatggaccccagcaagattgaggagagcgtgcgctccatggtgatgagatatggcagccggctgtggaagctgcgggtgctgcaggccgagctgaagatcaacatccggctgacccccaccgggaaggccatccccatccgcctcttcctgaccaatgaaagtggctactacctggacatcagcctgtacaaggaggtgacagacagcaggacagcccagatcatgttccaggcctatggagacaagcagggccccctgcacggcatgctgatcaacaccccctacgtgaccaaggacctgctgcagagcaagcgcttccaggcccagagcctgggcaccacctacatctatgacatccctgagatgttccggcagagcctcatcaagctgtgggagagcatgagcacccaggccttcctgcccagcccccccctgcccagcgacatgctgacctacacagagctggtgctggatgaccagggccagctggtgcacatgaaccggctgcccggcggcaatgaaattggcatggtggcctggaagatgaccttcaagagccctgagtacccagagggccgggacatcatcgtgattggaaatgacatcacctaccgcatcggcagctttggcccccaggaggacctgctcttcctgcgggccagcgagctggcccgggcagagggcatcccccgcatctacgtgtctgccaacagcggggcccgcatcggcctggccgaggagatccgccacatgtttcatgtggcctgggtggaccctgaggacccctacaagggctaccgctacctgtacctgaccccccaggactacaagagggtgtctgccctgaacagcgtgcactgtgaacatgtggaggatgaaggagagagccgctacaagatcacagacatcatcggcaaggaggagggcatcggccctgagaacctgcggggcagcggcatgattgctggggagagcagcctggcctacaatgagatcatcaccatcagcctggtgacctgccgggccatcggcattggagcctacctggtgcggctgggccagaggaccatccaggtggagaacagccacctgatcctgactggagctggggccctgaacaaggtgctgggccgggaggtgtacaccagcaacaaccagctgggcggcatccagatcatgcacaacaacggggtgacccactgcaccgtgtgtgatgactttgaaggagtcttcaccgtgctgcactggctgagctacatgcccaagtctgtgcacagctctgtgcccctgctgaacagcaaggaccccatcgaccgcatcattgaatttgtgcccaccaagaccccctatgacccccgctggatgctggccggccggccccaccccacccagaagggccagtggctgagcggcttctttgattatggcagcttcagcgagatcatgcagccctgggcccagacagtggtggtgggccgggcccggctgggcggcatccctgtgggcgtggtggccgtggagaccaggacagtggagctgagcatcccagctgaccctgccaacctggacagcgaggccaagatcatccagcaggccggccaggtgtggttcccagacagcgccttcaagacctaccaggccatcaaggacttcaaccgggagggcctgcccctgatggtgtttgccaactggaggggcttcagcggcggcatgaaggacatgtatgaccaggtgctgaagtttggagcctacatcgtggatggcctgcgggagtgctgccagcctgtgctggtgtacatccccccccaggccgagctgcggggcggctcctgggtggtgattgacagcagcatcaaccccaggcacatggagatgtatgctgaccgggagagccggggctctgtgctggagcctgagggcaccgtggagatcaagttccggaggaaggacctggtgaagaccatgagaagagtggaccctgtgtacatccacctggccgagcggctgggcaccccagagctgagcacagctgagaggaaggagctggagaacaagctgaaggagcgggaggagttcctgatccccatctaccaccaggtggccgtgcagtttgctgacctgcatgacaccccaggccgcatgcaggagaagggcgtcatcagtgacatcctggactggaagaccagcaggaccttcttctactggaggctgcggcggctgctgctggaggacctggtgaagaagaagatccacaatgccaaccctgagctgacagatggccagatccaggccatgctgcggcgctggtttgtggaggtggagggcaccgtgaaggcctacgtgtgggacaacaacaaggacctggccgagtggctggagaagcagctgacagaagaagatggagtgcacagcgtcatcgaggagaacatcaagtgcatcagccgggactatgtgctgaagcagatccgcagcctggtgcaggccaaccctgaggtggccatggacagcatcatccacatgacccagcacatcagccccacccagagagctgaggtgatccgcatcctgagcaccatggacagccccagcacctag

SEQ ID NO: 18206 - DNA, 7152 bp, synthetic construct
  misc_feature 1..7152: note = Description of Artificial Sequence: Synthetic coding sequence
  source 1..7152: mol_type = other DNA
atgtggtggagcaccctgatgagcatcctgcgggcccggagcttctggaagtggatcagcacccagacagtgcgcatcatccgggctgtgcgggcccactttggaggcatcatggatgagcccagccccctggcccagcccctggagctgaaccagcacagccgcttcatcatcggctctgtgtctgaggacaacagtgaagatgagatcagcaacctggtgaagctggacctgctggaggagaaggagggcagcctgagccctgcctctgtgggcagtgacaccctgagtgacctgggcatcagcagcctgcaggacggcctggccctgcacatccgcagctccatgagcggcctgcacctggtgaagcagggccgggacaggaagaagattgacagccagagggacttcaccgtggccagccctgctgagtttgtgaccaggtttggaggcaacaaggtgattgagaaggtgctgattgccaacaatggaattgctgctgtgaagtgcatgaggagcatccgccgctggagctatgagatgttcagaaatgaaagagccatccgctttgtggtgatggtgaccccagaggacctgaaggccaatgctgagtacatcaagatggctgaccactacgtgcctgtgcctgggggccccaacaacaacaactatgccaacgtggagctgatcctggacatcgccaagagaattcctgtgcaggccgtgtgggccggctggggccacgccagcgagaaccccaagctgcctgagctgctgctgaagaatggcatcgccttcatgggcccccccagccaggccatgtgggccctgggggacaagatcgccagcagcatcgtggcccagacagctggcatccccaccctgccctggagcggcagcggcctgcgggtggactggcaggagaatgacttcagcaagaggatcctgaatgtgccccaggagctgtatgagaagggctacgtgaaggatgtggatgatggcctgcaggccgctgaggaggtgggctaccctgtgatgatcaaggccagcgagggcggcggcggcaagggcatcaggaaggtgaacaatgctgatgacttccccaacctcttccggcaggtgcaggccgaggtgcccggcagccccatctttgtgatgaggctggccaagcagagccgccacctggaggtgcagatcctggccgaccagtatggaaatgccatcagcctgtttggccgggactgcagcgtgcagaggaggcaccagaagatcatcgaggaggccccagccaccatcgccaccccagctgtgtttgagcacatggagcagtgtgctgtgaagctggccaagatggtgggctacgtgtctgctggcaccgtggagtacctgtacagccaggacggcagcttctacttcctggagctgaacccccggctgcaggtggagcacccctgcacagagatggtggctgatgtgaacctgcctgctgcccagctgcagatcgccatgggcatccccctgtaccgcatcaaggacatccgcatgatgtatggagtgagcccctggggagacagccccatcgactttgaggacagcgcccacgtgccctgcccccggggccacgtgattgctgcccgcatcaccagcgagaacccagatgagggcttcaagcccagcagcggcaccgtgcaggagctgaacttccgcagcaacaagaatgtgtggggctacttctctgtggccgctgctgggggcctgcatgaatttgctgacagccagtttggccactgcttctcctggggcgagaaccgggaggaggccatcagcaacatggtggtggccctgaaggagctgagcatccggggggacttccgcaccaccgtggagtacctgatcaagctgctggagacagagagcttccagatgaacagaattgacaccggctggctggaccggctgattgctgagaaggtgcaggccgagaggccagacaccatgctgggcgtggtgtgtggggccctgcacgtggctgatgtgtccctgaggaacagcgtgagcaacttcctgcacagcctggagcggggccaggtgctgcctgcccacaccctgctgaacacagtggatgtggagctgatctatgaaggagtgaagtatgtgctgaaggtgacccggcagagccccaacagctatgtggtgatcatgaatggcagctgtgtggaggtggatgtgcaccggctgagtgatggcggcctgctgctgtcctatgatggcagcagctacaccacctacatgaaggaggaggtggaccgctaccgcatcaccatcggcaacaagacctgtgtgtttgagaaggaaaatgaccccagcgtgatgaggagccccagcgctgggaagctgatccagtacatcgtggaggatggcggccacgtgtttgctggccagtgctacgcagaaattgaggtgatgaagatggtgatgaccctgacagctgtggagagcggctgcatccactacgtgaagaggcctggggccgccctggaccccggctgtgtgctggccaagatgcagctggacaaccccagcaaggtgcagcaggccgagctgcacacaggcagcctgccccgcatccagagcacagccctgcggggggagaagctgcacagggtcttccactacgtgctggacaacctggtgaatgtgatgaatggctactgcctgcctgaccccttcttcagcagcaaggtgaaggactgggtggagcggctgatgaagaccctgcgggaccccagcctgcccctgctggagctgcaggacatcatgacctctgtgtctggccgcatcccccccaacgtggagaagagcatcaagaaggagatggcccagtatgccagcaacatcacctctgtgctgtgccagttccccagccagcagatcgccaacatcctggacagccacgccgccaccctgaacaggaagtctgagcgggaggtgttcttcatgaacacccagagcatcgtgcagctggtgcagcgctaccgcagcggcatccggggccacatgaaggctgtggtgatggacctgctgcggcagtacctgcgggtggagacccagttccagaatggccactatgacaagtgtgtgtttgccctgcgggaggagaacaagagtgacatgaacacagtgctgaactacatcttcagccacgcccaggtgaccaagaagaacctgctggtgaccatgctgattgaccagctgtgtggccgggaccccaccctgacagatgagctgctgaacatcctgacagagctgacccagctgagcaagaccaccaatgccaaggtggccctgcgggcccggcaggtgctgattgccagccacctgcccagctatgagctgcggcacaaccaggtggagagcatcttcctgagcgccatcgacatgtatggccaccagttctgcatcgagaacctgcagaagctgatcctgtctgagaccagcatctttgatgtgctgcccaacttcttctaccacagcaaccaggtggtgaggatggccgccctggaggtgtatgtgcggcgggcctacatcgcctatgagctgaacagcgtgcagcaccggcagctgaaggacaacacctgtgtggtggagttccagttcatgctgcccaccagccaccccaacagaggcaacatccccaccctgaacaggatgtccttcagcagcaacctgaaccactacggcatgacccacgtggcctctgtgtctgatgtgctgctggacaacagcttcaccccaccctgccagaggatgggcggcatggtgtccttccgcacctttgaggactttgtgcgcatctttgatgaggtgatgggctgcttcagtgacagccccccccagagccccaccttccctgaggccggccacaccagcctgtatgatgaggacaaggtgcccagagatgagcccatccacatcctgaatgtggccatcaagacagactgtgacattgaagatgaccggctggccgccatgttccgggagttcacccagcagaacaaggccaccctggtggaccacggcatccggcggctgaccttcctggtggcccagaaggacttcaggaagcaggtgaactatgaggtggaccggcgcttccaccgggagttccccaagttcttcaccttccgggcccgggacaagtttgaagaagatcgcatctaccgccacctggagcccgccctggccttccagctggagctgaacaggatgaggaactttgacctgacagccatcccctgtgccaaccacaagatgcacctgtacctgggcgccgccaaggtggaggtgggcacagaggtgacagactaccgcttctttgtgcgggccatcatccgccacagcgacctggtgaccaaggaggccagctttgagtacctgcagaatgaaggagagcggctgctgctggaggccatggatgagctggaggtggccttcaacaacaccaacgtgaggacagactgcaaccacatcttcctgaactttgtgcccaccgtcatcatggaccccagcaagattgaggagagcgtgcgctccatggtgatgagatatggcagccggctgtggaagctgcgggtgctgcaggccgagctgaagatcaacatccggctgacccccaccgggaaggccatccccatccgcctcttcctgaccaatgaaagtggctactacctggacatcagcctgtacaaggaggtgacagacagcaggacagcccagatcatgttccaggcctacggggacaagcagggccccctgcacggcatgctgatcaacaccccctacgtgaccaaggacctgctgcagagcaagcgcttccaggcccagagcctgggcaccacctacatctatgacatccctgagatgttccggcagagcctcatcaagctgtgggagagcatgagcacccaggccttcctgcccagcccccccctgcccagcgacatgctgacctacacagagctggtgctggatgaccagggccagctggtgcacatgaaccggctgcccggcggcaatgagatcggcatggtggcctggaagatgaccttcaagagccctgagtacccagagggccgggacatcatcgtgattggaaatgacatcacctacagaattggcagctttggcccccaggaggacctgctcttcctgcgggccagcgagctggcccgggcagagggcatcccccgcatctacgtgtctgccaacagcggggccagaattggcctggccgaggagatccgccacatgttccacgtggcctgggtggaccctgaggacccctacaagggctaccgctacctgtacctgaccccccaggactacaagagggtgtctgccctgaacagcgtgcactgtgagcacgtggaggatgaaggagagagccgctacaagatcacagacatcatcggcaaggaggagggcatcggccctgagaacctgcggggcagcggcatgattgctggggagagcagcctggcctacaatgagatcatcaccatcagcctggtgacctgccgggccatcggcatcggggcctacctggtgcggctgggccagaggaccatccaggtggagaacagccacctgatcctgaccggggccggggccctgaacaaggtgctgggccgggaggtgtacaccagcaacaaccagctgggcggcatccagatcatgcacaacaatggagtgacccactgcaccgtgtgtgatgactttgagggcgtcttcaccgtgctgcactggctgagctacatgcccaagtctgtgcacagctctgtgcccctgctgaacagcaaggaccccatcgaccgcatcatcgagtttgtgcccaccaagaccccctatgacccccgctggatgctggccggccggccccaccccacccagaagggccagtggctgagcggcttctttgattatggcagcttcagcgagatcatgcagccctgggcccagacagtggtggtgggccgggcccggctgggcggcatccctgtgggcgtggtggccgtggagaccaggacagtggagctgagcatcccagctgaccctgccaacctggacagcgaggccaagatcatccagcaggccggccaggtgtggttcccagattctgccttcaagacctaccaggccatcaaggacttcaaccgggagggcctgcccctgatggtgtttgccaactggaggggcttcagcggcggcatgaaggacatgtatgaccaggtgctgaagtttggagcctacatcgtggatggcctgcgggagtgctgccagcctgtgctggtgtacatccccccccaggccgagctgcggggcggctcctgggtggtgattgacagcagcatcaaccccaggcacatggagatgtatgctgaccgggagagccggggctctgtgctggagcctgagggcaccgtggagatcaagttccggaggaaggacctggtgaagaccatgagaagagtggaccctgtgtacatccacctggccgagcggctgggcaccccagagctgagcacagctgagaggaaggagctggagaacaagctgaaggagcgggaggagttcctgatccccatctaccaccaggtggccgtgcagtttgctgacctgcatgacaccccaggccgcatgcaggagaagggcgtcatcagtgacatcctggactggaagaccagcaggaccttcttctactggaggctgcggcggctgctgctggaggacctggtgaagaagaagatccacaatgccaaccctgagctgacagatggccagatccaggccatgctgcggcgctggtttgtggaggtggagggcaccgtgaaggcctacgtgtgggacaacaacaaggacctggccgagtggctggagaagcagctgacagaggaggatggagtgcacagcgtgattgaggagaacatcaagtgcatcagccgggactatgtgctgaagcagatccgcagcctggtgcaggccaaccctgaggtggccatggacagcatcatccacatgacccagcacatcagccccacccagagagctgaggtgatccgcatcctgagcaccatggacagccccagcacctag

SEQ ID NO: 18207 - DNA, 6867 bp, synthetic construct
  misc_feature 1..6867: note = Description of Artificial Sequence: Synthetic coding sequence
  source 1..6867: mol_type = other DNA
atggagggcagccctgaggagaacaaggagatgagatactacatgctgcagaggagctccatgagcggcctgcacctggtgaagcagggccgggacaggaagaagattgacagccagagggacttcaccgtggccagccctgctgagtttgtgaccaggtttggaggcaacaaggtgattgagaaggtgctgattgccaacaacggcattgctgctgtgaagtgcatgaggagcatccgccgctggagctatgagatgttcagaaatgaaagagccatccgctttgtggtgatggtgaccccagaggacctgaaggccaatgctgagtacatcaagatggctgaccactacgtgcctgtgcctgggggccccaacaacaacaactatgccaacgtggagctgatcctggacatcgccaagagaattcctgtgcaggccgtgtgggccggctggggccacgccagcgagaaccccaagctgcctgagctgctgctgaagaatggaattgccttcatgggcccccccagccaggccatgtgggccctgggggacaagatcgccagcagcatcgtggcccagacagctggcatccccaccctgccctggagcggcagcggcctgcgggtggactggcaggagaatgacttcagcaagaggatcctgaatgtgccccaggagctgtatgagaagggctacgtgaaggatgtggatgatggcctgcaggccgctgaggaggtgggctaccctgtgatgatcaaggccagcgagggcggcggcggcaagggcatcaggaaggtgaacaatgctgatgacttccccaacctcttccggcaggtgcaggccgaggtgcccggcagccccatctttgtgatgaggctggccaagcagagccgccacctggaggtgcagatcctggccgaccagtatggaaatgccatcagcctgtttggccgggactgcagcgtgcagaggaggcaccagaagatcatcgaggaggccccagccaccatcgccaccccagctgtgtttgagcacatggagcagtgtgctgtgaagctggccaagatggtgggctacgtgtctgctggcaccgtggagtacctgtacagccaggacggcagcttctacttcctggagctgaacccccggctgcaggtggagcacccctgcacagagatggtggctgatgtgaacctgcctgctgcccagctgcagatcgccatgggcatccccctgtaccgcatcaaggacatccgcatgatgtatggagtgagcccctggggagacagccccatcgactttgaagattctgcccacgtgccctgcccccggggccacgtgattgctgcccgcatcaccagtgaaaatccagatgagggcttcaagcccagcagcggcaccgtgcaggagctgaacttccgcagcaacaagaatgtgtggggctacttctctgtggccgccgccggcggcctgcacgagtttgctgacagccagtttggccactgcttctcctggggagaaaatcgggaggaggccatcagcaacatggtggtggccctgaaggagctgagcatccggggggacttccgcaccaccgtggagtacctgatcaagctgctggagacagagagcttccagatgaacagaattgacaccggctggctggaccggctgattgctgagaaggtgcaggccgagaggccagacaccatgctgggcgtggtgtgtggggccctgcacgtggctgatgtgtccctgagaaattctgtgagcaacttcctgcacagcctggagcggggccaggtgctgcctgcccacaccctgctgaacacagtggatgtggagctgatctatgagggcgtgaagtatgtgctgaaggtgacccggcagagccccaacagctatgtggtgatcatgaatggcagctgtgtggaggtggatgtgcaccggctgagtgatggcggcctgctgctgtcctatgatggcagcagctacaccacctacatgaaggaggaggtggaccgctaccgcatcaccatcggcaacaagacctgtgtgtttgagaaggaaaatgaccccagcgtgatgaggagccccagcgctgggaagctgatccagtacatcgtggaggatggcggccacgtgtttgctggccagtgctacgccgagattgaggtgatgaagatggtgatgaccctgacagctgtggagagcggctgcatccactacgtgaagaggcctggagctgccctggaccccggctgtgtgctggccaagatgcagctggacaaccccagcaaggtgcagcaggccgagctgcacacaggcagcctgccccgcatccagagcacagccctgcggggggagaagctgcacagggtcttccactacgtgctggacaacctggtgaatgtgatgaatggctactgcctgcctgaccccttcttcagcagcaaggtgaaggactgggtggagcggctgatgaagaccctgcgggaccccagcctgcccctgctggagctgcaggacatcatgacctctgtgtctggccgcatccccccaaatgtggagaagagcatcaagaaggagatggcccagtatgccagcaacatcacctctgtgctgtgccagttccccagccagcagatcgccaacatcctggacagccatgctgccaccctgaacaggaagtctgagcgggaggtgttcttcatgaacacccagagcatcgtgcagctggtgcagcgctacagaagtggcatccggggccacatgaaggctgtggtgatggacctgctgcggcagtacctgcgggtggagacccagttccagaatggccactatgacaagtgtgtgtttgccctgcgggaggagaacaagagtgacatgaacacagtgctgaactacatcttcagccacgcccaggtgaccaagaagaacctgctggtgaccatgctgattgaccagctgtgtggccgggaccccaccctgacagatgagctgctgaacatcctgacagagctgacccagctgagcaagaccaccaatgccaaggtggccctgcgggcccggcaggtgctgattgccagccacctgcccagctatgagctgcggcacaaccaggtggagagcatcttcctgagcgccatcgacatgtatggccaccagttctgcatcgagaacctgcagaagctgatcctgtctgagaccagcatctttgatgtgctgcccaacttcttctaccacagcaaccaggtggtgaggatggccgccctggaggtgtatgtgagaagagcctacatcgcctatgagctgaacagcgtgcagcaccggcagctgaaggacaacacctgtgtggtggagttccagttcatgctgcccaccagccaccccaacagaggcaacatccccaccctgaacaggatgtccttcagcagcaacctgaaccactacggcatgacccacgtggcctctgtgtctgatgtgctgctggacaacagcttcaccccaccctgccagaggatgggcggcatggtgtccttccgcacctttgaagattttgtgcgcatctttgatgaggtgatgggctgcttcagtgacagccccccccagagccccaccttccctgaggccggccacaccagcctgtatgatgaggacaaggtgcccagagatgagcccatccacatcctgaatgtggccatcaagacagactgtgacattgaagatgaccggctggccgccatgttccgggagttcacccagcagaacaaggccaccctggtggaccacggcatccggcggctgaccttcctggtggcccagaaggacttcaggaagcaggtgaactatgaggtggaccggcgcttccaccgggagttccccaagttcttcaccttccgggcccgggacaagtttgaggaggaccgcatctaccgccacctggagcccgccctggccttccagctggagctgaacaggatgaggaactttgacctgacagccatcccctgtgccaaccacaagatgcacctgtacctgggcgccgccaaggtggaggtgggcacagaggtgacagactaccgcttctttgtgcgggccatcatccgccacagcgacctggtgaccaaggaggccagctttgagtacctgcagaatgaaggagagcggctgctgctggaggccatggatgagctggaggtggccttcaacaacaccaacgtgaggacagactgcaaccacatcttcctgaactttgtgcccaccgtcatcatggaccccagcaagattgaggagagcgtgcgctccatggtgatgagatatggcagccggctgtggaagctgcgggtgctgcaggccgagctgaagatcaacatccggctgacccccaccgggaaggccatccccatccgcctcttcctgaccaatgaaagtggctactacctggacatcagcctgtacaaggaggtgacagacagcaggacagcccagatcatgttccaggcctatggagacaagcagggccccctgcacggcatgctgatcaacaccccctacgtgaccaaggacctgctgcagagcaagcgcttccaggcccagagcctgggcaccacctacatctatgacatccctgagatgttccggcagagcctcatcaagctgtgggagagcatgagcacccaggccttcctgcccagcccccccctgcccagcgacatgctgacctacacagagctggtgctggatgaccagggccagctggtgcacatgaaccggctgcccggcggcaatgaaattggcatggtggcctggaagatgaccttcaagagccctgagtacccagagggccgggacatcatcgtgattggaaatgacatcacctaccgcatcggcagctttggcccccaggaggacctgctcttcctgcgggccagcgagctggcccgggcagagggcatcccccgcatctacgtgtctgccaacagcggggcccgcatcggcctggccgaggagatccgccacatgtttcatgtggcctgggtggaccctgaggacccctacaagggctaccgctacctgtacctgaccccccaggactacaagagggtgtctgccctgaacagcgtgcactgtgaacatgtggaggatgaaggagagagccgctacaagatcacagacatcatcggcaaggaggagggcatcggccctgagaacctgcggggcagcggcatgattgctggggagagcagcctggcctacaatgagatcatcaccatcagcctggtgacctgccgggccatcggcattggagcctacctggtgcggctgggccagaggaccatccaggtggagaacagccacctgatcctgactggagctggggccctgaacaaggtgctgggccgggaggtgtacaccagcaacaaccagctgggcggcatccagatcatgcacaacaacggggtgacccactgcaccgtgtgtgatgactttgaaggagtcttcaccgtgctgcactggctgagctacatgcccaagtctgtgcacagctctgtgcccctgctgaacagcaaggaccccatcgaccgcatcattgaatttgtgcccaccaagaccccctatgacccccgctggatgctggccggccggccccaccccacccagaagggccagtggctgagcggcttctttgattatggcagcttcagcgagatcatgcagccctgggcccagacagtggtggtgggccgggcccggctgggcggcatccctgtgggcgtggtggccgtggagaccaggacagtggagctgagcatcccagctgaccctgccaacctggacagcgaggccaagatcatccagcaggccggccaggtgtggttcccagacagcgccttcaagacctaccaggccatcaaggacttcaaccgggagggcctgcccctgatggtgtttgccaactggaggggcttcagcggcggcatgaaggacatgtatgaccaggtgctgaagtttggagcctacatcgtggatggcctgcgggagtgctgccagcctgtgctggtgtacatccccccccaggccgagctgcggggcggctcctgggtggtgattgacagcagcatcaaccccaggcacatggagatgtatgctgaccgggagagccggggctctgtgctggagcctgagggcaccgtggagatcaagttccggaggaaggacctggtgaagaccatgagaagagtggaccctgtgtacatccacctggccgagcggctgggcaccccagagctgagcacagctgagaggaaggagctggagaacaagctgaaggagcgggaggagttcctgatccccatctaccaccaggtggccgtgcagtttgctgacctgcatgacaccccaggccgcatgcaggagaagggcgtcatcagtgacatcctggactggaagaccagcaggaccttcttctactggaggctgcggcggctgctgctggaggacctggtgaagaagaagatccacaatgccaaccctgagctgacagatggccagatccaggccatgctgcggcgctggtttgtggaggtggagggcaccgtgaaggcctacgtgtgggacaacaacaaggacctggccgagtggctggagaagcagctgacagaagaagatggagtgcacagcgtcatcgaggagaacatcaagtgcatcagccgggactatgtgctgaagcagatccgcagcctggtgcaggccaaccctgaggtggccatggacagcatcatccacatgacccagcacatcagccccacccagagagctgaggtgatccgcatcctgagcaccatggacagccccagcacctag

SEQ ID NO: 18208 - DNA, 1419 bp, synthetic construct
  misc_feature 1..1419: note = Description of Artificial Sequence: Synthetic coding sequence
  source 1..1419: mol_type = other DNA
atgcacaacaacggggtgacccactgcaccgtgtgtgatgactttgaaggagtcttcaccgtgctgcactggctgagctacatgcccaagtctgtgcacagctctgtgcccctgctgaacagcaaggaccccatcgaccgcatcattgaatttgtgcccaccaagaccccctatgacccccgctggatgctggccggccggccccaccccacccagaagggccagtggctgagcggcttctttgattatggcagcttcagcgagatcatgcagccctgggcccagacagtggtggtgggccgggcccggctgggcggcatccctgtgggcgtggtggccgtggagaccaggacagtggagctgagcatcccagctgaccctgccaacctggacagcgaggccaagatcatccagcaggccggccaggtgtggttcccagacagcgccttcaagacctaccaggccatcaaggacttcaaccgggagggcctgcccctgatggtgtttgccaactggaggggcttcagcggcggcatgaaggacatgtatgaccaggtgctgaagtttggagcctacatcgtggatggcctgcgggagtgctgccagcctgtgctggtgtacatccccccccaggccgagctgcggggcggctcctgggtggtgattgacagcagcatcaaccccaggcacatggagatgtatgctgaccgggagagccggggctctgtgctggagcctgagggcaccgtggagatcaagttccggaggaaggacctggtgaagaccatgagaagagtggaccctgtgtacatccacctggccgagcggctgggcaccccagagctgagcacagctgagaggaaggagctggagaacaagctgaaggagcgggaggagttcctgatccccatctaccaccaggtggccgtgcagtttgctgacctgcatgacaccccaggccgcatgcaggagaagggcgtcatcagtgacatcctggactggaagaccagcaggaccttcttctactggaggctgcggcggctgctgctggaggacctggtgaagaagaagatccacaatgccaaccctgagctgacagatggccagatccaggccatgctgcggcgctggtttgtggaggtggagggcaccgtgaaggcctacgtgtgggacaacaacaaggacctggccgagtggctggagaagcagctgacagaagaagatggagtgcacagcgtcatcgaggagaacatcaagtgcatcagccgggactatgtgctgaagcagatccgcagcctggtgcaggccaaccctgaggtggccatggacagcatcatccacatgacccagcacatcagccccacccagagagctgaggtgatccgcatcctgagcaccatggacagccccagcacctag

SEQ ID NO: 18209 - DNA, 129 bp, synthetic construct
  misc_feature 1..129: note = Description of Artificial Sequence: Synthetic coding sequence
  source 1..129: mol_type = other DNA
atgagcggcctgcacctggtgaagcagggccgggacaggaagaagattgacagccagagggacttcaccgtggccagccctgctgagtttgtgaccaggtttggaggcaacaaggtgattgagaagtag

SEQ ID NO: 18210 - DNA, 7041 bp, synthetic construct
  misc_feature 1..7041: note = Description of Artificial Sequence: Synthetic coding sequence
  source 1..7041: mol_type = other DNA
atggatgagcccagccccctggcccagcccctggagctgaaccagcacagccgcttcatcatcggctctgtgtctgaggacaacagtgaagatgagatcagcaacctggtgaagctggacctgctggaggagaaggagggcagcctgagccctgcctctgtgggcagtgacaccctgagtgacctgggcatcagcagcctgcaggacggcctggccctgcacatccgcagctccatgagcggcctgcacctggtgaagcagggccgggacaggaagaagattgacagccagagggacttcaccgtggccagccctgctgagtttgtgaccaggtttggaggcaacaaggtgattgagaaggtgctgattgccaacaacggcattgctgctgtgaagtgcatgaggagcatccgccgctggagctatgagatgttcagaaatgaaagagccatccgctttgtggtgatggtgaccccagaggacctgaaggccaatgctgagtacatcaagatggctgaccactacgtgcctgtgcctgggggccccaacaacaacaactatgccaacgtggagctgatcctggacatcgccaagagaattcctgtgcaggccgtgtgggccggctggggccacgccagcgagaaccccaagctgcctgagctgctgctgaagaatggaattgccttcatgggcccccccagccaggccatgtgggccctgggggacaagatcgccagcagcatcgtggcccagacagctggcatccccaccctgccctggagcggcagcggcctgcgggtggactggcaggagaatgacttcagcaagaggatcctgaatgtgccccaggagctgtatgagaagggctacgtgaaggatgtggatgatggcctgcaggccgctgaggaggtgggctaccctgtgatgatcaaggccagcgagggcggcggcggcaagggcatcaggaaggtgaacaatgctgatgacttccccaacctcttccggcaggtgcaggccgaggtgcccggcagccccatctttgtgatgaggctggccaagcagagccgccacctggaggtgcagatcctggccgaccagtatggaaatgccatcagcctgtttggccgggactgcagcgtgcagaggaggcaccagaagatcatcgaggaggccccagccaccatcgccaccccagctgtgtttgagcacatggagcagtgtgctgtgaagctggccaagatggtgggctacgtgtctgctggcaccgtggagtacctgtacagccaggacggcagcttctacttcctggagctgaacccccggctgcaggtggagcacccctgcacagagatggtggctgatgtgaacctgcctgctgcccagctgcagatcgccatgggcatccccctgtaccgcatcaaggacatccgcatgatgtatggagtgagcccctggggagacagccccatcgactttgaagattctgcccacgtgccctgcccccggggccacgtgattgctgcccgcatcaccagtgaaaatccagatgagggcttcaagcccagcagcggcaccgtgcaggagctgaacttccgcagcaacaagaatgtgtggggctacttctctgtggccgccgccggcggcctgcacgagtttgctgacagccagtttggccactgcttctcctggggagaaaatcgggaggaggccatcagcaacatggtggtggccctgaaggagctgagcatccggggggacttccgcaccaccgtggagtacctgatcaagctgctggagacagagagcttccagatgaacagaattgacaccggctggctggaccggctgattgctgagaaggtgcaggccgagaggccagacaccatgctgggcgtggtgtgtggggccctgcacgtggctgatgtgtccctgagaaattctgtgagcaacttcctgcacagcctggagcggggccaggtgctgcctgcccacaccctgctgaacacagtggatgtggagctgatctatgagggcgtgaagtatgtgctgaaggtgacccggcagagccccaacagctatgtggtgatcatgaatggcagctgtgtggaggtggatgtgcaccggctgagtgatggcggcctgctgctgtcctatgatggcagcagctacaccacctacatgaaggaggaggtggaccgctaccgcatcaccatcggcaacaagacctgtgtgtttgagaaggaaaatgaccccagcgtgatgaggagccccagcgctgggaagctgatccagtacatcgtggaggatggcggccacgtgtttgctggccagtgctacgccgagattgaggtgatgaagatggtgatgaccctgacagctgtggagagcggctgcatccactacgtgaagaggcctggagctgccctggaccccggctgtgtgctggccaagatgcagctggacaaccccagcaaggtgcagcaggccgagctgcacacaggcagcctgccccgcatccagagcacagccctgcggggggagaagctgcacagggtcttccactacgtgctggacaacctggtgaatgtgatgaatggctactgcctgcctgaccccttcttcagcagcaaggtgaaggactgggtggagcggctgatgaagaccctgcgggaccccagcctgcccctgctggagctgcaggacatcatgacctctgtgtctggccgcatccccccaaatgtggagaagagcatcaagaaggagatggcccagtatgccagcaacatcacctctgtgctgtgccagttccccagccagcagatcgccaacatcctggacagccatgctgccaccctgaacaggaagtctgagcgggaggtgttcttcatgaacacccagagcatcgtgcagctggtgcagcgctacagaagtggcatccggggccacatgaaggctgtggtgatggacctgctgcggcagtacctgcgggtggagacccagttccagaatggccactatgacaagtgtgtgtttgccctgcgggaggagaacaagagtgacatgaacacagtgctgaactacatcttcagccacgcccaggtgaccaagaagaacctgctggtgaccatgctgattgaccagctgtgtggccgggaccccaccctgacagatgagctgctgaacatcctgacagagctgacccagctgagcaagaccaccaatgccaaggtggccctgcgggcccggcaggtgctgattgccagccacctgcccagctatgagctgcggcacaaccaggtggagagcatcttcctgagcgccatcgacatgtatggccaccagttctgcatcgagaacctgcagaagctgatcctgtctgagaccagcatctttgatgtgctgcccaacttcttctaccacagcaaccaggtggtgaggatggccgccctggaggtgtatgtgagaagagcctacatcgcctatgagctgaacagcgtgcagcaccggcagctgaaggacaacacctgtgtggtggagttccagttcatgctgcccaccagccaccccaacagaggcaacatccccaccctgaacaggatgtccttcagcagcaacctgaaccactacggcatgacccacgtggcctctgtgtctgatgtgctgctggacaacagcttcaccccaccctgccagaggatgggcggcatggtgtccttccgcacctttgaagattttgtgcgcatctttgatgaggtgatgggctgcttcagtgacagccccccccagagccccaccttccctgaggccggccacaccagcctgtatgatgaggacaaggtgcccagagatgagcccatccacatcctgaatgtggccatcaagacagactgtgacattgaagatgaccggctggccgccatgttccgggagttcacccagcagaacaaggccaccctggtggaccacggcatccggcggctgaccttcctggtggcccagaaggacttcaggaagcaggtgaactatgaggtggaccggcgcttccaccgggagttccccaagttcttcaccttccgggcccgggacaagtttgaggaggaccgcatctaccgccacctggagcccgccctggccttccagctggagctgaacaggatgaggaactttgacctgacagccatcccctgtgccaaccacaagatgcacctgtacctgggcgccgccaaggtggaggtgggcacagaggtgacagactaccgcttctttgtgcgggccatcatccgccacagcgacctggtgaccaaggaggccagctttgagtacctgcagaatgaaggagagcggctgctgctggaggccatggatgagctggaggtggccttcaacaacaccaacgtgaggacagactgcaaccacatcttcctgaactttgtgcccaccgtcatcatggaccccagcaagattgaggagagcgtgcgctccatggtgatgagatatggcagccggctgtggaagctgcgggtgctgcaggccgagctgaagatcaacatccggctgacccccaccgggaaggccatccccatccgcctcttcctgaccaatgaaagtggctactacctggacatcagcctgtacaaggaggtgacagacagcaggacagcccagatcatgttccaggcctatggagacaagcagggccccctgcacggcatgctgatcaacaccccctacgtgaccaaggacctgctgcagagcaagcgcttccaggcccagagcctgggcaccacctacatctatgacatccctgagatgttccggcagagcctcatcaagctgtgggagagcatgagcacccaggccttcctgcccagcccccccctgcccagcgacatgctgacctacacagagctggtgctggatgaccagggccagctggtgcacatgaaccggctgcccggcggcaatgaaattggcatggtggcctggaagatgaccttcaagagccctgagtacccagagggccgggacatcatcgtgattggaaatgacatcacctaccgcatcggcagctttggcccccaggaggacctgctcttcctgcgggccagcgagctggcccgggcagagggcatcccccgcatctacgtgtctgccaacagcggggcccgcatcggcctggccgaggagatccgccacatgtttcatgtggcctgggtggaccctgaggacccctacaagggctaccgctacctgtacctgaccccccaggactacaagagggtgtctgccctgaacagcgtgcactgtgaacatgtggaggatgaaggagagagccgctacaagatcacagacatcatcggcaaggaggagggcatcggccctgagaacctgcggggcagcggcatgattgctggggagagcagcctggcctacaatgagatcatcaccatcagcctggtgacctgccgggccatcggcattggagcctacctggtgcggctgggccagaggaccatccaggtggagaacagccacctgatcctgactggagctggggccctgaacaaggtgctgggccgggaggtgtacaccagcaacaaccagctgggcggcatccagatcatgcacaacaacggggtgacccactgcaccgtgtgtgatgactttgaaggagtcttcaccgtgctgcactggctgagctacatgcccaagtctgtgcacagctctgtgcccctgctgaacagcaaggaccccatcgaccgcatcattgaatttgtgcccaccaagaccccctatgacccccgctggatgctggccggccggccccaccccacccagaagggccagtggctgagcggcttctttgattatggcagcttcagcgagatcatgcagccctgggcccagacagtggtggtgggccgggcccggctgggcggcatccctgtgggcgtggtggccgtggagaccaggacagtggagctgagcatcccagctgaccctgccaacctggacagcgaggccaagatcatccagcaggccggccaggtgtggttcccagacagcgccttcaagacctaccaggccatcaaggacttcaaccgggagggcctgcccctgatggtgtttgccaactggaggggcttcagcggcggcatgaaggacatgtatgaccaggtgctgaagtttggagcctacatcgtggatggcctgcgggagtgctgccagcctgtgctggtgtacatccccccccaggccgagctgcggggcggctcctgggtggtgattgacagcagcatcaaccccaggcacatggagatgtatgctgaccgggagagccggggctctgtgctggagcctgagggcaccgtggagatcaagttccggaggaaggacctggtgaagaccatgagaagagtggaccctgtgtacatccacctggccgagcggctgggcaccccagagctgagcacagctgagaggaaggagctggagaacaagctgaaggagcgggaggagttcctgatccccatctaccaccaggtggccgtgcagtttgctgacctgcatgacaccccaggccgcatgcaggagaagggcgtcatcagtgacatcctggactggaagaccagcaggaccttcttctactggaggctgcggcggctgctgctggaggacctggtgaagaagaagatccacaatgccaaccctgagctgacagatggccagatccaggccatgctgcggcgctggtttgtggaggtggagggcaccgtgaaggcctacgtgtgggacaacaacaaggacctggccgagtggctggagaagcagctgacagaagaagatggagtgcacagcgtcatcgaggagaacatcaagtgcatcagccgggactatgtgctgaagcagatccgcagcctggtgcaggccaaccctgaggtggccatggacagcatcatccacatgacccagcacatcagccccacccagagagctgaggtgatccgcatcctgagcaccatggacagccccagcacctag

SEQ ID NO: 18211 - DNA, 129 bp, synthetic construct; identical to SEQ ID NO: 18209
  misc_feature 1..129: note = Description of Artificial Sequence: Synthetic coding sequence
  source 1..129: mol_type = other DNA

SEQ ID NO: 18212 - DNA, 234 bp, synthetic construct
  misc_feature 1..234: note = Description of Artificial Sequence: Synthetic coding sequence
  source 1..234: mol_type = other DNA
atggatgagcccagccccctggcccagcccctggagctgaaccagcacagccgcttcatcatcggctctgtgtctgaggacaacagtgaagatgagatcagcaacctggtgaagctggacctgctggaggagaaggagggcagcctgagccctgcctctgtgggcagtgacaccctgagtgacctgggcatcagcagcctgcaggacggcctggccctgcacatccggctgtag

SEQ ID NO: 18213 - DNA, 3138 bp, synthetic construct
  misc_feature 1..3138: note = Description of Artificial Sequence: Synthetic coding sequence
  source 1..3138: mol_type = other DNA
atgggctgcttcagtgacagccccccccagagccccaccttccctgaggccggccacaccagcctgtatgatgaggacaaggtgcccagagatgagcccatccacatcctgaatgtggccatcaagacagactgtgacattgaagatgaccggctggccgccatgttccgggagttcacccagcagaacaaggccaccctggtggaccacggcatccggcggctgaccttcctggtggcccagaaggacttcaggaagcaggtgaactatgaggtggaccggcgcttccaccgggagttccccaagttcttcaccttccgggcccgggacaagtttgaggaggaccgcatctaccgccacctggagcccgccctggccttccagctggagctgaacaggatgaggaactttgacctgacagccatcccctgtgccaaccacaagatgcacctgtacctgggcgccgccaaggtggaggtgggcacagaggtgacagactaccgcttctttgtgcgggccatcatccgccacagcgacctggtgaccaaggaggccagctttgagtacctgcagaatgaaggagagcggctgctgctggaggccatggatgagctggaggtggccttcaacaacaccaacgtgaggacagactgcaaccacatcttcctgaactttgtgcccaccgtcatcatggaccccagcaagattgaggagagcgtgcgctccatggtgatgagatatggcagccggctgtggaagctgcgggtgctgcaggccgagctgaagatcaacatccggctgacccccaccgggaaggccatccccatccgcctcttcctgaccaatgaaagtggctactacctggacatcagcctgtacaaggaggtgacagacagcaggacagcccagatcatgttccaggcctatggagacaagcagggccccctgcacggcatgctgatcaacaccccctacgtgaccaaggacctgctgcagagcaagcgcttccaggcccagagcctgggcaccacctacatctatgacatccctgagatgttccggcagatcggcatggtggcctggaagatgaccttcaagagccctgagtacccagagggccgggacatcatcgtgattggaaatgacatcacctacagaattggcagctttggcccccaggaggacctgctcttcctgcgggccagcgagctggcccgggcagagggcatcccccgcatctacgtgtctgccaacagcggggccagaattggcctggccgaggagatccgccacatgttccacgtggcctgggtggaccctgaggacccctacaagggctaccgctacctgtacctgaccccccaggactacaagagggtgtctgccctgaacagcgtgcactgtgagcacgtggaggatgaaggagagagccgctacaagatcacagacatcatcggcaaggaggagggcatcggccctgagaacctgcggggcagcggcatgattgctggggagagcagcctggcctacaatgagatcatcaccatcagcctggtgacctgccgggccatcggcatcggggcctacctggtgcggctgggccagaggaccatccaggtggagaacagccacctgatcctgaccggggccggggccctgaacaaggtgctgggccgggaggtgtacaccagcaacaaccagctgggcggcatccagatcatgcacaacaatggagtgacccactgcaccgtgtgtgatgactttgagggcgtcttcaccgtgctgcactggctgagctacatgcccaagtctgtgcacagctctgtgcccctgctgaacagcaaggaccccatcgaccgcatcatcgagtttgtgcccaccaagaccccctatgacccccgctggatgctggccggccggccccaccccacccagaagggccagtggctgagcggcttctttgattatggcagcttcagcgagatcatgcagccctgggcccagacagtggtggtgggccgggcccggctgggcggcatccctgtgggcgtggtggccgtggagaccaggacagtggagctgagcatcccagctgaccctgccaacctggacagcgaggccaagatcatccagcaggccggccaggtgtggttcccagattctgccttcaagacctaccaggccatcaaggacttcaaccgggagggcctgcccctgatggtgtttgccaactggaggggcttcagcggcggcatgaaggacatgtatgaccaggtgctgaagtttggagcctacatcgtggatggcctgcgggagtgctgccagcctgtgctggtgtacatccccccccaggccgagctgcggggcggctcctgggtggtgattgacagcagcatcaaccccaggcacatggagatgtatgctgaccgggagagccggggctctgtgctggagcctgagggcaccgtggagatcaagttccggaggaaggacctggtgaagaccatgagaagagtggaccctgtgtacatccacctggccgagcggctgggcaccccagagctgagcacagctgagaggaaggagctggagaacaagctgaaggagcgggaggagttcctgatccccatctaccaccaggtggccgtgcagtttgctgacctgcatgacaccccaggccgcatgcaggagaagggcgtcatcagtgacatcctggactggaagaccagcaggaccttcttctactggaggctgcggcggctgctgctggaggacctggtgaagaagaagatccacaatgccaaccctgagctgacagatggccagatccaggccatgctgcggcgctggtttgtggaggtggagggcaccgtgaaggcctacgtgtgggacaacaacaaggacctggccgagtggctggagaagcagctgacagaggaggatggagtgcacagcgtgattgaggagaacatcaagtgcatcagccgggactatgtgctgaagcagatccgcagcctggtgcaggccaaccctgaggtggccatggacagcatcatccacatgacccagcacatcagccccacccagagagctgaggtgatccgcatcctgagcaccatggacagccccagcacctag

SEQ ID NO: 18214 - DNA, 363 bp, synthetic construct
  misc_feature 1..363: note = Description of Artificial Sequence: Synthetic coding sequence
  source 1..363: mol_type = other DNA
atggatgagcccagccccctggcccagcccctggagctgaaccagcacagccgcttcatcatcggctctgtgtctgaggacaacagtgaagatgagatcagcaacctggtgaagctggacctgctggaggagaaggagggcagcctgagccctgcctctgtgggcagtgacaccctgagtgacctgggcatcagcagcctgcaggacggcctggccctgcacatccgcagctccatgagcggcctgcacctggtgaagcagggccgggacaggaagaagattgacagccagagggacttcaccgtggccagccctgctgagtttgtgaccaggtttggaggcaacaaggtgattgagaagtag

SEQ ID NO: 18215 - DNA, 7113 bp, synthetic construct
  misc_feature 1..7113: note = Description of Artificial Sequence: Synthetic coding sequence
  source 1..7113: mol_type = other DNA
tccttctggaagtggatcagcacccagacagtgcgcatcatccgggctgtgcgggcccactttggaggcatcatggatgagcccagccccctggcccagcccctggagctgaaccagcacagccgcttcatcatcggctctgtgtctgaggacaacagtgaagatgagatcagcaacctggtgaagctggacctgctggaggagaaggagggcagcctgagccctgcctctgtgggcagtgacaccctgagtgacctgggcatcagcagcctgcaggacggcctggccctgcacatccgcagctccatgagcggcctgcacctggtgaagcagggccgggacaggaagaagattgacagccagagggacttcaccgtggccagccctgctgagtttgtgaccaggtttggaggcaacaaggtgattgagaaggtgctgattgccaacaacggcattgctgctgtgaagtgcatgaggagcatccgccgctggagctatgagatgttcagaaatgaaagagccatccgctttgtggtgatggtgaccccagaggacctgaaggccaatgctgagtacatcaagatggctgaccactacgtgcctgtgcctgggggccccaacaacaacaactatgccaacgtggagctgatcctggacatcgccaagagaattcctgtgcaggccgtgtgggccggctggggccacgccagcgagaaccccaagctgcctgagctgctgctgaagaatggaattgccttcatgggcccccccagccaggccatgtgggccctgggggacaagatcgccagcagcatcgtggcccagacagctggcatccccaccctgccctggagcggcagcggcctgcgggtggactggcaggagaatgacttcagcaagaggatcctgaatgtgccccaggagctgtatgagaagggctacgtgaaggatgtggatgatggcctgcaggccgctgaggaggtgggctaccctgtgatgatcaaggccagcgagggcggcggcggcaagggcatcaggaaggtgaacaatgctgatgacttccccaacctcttccggcaggtgcaggccgaggtgcccggcagccccatctttgtgatgaggctggccaagcagagccgccacctggaggtgcagatcctggccgaccagtatggaaatgccatcagcctgtttggccgggactgcagcgtgcagaggaggcaccagaagatcatcgaggaggccccagccaccatcgccaccccagctgtgtttgagcacatggagcagtgtgctgtgaagctggccaagatggtgggctacgtgtctgctggcaccgtggagtacctgtacagccaggacggcagcttctacttcctggagctgaacccccggctgcaggtggagcacccctgcacagagatggtggctgatgtgaacctgcctgctgcccagctgcagatcgccatgggcatccccctgtaccgcatcaaggacatccgcatgatgtatggagtgagcccctggggagacagccccatcgactttgaagattctgcccacgtgccctgcccccggggccacgtgattgctgcccgcatcaccagtgaaaatccagatgagggcttcaagcccagcagcggcaccgtgcaggagctgaacttccgcagcaacaagaatgtgtggggctacttctctgtggccgccgccggcggcctgcacgagtttgctgacagccagtttggccactgcttctcctggggagaaaatcgggaggaggccatcagcaacatggtggtggccctgaaggagctgagcatccggggggacttccgcaccaccgtggagtacctgatcaagctgctggagacagagagcttccagatgaacagaattgacaccggctggctggaccggctgattgctgagaaggtgcaggccgagaggccagacaccatgctgggcgtggtgtgtggggccctgcacgtggctgatgtgtccctgagaaattctgtgagcaacttcctgcacagcctggagcggggccaggtgctgcctgcccacaccctgctgaacacagtggatgtggagctgatctatgagggcgtgaagtatgtgctgaaggtgacccggcagagccccaacagctatgtggtgatcatgaatggcagctgtgtggaggtggatgtgcaccggctgagtgatggcggcctgctgctgtcctatgatggcagcagctacaccacctacatgaaggaggaggtggaccgctaccgcatcaccatcggcaacaagacctgtgtgtttgagaaggaaaatgaccccagcgtgatgaggagccccagcgctgggaagctgatccagtacatcgtggaggatggcggccacgtgtttgctggccagtgctacgccgagattgaggtgatgaagatggtgatgaccctgacagctgtggagagcggctgcatccactacgtgaagaggcctggagctgccctggaccccggctgtgtgctggccaagatgcagctggacaaccccagcaaggtgcagcaggccgagctgcacacaggcagcctgccccgcatccagagcacagccctgcggggggagaagctgcacagggtcttccactacgtgctggacaacctggtgaatgtgatgaatggctactgcctgcctgaccccttcttcagcagcaaggtgaaggactgggtggagcggctgatgaagaccctgcgggaccccagcctgcccctgctggagctgcaggacatcatgacctctgtgtctggccgcatccccccaaatgtggagaagagcatcaagaaggagatggcccagtatgccagcaacatcacctctgtgctgtgccagttccccagccagcagatcgccaacatcctggacagccatgctgccaccctgaacaggaagtctgagcgggaggtgttcttcatgaacacccagagcatcgtgcagctggtgcagcgctacagaagtggcatccggggccacatgaaggctgtggtgatggacctgctgcggcagtacctgcgggtggagacccagttccagaatggccactatgacaagtgtgtgtttgccctgcgggaggagaacaagagtgacatgaacacagtgctgaactacatcttcagccacgcccaggtgaccaagaagaacctgctggtgaccatgctgattgaccagctgtgtggccgggaccccaccctgacagatgagctgctgaacatcctgacagagctgacccagctgagcaagaccaccaatgccaaggtggccctgcgggcccggcaggtgctgattgccagccacctgcccagctatgagctgcggcacaaccaggtggagagcatcttcctgagcgccatcgacatgtatggccaccagttctgcatcgagaacctgcagaagctgatcctgtctgagaccagcatctttgatgtgctgcccaacttcttctaccacagcaaccaggtggtgaggatggccgccctggaggtgtatgtgagaagagcctacatcgcctatgagctgaacagcgtgcagcaccggcagctgaaggacaacacctgtgtggtggagttccagttcatgctgcccaccagccaccccaacagaggcaacatccccaccctgaacaggatgtccttcagcagcaacctgaaccactacggcatgacccacgtggcctctgtgtctgatgtgctgctggacaacagcttcaccccaccctgccagaggatgggcggcatggtgtccttccgcacctttgaagattttgtgcgcatctttgatgaggtgatgggctgcttcagtgacagccccccccagagccccaccttccctgaggccggccacaccagcctgtatgatgaggacaaggtgcccagagatgagcccatccacatcctgaatgtggccatcaagacagactgtgacattgaagatgaccggctggccgccatgttccgggagttcacccagcagaacaaggccaccctggtggaccacggcatccggcggctgaccttcctggtggcccagaaggacttcaggaagcaggtgaactatgaggtggaccggcgcttccaccgggagttccccaagttcttcaccttccgggcccgggacaagtttgaggaggaccgcatctaccgccacctggagcccgccctggccttccagctggagctgaacaggatgaggaactttgacctgacagccatcccctgtgccaaccacaagatgcacctgtacctgggcgccgccaaggtggaggtgggcacagaggtgacagactaccgcttctttgtgcgggccatcatccgccacagcgacctggtgaccaaggaggccagctttgagtacctgcagaatgaaggagagcggctgctgctggaggccatggatgagctggaggtggccttcaacaacaccaacgtgaggacagactgcaaccacatcttcctgaactttgtgcccaccgtcatcatggaccccagcaagattgaggagagcgtgcgctccatggtgatgagatatggcagccggctgtggaagctgcgggtgctgcaggccgagctgaagatcaacatccggctgacccccaccgggaaggccatccccatccgcctcttcctgaccaatgaaagtggctactacctggacatcagcctgtacaaggaggtgacagacagcaggacagcccagatcatgttccaggcctatggagacaagcagggccccctgcacggcatgctgatcaacaccccctacgtgaccaaggacctgctgcagagcaagcgcttccaggcccagagcctgggcaccacctacatctatgacatccctgagatgttccggcagagcctcatcaagctgtgggagagcatgagcacccaggccttcctgcccagcccccccctgcccagcgacatgctgacctacacagagctggtgctggatgaccagggccagctggtgcacatgaaccggctgcccggcggcaatgaaattggcatggtggcctggaagatgaccttcaagagccctgagtacccagagggccgggacatcatcgtgattggaaatgacatcacctaccgcatcggcagctttggcccccaggaggacctgctcttcctgcgggccagcgagctggcccgggcagagggcatcccccgcatctacgtgtctgccaacagcggggcccgcatcggcctggccgaggagatccgccacatgtttcatgtggcctgggtggaccctgaggacccctacaagggctaccgctacctgtacctgaccccccaggactacaagagggtgtctgccctgaacagcgtgcactgtgaacatgtggaggatgaaggagagagccgctacaagatcacagacatcatcggcaaggaggagggcatcggccctgagaacctgcggggcagcggcatgattgctggggagagcagcctggcctacaatgagatcatcaccatcagcctggtgacctgccgggccatcggcattggagcctacctggtgcggctgggccagaggaccatccaggtggagaacagccacctgatcctgactggagctggggccctgaacaaggtgctgggccgggaggtgtacaccagcaacaaccagctgggcggcatccagatcatgcacaacaacggggtgacccactgcaccgtgtgtgatgactttgaaggagtcttcaccgtgctgcactggctgagctacatgcccaagtctgtgcacagctctgtgcccctgctgaacagcaaggaccccatcgaccgcatcattgaatttgtgcccaccaagaccccctatgacccccgctggatgctggccggccggccccaccccacccagaagggccagtggctgagcggcttctttgattatggcagcttcagcgagatcatgcagccctgggcccagacagtggtggtgggccgggcccggctgggcggcatccctgtgggcgtggtggccgtggagaccaggacagtggagctgagcatcccagctgaccctgccaacctggacagcgaggccaagatcatccagcaggccggccaggtgtggttcccagacagcgccttcaagacctaccaggccatcaaggacttcaaccgggagggcctgcccctgatggtgtttgccaactggaggggcttcagcggcggcatgaaggacatgtatgaccaggtgctgaagtttggagcctacatcgtggatggcctgcgggagtgctgccagcctgtgctggtgtacatccccccccaggccgagctgcggggcggctcctgggtggtgattgacagcagcatcaaccccaggcacatggagatgtatgctgaccgggagagccggggctctgtgctggagcctgagggcaccgtggagatcaagttccggaggaaggacctggtgaagaccatgagaagagtggaccctgtgtacatccacctggccgagcggctgggcaccccagagctgagcacagctgagaggaaggagctggagaacaagctgaaggagcgggaggagttcctgatccccatctaccaccaggtggccgtgcagtttgctgacctgcatgacaccccaggccgcatgcaggagaagggcgtcatcagtgacatcctggactggaagaccagcaggaccttcttctactggaggctgcggcggctgctgctggaggacctggtgaagaagaagatccacaatgccaaccctgagctgacagatggccagatccaggccatgctgcggcgctggtttgtggaggtggagggcaccgtgaaggcctacgtgtgggacaacaacaaggacctggccgagtggctggagaagcagctgacagaagaagatggagtgcacagcgtcatcgaggagaacatcaagtgcatcagccgggactatgtgctgaagcagatccgcagcctggtgcaggccaaccctgaggtggccatggacagcatcatccacatgacccagcacatcagccccacccagagagctgaggtgatccgcatcctgagcaccatggacagccccagcacctag

SEQ ID NO: 18216 - DNA, 777 bp, synthetic construct
  misc_feature 1..777: note = Description of Artificial Sequence: Synthetic coding sequence
  source 1..777: mol_type = other DNA
atgagcggcctgcacctggtgaagcagggccgggacaggaagaagattgacagccagagggacttcaccgtggccagccctgctgagtttgtgaccaggtttggaggcaacaaggtgattgagaaggtgctgattgccaacaacggcattgctgctgtgaagtgcatgaggagcatccgccgctggagctatgagatgttcagaaatgaaagagccatccgctttgtggtgatggtgaccccagaggacctgaaggccaatgctgagtacatcaagatggctgaccactacgtgcctgtgcctgggggccccaacaacaacaactatgccaacgtggagctgatcctggacatcgccaagagaattcctgtgcaggccgtgtgggccggctggggccacgccagcgagaaccccaagctgcctgagctgctgctgaagaatggaattgccttcatgggcccccccagccaggccatgtgggccctgggggacaagatcgccagcagcatcgtggcccagacagctggcatccccaccctgccctggagcggcagcggcctgcgggtggactggcaggagaatgacttcagcaagaggatcctgaatgtgccccaggagctgtatgagaagggctacgtgaaggatgtggatgatggcctgcaggccgctgaggaggtgggctaccctgtgatgatcaaggccagcgagggcggcggcggcaagggcatcaggaaggtgaacaatgctgatgacttccccaacctcttccggcagtag

SEQ ID NO: 18217 - DNA, 144 bp, synthetic construct
  misc_feature 1..144: note = Description of Artificial Sequence: Synthetic coding sequence
  source 1..144: mol_type = other DNA
atggatgagcccagccccctggcccagcccctggagctgaaccagcacagccgcttcatcatcggctctgtgtctgaggacaacagtgaagatgagatcagcaacctggtgaagctggacctgctggaggagaaggagggctag

SEQ ID NO: 18218 - DNA, 2679 bp, synthetic construct
  misc_feature 1..2679: note = Description of Artificial Sequence: Synthetic coding sequence
  source 1..2679: mol_type = other DNA
atggaccactatgacagccagcagaccaatgactacatgcagcctgaggaggactgggaccgggacctgctgctggaccctgcctgggagaagcagcagaggaagaccttcaccgcctggtgcaacagccacctgaggaaggccggcacccagattgaaaatattgaggaggacttcagagatggcctgaagctgatgctgctgctggaggtgatctctggagagcggctggccaagccagagcggggcaagatgagggtgcacaagatcagcaatgtgaacaaggccctggacttcatcgccagcaaaggagtgaagctggtgtccatcggggctgaggagatcgtggatggaaatgtgaagatgaccctgggcatgatctggaccatcatcctgcgctttgccatccaggacatctctgtggaggagaccagcgccaaggagggcctgctgctgtggtgccagaggaagacagccccctacaagaatgtgaacatccagaacttccacatctcctggaaggatggcctgggcttctgtgccctgatccaccgccacaggcctgagctgattgattatggcaagctgaggaaggatgaccccctgaccaacctgaacacagcctttgatgtggccgagaagtacctggacatccccaagatgctggatgctgaagatattgtgggcacagcccggccagatgagaaggccatcatgacctacgtgagcagcttctaccacgccttcagcggggcccagaaggccgagacagctgccaaccgcatctgcaaggtgctggccgtgaaccaggagaatgagcagctgatggaggactatgagaagctggccagtgacctgctggagtggatccggaggaccatcccctggctggagaacagagtgcctgagaacaccatgcacgccatgcagcagaagctggaggacttccgggactaccgccgcctgcacaagccacccaaggtgcaggagaagtgccagctggagatcaacttcaacaccctgcagaccaagctgcggctgagcaacagacctgccttcatgcccagcgagggccgcatggtgtctgacatcaacaatgcctggggctgcctggagcaggtggagaagggctatgaggagtggctgctgaatgagatccggcggctggagcggctggaccacctggccgagaagttccggcagaaggccagcatccacgaggcctggacagatggcaaggaggccatgctgcggcagaaggactatgaaacagccaccctgtctgagatcaaggccctgctgaagaagcatgaggcctttgaaagtgacctggccgcccaccaggacagagtggagcagattgctgccatcgcccaggagctgaatgagctggactactatgacagccccagcgtgaatgcccgctgccagaagatctgtgaccagtgggacaacctgggcgccctgacccagaagagaagagaggccctggagaggacagagaagctgctggagaccatcgaccagctgtacctggagtatgccaagagagctgcccccttcaacaactggatggagggcgccatggaggacctgcaggacaccttcatcgtgcacaccatcgaggagatccagggcctgaccacagcccacgagcagttcaaggccaccctgcctgatgctgacaaggagcggctggccatcctgggcatccacaatgaggtgtccaagatcgtgcagacctaccacgtgaacatggccggcaccaacccctacaccaccatcaccccccaggagatcaatggcaagtgggaccacgtgcggcagctggtgccccggcgggaccaggccctgacagaggagcacgcccggcagcagcacaatgaaaggctgaggaagcagtttggagcccaggccaacgtcatcggcccctggatccagaccaagatggaggagatcggccgcatcagcattgagatgcacggcaccctggaggaccagctgagccacctgcggcagtatgagaagagcatcgtgaactacaagcccaagattgaccagctggagggggaccaccagctgatccaggaggccctgatctttgacaacaagcacaccaactacaccatggagcacatccgggtgggctgggagcagctgctgaccaccatcgcccggaccatcaatgaggtggagaaccagatcctgaccagagatgccaagggcatcagccaggagcagatgaatgagttccgggccagcttcaaccactttgaccgggaccacagcggcaccctgggccctgaggagttcaaggcctgcctgatcagcctgggctatgacattggaaatgacccccagggcgaggccgagtttgcccgcatcatgagcatcgtggaccccaaccggctgggcgtggtgaccttccaggccttcatcgacttcatgagccgggagacagctgacacagacacagctgaccaggtgatggccagcttcaagatcctggccggggacaagaactacatcaccatggatgagctgcggcgggagctgcccccagaccaggccgagtactgcatcgccaggatggccccctacacaggccctgacagcgtgcctggggccctggactacatgtccttcagcacagccctgtatggagagagtgacctgtag

SEQ ID NO: 18219 - DNA, 2745 bp, synthetic construct
  misc_feature 1..2745: note = Description of Artificial Sequence: Synthetic coding sequence
  source 1..2745: mol_type = other DNA
atggaccactatgacagccagcagaccaatgactacatgcagcctgaggaggactgggaccgggacctgctgctggaccctgcctgggagaagcagcagaggaagaccttcaccgcctggtgcaacagccacctgaggaaggccggcacccagattgaaaatattgaggaggacttcagagatggcctgaagctgatgctgctgctggaggtgatctctggagagcggctggccaagccagagcggggcaagatgagggtgcacaagatcagcaatgtgaacaaggccctggacttcatcgccagcaaaggagtgaagctggtgtccatcggggctgaggagatcgtggatggaaatgtgaagatgaccctgggcatgatctggaccatcatcctgcgctttgccatccaggacatctctgtggaggagaccagcgccaaggagggcctgctgctgtggtgccagaggaagacagccccctacaagaatgtgaacatccagaacttccacatctcctggaaggatggcctgggcttctgtgccctgatccaccgccacaggcctgagctgattgattatggcaagctgaggaaggatgaccccctgaccaacctgaacacagcctttgatgtggccgagaagtacctggacatccccaagatgctggatgctgaagatattgtgggcacagcccggccagatgagaaggccatcatgacctacgtgagcagcttctaccacgccttcagcggggcccagaaggccgagacagctgccaaccgcatctgcaaggtgctggccgtgaaccaggagaatgagcagctgatggaggactatgagaagctggccagtgacctgctggagtggatccggaggaccatcccctggctggagaacagagtgcctgagaacaccatgcacgccatgcagcagaagctggaggacttccgggactaccgccgcctgcacaagccacccaaggtgcaggagaagtgccagctggagatcaacttcaacaccctgcagaccaagctgcggctgagcaacagacctgccttcatgcccagcgagggccgcatggtgtctgacatcaacaatgcctggggctgcctggagcaggtggagaagggctatgaggagtggctgctgaatgagatccggcggctggagcggctggaccacctggccgagaagttccggcagaaggccagcatccacgaggcctggacagatggcaaggaggccatgctgcggcagaaggactatgaaacagccaccctgtctgagatcaaggccctgctgaagaagcatgaggcctttgaaagtgacctggccgcccaccaggacagagtggagcagattgctgccatcgcccaggagctgaatgagctggactactatgacagccccagcgtgaatgcccgctgccagaagatctgtgaccagtgggacaacctgggcgccctgacccagaagagaagagaggccctggagaggacagagaagctgctggagaccatcgaccagctgtacctggagtatgccaagagagctgcccccttcaacaactggatggagggcgccatggaggacctgcaggacaccttcatcgtgcacaccatcgaggagatccagggcctgaccacagcccacgagcagttcaaggccaccctgcctgatgctgacaaggagcggctggccatcctgggcatccacaatgaggtgtccaagatcgtgcagacctaccacgtgaacatggccggcaccaacccctacaccaccatcaccccccaggagatcaatggcaagtgggaccacgtgcggcagctggtgccccggcgggaccaggccctgacagaggagcacgcccggcagcagcacaatgaaaggctgaggaagcagtttggagcccaggccaacgtcatcggcccctggatccagaccaagatggaggagatcggccgcatcagcattgagatgcacggcaccctggaggaccagctgagccacctgcggcagtatgagaagagcatcgtgaactacaagcccaagattgaccagctggagggggaccaccagctgatccaggaggccctgatctttgacaacaagcacaccaactacaccatggagcacatccgggtgggctgggagcagctgctgaccaccatcgcccggaccatcaatgaggtggagaaccagatcctgaccagagatgccaagggcatcagccaggagcagatgaatgagttccgggccagcttcaaccactttgaccgggaccacagcggcaccctgggccctgaggagttcaaggcctgcctgatcagcctgggctatgacattggaaatgacccccagaagaagacaggcatgatggacacagatgacttccgggcctgcctgatctccatgggctacaacatgggagaggccgagtttgcccgcatcatgagcatcgtggaccccaaccggctgggcgtggtgaccttccaggccttcatcgacttcatgagccgggagacagctgacacagacacagctgaccaggtgatggccagcttcaagatcctggccggggacaagaactacatcaccatggatgagctgcggcgggagctgcccccagaccaggccgagtactgcatcgccaggatggccccctacacaggccctgacagcgtgcctggggccctggactacatgtccttcagcacagccctgtatggagagagtgacctgtag

SEQ ID NO: 18220 - DNA, 2664 bp, synthetic construct
  misc_feature 1..2664: note = Description of Artificial Sequence: Synthetic coding sequence
  source 1..2664: mol_type = other DNA
atggaccactatgacagccagcagaccaatgactacatgcagcctgaggaggactgggaccgggacctgctgctggaccctgcctgggagaagcagcagaggaagaccttcaccgcctggtgcaacagccacctgaggaaggccggcacccagattgaaaatattgaggaggacttcagagatggcctgaagctgatgctgctgctggaggtgatctctggagagcggctggccaagccagagcggggcaagatgagggtgcacaagatcagcaatgtgaacaaggccctggacttcatcgccagcaaaggagtgaagctggtgtccatcggggctgaggagatcgtggatggaaatgtgaagatgaccctgggcatgatctggaccatcatcctgcgctttgccatccaggacatctctgtggaggagaccagcgccaaggagggcctgctgctgtggtgccagaggaagacagccccctacaagaatgtgaacatccagaacttccacatctcctggaaggatggcctgggcttctgtgccctgatccaccgccacaggcctgagctgattgattatggcaagctgaggaaggatgaccccctgaccaacctgaacacagcctttgatgtggccgagaagtacctggacatccccaagatgctggatgctgaagatattgtgggcacagcccggccagatgagaaggccatcatgacctacgtgagcagcttctaccacgccttcagcggggcccagaaggccgagacagctgccaaccgcatctgcaaggtgctggccgtgaaccaggagaatgagcagctgatggaggactatgagaagctggccagtgacctgctggagtggatccggaggaccatcccctggctggagaacagagtgcctgagaacaccatgcacgccatgcagcagaagctggaggacttccgggactaccgccgcctgcacaagccacccaaggtgcaggagaagtgccagctggagatcaacttcaacaccctgcagaccaagctgcggctgagcaacagacctgccttcatgcccagcgagggccgcatggtgtctgacatcaacaatgcctggggctgcctggagcaggtggagaagggctatgaggagtggctgctgaatgagatccggcggctggagcggctggaccacctggccgagaagttccggcagaaggccagcatccacgaggcctggacagatggcaaggaggccatgctgcggcagaaggactatgaaacagccaccctgtctgagatcaaggccctgctgaagaagcatgaggcctttgaaagtgacctggccgcccaccaggacagagtggagcagattgctgccatcgcccaggagctgaatgagctggactactatgacagccccagcgtgaatgcccgctgccagaagatctgtgaccagtgggacaacctgggcgccctgacccagaagagaagagaggccctggagaggacagagaagctgctggagaccatcgaccagctgtacctggagtatgccaagagagctgcccccttcaacaactggatggagggcgccatggaggacctgcaggacaccttcatcgtgcacaccatcgaggagatccagggcctgaccacagcccacgagcagttcaaggccaccctgcctgatgctgacaaggagcggctggccatcctgggcatccacaatgaggtgtccaagatcgtgcagacctaccacgtgaacatggccggcaccaacccctacaccaccatcaccccccaggagatcaatggcaagtgggaccacgtgcggcagctggtgccccggcgggaccaggccctgacagaggagcacgcccggcagcagcacaatgaaaggctgaggaagcagtttggagcccaggccaacgtcatcggcccctggatccagaccaagatggaggagatcggccgcatcagcattgagatgcacggcaccctggaggaccagctgagccacctgcggcagtatgagaagagcatcgtgaactacaagcccaagattgaccagctggagggggaccaccagctgatccaggaggccctgatctttgacaacaagcacaccaactacaccatggagcacatccgggtgggctgggagcagctgctgaccaccatcgcccggaccatcaatgaggtggagaaccagatcctgaccagagatgccaagggcatcagccaggagcagatgaatgagttccgggccagcttcaaccactttgacaggaagaagacaggcatgatggacacagatgacttccgggcctgcctgatctccatgggctacaacatgggagaggccgagtttgcccgcatcatgagcatcgtggaccccaaccggctgggcgtggtgaccttccaggccttcatcgacttcatgagccgggagacagctgacacagacacagctgaccaggtgatggccagcttcaagatcctggccggggacaagaactacatcaccatggatgagctgcggcgggagctgcccccagaccaggccgagtactgcatcgccaggatggccccctacacaggcccagattctgtgcctggggccctggactacatgtccttcagcacagccctgtatggagagagtgacctgtag

SEQ ID NO: 18221 - DNA, 2736 bp, synthetic construct
  misc_feature 1..2736: note = Description of Artificial Sequence: Synthetic coding sequence
  source 1..2736: mol_type = other DNA
atggtggactaccacgccgccaaccagagctaccagtatggccccagcagcgctggaaatggagctgggggcggcggctccatgggagactacatggcccaggaggatgactgggaccgggacctgctgctggaccctgcctgggagaagcagcagaggaagaccttcaccgcctggtgcaacagccacctgaggaaggccggcacccagatcgagaacattgatgaggacttcagagatggcctgaagctgatgctgctgctggaggtgatcagcggggagcggctgcccaagccagagcggggcaagatgagggtgcacaagatcaacaacgtgaacaaggccctggacttcatcgccagcaagggcgtgaagctggtgtccattggagctgaggagatcgtggatggaaatgccaagatgaccctgggcatgatctggaccatcatcctgcgctttgccatccaggacatctctgtggaggagaccagcgccaaggagggcctgctgctgtggtgccagaggaagacagccccctacaagaatgtgaatgtgcagaacttccacatctcctggaaggatggcctggccttcaatgccctgatccaccgccacaggcctgagctgattgaatatgacaagctgaggaaggatgatcctgtgaccaacctgaacaatgcctttgaggtggccgagaagtacctggacatccccaagatgctggatgctgaggacatcgtgaacacagcccggccagatgagaaggccatcatgacctacgtgtcctccttctaccacgccttcagcggggcccagaaggccgagacagctgccaaccgcatctgcaaggtgctggccgtgaaccaggagaatgagcacctgatggaggactatgagaagctggccagtgacctgctggagtggatccggaggaccatcccctggctggaggacagagtgccccagaagaccatccaggagatgcagcagaagctggaggacttccgggactacagaagagtgcacaagccacccaaggtgcaggagaagtgccagctggagatcaacttcaacaccctgcagaccaagctgcggctgagcaacagacctgccttcatgcccagcgagggcaagatggtgtctgacatcaacaacggctggcagcacctggagcaggccgagaagggctatgaggagtggctgctgaatgagatccggcggctggagcggctggaccacctggccgagaagttccggcagaaggccagcatccacgaggcctggacagatggcaaggaggccatgctgaagcaccgggactatgaaacagccaccctgagtgacatcaaggccctgatcaggaagcatgaggcctttgaaagtgacctggccgcccaccaggacagagtggagcagattgctgccatcgcccaggagctgaatgagctggactactatgacagccacaacgtgaacacccgctgccagaagatctgtgaccagtgggatgccctgggcagcctgacccacagccggcgggaggccctggagaagacagagaagcagctggaggccatcgaccagctgcacctggagtatgccaagagagctgcccccttcaacaactggatggagagcgccatggaggacctgcaggacatgttcatcgtgcacaccatcgaggagattgagggcctcatcagcgcccatgaccagttcaagagcaccctgcctgatgctgaccgggagcgggaggccatcctggccatccacaaggaggcccagagaattgctgagagcaaccacatcaagctgagcggcagcaacccctacaccaccgtgaccccccagatcatcaacagcaagtgggagaaggtgcagcagctggtgcccaagagggaccacgccctgctggaggagcagagcaagcagcagagcaatgagcacctgcggcggcagtttgccagccaggccaacgtggtgggcccctggatccagaccaagatggaggagatcggccgcatcagcattgagatgaatggcaccctggaggaccagctgagccacctgaagcagtatgaaagaagcatcgtggactacaagcccaacctggacctgctggagcagcagcaccagctgatccaggaggccctgatctttgacaacaagcacaccaactacaccatggagcacatccgggtgggctgggagcagctgctgaccaccatcgcccggaccatcaatgaggtggagaaccagatcctgaccagagatgccaagggcatcagccaggagcagatgcaggagttccgggccagcttcaaccactttgacaaggaccatggaggagccctgggccctgaggagttcaaggcctgcctgatcagcctgggctatgatgtggagaatgaccggcagggcgaggccgagttcaaccgcatcatgagcctggtggaccccaaccacagcggcctggtgaccttccaggccttcatcgacttcatgagccgggagaccacagacacagacacagctgaccaggtgattgccagcttcaaggtgctggccggggacaagaacttcatcacagctgaggagctgcggcgggagctgcccccagaccaggccgagtactgcatcgccaggatggccccctaccagggcccagatgctgtgcctggggccctggactacaagagcttcagcacagccctgtatggagagagtgacctgtag

SEQ ID NO: 18222 - DNA, 2079 bp, synthetic construct
  misc_feature 1..2079: note = Description of Artificial Sequence: Synthetic coding sequence
  source 1..2079: mol_type = other DNA
atggtggactaccacgccgccaaccagagctaccagtatggccccagcagcgctggaaatggagctgggggcggcggctccatgggagactacatggcccaggaggatgactgggaccgggacctgctgctggaccctgcctgggagaagcagcagaggaaggccgagacagctgccaaccgcatctgcaaggtgctggccgtgaaccaggagaatgagcacctgatggaggactatgagaagctggccagtgacctgctggagtggatccggaggaccatcccctggctggaggacagagtgccccagaagaccatccaggagatgcagcagaagctggaggacttccgggactaccgccgggtgcacaagccacccaaggtgcaggagaagtgccagctggagatcaacttcaacaccctgcagaccaagctgcggctgagcaacagacctgccttcatgcccagcgagggcaagatggtgtctgacatcaacaacggctggcagcacctggagcaggccgagaagggctatgaggagtggctgctgaatgagatccggcggctggagcggctggaccacctggccgagaagttccggcagaaggccagcatccacgaggcctggacagatggcaaggaggccatgctgaagcaccgggactatgaaacagccaccctgagtgacatcaaggccctgatcaggaagcatgaggcctttgaaagtgacctggccgcccaccaggacagagtggagcagattgctgccatcgcccaggagctgaatgagctggactactatgacagccacaacgtgaacacccgctgccagaagatctgtgaccagtgggatgccctgggcagcctgacccacagcagaagagaggccctggagaagacagagaagcagctggaggccatcgaccagctgcacctggagtatgccaagagagctgcccccttcaacaactggatggagagcgccatggaggacctgcaggacatgtttattgtgcacaccatcgaggagattgagggcctcatcagcgcccatgaccagttcaagagcaccctgcctgatgctgaccgggagcgggaggccatcctggccatccacaaggaggcccagagaattgctgagagcaaccacatcaagctgagcggcagcaacccctacaccaccgtgaccccccagatcatcaacagcaagtgggagaaggtgcagcagctggtgcccaagagggaccacgccctgctggaggagcagagcaagcagcagagcaatgagcacctgcggcggcagtttgccagccaggccaacgtggtgggcccctggatccagaccaagatggaggagatcggccgcatcagcattgagatgaatggcaccctggaggaccagctgagccacctgaagcagtatgaaagaagcatcgtggactacaagcccaacctggacctgctggagcagcagcaccagctgatccaggaggccctgatctttgacaacaagcacaccaactacaccatggagcacatccgggtgggctgggagcagctgctgaccaccatcgcccggaccatcaatgaggtggagaaccagatcctgaccagagatgccaagggcatcagccaggagcagatgcaggagttccgggccagcttcaaccactttgacaaggaccacggcggggccctgggccctgaggagttcaaggcctgcctgatcagcctgggctatgatgtggagaatgaccggcagggcgaggccgagttcaaccgcatcatgagcctggtggaccccaaccacagcggcctggtgaccttccaggccttcatcgacttcatgagccgggagaccacagacacagacacagctgaccaggtgattgccagcttcaaggtgctggccggggacaagaacttcatcacagctgaggagctgcggcgggagctgcccccagaccaggccgagtactgcatcgccaggatggccccctaccagggcccagatgctgtgcctggggccctggactacaagagcttcagcacagccctgtatggagagagtgacctgtag

SEQ ID NO: 18223 - DNA, 1566 bp, synthetic construct
  misc_feature 1..1566: note = Description of Artificial Sequence: Synthetic coding sequence
  source 1..1566: mol_type = other DNA
atggtggactaccacgccgccaaccagagctaccagtatggccccagcagcgctggaaatggagctgggggcggcggctccatgggagactacatggcccaggaggatgactgggaccgggacctgctgctggaccctgcctgggagaagcagcagaggaagaccttcaccgcctggtgcaacagccacctgaggaaggccggcacccagatcgagaacattgatgaggacttcagagatggcctgaagctgatgctgctgctggaggtgcatgagctggactactatgacagccacaacgtgaacacccgctgccagaagatctgtgaccagtgggatgccctgggcagcctgacccacagccggcgggaggccctggagaagacagagaagcagctggaggccatcgaccagctgcacctggagtatgccaagagagctgcccccttcaacaactggatggagagcgccatggaggacctgcaggacatgttcatcgtgcacaccatcgaggagattgagggcctcatcagcgcccatgaccagttcaagagcaccctgcctgatgctgaccgggagcgggaggccatcctggccatccacaaggaggcccagagaattgctgagagcaaccacatcaagctgagcggcagcaacccctacaccaccgtgaccccccagatcatcaacagcaagtgggagaaggtgcagcagctggtgcccaagagggaccacgccctgctggaggagcagagcaagcagcagagcaatgagcacctgcggcggcagtttgccagccaggccaacgtggtgggcccctggatccagaccaagatggaggagatcggccgcatcagcattgagatgaatggcaccctggaggaccagctgagccacctgaagcagtatgaaagaagcatcgtggactacaagcccaacctggacctgctggagcagcagcaccagctgatccaggaggccctgatctttgacaacaagcacaccaactacaccatggagcacatccgggtgggctgggagcagctgctgaccaccatcgcccggaccatcaatgaggtggagaaccagatcctgaccagagatgccaagggcatcagccaggagcagatgcaggagttccgggccagcttcaaccactttgacaaggaccatggaggagccctgggccctgaggagttcaaggcctgcctgatcagcctgggctatgatgtggagaatgaccggcagggcgaggccgagttcaaccgcatcatgagcctggtggaccccaaccacagcggcctggtgaccttccaggccttcatcgacttcatgagccgggagaccacagacacagacacagctgaccaggtgattgccagcttcaaggtgctggccggggacaagaacttcatcacagctgaggagctgcggcgggagctgcccccagaccaggccgagtactgcatcgccaggatggccccctaccagggcccagatgctgtgcctggggccctggactacaagagcttcagcacagccctgtatggagagagtgacctgtag

SEQ ID NO: 18224 - DNA, 1689 bp, synthetic construct
  misc_feature 1..1689: note = Description of Artificial Sequence: Synthetic coding sequence
  source 1..1689: mol_type = other DNA
atggtggactaccacgccgccaaccagagctaccagtatggccccagcagcgctggaaatggagctgggggcggcggctccatgggagactacatggcccaggaggatgactgggaccgggacctgctgctggaccctgcctgggagaagcagcagaggaagaccttcaccgcctggtgcaacagccacctgaggaaggccggcacccagatcgagaacattgatgaggacttcagagatggcctgaagctgatgctgctgctggaggtgatcagcggggagcggctgcccaagccagagcggggcaagatgagggtgcacaagatcaacaacgtgaacaaggccctggacttcatcgccagcaagggcgtgaagctggtgtccattggagctgaggagatcgtggatggaaatgccaagatgaccctgggcatgatctggaccatcatcctgcgctttgccatccaggacatctctgtggaggagaccagcgccaaggagggcctgctgctgtggtgccagaggaagacagccccctacaagaatgtgaatgtgcagaacttccacatctcctggaaggatggcctggccttcaatgccctgatccaccgccacaggcctgagctgattgaatatgacaagctgaggaaggatgatcctgtgaccaacctgaacaatgcctttgaggtggccgagaagtacctggacatccccaagatgctggatgctgaggacatcgtgaacacagcccggccagatgagaaggccatcatgacctacgtgtcctccttctaccacgccttcagcggggcccagaaggccgagacagctgccaaccgcatctgcaaggtgctggccgtgaaccaggagaatgagcacctgatggaggactatgagaagctggccagtgacctgctggagtggatccggaggaccatcccctggctggaggacagagtgccccagaagaccatccaggagatgcagcagaagctggaggacttccgggactacagaagagtgcacaagccacccaaggtgcaggagaagtgccagctggagatcaacttcaacaccctgcagaccaagctgcggctgagcaacagacctgccttcatgcccagcgagggcaagatggtgtctgacatcaacaacggctggcagcacctggagcaggccgagaagggctatgaggagtggctgctgaatgagatccggcggctggagcggctggaccacctggccgagaagttccggcagaaggccagcatccacgaggcctggacagatggcaaggaggccatgctgaagcaccgggactatgaaacagccaccctgagtgacatcaaggccctgatcaggaagcatgaggcctttgaaagtgacctggccgcccaccaggacagagtggagcagattgctgccatcgcccaggagctgaatgagctggactactatgacagccacaacgtgaacaccccagatggcctgcaggagggccctggccagccccacagccccatcccccccctgtgcatctatgccaagcacagcctgcagagcagcggcgtgggcggctgggccggccggggctggggccgcctgagccccctgagcctgtgtggcctggcccggcgcttcccccggcccggctggggagacctgggccctgccctgctggtgtggtag

SEQ ID NO: 18225 - DNA, 1518 bp, synthetic construct
  misc_feature 1..1518: note = Description of Artificial Sequence: Synthetic coding sequence
  source 1..1518: mol_type = other DNA
atgaagttcaagctgcacgtgaacagcgcccggcagtacaaggacctgtggaacatgtctgatgacaagcccttcctgtgcacagcccctggctgcggccagcgcttcaccaatgaagaccacctggccgtgcacaagcacaagcatgagatgaccctgaagtttggacctgccagaaatgacagcgtcatcgtggccgaccagacccccacccccacccgcttcctgaagaactgtgaggaggtgggcctcttcaatgagctggccagcccctttgaaaatgagttcaagaaggcctctgaagatgacatcaagaagatgcccctggacctgagccccctggccacccccatcatccgcagcaagattgaggagcccagcgtggtggagaccacccaccaggacagccccctgccccaccctgagagcaccaccagtgatgagaaggaggtgcccctggcccagacagcccagcccaccagcgccatcgtgcggcctgccagcctgcaggtgcccaacgtgctgctgaccagcagtgacagcagcgtcatcatccagcaggccgtgcccagccccaccagcagcaccgtcatcacccaggcccccagcagcaaccggcccatcgtgcctgtgcccggccccttccccctgctgctgcacctgcccaacggccagaccatgcctgtggccatcccagccagcatcaccagcagcaatgtgcacgtgcctgctgctgtgcccctggtgcggcctgtgaccatggtgcccagcgtgcccggcatccctggccccagcagcccccagcctgtgcagagcgaggccaagatgaggctgaaggccgccctgacccagcagcacccccctgtgaccaatggagacacagtgaagggccacggcagcggcctggtgaggacccagagcgaggagagccggccccagagcctgcagcagcctgccaccagcaccacagagaccccagccagccctgcccacaccaccccccagacccagagcaccagcggcagaagaagaagagctgccaatgaagatcctgatgagaagaggaggaagttcctggagaggaacagagctgctgccagccgctgccggcagaagaggaaggtgtgggtgcagagcctggagaagaaggccgaggacctgagcagcctgaatggccagctgcagagcgaggtgaccctgctgagaaatgaggtggcccagctgaagcagctgctgctggcccacaaggactgccctgtgacagccatgcagaagaagagcggctaccacacagctgacaaggatgacagcagcgaggacatctctgtgcccagcagcccccacacagaggccatccagcacagctctgtgtccaccagcaatggagtgagcagcaccagcaaggccgaggccgtggccacctctgtgctgacccagatggctgaccagagcacagagcccgccctgagccagatcgtgatggcccccagcagccagagccagcccagcggcagctag

SEQ ID NO: 18226 - DNA, 1344 bp, synthetic construct
  misc_feature 1..1344: note = Description of Artificial Sequence: Synthetic coding sequence
  source 1..1344: mol_type = other DNA
atgtactgtgcctggatgtggccagaccagacccccacccccacccgcttcctgaagaactgtgaggaggtgggcctcttcaatgagctggccagcccctttgaaaatgagttcaagaaggcctctgaagatgacatcaagaagatgcccctggacctgagccccctggccacccccatcatccgcagcaagattgaggagcccagcgtggtggagaccacccaccaggacagccccctgccccaccctgagagcaccaccagtgatgagaaggaggtgcccctggcccagacagcccagcccaccagcgccatcgtgcggcctgccagcctgcaggtgcccaacgtgctgctgaccagcagtgacagcagcgtcatcatccagcaggccgtgcccagccccaccagcagcaccgtcatcacccaggcccccagcagcaaccggcccatcgtgcctgtgcccggccccttccccctgctgctgcacctgcccaacggccagaccatgcctgtggccatcccagccagcatcaccagcagcaatgtgcacgtgcctgctgctgtgcccctggtgcggcctgtgaccatggtgcccagcgtgcccggcatccctggccccagcagcccccagcctgtgcagagcgaggccaagatgaggctgaaggccgccctgacccagcagcacccccctgtgaccaatggagacacagtgaagggccacggcagcggcctggtgaggacccagagcgaggagagccggccccagagcctgcagcagcctgccaccagcaccacagagaccccagccagccctgcccacaccaccccccagacccagagcaccagcggcagaagaagaagagctgccaatgaagatcctgatgagaagaggaggaagttcctggagaggaacagagctgctgccagccgctgccggcagaagaggaaggtgtgggtgcagagcctggagaagaaggccgaggacctgagcagcctgaatggccagctgcagagcgaggtgaccctgctgagaaatgaggtggcccagctgaagcagctgctgctggcccacaaggactgccctgtgacagccatgcagaagaagagcggctaccacacagctgacaaggatgacagcagcgaggacatctctgtgcccagcagcccccacacagaggccatccagcacagctctgtgtccaccagcaatggagtgagcagcaccagcaaggccgaggccgtggccacctctgtgctgacccagatggctgaccagagcacagagcccgccctgagccagatcgtgatggcccccagcagccagagccagcccagcggcagctag

SEQ ID NO: 18227 - DNA, 381 bp, synthetic construct
  misc_feature 1..381: note = Description of Artificial Sequence: Synthetic coding sequence
  source 1..381: mol_type = other DNA
atgtctgatgacaagcccttcctgtgcacagcccctggctgcggccagagcgaggtgaccctgctgagaaatgaggtggcccagctgaagcagctgctgctggcccacaaggactgccctgtgacagccatgcagaagaagagcggctaccacacagctgacaaggatgacagcagcgaggacatctctgtgcccagcagcccccacacagaggccatccagcacagctctgtgtccaccagcaatggagtgagcagcaccagcaaggccgaggccgtggccacctctgtgctgacccagatggctgaccagagcacagagcccgccctgagccagatcgtgatggcccccagcagccagagccagcccagcggcagctag

SEQ ID NO: 18228 - DNA, 1518 bp, synthetic construct; identical to SEQ ID NO: 18225
  misc_feature 1..1518: note = Description of Artificial Sequence: Synthetic coding sequence
  source 1..1518: mol_type = other DNA

SEQ ID NO: 18229 - DNA, 1344 bp, synthetic construct; identical to SEQ ID NO: 18226
  misc_feature 1..1344: note = Description of Artificial Sequence: Synthetic coding sequence
  source 1..1344: mol_type = other DNA

SEQ ID NO: 18230 - DNA, 630 bp, synthetic construct
  misc_feature 1..630: note = Description of Artificial Sequence: Synthetic coding sequence
  source 1..630: mol_type = other DNA
atgaagttcaagctgcacgtgaacagcgcccggcagtacaaggacctgtggaacatgtctgatgacaagcccttcctgtgcacagcccctggctgcggccagcgcttcaccaatgaagaccacctggccgtgcacaagcacaagcatgagatgaccctgaagtttggacctgccagaaatgacagcgtcatcgtggccgaccagacccccacccccacccgcttcctgaagaactgtgaggaggtgggcctcttcaatgagctggccagcccctttgaaaatgagttcaagaaggcctctgaagatgacatcaagaagatgcccctggacctgagccccctggccacccccatcatccgcagcaagattgaggagcccagcgtggtggagaccacccaccaggacagccccctgccccaccctgagagcaccaccagtgatgagaaggaggtgcccctggcccagacagcccagcccaccagcgccatcgtgcggcctgccagcctgcaggtgcccaacgtgctgctgaccagcagtgacagcagcgtcatcatccagcaggccgtgcccagccccaccagcagcaccgtcatcacccaggcccccagcagcaaccggcccatcgtgtag

SEQ ID NO: 18231 - DNA, 1188 bp, synthetic construct
  misc_feature 1..1188: note = Description of Artificial Sequence: Synthetic coding sequence
  source 1..1188: mol_type = other DNA
atgaagttcaagctgcacgtgaacagcgcccggcagtacaaggacctgtggaacatgtctgatgacaagcccttcctgtgcacagcccctggctgcggccagcgcttcaccaatgaagaccacctggccgtgcacaagcacaagcatgagatgaccctgaagtttggacctgccagaaatgacagcgtcatcgtggccgaccagacccccacccccacccgcttcctgaagaactgtgaggaggtgggcctcttcaatgagctggccagcccctttgaaaatgagttcaagaaggcctctgaagatgacatcaagaagatgcccctggacctgagccccctggccacccccatcatccgcagcaagattgaggagcccagcgtggtggagaccacccaccaggacagccccctgccccaccctgagagcaccaccagtgatgagaaggaggtgcccctggcccagacagcccagcccaccagcgccatcgtgcggcctgccagcctgcaggtgcccaacgtgctgctgaccagcagtgacagcagcgtcatcatccagcaggccgtgcccagccccaccagcagcaccgtcatcacccaggcccccagcagcaaccggcccatcgtgcctgtgcccggccccttccccctgctgctgcacctgcccaacggccagaccatgcctgtggccatcccagccagcatcaccagcagcaatgtgcacgtgcctgctgctgtgcccctggtgcggcctgtgaccatggtgcccagcgtgcccggcatccctggccccagcagcccccagcctgtgcagagcgaggccaagatgaggctgaaggccgccctgacccagcagcacccccctgtgaccaatggagacacagtgaagggccacggcagcggcctggtgaggacccagagcgaggagagccggccccagagcctgcagcagcctgccaccagcaccacagagaccccagccagccctgcccacaccaccccccagacccagagcaccagcggcagaagaagaagagctgccaatgaagatcctgatgagaagaggaggaagttcctggagaggaacagagctgctgccagccgctgccggcagaagaggaaggtgtgggtgcagagcctggagaagaaggccgaggacctgagcagcctgaatggccagctgcagtag

SEQ ID NO: 18232 - DNA, 714 bp, synthetic construct
  misc_feature 1..714: note = Description of Artificial Sequence: Synthetic coding sequence
  source 1..714: mol_type = other DNA
atgaagttcaagctgcacgtgaacagcgcccggcagtacaaggacctgtggaacatgtctgatgacaagcccttcctgtgcacagcccctggctgcggccagcgcttcaccaatgaagaccacctggccgtgcacaagcacaagcatgagatgaccctgaagtttggacctgccagaaatgacagcgtcatcgtggccgaccagacccccacccccacccgcttcctgaagaactgtgaggaggtgggcctcttcaatgagctggccagcccctttgaaaatgagttcaagaaggcctctgaagatgacatcaagaagatgcccctggacctgagccccctggccacccccatcatccgcagcaagattgaggagcccagcgtggtggagaccacccaccaggacagccccctgccccaccctgagagcaccaccagtgatgagaaggaggtgcccctggcccagacagcccagcccaccagcgccatcgtgcggcctgccagcctgcaggtgcccaacgtgctgctgaccagcagtgacagcagcgtcatcatccagcaggccgtgcccagccccaccagcagcaccgtcatcacccaggcccccagcagcaaccggcccatcgtgtcctttgaccagagcccctggtgcctggtgttccaggagagccaggtgctgcccctgcccaaccagtacagccagaagcagaagtag

SEQ ID NO: 18233 - DNA, 1464 bp, synthetic construct
  misc_feature 1..1464: note = Description of Artificial Sequence: Synthetic coding sequence
  source 1..1464: mol_type = other DNA
atgtctgatgacaagcccttcctgtgcacagcccctggctgcggccagcgcttcaccaatgaagaccacctggccgtgcacaagcacaagcatgagatgaccctgaagtttggacctgccagaaatgacagcgtcatcgtggccgaccagacccccacccccacccgcttcctgaagaactgtgaggaggtgggcctcttcaatgagctggccagcccctttgaaaatgagttcaagaaggcctctgaagatgacatcaagaagatgcccctggacctgagccccctggccacccccatcatccgcagcaagattgaggagcccagcgtggtggagaccacccaccaggacagccccctgccccaccctgagagcaccaccagtgatgagaaggaggtgcccctggcccagacagcccagcccaccagcgccatcgtgcggcctgccagcctgcaggtgcccaacgtgctgctgaccagcagtgacagcagcgtcatcatccagcaggccgtgcccagccccaccagcagcaccgtcatcacccaggcccccagcagcaaccggcccatcgtgcctgtgcccggccccttccccctgctgctgcacctgcccaacggccagaccatgcctgtggccatcccagccagcatcaccagcagcaatgtgcacgtgcctgctgctgtgcccctggtgcggcctgtgaccatggtgcccagcgtgcccggcatccctggccccagcagcccccagcctgtgcagagcgaggccaagatgaggctgaaggccgccctgacccagcagcacccccctgtgaccaatggagacacagtgaagggccacggcagcggcctggtgaggacccagagcgaggagagccggccccagagcctgcagcagcctgccaccagcaccacagagaccccagccagccctgcccacaccaccccccagacccagagcaccagcggcagaagaagaagagctgccaatgaagatcctgatgagaagaggaggaagttcctggagaggaacagagctgctgccagccgctgccggcagaagaggaaggtgtgggtgcagagcctggagaagaaggccgaggacctgagcagcctgaatggccagctgcagagcgaggtgaccctgctgagaaatgaggtggcccagctgaagcagctgctgctggcccacaaggactgccctgtgacagccatgcagaagaagagcggctaccacacagctgacaaggatgacagcagcgaggacatctctgtgcccagcagcccccacacagaggccatccagcacagctctgtgtccaccagcaatggagtgagcagcaccagcaaggccgaggccgtggccacctctgtgctgacccagatggctgaccagagcacagagcccgccctgagccagatcgtgatggcccccagcagccagagccagcccagcggcagctag

SEQ ID NO: 18234 - DNA, 1188 bp, synthetic construct; identical to SEQ ID NO: 18231
  misc_feature 1..1188: note = Description of Artificial Sequence: Synthetic coding sequence
  source 1..1188: mol_type = other DNA

SEQ ID NO: 18235 - DNA, 1188 bp, synthetic construct; identical to SEQ ID NO: 18231
  misc_feature 1..1188: note = Description of Artificial Sequence: Synthetic coding sequence
  source 1..1188: mol_type = other DNA

SEQ ID NO: 18236 - DNA, 660 bp, synthetic construct
  misc_feature 1..660: note = Description of Artificial Sequence: Synthetic coding sequence
  source 1..660: mol_type = other DNA
atgtctgatgacaagcccttcctgtgcacagcccctggctgcggccagcgcttcaccaatgaagaccacctggccgtgcacaagcacaagcatgagatgaccctgaagtttggacctgccagaaatgacagcgtcatcgtggccgaccagacccccacccccacccgcttcctgaagaactgtgaggaggtgggcctcttcaatgagctggccagcccctttgaaaatgagttcaagaaggcctctgaagatgacatcaagaagatgcccctggacctgagccccctggccacccccatcatccgcagcaagattgaggagcccagcgtggtggagaccacccaccaggacagccccctgccccaccctgagagcaccaccagtgatgagaaggaggtgcccctggcccagacagcccagcccaccagcgccatcgtgcggcctgccagcctgcaggtgcccaacgtgctgctgaccagcagtgacagcagcgtcatcatccagcaggccgtgcccagccccaccagcagcaccgtcatcacccaggcccccagcagcaaccggcccatcgtgtcctttgaccagagcccctggtgcctggtgttccaggagagccaggtgctgcccctgcccaaccagtacagccagaagcagaagtag

SEQ ID NO: 18237 - DNA, 1134 bp, synthetic construct
  misc_feature 1..1134: note = Description of Artificial Sequence: Synthetic coding sequence
  source 1..1134: mol_type = other DNA
atgtctgatgacaagcccttcctgtgcacagcccctggctgcggccagcgcttcaccaatgaagaccacctggccgtgcacaagcacaagcatgagatgaccctgaagtttggacctgccagaaatgacagcgtcatcgtggccgaccagacccccacccccacccgcttcctgaagaactgtgaggaggtgggcctcttcaatgagctggccagcccctttgaaaatgagttcaagaaggcctctgaagatgacatcaagaagatgcccctggacctgagccccctggccacccccatcatccgcagcaagattgaggagcccagcgtggtggagaccacccaccaggacagccccctgccccaccctgagagcaccaccagtgatgagaaggaggtgcccctggcccagacagcccagcccaccagcgccatcgtgcggcctgccagcctgcaggtgcccaacgtgctgctgaccagcagtgacagcagcgtcatcatccagcaggccgtgcccagccccaccagcagcaccgtcatcacccaggcccccagcagcaaccggcccatcgtgcctgtgcccggccccttccccctgctgctgcacctgcccaacggccagaccatgcctgtggccatcccagccagcatcaccagcagcaatgtgcacgtgcctgctgctgtgcccctggtgcggcctgtgaccatggtgcccagcgtgcccggcatccctggccccagcagcccccagcctgtgcagagcgaggccaagatgaggctgaaggccgccctgacccagcagcacccccctgtgaccaatggagacacagtgaagggccacggcagcggcctggtgaggacccagagcgaggagagccggccccagagcctgcagcagcctgccaccagcaccacagagaccccagccagccctgcccacaccaccccccagacccagagcaccagcggcagaagaagaagagctgccaatgaagatcctgatgagaagaggaggaagttcctggagaggaacagagctgctgccagccgctgccggcagaagaggaaggtgtgggtgcagagcctggagaagaaggccgaggacctgagcagcctgaatggccagctgcagtag

SEQ ID NO: 18238 - DNA, 1449 bp, synthetic construct
  misc_feature 1..1449: note = Description of Artificial Sequence: Synthetic coding sequence
  source 1..1449: mol_type = other DNA
atgaagttcaagctgcacgtgaacagcgcccggcagtacaaggacctgtggaacatgtctgatgacaagcccttcctgtgcacagcccctggctgcggccagcgcttcaccaatgaagaccacctggccgaccagacccccacccccacccgcttcctgaagaactgtgaggaggtgggcctcttcaatgagctggccagcccctttgaaaatgagttcaagaaggcctctgaagatgacatcaagaagatgcccctggacctgagccccctggccacccccatcatccgcagcaagattgaggagcccagcgtggtggagaccacccaccaggacagccccctgccccaccctgagagcaccaccagtgatgagaaggaggtgcccctggcccagacagcccagcccaccagcgccatcgtgcggcctgccagcctgcaggtgcccaacgtgctgctgaccagcagtgacagcagcgtcatcatccagcaggccgtgcccagccccaccagcagcaccgtcatcacccaggcccccagcagcaaccggcccatcgtgcctgtgcccggccccttccccctgctgctgcacctgcccaacggccagaccatgcctgtggccatcccagccagcatcaccagcagcaatgtgcacgtgcctgctgctgtgcccctggtgcggcctgtgaccatggtgcccagcgtgcccggcatccctggccccagcagcccccagcctgtgcagagcgaggccaagatgaggctgaaggccgccctgacccagcagcacccccctgtgaccaacggggacacagtgaagggccacggcagcggcctggtgaggacccagagcgaggagagccggccccagagcctgcagcagcctgccaccagcaccacagagaccccagccagccctgcccacaccaccccccagacccagagcaccagcggcagaagaagaagagctgccaatgaagatcctgatgagaagaggaggaagttcctggagaggaacagagctgctgccagccgctgccggcagaagaggaaggtgtgggtgcagagcctggagaagaaggccgaggacctgagcagcctgaatggccagctgcagagcgaggtgaccctgctgagaaatgaggtggcccagctgaagcagctgctgctggcccacaaggactgccctgtgacagccatgcagaagaagagcggctaccacacagctgacaaggatgacagcagcgaggacatctctgtgcccagcagcccccacacagaggccatccagcacagctctgtgtccaccagcaatggagtgagcagcaccagcaaggccgaggccgtggccacctctgtgctgacccagatggctgaccagagcacagagcccgccctgagccagatcgtgatggcccccagcagccagagccagcccagcggcagctag

SEQ ID NO: 18239 - DNA, 2136 bp, synthetic construct
  misc_feature 1..2136: note = Description of Artificial Sequence: Synthetic coding sequence
  source 1..2136: mol_type = other DNA
atgaagctgaagctgaatgtgctgaccatcatcctgctgcctgtgcacctgctgatcaccatctacagcgccctgatcttcatcccctggtacttcctgaccaatgccaagaagaagaatgccatggccaagaggatcaaggccaagcccaccagtgacaagccaggcagcccctacagatctgtgacccactttgacagcctggccgtgattgacatccctggagctgacaccctggacaagctgtttgaccatgctgtgtccaagtttgggaagaaggacagcctgggcacccgggagatcctgtctgaagaaaatgagatgcagcccaacgggaaggtgttcaagaagctgatcctgggcaactacaagtggatgaactacctggaggtgaacagaagagtgaacaactttggcagcggcctgacagccctgggcctgaagcccaagaacaccatcgccatcttctgtgagaccagggctgagtggatgattgctgcccagacctgcttcaagtacaacttccccctggtgaccctgtatgccaccctgggcaaggaggccgtggtgcacggcctgaatgaaagtgaggccagctacctgatcacctctgtggagctgctggagagcaagctgaagacagccctgctggacatcagctgtgtgaagcacatcatctacgtggacaacaaggccatcaacaaggccgagtacccagagggctttgagatccacagcatgcagagcgtggaggagctgggcagcaaccctgagaacctgggcatcccccccagccggcccacccccagcgacatggccatcgtgatgtacaccagcggcagcacaggccggcccaagggcgtgatgatgcaccacagcaacctgattgctggcatgacaggccagtgtgagcgcatccctggcctgggccccaaggacacctacatcggctacctgcccctggcccacgtgctggagctgacagctgagatcagctgcttcacctacggctgccgcatcggctacagcagccccctgaccctgagtgaccagagcagcaagatcaagaagggcagcaagggggactgcaccgtgctgaagcccaccctgatggctgctgtgcctgagatcatggaccgcatctacaagaatgtgatgagcaaggtgcaggagatgaactacatccagaagaccctcttcaagattggctatgactacaagctggagcagatcaagaagggctatgatgcccccctgtgcaacctgctgctcttcaagaaggtgaaggccctgctgggcggcaatgtgaggatgatgctgtctggaggagcccccctgagcccccagacccaccgcttcatgaatgtgtgcttctgctgccccatcggccagggctacggcctgacagagagctgtggggccggcaccgtgacagaggtgacagactacaccaccggccgggtgggcgcccccctcatctgctgtgagatcaagctgaaggactggcaggagggcggctacaccatcaatgacaagcccaaccccagaggagaaattgtgattggaggccagaacatctccatgggctacttcaagaatgaggagaagacagctgaggactacagcgtggatgaaaatggccagcgctggttctgcacaggagacatcggggagttccacccagatggctgcctgcagatcatcgacaggaagaaggacctggtgaagctgcaggccggggagtatgtgtccctgggcaaggtggaggccgccctgaagaactgccccctgattgacaacatctgtgcctttgccaagagtgaccagagctatgtgatcagctttgtggtgcccaaccagaagaggctgaccctgctggcccagcagaagggcgtggagggcacctgggtggacatctgcaacaacccagccatggaggccgagatcctgaaggagatccgggaggccgccaatgccatgaagctggagagatttgagatccccatcaaggtgcggctgagccctgagccctggaccccagagaccggcctggtgacagatgccttcaagctgaagaggaaggagctgaggaaccactacctgaaggacatcgagaggatgtatggaggcaagtag

SEQ ID NO: 18240 - DNA, 2013 bp, synthetic construct
  misc_feature 1..2013: note = Description of Artificial Sequence: Synthetic coding sequence
  source 1..2013: mol_type = other DNA
atggccaagaggatcaaggccaagcccaccagtgacaagccaggcagcccctacagatctgtgacccactttgacagcctggccgtcatcgacatccctggagctgacaccctggacaagctgtttgaccatgctgtgtccaagtttgggaagaaggacagcctgggcacccgggagatcctgtctgaggagaatgagatgcagcccaacgggaaggtgttcaagaagctgatcctgggcaactacaagtggatgaactacctggaggtgaacagaagagtgaacaactttggaagtggcctgacagccctgggcctgaagcccaagaacaccatcgccatcttctgtgagaccagggctgagtggatgattgctgcccagacctgcttcaagtacaacttccccctggtgaccctgtatgccaccctgggcaaggaggccgtggtgcacggcctgaatgaaagtgaggccagctacctgatcacctctgtggagctgctggagagcaagctgaagacagccctgctggacatcagctgtgtgaagcacatcatctacgtggacaacaaggccatcaacaaggccgagtacccagagggctttgagatccacagcatgcagagcgtggaggagctgggcagcaaccctgagaacctgggcatcccccccagccggcccacccccagcgacatggccatcgtgatgtacaccagcggcagcacaggccggcccaagggcgtgatgatgcaccacagcaacctgattgctggcatgacaggccagtgtgagcgcatccctggcctgggccccaaggacacctacatcggctacctgcccctggcccacgtgctggagctgacagctgagatcagctgcttcacctacggctgcagaattggctacagcagccccctgaccctgagtgaccagagcagcaagatcaagaagggcagcaaaggagactgcaccgtgctgaagcccaccctgatggctgctgtgcctgagatcatggaccgcatctacaagaatgtgatgagcaaggtgcaggagatgaactacatccagaagaccctcttcaagattggctatgactacaagctggagcagatcaagaagggctatgatgcccccctgtgcaacctgctgctcttcaagaaggtgaaggccctgctgggcggcaatgtgaggatgatgctgagcggcggggcccccctgagcccccagacccaccgcttcatgaatgtgtgcttctgctgccccatcggccagggctacggcctgacagagagctgtggggccggcaccgtgacagaggtgacagactacaccaccggccgggtgggcgcccccctcatctgctgtgagatcaagctgaaggactggcaggagggcggctacaccatcaatgacaagcccaaccccagaggagagatcgtcatcggcggccagaacatctccatgggctacttcaagaatgaggagaagacagctgaggactacagcgtggatgaaaatggccagcgctggttctgcaccggggacattggagagttccacccagatggctgcctgcagatcatcgacaggaagaaggacctggtgaagctgcaggccggggagtatgtgtccctgggcaaggtggaggccgccctgaagaactgccccctgattgacaacatctgtgcctttgccaagagtgaccagagctatgtgatcagctttgtggtgcccaaccagaagaggctgaccctgctggcccagcagaagggcgtggagggcacctgggtggacatctgcaacaacccagccatggaggccgagatcctgaaggagatccgggaggccgccaatgccatgaagctggagagatttgagatccccatcaaggtgcggctgagccctgagccctggaccccagagaccggcctggtgacagatgccttcaagctgaagaggaaggagctgaggaaccactacctgaaggacattgaaagaatgtatggaggcaagtag

SEQ ID NO: 18241 - DNA, 2136 bp, synthetic construct; identical to SEQ ID NO: 18239
  misc_feature 1..2136: note = Description of Artificial Sequence: Synthetic coding sequence
  source 1..2136: mol_type = other DNA

SEQ ID NO: 18242 - DNA, 165 bp, synthetic construct
  misc_feature 1..165: note = Description of Artificial Sequence: Synthetic coding sequence
  source 1..165: mol_type = other DNA
atgaagctgaagctgaatgtgctgaccatcatcctgctgcctgtgcacctgctgatcaccatctacagcgccctgatcttcatcccctggtacttcctgaccaatgccaagaagaagaatgccatggccaagaggatcaaggccaagcccaccagtgacaagtag

SEQ ID NO: 18243 - DNA, 438 bp, synthetic construct
  misc_feature 1..438: note = Description of Artificial Sequence: Synthetic coding sequence
  source 1..438: mol_type = other DNA
atgaagctgaagctgaatgtgctgaccatcatcctgctgcctgtgcacctgctgatcaccatctacagcgccctgatcttcatcccctggtacttcctgaccaatgccaagaagaagaatgccatggccaagaggatcaaggccaagcccaccagtgacaagccaggcagcccctacagatctgtgacccactttgacagcctggccgtgattgacatccctggagctgacaccctggacaagctgtttgaccatgctgtgtccaagtttgggaagaaggacagcctgggcacccgggagatcctgtctgaagaaaatgagatgcagcccaacgggaaggtgttcaagaagctgatcctgggcaactacaagtggatgaactacctggaggtgaacagaagagtgaacaactttggcagcggcctgacagccctgtag

SEQ ID NO: 18244 - DNA, 381 bp, synthetic construct
  misc_feature 1..381: note = Description of Artificial Sequence: Synthetic coding sequence
  source 1..381: mol_type = other DNA
atgaagctgaagctgaatgtgctgaccatcatcctgctgcctgtgcacctgctgatcaccatctacagcgccctgatcttcatcccctggtacttcctgaccaatgccaagaagaagaatgccatggccaagaggatcaaggccaagcccaccagtgacaagccaggcagcccctacagatctgtgacccactttgacagcctggccgtgattgacatccctggagctgacaccctggacaagctgtttgaccatgctgtgtccaagtttgggaagaaggacagcctgggcacccgggagatcctgtctgaagaaaatgagatgcagcccaacgggaaggtgttcaagaagctgatcctgggcaactacaagtggatgtag

SEQ ID NO: 18245 - DNA, 465 bp, synthetic construct
  misc_feature 1..465: note = Description of Artificial Sequence: Synthetic coding sequence
  source 1..465: mol_type = other DNA
atggccaagaggatcaaggccaagcccaccagtgacaagccaggcagcccctacagatctgtgacccactttgacagcctggccgtcatcgacatccctggagctgacaccctggacaagctgtttgaccatgctgtgtccaagtttgggaagaaggacagcctgggcacccgggagatcctgtctgaggagaatgagatgcagcccaacgggaaggtgttcaagaagctgatcctgggcaactacaagtggatgaactacctggaggtgaacagaagagtgaacaactttggaagtggcctgacagccctgggcctgaagcccaagaacaccatcgccatcttctgtgagaccagggctgagtggatgattgctgcccagacctgcttcaagtacaacttccccctggtgaccctgtatgccaccctgggcaaggaggccgtggtgcacggcctgaatgaatag

SEQ ID NO: 18246 - DNA, 387 bp, synthetic construct
  misc_feature 1..387: note = Description of Artificial Sequence: Synthetic coding sequence
  source 1..387: mol_type = other DNA
atgaagctgaagctgaatgtgctgaccatcatcctgctgcctgtgcacctgctgatcaccatctacagcgccctgatcttcatcccctggtacttcctgaccaatgccaagaagaagaatgccatggccaagaggatcaaggccaagcccaccagtgacaagccaggcagcccctacagatctgtgacccactttgacagcctggccgtgattgacatccctggagctgacaccctggacaagctgtttgaccatgctgtgtccaagtttgggaagaaggacagcctgggcacccgggagatcctgtctgaagaaaatgagatgcagcccaacgggaaggtgttcaagaagctgatcctgggcaactacaagtggatgaactactag

SEQ ID NO: 18247 - DNA, 2475 bp, synthetic construct
  misc_feature 1..2475: note = Description of Artificial Sequence: Synthetic coding sequence
  source 1..2475: mol_type = other DNA
atgaggcagagcctgctcttcctgacctctgtggtgccctttgtgctggccccccggcccccagatgaccccggcttcggcccccaccagaggctggagaagctggacagcctgctgagtgactatgacatcctgagcctgagcaacatccagcagcacagcgtgaggaagagggacctgcagaccagcacccacgtggagaccctgctgaccttcagcgccctgaagaggcacttcaagctgtacctgaccagcagcacagagcgcttcagccagaacttcaaggtggtggtggtggatggcaagaatgaaagtgagtacacagtgaagtggcaggacttcttcaccggccacgtggtgggggagccagacagccgggtgctggcccacatcagagatgatgatgtgatcatccgcatcaacacagatggagctgagtacaacatcgagcccctgtggaggtttgtgaatgacaccaaggacaagaggatgctggtgtacaagtctgaggacatcaagaatgtgtcccggctgcagagccccaaggtgtgtggctacctgaaggtggacaatgaggagctgctgcccaagggcctggtggaccgggagcccccagaggagctggtgcaccgggtgaagagaagagctgaccctgaccccatgaagaacacctgcaagctgctggtggtggccgaccaccgcttctaccgctacatgggccgcggggaggagagcaccaccaccaactacctgattgagctgattgacagagtggatgacatctacagaaacacctcctgggacaatgccggcttcaagggctacggcatccagatcgagcagatccgcatcctgaagagcccccaggaggtgaagccaggagagaagcactacaacatggccaagagctacccaaatgaggagaaggatgcctgggatgtgaagatgctgctggagcagttctcctttgatattgctgaggaggccagcaaggtgtgcctggcccacctgttcacctaccaggactttgacatgggcaccctgggcctggcctacgtgggcagcccccgggccaacagccatggaggagtgtgccccaaggcctactacagccctgtgggcaagaagaacatctacctgaacagcggcctgaccagcaccaagaactacggcaagaccatcctgaccaaggaggccgacctggtgaccacccatgagctgggccacaactttggagctgagcatgaccctgatggcctggccgagtgtgccccaaatgaagaccagggcggcaagtatgtgatgtaccccatcgctgtgtctggggaccacgagaacaacaagatgttcagcaactgcagcaagcagagcatctacaagaccatcgagagcaaggcccaggagtgcttccaggagaggagcaacaaggtgtgtggcaacagccgggtggatgaaggagaggagtgtgaccccggcatcatgtacctgaacaatgacacctgctgcaacagcgactgcaccctgaaggagggcgtgcagtgcagcgacaggaacagcccctgctgcaagaactgccagtttgaaacagcccagaagaagtgccaggaggccatcaatgccacctgcaagggcgtgtcctactgcaccggcaacagcagcgagtgccccccacctggaaatgcagaagatgacacagtgtgcctggacctgggcaagtgcaaggatggcaagtgcatccccttctgtgagcgggagcagcagctggagagctgtgcctgcaatgaaacagacaacagctgcaaggtgtgctgccgggacctgagcggccgctgtgtgccctacgtggatgctgagcagaagaacctcttcctgaggaagggcaagccctgcaccgtgggcttctgtgacatgaatggaaaatgtgagaagagggtgcaggatgtgattgagcgcttctgggacttcatcgaccagctgagcatcaacaccttcggcaagttcctggccgacaacatcgtgggctctgtgctggtgttcagcctcatcttctggatccccttcagcatcctggtgcactgtgtggacaagaagctggacaagcagtatgagagcctgagcctcttccaccccagcaatgtggagatgctgagctccatggattctgcctctgtgcgcatcatcaagcccttccctgccccccagaccccaggccgcctgcagcctgcccctgtgatccccagcgccccagctgcccccaagctggaccaccagaggatggacaccatccaggaggaccccagcacagacagccacatggatgaagatggctttgagaaggaccccttccccaacagcagcacagctgccaagagctttgaggacctgacagaccaccctgtgaccaggtctgagaaggccgccagcttcaagctgcagaggcagaacagagtggacagcaaggagacagaatgttag

SEQ ID NO: 18248 - DNA, 777 bp, synthetic construct
  misc_feature 1..777: note = Description of Artificial Sequence: Synthetic coding sequence
  source 1..777: mol_type = other DNA
atgaggcagagcctgctcttcctgacctctgtggtgccctttgtgctggccccccggcccccagatgaccccggcttcggcccccaccagaggctggagaagctggacagcctgctgagtgactatgacatcctgagcctgagcaacatccagcagcacagcgtgaggaagagggacctgcagaccagcacccacgtggagaccctgctgaccttcagcgccctgaagaggcacttcaagctgtacctgaccagcagcacagagcgcttcagccagaacttcaaggtggtggtggtggatggcaagaatgaaagtgagtacacagtgaagtggcaggacttcttcaccggccacgtggtgggggagccagacagccgggtgctggcccacatcagagatgatgatgtgatcatccgcatcaacacagatggagctgagtacaacatcgagcccctgtggaggtttgtgaatgacaccaaggacaagaggatgctggtgtacaagtctgaggacatcaagaatgtgtcccggctgcagagccccaaggtgtgtggctacctgaaggtggacaatgaggagctgctgcccaagggcctggtggaccgggagcccccagaggagctggtgcaccgggtgaagagaagagctgaccctgaccccatgaagaacacctgcaagctgctggtggtggccgaccaccgcttctaccgctacatgggccgcggggaggagagcaccaccaccaactacctgatccacacagaccgggccaactag

SEQ ID NO: 18249 - DNA, 2499 bp, synthetic construct
  misc_feature 1..2499: note = Description of Artificial Sequence: Synthetic coding sequence
  source 1..2499: mol_type = other DNA
atgaagcccccaggcagcagcagccggcagccccccctggccggctgcagcctggccggggccagctgtggcccccagaggggccctgctggctctgtgcctgccagcgccccagcccggaccccaccctgccgcctgctgctggtgctgctgctgctgccccccctggccgccagcagccggccccgggcctggggcgccgccgcccccagcgccccccactggaatgaaacagctgagaagaacctgggcgtgctggctgatgaggacaacaccctgcagcagaacagcagcagcaacatctcctacagcaatgccatgcagaaggagatcaccctgcccagccgcctcatctactacatcaaccaggacagcgagagcccctaccacgtgctggacaccaaggcccggcaccagcagaagcacaacaaggctgtgcacctggcccaggccagcttccagatcgaggccttcggcagcaagttcatcctggacctgatcctgaacaacggcctgctgagcagtgactatgtggagatccactatgaaaatggcaagccccagtacagcaaaggaggagagcactgctactaccacggcagcatccggggcgtgaaggacagcaaggtggccctgagcacctgcaatggcctgcacggcatgtttgaagatgacacctttgtgtacatgattgagcccctggagctggtgcatgatgagaagagcacaggccggccccacatcatccagaagaccctggccggccagtacagcaagcagatgaagaacctgaccatggagcggggggaccagtggcccttcctgtctgagctgcagtggctgaagaggaggaagagagctgtgaaccccagccggggcatctttgaggagatgaagtacctggagctgatgattgtgaatgaccacaagacctacaagaagcacaggagcagccacgcccacaccaacaactttgccaagtctgtggtgaacctggtggacagcatctacaaggagcagctgaacaccagggtggtgctggtggccgtggagacctggacagagaaggaccagattgacatcaccaccaaccctgtgcagatgctgcacgagttcagcaagtaccggcagaggatcaagcagcacgcagatgctgtgcacctgatcagccgggtgaccttccactacaagaggagcagcctgagctactttggaggagtgtgcagcaggacccggggcgtgggcgtgaatgaatatggcctgcccatggctgtggcccaggtgctgagccagagcctggcccagaacctgggcatccagtgggagcccagcagcaggaagcccaagtgtgactgcacagagagctggggcggctgcatcatggaggagaccggggtgagccacagcaggaagttcagcaagtgcagcatcctggagtacagagacttcctgcagagaggaggaggagcctgcctcttcaaccggcccaccaagctgtttgagcccacagaatgtggaaatggctacgtggaggccggggaggagtgtgactgtggcttccacgtggagtgctacggcctgtgctgcaagaagtgcagcctgagcaatggagcccactgcagtgatggcccctgctgcaacaacaccagctgcctcttccagccccggggctatgaatgtagagatgctgtgaatgaatgtgacatcacagagtactgcaccggggacagcggccagtgcccccccaacctgcacaagcaggacggctacgcctgcaaccagaaccagggccgctgctacaatggagagtgcaagacccgggacaaccagtgccagtacatctggggcaccaaggccgccggcagtgacaagttctgctatgagaagctgaacacagagggcacagagaagggcaactgtgggaaggatggagaccgctggatccagtgcagcaagcatgatgtgttctgtggcttcctgctgtgcaccaacctgacccgggcccccagaattggccagctgcagggcgagatcatccccaccagcttctaccaccagggccgggtcatcgactgcagcggggcccacgtggtgctggatgatgacacagatgtgggctacgtggaggatggcaccccctgtggccccagcatgatgtgcctggacaggaagtgcctgcagatccaggccctgaacatgagcagctgccccctggacagcaagggcaaggtgtgcagcggccacggcgtgtgcagcaatgaggccacctgcatctgtgacttcacctgggccggcacagactgcagcatccgggaccctgtgaggaacctgcacccccccaaggatgagggccccaagggccccagcgccaccaacctgatcatcggcagcattgctggggccatcctggtggccgccatcgtgctgggcggcaccggctggggcttcaagaatgtgaagaagagaagatttgaccccacccagcagggccccatctag

SEQ ID NO: 18250 - DNA, 2499 bp, synthetic construct
  misc_feature 1..2499: note = Description of Artificial Sequence: Synthetic coding sequence
  source 1..2499: mol_type = other DNA
atgaagcccccaggcagcagcagccggcagccccccctggccggctgcagcctggccggggccagctgtggcccccagaggggccctgctggctctgtgcctgccagcgccccagcccggaccccaccctgccgcctgctgctggtgctgctgctgctgccccccctggccgccagcagccggccccgggcctggggcgccgccgcccccagcgccccccactggaatgaaacagctgagaagaacctgggcgtgctggctgatgaggacaacaccctgcagcagaacagcagcagcaacatctcctacagcaatgccatgcagaaggagatcaccctgcccagccgcctcatctactacatcaaccaggacagcgagagcccctaccacgtgctggacaccaaggcccggcaccagcagaagcacaacaaggctgtgcacctggcccaggccagcttccagatcgaggccttcggcagcaagttcatcctggacctgatcctgaacaacggcctgctgagcagtgactatgtggagatccactatgaaaatggcaagccccagtacagcaaaggaggagagcactgctactaccacggcagcatccggggcgtgaaggacagcaaggtggccctgagcacctgcaatggcctgcacggcatgtttgaagatgacacctttgtgtacatgattgagcccctggagctggtgcatgatgagaagagcacaggccggccccacatcatccagaagaccctggccggccagtacagcaagcagatgaagaacctgaccatggagcggggggaccagtggcccttcctgtctgagctgcagtggctgaagaggaggaagagagctgtgaaccccagccggggcatctttgaggagatgaagtacctggagctgatgattgtgaatgaccacaagacctacaagaagcacaggagcagccacgcccacaccaacaactttgccaagtctgtggtgaacctggtggacagcatctacaaggagcagctgaacaccagggtggtgctggtggccgtggagacctggacagagaaggaccagattgacatcaccaccaaccctgtgcagatgctgcacgagttcagcaagtaccggcagaggatcaagcagcacgcagatgctgtgcacctgatcagccgggtgaccttccactacaagaggagcagcctgagctactttggaggagtgtgcagcaggacccggggcgtgggcgtgaatgaatatggcctgcccatggctgtggcccaggtgctgagccagagcctggcccagaacctgggcatccagtgggagcccagcagcaggaagcccaagtgtgactgcacagagagctggggcggctgcatcatggaggagaccggggtgagccacagcaggaagttcagcaagtgcagcatcctggagtacagagacttcctgcagagaggaggaggagcctgcctcttcaaccggcccaccaagctgtttgagcccacagaatgtggaaatggctacgtggaggccggggaggagtgtgactgtggcttccacgtggagtgctacggcctgtgctgcaagaagtgcagcctgagcaatggagcccactgcagtgatggcccctgctgcaacaacaccagctgcctcttccagccccggggctatgaatgtagagatgctgtgaatgaatgtgacatcacagagtactgcaccggggacagcggccagtgcccccccaacctgcacaagcaggacggctacgcctgcaaccagaaccagggccgctgctacaatggagagtgcaagacccgggacaaccagtgccagtacatctggggcaccaaggccgccggcagtgacaagttctgctatgagaagctgaacacagagggcacagagaagggcaactgtgggaaggatggagaccgctggatccagtgcagcaagcatgatgtgttctgtggcttcctgctgtgcaccaacctgacccgggcccccagaattggccagctgcagggcgagatcatccccaccagcttctaccaccagggccgggtcatcgactgcagcggggcccacgtggtgctggatgatgacacagatgtgggctacgtggaggatggcaccccctgtggccccagcatgatgtgcctggacaggaagtgcctgcagatccaggccctgaacatgagcagctgccccctggacagcaagggcaaggtgtgcagcggccacggcgtgtgcagcaatgaggccacctgcatctgtgacttcacctgggccggcacagactgcagcatccgggaccctgtgaggaacctgcacccccccaaggatgagggccccaaggtgaacatggccaccagccggctgattggagctgtggccggcaccatcctggccctgggcgtcatctttggaggcaccggctggggcattgaaaatgtgaagaagagaagatttgaccccacccagcagggccccatctag

SEQ ID NO: 18251 - DNA, 2499 bp, synthetic construct
  misc_feature 1..2499: note = Description of Artificial Sequence: Synthetic coding sequence
  source 1..2499: mol_type = other DNA
atgaagcccccaggcagcagcagccggcagccccccctggccggctgcagcctggccggggccagctgtggcccccagaggggccctgctggctctgtgcctgccagcgccccagcccggaccccaccctgccgcctgctgctggtgctgctgctgctgccccccctggccgccagcagccggccccgggcctggggcgccgccgcccccagcgccccccactggaatgaaacagctgagaagaacctgggcgtgctggctgatgaggacaacaccctgcagcagaacagcagcagcaacatctcctacagcaatgccatgcagaaggagatcaccctgcccagccgcctcatctactacatcaaccaggacagcgagagcccctaccacgtgctggacaccaaggcccggcaccagcagaagcacaacaaggctgtgcacctggcccaggccagcttccagatcgaggccttcggcagcaagttcatcctggacctgatcctgaacaacggcctgctgagcagtgactatgtggagatccactatgaaaatggcaagccccagtacagcaaaggaggagagcactgctactaccacggcagcatccggggcgtgaaggacagcaaggtggccctgagcacctgcaatggcctgcacggcatgtttgaagatgacacctttgtgtacatgattgagcccctggagctggtgcatgatgagaagagcacaggccggccccacatcatccagaagaccctggccggccagtacagcaagcagatgaagaacctgaccatggagcggggggaccagtggcccttcctgtctgagctgcagtggctgaagaggaggaagagagctgtgaaccccagccggggcatctttgaggagatgaagtacctggagctgatgattgtgaatgaccacaagacctacaagaagcacaggagcagccacgcccacaccaacaactttgccaagtctgtggtgaacctggtggacagcatctacaaggagcagctgaacaccagggtggtgctggtggccgtggagacctggacagagaaggaccagattgacatcaccaccaaccctgtgcagatgctgcacgagttcagcaagtaccggcagaggatcaagcagcacgcagatgctgtgcacctgatcagccgggtgaccttccactacaagaggagcagcctgagctactttggaggagtgtgcagcaggacccggggcgtgggcgtgaatgaatatggcctgcccatggctgtggcccaggtgctgagccagagcctggcccagaacctgggcatccagtgggagcccagcagcaggaagcccaagtgtgactgcacagagagctggggcggctgcatcatggaggagaccggggtgagccacagcaggaagttcagcaagtgcagcatcctggagtacagagacttcctgcagagaggaggaggagcctgcctcttcaaccggcccaccaagctgtttgagcccacagaatgtggaaatggctacgtggaggccggggaggagtgtgactgtggcttccacgtggagtgctacggcctgtgctgcaagaagtgcagcctgagcaatggagcccactgcagtgatggcccctgctgcaacaacaccagctgcctcttccagccccggggctatgaatgtagagatgctgtgaatgaatgtgacatcacagagtactgcaccggggacagcggccagtgcccccccaacctgcacaagcaggacggctacgcctgcaaccagaaccagggccgctgctacaatggagagtgcaagacccgggacaaccagtgccagtacatctggggcaccaaggccgccggcagtgacaagttctgctatgagaagctgaacacagagggcacagagaagggcaactgtgggaaggatggagaccgctggatccagtgcagcaagcatgatgtgttctgtggcttcctgctgtgcaccaacctgacccgggcccccagaattggccagctgcagggcgagatcatccccaccagcttctaccaccagggccgggtcatcgactgcagcggggcccacgtggtgctggatgatgacacagatgtgggctacgtggaggatggcaccccctgtggccccagcatgatgtgcctggacaggaagtgcctgcagatccaggccctgaacatgagcagctgccccctggacagcaagggcaaggtgtgcagcggccacggcgtgtgcagcaatgaggccacctgcatctgtgacttcacctgggccggcacagactgcagcatccgggaccctgtgaggaacctgcacccccccaaggatgagggccccaaggagatgagccggcgggagggcagcatcctgctgagcaaggcccccagcgagagcgctgccctggatggccaccggctggccctgctggacagcggctatgacatcctggccgctgtgctgctggagctgctgagcctgtag

SEQ ID NO: 18252 - DNA, 2100 bp, synthetic construct
  misc_feature 1..2100: note = Description of Artificial Sequence: Synthetic coding sequence
  source 1..2100: mol_type = other DNA
atgcagaaggagatcaccctgcccagccgcctcatctactacatcaaccaggacagcgagagcccctaccacgtgctggacaccaaggcccggcaccagcagaagcacaacaaggctgtgcacctggcccaggccagcttccagatcgaggccttcggcagcaagttcatcctggacctgatcctgaacaacggcctgctgagcagtgactatgtggagatccactatgaaaatggcaagccccagtacagcaaaggaggagagcactgctactaccacggcagcatccggggcgtgaaggacagcaaggtggccctgagcacctgcaatggcctgcacggcatgtttgaagatgacacctttgtgtacatgattgagcccctggagctggtgcatgatgagaagagcacaggccggccccacatcatccagaagaccctggccggccagtacagcaagcagatgaagaacctgaccatggagcggggggaccagtggcccttcctgtctgagctgcagtggctgaagaggaggaagagagctgtgaaccccagccggggcatctttgaggagatgaagtacctggagctgatgattgtgaatgaccacaagacctacaagaagcacaggagcagccacgcccacaccaacaactttgccaagtctgtggtgaacctggtggacagcatctacaaggagcagctgaacaccagggtggtgctggtggccgtggagacctggacagagaaggaccagattgacatcaccaccaaccctgtgcagatgctgcacgagttcagcaagtaccggcagaggatcaagcagcacgcagatgctgtgcacctgatcagccgggtgaccttccactacaagaggagcagcctgagctactttggaggagtgtgcagcaggacccggggcgtgggcgtgaatgaatatggcctgcccatggctgtggcccaggtgctgagccagagcctggcccagaacctgggcatccagtgggagcccagcagcaggaagcccaagtgtgactgcacagagagctggggcggctgcatcatggaggagaccggggtgagccacagcaggaagttcagcaagtgcagcatcctggagtacagagacttcctgcagagaggaggaggagcctgcctcttcaaccggcccaccaagctgtttgagcccacagaatgtggaaatggctacgtggaggccggggaggagtgtgactgtggcttccacgtggagtgctacggcctgtgctgcaagaagtgcagcctgagcaatggagcccactgcagtgatggcccctgctgcaacaacaccagctgcctcttccagccccggggctatgaatgtagagatgctgtgaatgaatgtgacatcacagagtactgcaccggggacagcggccagtgcccccccaacctgcacaagcaggacggctacgcctgcaaccagaaccagggccgctgctacaatggagagtgcaagacccgggacaaccagtgccagtacatctggggcaccaaggccgccggcagtgacaagttctgctatgagaagctgaacacagagggcacagagaagggcaactgtgggaaggatggagaccgctggatccagtgcagcaagcatgatgtgttctgtggcttcctgctgtgcaccaacctgacccgggcccccagaattggccagctgcagggcgagatcatccccaccagcttctaccaccagggccgggtcatcgactgcagcggggcccacgtggtgctggatgatgacacagatgtgggctacgtggaggatggcaccccctgtggccccagcatgatgtgcctggacaggaagtgcctgcagatccaggccctgaacatgagcagctgccccctggacagcaaggatgagggccccaaggcctgcttcctgaagaggaccaagtgcaagagctaccccaagcacaggaagtgccaggaggagaaggtgcgcagctacagcgcccggccccacctgaaccagctgcgctggatggacacagccctgcactgctggatcctgggcatgacctacagccagcagtgctactggaactactag

SEQ ID NO: 18253 - DNA, 324 bp, synthetic construct
  misc_feature 1..324: note = Description of Artificial Sequence: Synthetic coding sequence
  source 1..324: mol_type = other DNA
tgacagatccaggccctgaacatgagcagctgccccctggacagcaagggcaaggtgtgcagcggccatggagtgtgcagcaatgaggccacctgcatctgtgacttcacctgggccggcacagactgcagcatccgggaccctgtgaggaacctgcacccccccaaggatgagggccccaaggagatgagcagaagagagggcagcatcctgctgagcaaggcccccagcgagagcgctgccctggatggccaccggctggccctgctggacagcggctatgacatcctggccgctgtgctgctggagctgctgagcctgtag

SEQ ID NO: 18254 - DNA, 8532 bp, synthetic construct
  misc_feature 1..8532: note = Description of Artificial Sequence: Synthetic coding sequence
  source 1..8532: mol_type = other DNA
atggctgctgccagctatgaccagctgctgaagcaggtggaggccctgaagatggagaacagcaacctgcggcaggagctggaggacaacagcaaccacctgaccaagctggagacagaggccagcaacatgaaggaggtgctgaagcagctgcagggcagcattgaagatgaggccatggccagcagcggccagattgacctgctggagcggctgaaggagctgaacctggacagcagcaacttccctggggtgaagctgcggagcaagatgagcctgcggagctatggcagccgggagggctctgtgagcagccgctctggagaatgttctcctgtgcccatgggcagcttcccccggcggggctttgtgaatggcagccgggagagcacaggctacctggaggagctggagaaggagaggagcctgctgctggccgacctggacaaggaggagaaggagaaggactggtactatgcccagctgcagaacctgaccaagagaattgacagcctgcccctgacagagaacttcagcctgcagacagacatgacccggcggcagctggagtatgaggcccggcagatccgggtggccatggaggagcagctgggcacctgccaggacatggagaagagggcccagaggcgcatcgcccgcatccagcagatcgagaaggacatcctgcgcatccggcagctgctgcagagccaggccacagaggccgagaggagcagccagaacaagcatgagaccggcagccatgatgctgagcggcagaatgaaggccagggcgtgggggagatcaacatggccaccagcggaaatggccagggcagcaccaccaggatggaccacgagacagcctctgtgctgagcagcagcagcacccacagcgccccccggcggctgaccagccacctgggcaccaaggtggagatggtgtacagcctgctgtccatgctgggcacccatgacaaggatgacatgagcaggaccctgctggccatgagcagcagccaggacagctgcatctccatgaggcagagcggctgcctgcccctgctgatccagctgctgcatggaaatgacaaggacagcgtgctgctgggcaacagccggggcagcaaggaggcccgggcccgggccagcgctgccctgcacaacatcatccacagccagccagatgacaagagaggaagaagagagatccgggtgctgcacctgctggagcagatccgggcctactgtgagacctgctgggagtggcaggaggcccacgagcccggcatggaccaggacaagaaccccatgcctgcccctgtggagcaccagatctgcccagctgtgtgtgtgctgatgaagctgagctttgatgaggagcacagacatgccatgaatgagctgggcggcctgcaggccatcgccgagctgctgcaggtggactgtgagatgtatggcctgaccaatgaccactacagcatcaccctgcggcgctatgccggcatggccctgaccaacctgacctttggagatgtggccaacaaggccaccctgtgcagcatgaagggctgcatgagggccctggtggcccagctgaagtctgagagcgaggacctgcagcaggtgattgcctctgtgctgaggaacctgtcctggagggcagatgtgaacagcaagaagaccctgcgggaggtgggctctgtgaaggccctgatggagtgtgccctggaggtgaagaaggagagcaccctgaagtctgtgctgagcgccctgtggaacctgagcgcccactgcacagagaacaaggctgacatctgtgctgtggatggagccctggccttcctggtgggcaccctgacctaccgcagccagaccaacaccctggccatcatcgagagcggcggcggcatcctgagaaatgtgagcagcctcatcgccaccaatgaagaccaccggcagatcctgcgggagaacaactgcctgcagaccctgctgcagcacctgaagagccacagcctgaccatcgtgtccaatgcctgtggcaccctgtggaacctgagcgccaggaaccccaaggaccaggaggccctgtgggacatgggcgctgtgtccatgctgaagaacctgatccacagcaagcacaagatgattgccatgggcagcgctgctgccctgaggaacctgatggccaacagacctgccaagtacaaggatgccaacatcatgagccctggcagcagcctgcccagcctgcacgtgaggaagcagaaggccctggaggccgagctggatgcccagcacctgtctgagacctttgacaacatcgacaacctgagccccaaggccagccacaggagcaagcagaggcacaagcagagcctgtatggagactatgtgtttgacaccaacagacatgatgacaacagaagtgacaacttcaacacaggcaacatgacagtgctgagcccctacctgaacaccaccgtgctgcccagcagcagcagcagccggggcagcctggacagcagccgctctgagaaggacaggagcctggagcgggagcggggcatcggcctgggcaactaccacccagccacagagaaccctggcaccagcagcaagaggggcctgcagatcagcaccacagctgcccagatcgccaaggtgatggaggaggtgtctgccatccacaccagccaggaggacaggagcagcggcagcaccacagagctgcactgtgtgacagatgaaagaaatgccctgcggcgcagcagcgctgcccacacccacagcaacacctacaacttcaccaagtctgagaacagcaacagaacctgcagcatgccctatgccaagctggagtacaagaggagcagcaatgacagcctgaacagcgtgagcagcagtgatggctacggcaagaggggccagatgaagcccagcattgagagctacagtgaagatgatgagagcaagttctgcagctatggccagtacccagctgacctggcccacaagatccacagcgccaaccacatggatgacaatgatggagagctggacacccccatcaactacagcctgaagtacagtgatgagcagctgaacagcggccggcagagccccagccagaatgaacgctgggcccggcccaagcacatcattgaagatgagatcaagcagagcgagcagaggcagagcaggaaccagagcaccacctaccctgtgtacacagagagcacagatgacaagcacctgaagttccagccccacttcggccagcaggagtgtgtgagcccctaccgcagcagaggagccaacggcagcgagaccaacagagtgggcagcaaccacggcatcaaccagaatgtgtcccagagcctgtgccaggaggatgattatgaagatgacaagcccaccaactacagcgagcgctacagcgaggaggagcagcacgaggaggaggagcggcccaccaactacagcatcaagtacaatgaggagaagagacatgtggaccagcccatcgactacagcctgaagtatgccacagacatccccagcagccagaagcagagcttctccttcagcaagagcagcagcggccagagcagcaagacagagcacatgagcagcagcagcgagaacaccagcacccccagcagcaatgccaagaggcagaaccagctgcaccccagcagcgcccagagccgcagcggccagccccagaaggccgccacctgcaaggtgagcagcatcaaccaggagaccatccagacctactgtgtggaggacacccccatctgcttcagccgctgcagcagcctgagcagcctgagcagcgcagaagatgaaattggctgcaaccagaccacccaggaggccgacagcgccaacaccctgcagattgctgagatcaaggagaagattggcaccaggtctgcagaagatcctgtgtctgaggtgcctgctgtgtcccagcaccccaggaccaagagcagccggctgcagggcagcagcctgagcagcgagagcgcccggcacaaggctgtggagttcagcagcggggccaagagccccagcaagagcggggcccagacccccaagagccccccagagcactacgtgcaggagacccccctgatgttcagccgctgcacctctgtgagcagcctggacagctttgagagccgcagcatcgccagctctgtgcagagcgagccctgcagcggcatggtgtctggcatcatcagccccagcgacctgcctgacagccctggccagaccatgccacccagccgcagcaagaccccacctcctccaccccagacagcccagaccaagcgggaggtgcccaagaacaaggcccccacagctgagaagcgggagagcggccccaagcaggccgctgtgaatgctgctgtgcagagggtgcaggtgctgcctgatgctgacaccctgctgcactttgccacagagagcaccccagatggcttcagctgcagcagcagcctgagcgccctgagcctggatgagcccttcatccagaaggatgtggagctgcgcatcatgcctcctgtgcaggagaatgacaatggaaatgaaacagaaagtgagcagcccaaggagagcaatgaaaaccaggagaaggaggccgagaagaccattgattctgagaaggacctgctggatgacagtgatgatgatgacatcgagatcctggaggagtgcatcatcagcgccatgcccaccaagagcagcaggaaggccaagaagccagcccagacagccagcaagctgcccccacctgtggccaggaagcccagccagctgcctgtgtacaagctgctgcccagccagaaccggctgcagccccagaagcacgtgtccttcaccccaggagatgacatgccccgggtgtactgtgtggagggcacccccatcaacttcagcacagccaccagcctgagtgacctgaccatcgagagccccccaaatgagctggccgccggggagggcgtgcggggcggggcccagagcggggagtttgagaagagggacaccatccccacagagggccgcagcacagatgaggcccagggcggcaagaccagctctgtgaccatccctgagctggatgacaacaaggccgaggagggggacatcctggccgagtgcatcaacagcgccatgcccaagggcaagagccacaagcccttccgggtgaagaagatcatggaccaggtgcagcaggccagcgccagcagcagcgcccccaacaagaaccagctggatggcaagaagaagaagcccaccagccctgtgaagcccatcccccagaacacagagtaccgcaccagggtgaggaagaatgctgacagcaagaacaacctgaatgctgagagggtcttcagtgacaacaaggacagcaagaagcagaacctgaagaacaacagcaaggtgttcaatgacaagctgcccaacaatgaagatagagtgcggggcagctttgcctttgacagcccccaccactacacccccatcgagggcaccccctactgcttcagcagaaatgacagcctgagcagcctggactttgatgatgatgatgtggacctgagccgggagaaggccgagctgaggaaggccaaggagaacaaggagagcgaggccaaggtgaccagccacacagagctgaccagcaaccagcagagcgccaacaagacccaggccatcgccaagcagcccatcaacagaggccagcccaagcccatcctgcagaagcagagcaccttcccccagagcagcaaggacatcccagacagaggagctgccacagatgagaagctgcagaactttgccatcgagaacacccctgtgtgcttcagccacaacagcagcctgagcagcctgagtgacatcgaccaggagaacaacaacaaggaaaatgagcccatcaaggagacagagcccccagacagccagggcgagcccagcaagccccaggccagcggctacgcccccaagagcttccacgtggaggacacccctgtgtgcttcagcaggaacagcagcctgagcagcctgagcattgacagtgaagatgacctgctgcaggagtgcatcagcagcgccatgcccaagaagaagaagcccagccggctgaagggggacaatgagaagcacagccccaggaacatgggcggcatcctgggggaggacctgaccctggacctgaaggacatccagaggccagacagcgagcacggcctgagcccagacagtgaaaattttgactggaaggccatccaggagggcgccaacagcatcgtgagcagcctgcaccaggccgctgctgctgcctgcctgagccggcaggccagcagtgacagcgacagcatcctgagcctgaagagcggcatcagcctgggcagccccttccacctgaccccagaccaggaggagaagcccttcaccagcaacaagggcccccgcatcctgaagccaggagagaagagcaccctggagaccaagaagattgaaagtgagagcaagggcatcaagggcggcaagaaggtgtacaagagcctcatcaccgggaaggtgcgcagcaacagcgagatcagcggccagatgaagcagcccctgcaggccaacatgcccagcatcagccggggccgcaccatgatccacatccctggggtgaggaacagcagcagcagcaccagccctgtgtccaagaagggcccccccctgaagaccccagccagcaagagccccagcgagggccagacagccaccaccagccccaggggggccaagcccagcgtgaagtctgagctgagccctgtggcccggcagaccagccagatcggcggcagcagcaaggcccccagccgcagcggcagccgggacagcacccccagcaggcctgcccagcagcccctgagccggcccatccagagccctggcaggaacagcatcagccctggaagaaatggcatcagcccccccaacaagctgagccagctgcccaggaccagcagccccagcacagccagcaccaagagcagcggcagcggcaagatgagctacaccagccctggccggcagatgagccagcagaacctgaccaagcagacaggcctgagcaagaatgccagcagcatccccaggtctgagagcgccagcaagggcctgaaccagatgaacaatggaaatggagccaacaagaaggtggagctgagcaggatgagcagcaccaagagcagcggcagcgagagtgacagaagtgagaggcctgtgctggtgcggcagagcaccttcatcaaggaggcccccagccccaccctgcggaggaagctggaggagagcgccagctttgagagcctgagccccagcagcaggcctgccagccccaccaggagccaggcccagacccctgtgctgagccccagcctgcctgacatgagcctgagcacccacagctctgtgcaggccggcggctggaggaagctgccccccaacctgagccccaccatcgagtacaatgatggccggcctgccaagagacatgacatcgcccggagccacagcgagagccccagccggctgcccatcaacagaagtggcacctggaagcgggagcacagcaagcacagcagcagcctgccccgggtgtccacctggaggagaacaggcagcagcagcagcatcctgagcgccagcagcgagagcagcgagaaggccaagtcagaagatgagaagcacgtgaacagcatcagcggcaccaagcagagcaaagaaaaccaggtgtctgccaagggcacctggaggaagatcaaggaaaatgagttcagccccaccaacagcaccagccagacagtgagcagcggggccaccaacggggctgagagcaagaccctcatctaccagatggccccagctgtgtccaagacagaagatgtgtgggtgagaattgaggactgccccatcaacaaccccaggagcggccgcagccccaccggcaacaccccacctgtgattgattctgtgtctgagaaggccaaccccaacatcaaggacagcaaggacaaccaggccaagcagaatgtgggcaatggatctgtgcccatgaggacagtgggcctggagaaccggctgaacagcttcatccaggtggatgccccagaccagaagggcacagagatcaagccaggccagaacaaccctgtgcctgtgtctgagaccaatgaaagcagcatcgtggagaggacccccttcagcagcagcagcagcagcaagcacagcagccccagcggcaccgtggccgcccgggtgacccccttcaactacaaccccagccccaggaagagcagcgctgacagcaccagcgcccggcccagccagatccccacccctgtgaacaacaacaccaagaagagggacagcaagacagacagcacagagagcagcggcacccagagccccaagaggcacagcggcagctacctggtgacctctgtgtag

SEQ ID NO: 18255 - DNA, 8532 bp, synthetic construct; identical to SEQ ID NO: 18254
  misc_feature 1..8532: note = Description of Artificial Sequence: Synthetic coding sequence
  source 1..8532: mol_type = other DNA

SEQ ID NO: 18256 - DNA, 8532 bp, synthetic construct; identical to SEQ ID NO: 18254
  misc_feature 1..8532: note = Description of Artificial Sequence: Synthetic coding sequence
  source 1..8532: mol_type = other DNA

SEQ ID NO: 18257 - DNA, 864 bp, synthetic construct
  misc_feature 1..864: note = Description of Artificial Sequence: Synthetic coding sequence
  source 1..864: mol_type = other DNA
atggctgctgccagctatgaccagctgctgaagcaggtggaggccctgaagatggagaacagcaacctgcggcaggagctggaggacaacagcaaccacctgaccaagctggagacagaggccagcaacatgaaggaggtgctgaagcagctgcagggcagcattgaagatgaggccatggccagcagcggccagattgacctgctggagcggctgaaggagctgaacctggacagcagcaacttccctggggtgaagctgcggagcaagatgagcctgcggagctatggcagccgggagggctctgtgagcagccgctctggagaatgttctcctgtgcccatgggcagcttcccccggcggggctttgtgaatggcagccgggagagcacaggctacctggaggagctggagaaggagaggagcctgctgctggccgacctggacaaggaggagaaggagaaggactggtactatgcccagctgcagaacctgaccaagagaattgacagcctgcccctgacagagaacttcagcctgcagacagacatgacccggcggcagctggagtatgaggcccggcagatccgggtggccatggaggagcagctgggcacctgccaggacatggagaagagggcccagaggcgcatcgcccgcatccagcagatcgagaaggacatcctgcgcatccggcagctgctgcagagccaggccacagaggccgagaggagcagccagaacaagcatgagaccggcagccatgatgctgagcggcagaatgaaggccagggcgtgggggagatcaacatggccaccagcggaaatggccagatcgagaagatgaggatgtttgagtgctag

SEQ ID NO: 18258 - DNA, 357 bp, synthetic construct
  misc_feature 1..357: note = Description of Artificial Sequence: Synthetic coding sequence
  source 1..357: mol_type = other DNA
atggctgctgccagctatgaccagctgctgaagcaggtggaggccctgaagatggagaacagcaacctgcggcaggagctggaggacaacagcaaccacctgaccaagctggagacagaggccagcaacatgaaggaggtgctgaagcagctgcagggcagcattgaagatgaggccatggccagcagcggccagattgacctgctggagcggctgaaggagctgaacctggacagcagcaacttccctggggtgaagctgcggagcaagatgagcctgcggagctatggcagccgggagggctctgtgagcagccgctctggagaatgttctcctgtgcccatgggcagcttctag

SEQ ID NO: 18259 - DNA, 3918 bp, synthetic construct
  misc_feature 1..3918: note = Description of Artificial Sequence: Synthetic coding sequence
  source 1..3918: mol_type = other DNA
atggctgctgccagctatgaccagctgctgaagcaggtggaggccctgaagatggagaacagcaacctgcggcaggagctggaggacaacagcaaccacctgaccaagctggagacagaggccagcaacatgaaggaggtgctgaagcagctgcagggcagcattgaagatgaggccatggccagcagcggccagattgacctgctggagcggctgaaggagctgaacctggacagcagcaacttccctggggtgaagctgcggagcaagatgagcctgcggagctatggcagccgggagggctctgtgagcagccgctctggagaatgttctcctgtgcccatgggcagcttcccccggcggggctttgtgaatggcagccgggagagcacaggctacctggaggagctggagaaggagaggagcctgctgctggccgacctggacaaggaggagaaggagaaggactggtactatgcccagctgcagaacctgaccaagagaattgacagcctgcccctgacagagaacttcagcctgcagacagacatgacccggcggcagctggagtatgaggcccggcagatccgggtggccatggaggagcagctgggcacctgccaggacatggagaagagggcccagaggcgcatcgcccgcatccagcagatcgagaaggacatcctgcgcatccggcagctgctgcagagccaggccacagaggccgagaggagcagccagaacaagcatgagaccggcagccatgatgctgagcggcagaatgaaggccagggcgtgggggagatcaacatggccaccagcggaaatggccagggcagcaccaccaggatggaccacgagacagcctctgtgctgagcagcagcagcacccacagcgccccccggcggctgaccagccacctgggcaccaaggtggagatggtgtacagcctgctgtccatgctgggcacccatgacaaggatgacatgagcaggaccctgctggccatgagcagcagccaggacagctgcatctccatgaggcagagcggctgcctgcccctgctgatccagctgctgcatggaaatgacaaggacagcgtgctgctgggcaacagccggggcagcaaggaggcccgggcccgggccagcgctgccctgcacaacatcatccacagccagccagatgacaagagaggaagaagagagatccgggtgctgcacctgctggagcagatccgggcctactgtgagacctgctgggagtggcaggaggcccacgagcccggcatggaccaggacaagaaccccatgcctgcccctgtggagcaccagatctgcccagctgtgtgtgtgctgatgaagctgagctttgatgaggagcacagacatgccatgaatgagctgggcggcctgcaggccatcgccgagctgctgcaggtggactgtgagatgtatggcctgaccaatgaccactacagcatcaccctgcggcgctatgccggcatggccctgaccaacctgacctttggagatgtggccaacaaggccaccctgtgcagcatgaagggctgcatgagggccctggtggcccagctgaagtctgagagcgaggacctgcagcaggtgattgcctctgtgctgaggaacctgtcctggagggcagatgtgaacagcaagaagaccctgcgggaggtgggctctgtgaaggccctgatggagtgtgccctggaggtgaagaaggagagcaccctgaagtctgtgctgagcgccctgtggaacctgagcgcccactgcacagagaacaaggctgacatctgtgctgtggatggagccctggccttcctggtgggcaccctgacctaccgcagccagaccaacaccctggccatcatcgagagcggcggcggcatcctgagaaatgtgagcagcctcatcgccaccaatgaagaccaccggcagatcctgcgggagaacaactgcctgcagaccctgctgcagcacctgaagagccacagcctgaccatcgtgtccaatgcctgtggcaccctgtggaacctgagcgccaggaaccccaaggaccaggaggccctgtgggacatgggcgctgtgtccatgctgaagaacctgatccacagcaagcacaagatgattgccatgggcagcgctgctgccctgaggaacctgatggccaacagacctgccaagtacaaggatgccaacatcatgagccctggcagcagcctgcccagcctgcacgtgaggaagcagaaggccctggaggccgagctggatgcccagcacctgtctgagacctttgacaacatcgacaacctgagccccaaggccagccacaggagcaagcagaggcacaagcagagcctgtatggagactatgtgtttgacaccaacagacatgatgacaacagaagtgacaacttcaacacaggcaacatgacagtgctgagcccctacctgaacaccaccgtgctgcccagcagcagcagcagccggggcagcctggacagcagccgctctgagaaggacaggagcctggagcgggagcggggcatcggcctgggcaactaccacccagccacagagaaccctggcaccagcagcaagaggggcctgcagatcagcaccacagctgcccagatcgccaaggtgatggaggaggtgtctgccatccacaccagccaggaggacaggagcagcggcagcaccacagagctgcactgtgtgacagatgaaagaaatgccctgcggcgcagcagcgctgcccacacccacagcaacacctacaacttcaccaagtctgagaacagcaacagaacctgcagcatgccctatgccaagctggagtacaagaggagcagcaatgacagcctgaacagcgtgagcagcagtgatggctacggcaagaggggccagatgaagcccagcattgagagctacagtgaagatgatgagagcaagttctgcagctatggccagtacccagctgacctggcccacaagatccacagcgccaaccacatggatgacaatgatggagagctggacacccccatcaactacagcctgaagtacagtgatgagcagctgaacagcggccggcagagccccagccagaatgaacgctgggcccggcccaagcacatcattgaagatgagatcaagcagagcgagcagaggcagagcaggaaccagagcaccacctaccctgtgtacacagagagcacagatgacaagcacctgaagttccagccccacttcggccagcaggagtgtgtgagcccctaccgcagcagaggagccaacggcagcgagaccaacagagtgggcagcaaccacggcatcaaccagaatgtgtcccagagcctgtgccaggaggatgattatgaagatgacaagcccaccaactacagcgagcgctacagcgaggaggagcagcacgaggaggaggagcggcccaccaactacagcatcaagtacaatgaggagaagagacatgtggaccagcccatcgactacagcctgaagtatgccacagacatccccagcagccagaagcagagcttctccttcagcaagagcagcagcggccagagcagcaagacagagcacatgagcagcagcagcgagaacaccagcacccccagcagcaatgccaagaggcagaaccagctgcaccccagcagcgcccagagccgcagcggccagccccagaaggccgccacctgcaaggtgagcagcatcaaccaggagaccatccagacctactgtgtggaggacacccccatctgcttcagccgctgcagcagcctgagcagcctgagcagcgcagaagatgaaattggctgcaaccagaccacccaggaggccgacagcgccaacaccctgcagatcgcctag

SEQ ID NO: 18260 - DNA, 2796 bp, synthetic construct
  misc_feature 1..2796: note = Description of Artificial Sequence: Synthetic coding sequence
  source 1..2796: mol_type = other DNA
atggccgagatcaaggagaagatctgtgactacctgttcaacgtgtctgacagcagcgccctgaacctggccaagaacatcggcctgaccaaggcccgggacatcaatgctgtgctgattgacatggagcggcagggagatgtgtaccggcagggcaccaccccacccatctggcacctgacagacaagaagcgggagaggatgcagatcaagaggaacaccaacagcgtgcctgagacagccccagctgccatccctgagaccaagagaaatgctgagttcctgacctgcaacatccccaccagcaatgccagcaacaacatggtgaccacagagaaggtggagaatggccaggagcccgtcatcaagctggagaaccggcaggaggcccggcctgagcccgcccggctgaagccccctgtgcactacaacggccccagcaaggccggctacgtggactttgaaaatggccagtgggccacagatgacatcccagatgacctgaacagcatccgggccgcccctggagagttccgggccatcatggagatgcccagcttctacagccacggcctgccccgctgcagcccctacaagaagctgacagagtgccagctgaagaaccccatcagcggcctgctggagtatgcccagtttgccagccagacctgtgagttcaacatgattgagcagagcggcccccctcatgagccccgcttcaagttccaggtggtgatcaatggccgggagttccccccagctgaggccggcagcaagaaggtggccaagcaggatgctgccatgaaggccatgaccatcctgctggaggaggccaaggccaaggacagcggcaagtctgaggagagcagccactacagcacagagaaggagagcgagaagacagctgagagccagacccccacccccagcgccaccagcttcttcagcggcaagagccctgtgaccaccctgctggagtgcatgcacaagctgggcaacagctgtgagttccggctgctgagcaaggagggccctgcccacgagcccaagttccagtactgtgtggccgtgggcgcccagaccttccccagcgtgtctgcccccagcaagaaggtggccaagcagatggctgctgaggaggccatgaaggccctgcacggggaggccaccaacagcatggccagtgacaaccagcctgagggcatgatcagcgagagcctggacaacctggagagcatgatgcccaacaaggtgaggaagattggagagctggtgcgctacctgaacaccaaccctgtgggcggcctgctggagtatgcccggagccacggctttgctgctgagttcaagctggtggaccagagcggcccccctcatgagcccaagtttgtgtaccaggccaaggtgggcggccgctggttccctgctgtgtgtgcccacagcaagaagcagggcaagcaggaggccgcagatgctgccctgcgggtgctgattggagaaaatgagaaggccgagaggatgggcttcacagaggtgacccctgtgactggagccagcctgcggaggaccatgctgctgctgagccgcagccctgaggcccagcccaagaccctgcccctgaccggcagcaccttccatgaccagatcgccatgctgagccaccgctgcttcaacaccctgaccaacagcttccagcccagcctgctgggcaggaagatcctggccgccatcatcatgaagaaggacagcgaggacatgggcgtggtggtgtccctgggcaccggcaacagatgtgtgaagggggacagcctgagcctgaagggggagaccgtgaatgactgccacgccgagatcatcagcagaagaggcttcatccgcttcctgtacagcgagctgatgaagtacaacagccagacagccaaggacagcatctttgagcccgccaagggcggggagaagctgcagatcaagaagacagtgtccttccacctgtacatcagcacagccccctgtggagatggagccctgtttgacaagagctgcagcgaccgggccatggagagcacagagagccgccactaccctgtgtttgagaaccccaagcagggcaagctgcggaccaaggtggagaatggagagggcaccatccctgtggagagcagtgacatcgtgcccacctgggatggcatccggctgggggagcggctgcggaccatgagctgcagcgacaagatcctgcgctggaatgtgctgggcctgcagggcgccctgctgacccacttcctgcagcccatctacctgaagtctgtgaccctgggctacctgttcagccagggccacctgacccgggccatctgctgccgggtgaccagagatggcagcgcctttgaagatggcctgcggcaccccttcatcgtgaaccaccccaaggtgggccgggtgtccatctatgacagcaagaggcagagcggcaagaccaaggagacctctgtgaactggtgcctggctgatggctatgacctggagatcctggatggcacccggggcaccgtggatggccccagaaatgagctgagccgggtgtccaagaagaacatcttcctgctcttcaagaagctgtgcagcttccgctacagaagagacctgctgcggctgtcctatggagaggccaagaaggccgcccgggactatgaaacagccaagaactacttcaagaagggcctgaaggacatgggctacggcaactggatcagcaagccccaggaggagaagaacttctacctgtgccctgtgtag

SEQ ID NO: 18261 - DNA, 3681 bp, synthetic construct
  misc_feature 1..3681: note = Description of Artificial Sequence: Synthetic coding sequence
  source 1..3681: mol_type = other DNA
atgaacccccggcagggctacagcctgagcggctactacacccaccccttccagggctatgagcaccggcagctgcgctaccagcagcccggccctggcagcagccccagcagcttcctgctgaagcagatcgagttcctgaagggccagctgcctgaggcccctgtgattggcaagcagacccccagcctgccccccagcctgcccggcctgcggccccgcttccctgtgctgctggccagcagcacccggggccggcaggtggacatccggggcgtgccccggggcgtgcacctgcggagccagggcctgcagaggggcttccagcaccccagcccccggggccgcagcctgccccagaggggcgtggactgcctgagcagccacttccaggagctgagcatctaccaggaccaggagcagaggatcctgaagttcctggaggagctgggggagggcaaggccaccacagcccatgacctgagcggcaagctgggcacccccaagaaggagatcaacagagtgctgtacagcctggccaagaagggcaagctgcagaaggaggccggcaccccacccctgtggaagattgctgtgtccacccaggcctggaaccagcacagcggcgtggtgcggccagatggccacagccagggcgcccccaacagcgaccccagcctggagcctgaggacaggaacagcacctctgtgtctgaggacctgctggagcccttcatcgctgtgtctgcccaggcctggaaccagcacagcggcgtggtgcggccagacagccacagccagggcagccccaacagcgaccccggcctggagcctgaggacagcaacagcaccagcgccctggaggaccccctggagttcctggacatggccgagatcaaggagaagatctgtgactacctgttcaacgtgtctgacagcagcgccctgaacctggccaagaacatcggcctgaccaaggcccgggacatcaatgctgtgctgattgacatggagcggcagggagatgtgtaccggcagggcaccaccccacccatctggcacctgacagacaagaagcgggagaggatgcagatcaagaggaacaccaacagcgtgcctgagacagccccagctgccatccctgagaccaagagaaatgctgagttcctgacctgcaacatccccaccagcaatgccagcaacaacatggtgaccacagagaaggtggagaatggccaggagcctgtgatcaagctggagaaccggcaggaggcccggcctgagcccgcccggctgaagccccctgtgcactacaacggccccagcaaggccggctacgtggactttgaaaatggccagtgggccacagatgacatcccagatgacctgaacagcatccgggccgcccctggagagttccgggccatcatggagatgcccagcttctacagccacggcctgccccgctgcagcccctacaagaagctgacagagtgccagctgaagaaccccatcagcggcctgctggagtatgcccagtttgccagccagacctgtgagttcaacatgattgagcagagcggcccccctcatgagccccgcttcaagttccaggtggtgatcaatggccgggagttccccccagctgaggccggcagcaagaaggtggccaagcaggatgctgccatgaaggccatgaccatcctgctggaggaggccaaggccaaggacagcggcaagtctgaggagagcagccactacagcacagagaaggagagcgagaagacagctgagagccagacccccaccccatctgccaccagcttcttcagcggcaagagccctgtgaccaccctgctggagtgcatgcacaagctgggcaacagctgtgagttccggctgctgagcaaggagggccctgcccacgagcccaagttccagtactgtgtggccgtgggcgcccagaccttccccagcgtgtctgcccccagcaagaaggtggccaagcagatggctgctgaggaggccatgaaggccctgcatggagaggccaccaacagcatggccagtgacaaccagcctgagggcatgatcagcgagagcctggacaacctggagagcatgatgcccaacaaggtgaggaagatcggggagctggtgcgctacctgaacaccaaccctgtgggcggcctgctggagtatgcccggagccacggctttgctgctgagttcaagctggtggaccagagcggcccccctcatgagcccaagtttgtgtaccaggccaaggtgggcggccgctggttccctgctgtgtgtgcccacagcaagaagcagggcaagcaggaggccgcagatgctgccctgcgggtgctgattggagaaaatgagaaggccgagaggatgggcttcacagaggtgacccctgtgactggagccagcctgcggaggaccatgctgctgctgagccgcagccctgaggcccagcccaagaccctgcccctgaccggcagcaccttccatgaccagatcgccatgctgagccaccgctgcttcaacaccctgaccaacagcttccagcccagcctgctgggcaggaagatcctggccgccatcatcatgaagaaggacagcgaggacatgggcgtggtggtgtccctgggcactggaaacagatgtgtgaagggggacagcctgagcctgaagggggagaccgtgaatgactgccacgccgagatcatcagccggcggggcttcatccgcttcctgtacagcgagctgatgaagtacaacagccagacagccaaggacagcatctttgagcccgccaagggcggggagaagctgcagatcaagaagacagtgtccttccacctgtacatcagcacagccccctgtggagatggagccctgtttgacaagagctgcagcgaccgggccatggagagcacagagagccgccactaccctgtgtttgagaaccccaagcagggcaagctgcggaccaaggtggagaatggagagggcaccatccctgtggagagcagtgacatcgtgcccacctgggatggcatccggctgggggagcggctgcggaccatgagctgcagcgacaagatcctgcgctggaatgtgctgggcctgcagggcgccctgctgacccacttcctgcagcccatctacctgaagtctgtgaccctgggctacctgttcagccagggccacctgacccgggccatctgctgccgggtgaccagagatggcagcgcctttgaagatggcctgcggcaccccttcatcgtgaaccaccccaaggtgggccgggtgtccatctatgacagcaagaggcagagcggcaagaccaaggagacctctgtgaactggtgcctggctgatggctatgacctggagatcctggatggcacccggggcaccgtggatggccccagaaatgagctgagccgggtgtccaagaagaacatcttcctgctcttcaagaagctgtgcagcttccgctaccgccgggacctgctgcggctgtcctatggagaggccaagaaggccgcccgggactatgaaacagccaagaactacttcaagaagggcctgaaggacatgggctacggcaactggatcagcaagccccaggaggagaagaacttctacctgtgccctgtgtag

SEQ ID NO: 18262 - DNA, 3588 bp, synthetic construct
  misc_feature 1..3588: note = Description of Artificial Sequence: Synthetic coding sequence
  source 1..3588: mol_type = other DNA
ggctacagcctgagcggctactacacccaccccttccagggctatgagcaccggcagctgcgctaccagcagcccggccctggcagcagccccagcagcttcctgctgaagcagatcgagttcctgaagggccagctgcctgaggcccctgtgattggcaagcagacccccagcctgccccccagcctgcccggcctgcggccccgcttccctgtgctgctggccagcagcacccggggccggcaggtggacatccggggcgtgccccggggcgtgcacctgcggagccagggcctgcagaggggcttccagcaccccagcccccggggccgcagcctgccccagaggggcgtggactgcctgagcagccacttccaggagctgagcatctaccaggaccaggagcagaggatcctgaagttcctggaggagctgggggagggcaaggccaccacagcccatgacctgagcggcaagctgggcacccccaagaaggagatcaacagagtgctgtacagcctggccaagaagggcaagctgcagaaggaggccggcaccccacccctgtggaagattgctgtgtccacccaggcctggaaccagcacagcggcgtggtgcggccagatggccacagccagggcgcccccaacagcgaccccagcctggagccagaagatagaaacagcacctctgtgtctgaggacctgctggagcccttcatcgctgtgtctgcccaggcctggaaccagcacagcggcgtggtgcggccagacagccacagccagggcagccccaacagcgaccccggcctggagcctgaggacagcaacagcaccagcgccctggaggaccccctggagttcctggacatggccgagatcaaggagaagatctgtgactacctgttcaacgtgtctgacagcagcgccctgaacctggccaagaacatcggcctgaccaaggcccgggacatcaatgctgtgctgattgacatggagcggcagggagatgtgtaccggcagggcaccaccccacccatctggcacctgacagacaagaagcgggagaggatgcagatcaagaggaacaccaacagcgtgcctgagacagccccagctgccatccctgagaccaagagaaatgctgagttcctgacctgcaacatccccaccagcaatgccagcaacaacatggtgaccacagagaaggtggagaatggccaggagcccgtcatcaagctggagaaccggcaggaggcccggcctgagcccgcccggctgaagccccctgtgcactacaacggccccagcaaggccggctacgtggactttgaaaatggccagtgggccacagatgacatcccagatgacctgaacagcatccgggccgcccctggagagttccgggccatcatggagatgcccagcttctacagccacggcctgccccgctgcagcccctacaagaagctgacagagtgccagctgaagaaccccatcagcggcctgctggagtatgcccagtttgccagccagacctgtgagttcaacatgattgagcagagcggcccccctcatgagccccgcttcaagttccaggtggtgatcaatggccgggagttccccccagctgaggccggcagcaagaaggtggccaagcaggatgctgccatgaaggccatgaccatcctgctggaggaggccaaggccaaggacagcggcaagtctgaggagagcagccactacagcacagagaaggagagcgagaagacagctgagagccagacccccacccccagcgccaccagcttcttcagcggcaagagccctgtgaccaccctgctggagtgcatgcacaagctgggcaacagctgtgagttccggctgctgagcaaggagggccctgcccacgagcccaagttccagtactgtgtggccgtgggcgcccagaccttccccagcgtgtctgcccccagcaagaaggtggccaagcagatggctgctgaggaggccatgaaggccctgcacggggaggccaccaacagcatggccagtgacaaccagcctgagggcatgatcagcgagagcctggacaacctggagagcatgatgcccaacaaggtgaggaagattggagagctggtgcgctacctgaacaccaaccctgtgggcggcctgctggagtatgcccggagccacggctttgctgctgagttcaagctggtggaccagagcggcccccctcatgagcccaagtttgtgtaccaggccaaggtgggcggccgctggttccctgctgtgtgtgcccacagcaagaagcagggcaagcaggaggccgcagatgctgccctgcgggtgctgattggagaaaatgagaaggccgagaggatgggcttcacagagctgcccctgaccggcagcaccttccatgaccagatcgccatgctgagccaccgctgcttcaacaccctgaccaacagcttccagcccagcctgctgggcaggaagatcctggccgccatcatcatgaagaaggacagcgaggacatgggcgtggtggtgtccctgggcaccggcaacagatgtgtgaagggggacagcctgagcctgaagggggagaccgtgaatgactgccacgccgagatcatcagcagaagaggcttcatccgcttcctgtacagcgagctgatgaagtacaacagccagacagccaaggacagcatctttgagcccgccaagggcggggagaagctgcagatcaagaagacagtgtccttccacctgtacatcagcacagccccctgtggagatggagccctgtttgacaagagctgcagcgaccgggccatggagagcacagagagccgccactaccctgtgtttgagaaccccaagcagggcaagctgcggaccaaggtggagaatggagagggcaccatccctgtggagagcagtgacatcgtgcccacctgggatggcatccggctgggggagcggctgcggaccatgagctgcagcgacaagatcctgcgctggaatgtgctgggcctgcagggcgccctgctgacccacttcctgcagcccatctacctgaagtctgtgaccctgggctacctgttcagccagggccacctgacccgggccatctgctgccgggtgaccagagatggcagcgcctttgaagatggcctgcggcaccccttcatcgtgaaccaccccaaggtgggccgggtgtccatctatgacagcaagaggcagagcggcaagaccaaggagacctctgtgaactggtgcctggctgatggctatgacctggagatcctggatggcacccggggcaccgtggatggccccagaaatgagctgagccgggtgtccaagaagaacatcttcctgctcttcaagaagctgtgcagcttccgctacagaagagacctgctgcggctgtcctatggagaggccaagaaggccgcccgggactatgaaacagccaagaactacttcaagaagggcctgaaggacatgggctacggcaactggatcagcaagccccaggaggagaagaacttctacctgtgccctgtgtag

SEQ ID NO: 18263 - DNA, 528 bp, synthetic construct
  misc_feature 1..528: note = Description of Artificial Sequence: Synthetic coding sequence
  source 1..528: mol_type = other DNA
atgggcaaggtgctgagcaagatctttggaaacaaggagatgaggatcctgatgctgggcctggatgctgctgggaagaccaccatcctgtacaagctgaagctgggccagagcgtgaccaccatccccaccgtgggcttcaacgtggagaccgtgacctacaagaatgtgaagttcaacgtgtgggatgtgggcggccaggacaagatccggcccctgtggaggcactactacacaggcacccagggcctcatctttgtggtggactgtgccgaccgggacagaattgatgaggcccggcaggagctgcaccgcatcatcaatgaccgggagatgagagatgccatcatcctgatctttgccaacaagcaggacctgcctgatgccatgaagccccatgagatccaggagaagctgggcctgacccgcatccgggacaggaactggtacgtgcagcccagctgtgccaccagcggagatggcctgtatgagggcctgacctggctgaccagcaactacaagagctag

SEQ ID NO: 18264 - DNA, 1398 bp, synthetic construct
  misc_feature 1..1398: note = Description of Artificial Sequence: Synthetic coding sequence
  source 1..1398: mol_type = other DNA
atgttccggcaggagcagcccctggccgagggcagctttgcccccatgggcagcctgcagccagatgctggaaatgcctcctggaatggaacagaggcccctgggggcggggcccgggccaccccctacagcctgcaggtgaccctgaccctggtgtgcctggccggcctgctgatgctgctgactgtgtttggaaatgtgctggtgatcatcgctgtgttcaccagccgggccctgaaggccccccagaacctcttcctggtgtccctggccagcgctgacatcctggtggccaccctggtgatccccttcagcctggccaatgaggtgatgggctactggtactttgggaaggcctggtgtgagatctacctggccctggatgtgctcttctgcaccagcagcatcgtgcacctgtgtgccatcagcctggaccgctactggagcatcacccaggccatcgagtacaacctgaagaggaccccccggcgcatcaaggccatcatcatcaccgtgtgggtgatctctgctgtgatctccttccccccactcatcagcattgagaagaagggcggcggcggcggcccccagcctgctgagccccgctgtgagatcaatgaccagaagtggtacgtgatcagcagctgcatcggcagcttctttgccccctgcctgatcatgatcctggtgtatgtgcgcatctaccagatcgccaagaggaggaccagggtgccccccagccggcggggcccagatgctgtggccgcccctcctgggggcacagaaagaagacccaacggcctgggccctgagaggtctgctggccctgggggcgctgaggccgagcccctgcccacccagctgaatggagcccctggagagcccgccccagctggcccccgggacacagatgccctggacctggaggagagcagcagcagtgaccatgctgagcggcccccaggcccccggcggcctgagcggggcccccggggcaagggcaaggcccgggccagccaggtgaagccaggggacagcctgccccggcggggccctggggccactggaattggcaccccagctgctggccctggagaggagcgggtgggcgccgccaaggccagccgctggaggggccggcagaaccgggagaagcgcttcacctttgtgctggccgtggtgattggagtgtttgtggtgtgctggttccccttcttcttcacctacaccctgacagctgtgggctgcagcgtgcccaggaccctcttcaagttcttcttctggtttggctactgcaacagcagcctgaaccctgtgatctacaccatcttcaaccacgacttcagaagagccttcaagaagatcctgtgccgcggggacaggaagagaattgtgtag

SEQ ID NO: 18265 - DNA, 285 bp, synthetic construct
  misc_feature 1..285: note = Description of Artificial Sequence: Synthetic coding sequence
  source 1..285: mol_type = other DNA
atggcccccctgaagatgctggccctggtgaccctgctgctgggcgccagcctgcagcacatccatgctgcccggggcaccaacgtgggccgggagtgctgcctggagtacttcaagggggccatccccctgaggaagctgaagacctggtaccagaccagcgaggactgcagcagagatgccatcgtgtttgtgacagtgcagggccgggccatctgcagcgaccccaacaacaagagggtgaagaatgctgtgaagtacctgcagagcctggagaggagctag

SEQ ID NO: 18266 - DNA, 1635 bp, synthetic construct
  misc_feature 1..1635: note = Description of Artificial Sequence: Synthetic coding sequence
  source 1..1635: mol_type = other DNA
atgcctggccgctgccagagtgatgctgccatgagggtgaatggacctgccagccgggccccagctggctggaccagcggcagcctgcacacaggccccagggctggccggccccgggcccaggcccggggcgtgcggggccggggcctgctgctgcggcccaggcctgccaaggagctgcccctgcccaggaaaggaggagcctgggccccagctggcaaccctggccccctgcaccccctgggcgtggccgtgggcatggccggcagcggccgcctggtgctgcggccctggatccgggagctgatcctgggcagcgagacccccagcagcccccgggccggccagctgctggaggtgctgcaggatgctgaggccgctgtggccggccccagccacgccccagacaccagtgatgtgggcgccaccctgctggtgtctgatggcacccacagcgtgcgctgcctggtgacccgggaggccctggacaccagtgactgggaggagaaggagtttggcttccggggcacagagggccgcctgctgctgctgcaggactgtggggtgcacgtgcaggtggccgagggcggggccccagctgagttctacctgcaggtggaccgcttcagcctgctgcccacagagcagccccggctgcgggtgcccggctgcaaccaggacctggatgtgcagaagaagctgtatgactgcctggaggagcacctgtctgagagcaccagcagcaatgccggcctgagcctgagccagctgctggatgagatgagggaggaccaggagcaccagggcgccctggtgtgcctggccgagagctgcctgaccctggagggcccctgcacagcccctcctgtgacccactgggccgccagccgctgcaaggccactggagaggccgtgtacacagtgcccagctccatgctgtgcatcagtgaaaatgaccagctgatcctgagcagcctgggcccctgccagaggacccagggccctgagctgcccccaccagaccctgccctgcaggacctgagcctgaccctcatcgccagcccccccagcagccccagcagcagcggcaccccagccctgcccggccacatgagcagcgaggagagcggcaccagcatcagcctgctgcctgccctgagcctggccgccccagaccccggccagaggagcagcagccagcccagccctgccatctgcagcgccccagccaccctgacccccaggagcccccacgccagcaggacccccagcagccccctgcagagctgcacccccagcctgagccccaggagccacgtgcccagcccccaccaggccctggtgacccggccccagaagcccagcctggagttcaaggagtttgtgggcctgccctgcaagaaccggccccccttccccaggactggagccaccaggggggcccaggagccctgcagcgtgtgggagccccccaagaggcacagagatggcagcgccttccagtatgaatatgagcccccctgcaccagcctgtgtgcccgggtgcaggccgtgcggctgcccccccagctgatggcctgggccctgcacttcctgatggatgcccagcccggcagcgagcccacccccatgtag

SEQ ID NO: 18267 - DNA, 558 bp, synthetic construct
  misc_feature 1..558: note = Description of Artificial Sequence: Synthetic coding sequence
  source 1..558: mol_type = other DNA
atgaagctggtgtctgtggccctgatgtacctgggcagcctggccttcctgggcgctgacacagcccggctggatgtggccagcgagttcaggaagaagtggaacaagtgggccctgagccggggcaagcgggagctgaggatgagcagcagctaccccaccggcctggctgatgtgaaggccggccctgcccagaccctcatccggccccaggacatgaagggggccagccgcagccctgaggacagcagcccagatgctgcccgcatccgggtgaagcgctaccggcagagcatgaacaacttccagggcctgcggagctttggctgccgcttcggcacctgcaccgtgcagaagctggcccaccagatctaccagttcacagacaaggacaaggacaacgtggcccccaggagcaagatcagcccccagggctacggcagaagaagaagaagaagcctgcctgaggccggccctggccgcaccctggtgagcagcaagccccaggcccatggagccccagccccacccagcggcagcgccccccacttcctgtag

SEQ ID NO: 18268 - DNA, 558 bp, synthetic construct; identical to SEQ ID NO: 18267
  misc_feature 1..558: note = Description of Artificial Sequence: Synthetic coding sequence
  source 1..558: mol_type = other DNA

SEQ ID NO: 18269 - DNA, 558 bp, synthetic construct; identical to SEQ ID NO: 18267
  misc_feature 1..558: note = Description of Artificial Sequence: Synthetic coding sequence
  source 1..558: mol_type = other DNA

SEQ ID NO: 18270 - DNA, 702 bp, synthetic construct
  misc_feature 1..702: note = Description of Artificial Sequence: Synthetic coding sequence
  source 1..702: mol_type = other DNA
atggctgctggaacagctgtgggcgcctgggtgctggtgctgagcctgtggggcgctgtggtgggcgcccagaacatcacagcccgcatcggggagcccctggtgctgaagtgcaagggggcccccaagaagccaccccagaggctggagtggaagctgaacacaggccgcacagaggcctggaaggtgctgagcccccagggcggcggcccctgggacagcgtggcccgggtgctgcccaacagcagcctcttcctgcctgctgtgggcatccaggatgagggcatcttccgctgccaggccatgaacagaaatggcaaggagaccaagagcaactacagagtgcgggtgtaccagatccctgggaagccagagatcgtggacagcgccagcgagctgacagctggggtgcccaacaaggtggtggaggagagccgccgcagcaggaagaggccctgtgagcaggaggtgggcacctgtgtgtctgagggcagctacccagctggcaccctgtcctggcacctggatggcaagcccctggtgcccaatgaaaaaggagtgtctgtgaaggagcagacccggcggcaccctgagaccggcctcttcaccctgcagagcgagctgatggtgaccccagcccggggcggggacccccggcccaccttcagctgcagcttcagccctggcctgcccaggcactag

SEQ ID NO: 18271 - DNA, 1029 bp, synthetic construct
  misc_feature 1..1029: note = Description of Artificial Sequence: Synthetic coding sequence
  source 1..1029: mol_type = other DNA
atggctgctggaacagctgtgggcgcctgggtgctggtgctgagcctgtggggcgctgtggtgggcgcccagaacatcacagcccgcatcggggagcccctggtgctgaagtgcaagggggcccccaagaagccaccccagaggctggagtggaagctgggcggcggcccctgggacagcgtggcccgggtgctgcccaacagcagcctcttcctgcctgctgtgggcatccaggatgagggcatcttccgctgccaggccatgaacagaaatggcaaggagaccaagagcaactacagagtgcgggtgtaccagatccctgggaagccagagatcgtggacagcgccagcgagctgacagctggggtgcccaacaaggtgggcacctgtgtgtctgagggcagctacccagctggcaccctgtcctggcacctggatggcaagcccctggtgcccaatgaaaaaggagtgtctgtgaaggagcagacccggcggcaccctgagaccggcctcttcaccctgcagagcgagctgatggtgaccccagcccggggcggggacccccggcccaccttcagctgcagcttcagccctggcctgcccaggcaccgggccctgaggacagcccccatccagccccgggtgtgggagcctgtgcccctggaggaggtgcagctggtggtggagcctgagggcggcgctgtggcccctgggggcaccgtgaccctgacctgtgaggtgcctgcccagcccagcccccagatccactggatgaaggatgtgtctgacctggagcggggggccggccgcacccggcggggcggggccaactgccgcctgtgtggccgcatccgggccggcaacagcagccctggccctggggaccccggccggcctggggacagcaggcctgcccactggggccacctggtggccaaggccgccaccccccggcggggggaggagggccccaggaagccaggcggccggggcggggcctgcaggacagagagcgtgggcggcacctag

SEQ ID NO: 18272 - DNA, 1044 bp, synthetic construct
  misc_feature 1..1044: note = Description of Artificial Sequence: Synthetic coding sequence
  source 1..1044: mol_type = other DNA
atggctgctggaacagctgtgggcgcctgggtgctggtgctgagcctgtggggcgctgtggtgggcgcccagaacatcacagcccgcatcggggagcccctggtgctgaagtgcaagggggcccccaagaagccaccccagaggctggagtggaagctgaacacaggccgcacagaggcctggaaggtgctgagcccccagggcggcggcccctgggacagcgtggcccgggtgctgcccaacagcagcctcttcctgcctgctgtgggcatccaggatgagggcatcttccgctgccaggccatgaacagaaatggcaaggagaccaagagcaactacagagtgcgggtgtaccagatccctgggaagccagagatcgtggacagcgccagcgagctgacagctggggtgcccaacaaggtgggcacctgtgtgtctgagggcagctacccagctggcaccctgtcctggcacctggatggcaagcccctggtgcccaatgaaaaaggagtgtctgtgaaggagcagacccggcggcaccctgagaccggcctcttcaccctgcagagcgagctgatggtgaccccagcccggggcggggacccccggcccaccttcagctgcagcttcagccctggcctgcccaggcaccgggccctgaggacagcccccatccagccccgggtgtgggagcctgtgcccctggaggaggtgcagctggtggtggagcctgagggcggcgctgtggcccctgggggcaccgtgaccctgacctgtgaggtgcctgcccagcccagcccccagatccactggatgaaggatggagtgcccctgcccctgccccccagccctgtgctgatcctgcctgagatcggcccccaggaccagggcacctacagctgtgtggccacccacagcagccacggcccccaggagagcagagctgtgtccatcagcatcatcgagcctggagaggagggccccacagctggggagggctttgacaaggtgcgggaggccgaggacagcccccagcacatgtag

SEQ ID NO: 18273 - DNA, 1215 bp, synthetic construct
  misc_feature 1..1215: note = Description of Artificial Sequence: Synthetic coding sequence
  source 1..1215: mol_type = other DNA
atggctgctggaacagctgtgggcgcctgggtgctggtgctgagcctgtggggcgctgtggtgggcgcccagaacatcacagcccgcatcggggagcccctggtgctgaagtgcaagggggcccccaagaagccaccccagaggctggagtggaagctgaacacaggccgcacagaggcctggaaggtgctgagcccccagggcggcggcccctgggacagcgtggcccgggtgctgcccaacagcagcctcttcctgcctgctgtgggcatccaggatgagggcatcttccgctgccaggccatgaacagaaatggcaaggagaccaagagcaactacagagtgcgggtgtaccagatccctgggaagccagagatcgtggacagcgccagcgagctgacagctggggtgcccaacaaggtgggcacctgtgtgtctgagggcagctacccagctggcaccctgtcctggcacctggatggcaagcccctggtgcccaatgaaaaaggagtgtctgtgaaggagcagacccggcggcaccctgagaccggcctcttcaccctgcagagcgagctgatggtgaccccagcccggggcggggacccccggcccaccttcagctgcagcttcagccctggcctgcccaggcaccgggccctgaggacagcccccatccagccccgggtgtgggagcctgtgcccctggaggaggtgcagctggtggtggagcctgagggcggcgctgtggcccctgggggcaccgtgaccctgacctgtgaggtgcctgcccagcccagcccccagatccactggatgaaggatggagtgcccctgcccctgccccccagccctgtgctgatcctgcctgagatcggcccccaggaccagggcacctacagctgtgtggccacccacagcagccacggcccccaggagagcagagctgtgtccatcagcatcatcgagcctggagaggagggccccacagctggctctgtgggcggcagcggcctgggcaccctggccctggccctgggcatcctgggcggcctgggcacagctgccctgctgattggagtcatcctgtggcagaggcggcagaggagaggagaggagaggaaggcccctgagaaccaggaggaggaggaggagcgggcagagctgaaccagagcgaggagcctgaggccggggagagcagcactggaggcccctag

SEQ ID NO: 18274 - DNA, 705 bp, synthetic construct
  misc_feature 1..705: note = Description of Artificial Sequence: Synthetic coding sequence
  source 1..705: mol_type = other DNA
atggctgctggaacagctgtgggcgcctgggtgctggtgctgagcctgtggggcgctgtggtgggcgcccagaacatcacagcccgcatcggggagcccctggtgctgaagtgcaagggggcccccaagaagccaccccagaggctggagtggaagctgaacacaggccgcacagaggcctggaaggtgctgagcccccagggcggcggcccctgggacagcgtggcccgggtgctgcccaacagcagcctcttcctgcctgctgtgggcatccaggatgagggcatcttccgctgccaggccatgaacagaaatggcaaggagaccaagagcaactaccgcagcctgcggaccttcaccatcacagccagtgactggatcttccccccatctgagatccctgggaagccagaaattgtggacagcgccagcgagctgacagctggggtgcccaacaaggtgggcacctgtgtgtctgagggcagctacccagctggcaccctgtcctggcacctggatggcaagcccctggtgcccaatgagaagggcgtgtctgtgaaggagcagaccaggaggcaccctgagaccggcctcttcaccctgcagagcgagctgatggtgaccccagcccggggcggggacccccggcccaccttcagctgcagcttcagccctggcctgcccaggcaccgggccctgaggtag

SEQ ID NO: 18275 - DNA, 402 bp, synthetic construct
  misc_feature 1..402: note = Description of Artificial Sequence: Synthetic coding sequence
  source 1..402: mol_type = other DNA
atgaaggatggagtgcccctgcccctgccccccagccctgtgctgatcctgcctgagatcggcccccaggaccagggcacctacagctgtgtggccacccacagcagccacggcccccaggagagcagagctgtgtccatcagcatcatcgagcccggggaggagggccccacagctggctctgtgggcggcagcggcctgggcaccctggccctggccctgggcatcctgggcggcctgggcacagctgccctgctgattggagtcatcctgtggcagaggcggcagaggagaggagaggagaggaaggcccctgagaaccaggaggaggaggaggagagagctgagctgaaccagagcgaggagcctgaggccggggagagcagcactggaggcccctag

SEQ ID NO: 18276 - DNA, 1308 bp, synthetic construct
  misc_feature 1..1308: note = Description of Artificial Sequence: Synthetic coding sequence
  source 1..1308: mol_type = other DNA
atgggcgctggggagcgggtgcaggccccacccagggctgaggccacagctggaagaggagctgaccgggcccggaccctggagggcagcaggatggccgccggcacagctgtgggcgcctgggtgctggtgctgagcctgtggggcgctgtggtgggcgcccagaacatcacagccagaattggagagcccctggtgctgaagtgcaagggggcccccaagaagccaccccagaggctggagtggaagctgaacacaggccgcacagaggcctggaaggtgctgagcccccagggcggcggcccctgggacagcgtggcccgggtgctgcccaacagcagcctcttcctgcctgctgtgggcatccaggatgagggcatcttccgctgccaggccatgaacagaaatggcaaggagaccaagagcaactacagagtgcgggtgtaccagatccctgggaagccagaaattgtggacagcgccagcgagctgacagctggggtgcccaacaaggtgggcacctgtgtgtctgagggcagctacccagctggcaccctgtcctggcacctggatggcaagcccctggtgcccaatgagaagggcgtgtctgtgaaggagcagaccaggaggcaccctgagaccggcctcttcaccctgcagagcgagctgatggtgaccccagcccggggcggggacccccggcccaccttcagctgcagcttcagccctggcctgcccaggcaccgggccctgaggacagcccccatccagccccgggtgtgggagcctgtgcccctggaggaggtgcagctggtggtggagcctgagggcggcgctgtggcccctgggggcaccgtgaccctgacctgtgaggtgcctgcccagcccagcccccagatccactggatgaaggatggagtgcccctgcccctgccccccagccctgtgctgatcctgcctgagatcggcccccaggaccagggcacctacagctgtgtggccacccacagcagccacggcccccaggagagcagagctgtgtccatcagcatcatcgagcccggggaggagggccccacagctggctctgtgggcggcagcggcctgggcaccctggccctggccctgggcatcctgggcggcctgggcacagctgccctgctgattggagtcatcctgtggcagaggcggcagaggagaggagaggagaggaaggcccctgagaaccaggaggaggaggaggagagagctgagctgaaccagagcgaggagcctgaggccggggagagcagcactggaggcccctag

SEQ ID NO: 18277 - DNA, 387 bp, synthetic construct
  misc_feature 1..387: note = Description of Artificial Sequence: Synthetic coding sequence
  source 1..387: mol_type = other DNA
atggctgctggaacagctgtgggcgcctgggtgctggtgctgagcctgtggggcgctgtggtgggcgcccagaacatcacagcccgcatcggggagcccctggtgctgaagtgcaagggggcccccaagaagccaccccagaggctggagtggaagctgaacacaggccgcacagaggcctggaaggtgctgagcccccagggcggcggcccctgggacagcgtggcccgggtgctgcccaacagcagcctcttcctgcctgctgtgggcatccaggatgagggcatcttccgctgccaggccatgaacagaaatggcaaggagaccaagagcaactacagagtgcgggtgtaccagtttgagaacctgcacaactacagcctgtag

SEQ ID NO: 18278 - DNA, 462 bp, synthetic construct
  misc_feature 1..462: note = Description of Artificial Sequence: Synthetic coding sequence
  source 1..462: mol_type = other DNA
atggctgctggaacagctgtgggcgcctgggtgctggtgctgagcctgtggggcgctgtggtgggcgcccagaacatcacagcccgcatcggggagcccctggtgctgaagtgcaagggggcccccaagaagccaccccagaggctggagtggaagctgaacacaggccgcacagaggcctggaaggtgctgagcccccagggcggcggcccctgggacagcgtggcccgggtgctgcccaacagcagcctcttcctgcctgctgtgggcatccaggatgagggcatcctgggcggcctgggcacagctgccctgctgattggagtcatcctgtggcagaggcggcagaggagaggagaggagaggaaggcccctgagaaccaggaggaggaggaggagagagctgagctgaaccagagcgaggagcctgaggccggggagagcagcactggaggcccctag

SEQ ID NO: 18279 - DNA, 885 bp, synthetic construct
  misc_feature 1..885: note = Description of Artificial Sequence: Synthetic coding sequence
  source 1..885: mol_type = other DNA
atgaacagaaatggcaaggagaccaagagcaactacagagtgcgggtgtaccagatccctgggaagccagaaattgtggacagcgccagcgagctgacagctggggtgcccaacaaggtgggcacctgtgtgtctgagggcagctacccagctggcaccctgtcctggcacctggatggcaagcccctggtgcccaatgagaagggcgtgtctgtgaaggagcagaccaggaggcaccctgagaccggcctcttcaccctgcagagcgagctgatggtgaccccagcccggggcggggacccccggcccaccttcagctgcagcttcagccctggcctgcccaggcaccgggccctgaggacagcccccatccagccccgggtgtgggagcctgtgcccctggaggaggtgcagctggtggtggagcctgagggcggcgctgtggcccctgggggcaccgtgaccctgacctgtgaggtgcctgcccagcccagcccccagatccactggatgaaggatggagtgcccctgcccctgccccccagccctgtgctgatcctgcctgagatcggcccccaggaccagggcacctacagctgtgtggccacccacagcagccacggcccccaggagagcagagctgtgtccatcagcatcatcggctctgtgggcggcagcggcctgggcaccctggccctggccctgggcatcctgggcggcctgggcacagctgccctgctgattggagtcatcctgtggcagaggcggcagaggagaggagaggagaggaaggcccctgagaaccaggaggaggaggaggagcgggcagagctgaaccagagcgaggagcctgaggccggggagagcagcactggaggcccctag

SEQ ID NO: 18280 - DNA, 366 bp, synthetic construct
  misc_feature 1..366: note = Description of Artificial Sequence: Synthetic coding sequence
  source 1..366: mol_type = other DNA
atggctgctggaacagctgtgggcgcctgggtgctggtgctgagcctgtggggcgctgtggtgggcgcccagaacatcacagcccgcatcggggagcccctggtgctgaagtgcaagggggcccccaagaagccaccccagaggctggagtggaagctgaacacaggccgcacagaggcctggaaggtgctgagcccccagggcggcggcccctgggacagcgtggcccgggtgctgcccaacagcagcctcttcctgcctgctgtgggcatccaggatgagggcatcttccgctgccaggccatgaacagaaatggcaaggagaccaagagcaactggtggtggagccagaaggtggagcagtag

SEQ ID NO: 18281 - DNA, 1092 bp, synthetic construct
  misc_feature 1..1092: note = Description of Artificial Sequence: Synthetic coding sequence
  source 1..1092: mol_type = other DNA
atggctgctggaacagctgtgggcgcctgggtgctggtgctgagcctgtggggcgctgtggtgggcgcccagaacatcacagcccgcatcggggagcccctggtgctgaagtgcaagggggcccccaagaagccaccccagaggctggagtggaagctgaacacaggccgcacagaggcctggaaggtgctgagcccccagggcggcggcccctgggacagcgtggcccgggtgctgcccaacagcagcctcttcctgcctgctgtgggcatccaggatgagggcatcttccgctgccaggccatgaacagaaatggcaaggagaccaagagcaactacagagtgcgggtgtaccagatccctgggaagccagagatcgtggacagcgccagcgagctgacagctggggtgcccaacaaggtggtggaggagagccgccgcagcaggaagaggccctgtgagcaggaggtgggcacctgtgtgtctgagggcagctacccagctggcaccctgtcctggcacctggatggcaagcccctggtgcccaatgaaaaaggagtgtctgtgaaggagcagacccggcggcaccctgagaccggcctcttcaccctgcagagcgagctgatggtgaccccagcccggggcggggacccccggcccaccttcagctgcagcttcagccctggcctgcccaggcaccgggccctgaggacagcccccatccagccccgggtgtgggagcctgtgcccctggaggaggtgcagctggtggtggagcctgagggcggcgctgtggcccctgggggcaccgtgaccctgacctgtgaggtgcctgcccagcccagcccccagatccactggatgaaggatggagtgcccctgcccctgccccccagccctgtgctgatcctgcctgagatcggcccccaggaccagggcacctacagctgtgtggccacccacagcagccacggcccccaggagagcagagctgtgtccatcagcatcatcgagcctggagaggagggccccacagctggggagggctttgacaaggtgcgggaggccgaggacagcccccagcacatgtag

SEQ ID NO: 18282 - DNA, 3633 bp, synthetic construct
  misc_feature 1..3633: note = Description of Artificial Sequence: Synthetic coding sequence
  source 1..3633: mol_type = other DNA
atggccgcccagagcagcctgtacaatgatgacaggaacctgctgcgcatccgggagaaggagaggaggaaccaggaggcccaccaggagaaggaggccttccctgagaagatccccctgtttggagagccctacaagacagccaagggagatgagctgagcagccgcatccagaacatgctgggcaactatgaggaggtgaaggagttcctgagcaccaagagccacacccaccggctggatgccagcgagaaccggctgggcaagcccaagtaccccctcatcccagacaagggcagcagcatccccagcagcagcttccacacctctgtgcaccaccagagcatccacaccccagccagcggccccctgtctgtgggcaacatcagccacaaccccaagatggcccagcccaggacagagcccatgcccagcctgcacgccaagagctgtggccccccagacagccagcacctgacccaggaccggctgggccaggagggcttcggcagcagccaccacaagaagggggacagaagagcagatggagaccactgtgcctctgtgacagacagcgcccctgagcgggagctgagccccctcatcagcctgcccagccctgtgccccccctgagccccatccacagcaaccagcagaccctgcccaggacccagggcagcagcaaggtgcacggcagcagcaacaacagcaagggctactgcccagccaagagccccaaggacctggccgtgaaggtgcatgacaaggagaccccccaggacagcctggtggccccagcccagccccccagccagaccttccccccacccagcctgcccagcaagtctgtggccatgcagcagaagcccacagcctacgtgcggcccatggatggccaggaccaggcccccagcgagagccctgagctgaagcccctgcctgaggactaccggcagcagacctttgagaagacagacctgaaggtgcctgccaaggccaagctgaccaagctgaagatgcccagccagagcgtggagcagacctacagcaatgaggtgcactgtgtggaggagatcctgaaggagatgacccacagctggcccccacccctgacagccatccacacccccagcacagctgagcccagcaagttccccttccccaccaaggacagccagcacgtgtcctctgtgacccagaaccagaagcagtatgacaccagcagcaagacccacagcaacagccagcagggcaccagctccatgctggaggatgacctgcagctgagtgacagtgaagattctgattctgagcagaccccagagaagccacccagcagcagcgccccacccagcgccccccagagcctgcctgagcctgtggccagcgcccacagcagcagcgctgagagcgagagcaccagtgacagcgacagcagcagtgacagcgagagcgagagcagcagcagtgacagcgaggagaatgagcccctggagaccccagcccctgagcctgagccccccaccaccaacaagtggcagctggacaactggctgaccaaggtgtcccagcctgctgcccctcctgagggccccaggagcacagagcccccaagaagacaccctgagagcaagggcagcagtgacagcgccaccagccaggagcacagcgagagcaaggaccccccacccaagagcagcagcaaggccccccgggcccctcctgaggccccccaccctgggaagaggagctgccagaagagccctgcccagcaggagcccccccagaggcagacagtgggcaccaagcagcccaagaagcctgtgaaggccagcgcccgggccggcagcaggaccagcctgcagggcgagcgggagcccggcctgctgccctacggcagccgggaccagaccagcaaggacaagcccaaggtgaagaccaagggccggcccagggctgctgccagcaatgagcccaagccagctgtgccccccagcagcgagaagaagaagcacaagagcagcctgcctgcccccagcaaggccctgagcggccctgagcccgccaaggacaacgtggaggacaggaccccagagcactttgccctggtgcccctgacagagagccagggccccccccacagcggcagcggcagcaggaccagcggctgccggcaggccgtggtggtgcaggaggacagcaggaaggaccggctgcccctgcccctgcgggacaccaagctgctgagccccctgcgggacaccccaccaccccagagcctgatggtgaagatcaccctggacctgctgagccgcatcccccagcccccaggcaagggcagccggcagaggaaggccgaggacaagcagcccccagctgggaagaagcacagcagcgagaagaggagcagtgacagcagcagcaagctggccaagaagaggaaaggagaggccgagcgggactgtgacaacaagaagatccggctggagaaggagatcaagagccagagcagcagcagcagcagcagccacaaggagagcagcaagaccaagcccagccggcccagcagccagagcagcaagaaggagatgctgcccccacctcctgtgagcagcagcagccagaagccagccaagccagccctgaagaggagccggcgggaggccgacacctgtggccaggacccccccaagagcgccagcagcaccaagagcaaccacaaggacagcagcatccccaagcagaggagagtggagggcaagggcagccgcagcagcagcgagcacaagggcagcagcggggacacagccaaccccttccctgtgcccagcctgcccaatggaaacagcaagccaggcaagccccaggtgaagtttgacaagcagcaggccgacctgcacatgagggaggccaagaagatgaagcagaaggccgagctgatgacagacagagtgggcaaggccttcaagtacctggaggccgtgctgtccttcattgaatgtggcatcgccacagaaagtgagagccagagcagcaagagcgcctacagcgtgtacagcgagaccgtggacctgatcaagttcatcatgagcctgaagagcttcagtgatgccacagcccccacccaggagaagatctttgctgtgctgtgcatgcgctgccagagcatcctgaacatggccatgttccgctgcaagaaggacatcgccatcaagtacagcaggaccctgaacaagcactttgagagcagcagcaaggtggcccaggcccccagcccctgcatcgccagcacaggcacccccagccccctgagccccatgcccagccctgccagctctgtgggcagccagagcagcgctggctctgtgggcagcagcggcgtggccgccaccatcagcacccctgtgaccatccagaacatgaccagcagctatgtgaccatcaccagccacgtgctgacagcctttgacctgtgggagcaggccgaggccctgaccaggaagaacaaggagttctttgcccggctgagcaccaacgtgtgcaccctggccctgaacagcagcctggtggacctggtgcactacacccggcagggcttccagcagctgcaggagctgaccaagaccccctag

SEQ ID NO: 18283 - DNA, 1266 bp, synthetic construct
  misc_feature 1..1266: note = Description of Artificial Sequence: Synthetic coding sequence
  source 1..1266: mol_type = other DNA
atggccttcacagagcgggtgaacagcagcggcaacagcctgtacaatgatgacaggaacctgctgcgcatccgggagaaggagaggaggaaccaggaggcccaccaggagaaggaggccttccctgagaagatccccctgtttggagagccctacaagacagccaagggagatgagctgagcagccgcatccagaacatgctgggcaactatgaggaggtgaaggagttcctgagcaccaagagccacacccaccggctggatgcctctgaaaatcggctgggcaagcccaagtaccccctcatcccagacaagggcagcagcatccccagcagcagcttccacacctctgtgcaccaccagagcatccacaccccagccagcggccccctgtctgtgggcaacatcagccacaaccccaagatggcccagcccaggacagagcccatgcccagcctgcacgccaagagctgtggccccccagacagccagcacctgacccaggaccggctgggccaggagggcttcggcagcagccaccacaagaagggggaccggcgggcagatggagaccactgtgcctctgtgacagattctgcccctgagcgggagctgagccccctcatcagcctgcccagccctgtgccccccctgagccccatccacagcaaccagcagaccctgcccaggacccagggcagcagcaaggtgcacggcagcagcaacaacagcaagggctactgcccagccaagagccccaaggacctggccgtgaaggtgcatgacaaggagaccccccaggacagcctggtggccccagcccagccccccagccagaccttccccccacccagcctgcccagcaagtctgtggccatgcagcagaagcccacagcctacgtgcggcccatggatggccaggaccaggcccccagcgagagccctgagctgaagcccctgcctgaggactaccggcagcagacctttgagaagacagacctgaaggtgcctgccaaggccaagctgaccaagctgaagatgcccagccagagcgtggagcagacctacagcaatgaggtgcactgtgtggaggagatcctgaaggacagccagcacgtgtcctctgtgacccagaaccagaagcagtatgacaccagcagcaagacccacagcaacagccagcagggcaccagctccatgctggaggatgacctgcagctgagtgacagtgaagattctgattctgagcagaccccagccccctag

SEQ ID NO: 18284 - DNA, 3657 bp, synthetic construct
  misc_feature 1..3657: note = Description of Artificial Sequence: Synthetic coding sequence
  source 1..3657: mol_type = other DNA
atggccttcacagagcgggtgaacagcagcggcaacagcctgtacaatgatgacaggaacctgctgcgcatccgggagaaggagaggaggaaccaggaggcccaccaggagaaggaggccttccctgagaagatccccctgtttggagagccctacaagacagccaagggagatgagctgagcagccgcatccagaacatgctgggcaactatgaggaggtgaaggagttcctgagcaccaagagccacacccaccggctggatgcctctgaaaatcggctgggcaagcccaagtaccccctcatcccagacaagggcagcagcatccccagcagcagcttccacacctctgtgcaccaccagagcatccacaccccagccagcggccccctgtctgtgggcaacatcagccacaaccccaagatggcccagcccaggacagagcccatgcccagcctgcacgccaagagctgtggccccccagacagccagcacctgacccaggaccggctgggccaggagggcttcggcagcagccaccacaagaagggggaccggcgggcagatggagaccactgtgcctctgtgacagattctgcccctgagcgggagctgagccccctcatcagcctgcccagccctgtgccccccctgagccccatccacagcaaccagcagaccctgcccaggacccagggcagcagcaaggtgcacggcagcagcaacaacagcaagggctactgcccagccaagagccccaaggacctggccgtgaaggtgcatgacaaggagaccccccaggacagcctggtggccccagcccagccccccagccagaccttccccccacccagcctgcccagcaagtctgtggccatgcagcagaagcccacagcctacgtgcggcccatggatggccaggaccaggcccccagcgagagccctgagctgaagcccctgcctgaggactaccggcagcagacctttgagaagacagacctgaaggtgcctgccaaggccaagctgaccaagctgaagatgcccagccagagcgtggagcagacctacagcaatgaggtgcactgtgtggaggagatcctgaaggagatgacccacagctggcccccacccctgacagccatccacacccccagcacagctgagcccagcaagttccccttccccaccaaggacagccagcacgtgtcctctgtgacccagaaccagaagcagtatgacaccagcagcaagacccacagcaacagccagcagggcaccagctccatgctggaggatgacctgcagctgagtgacagcgaggacagcgacagcgagcagaccccagagaagccacccagcagcagcgcccctccttctgccccccagagcctgcctgagcctgtggccagcgcccacagcagcagcgctgagagcgagagcaccagtgacagcgacagcagcagtgacagcgagagcgagagcagcagcagtgacagtgaagaaaatgagcccctggagaccccagcccctgagcctgagccccccaccaccaacaagtggcagctggacaactggctgaccaaggtgtcccagcctgctgcccctcctgagggccccaggagcacagagcccccccggcggcaccctgagagcaagggcagcagtgacagcgccaccagccaggagcacagcgagagcaaggaccccccacccaagagcagcagcaaggccccccgggcccctcctgaggccccccaccctgggaagaggagctgccagaagagccctgcccagcaggagcccccccagaggcagacagtgggcaccaagcagcccaagaagcctgtgaaggccagcgcccgggccggcagcaggaccagcctgcagggcgagcgggagcccggcctgctgccctacggcagccgggaccagaccagcaaggacaagcccaaggtgaagaccaagggccggcccagggctgctgccagcaatgagcccaagccagctgtgccccccagcagcgagaagaagaagcacaagagcagcctgcctgcccccagcaaggccctgagcggccctgagcccgccaaggacaacgtggaggacaggaccccagagcactttgccctggtgcccctgacagagagccagggccccccccacagcggcagcggcagcaggaccagcggctgccggcaggccgtggtggtgcaggaggacagcaggaaggaccggctgcccctgcccctgcgggacaccaagctgctgagccccctgcgggacaccccaccaccccagagcctgatggtgaagatcaccctggacctgctgagccgcatcccccagcccccaggcaagggcagccggcagaggaaggccgaggacaagcagcccccagctgggaagaagcacagcagcgagaagaggagcagtgacagcagcagcaagctggccaagaagaggaagggggaggccgagcgggactgtgacaacaagaagatccggctggagaaggagatcaagagccagagcagcagcagcagcagcagccacaaggagagcagcaagaccaagcccagccggcccagcagccagagcagcaagaaggagatgctgcccccacctcctgtgagcagcagcagccagaagccagccaagccagccctgaagaggagcagaagagaggccgacacctgtggccaggacccccccaagagcgccagcagcaccaagagcaaccacaaggacagcagcatccccaagcagaggagagtggagggcaagggcagccgcagcagcagcgagcacaagggcagcagcggggacacagccaaccccttccctgtgcccagcctgcccaacggcaacagcaagccaggcaagccccaggtgaagtttgacaagcagcaggccgacctgcacatgagggaggccaagaagatgaagcagaaggccgagctgatgacagacagagtgggcaaggccttcaagtacctggaggccgtgctgtccttcattgaatgtggcatcgccacagagagcgagagccagagcagcaagagcgcctacagcgtgtacagcgagaccgtggacctgatcaagttcatcatgagcctgaagagcttcagtgatgccacagcccccacccaggagaagatctttgctgtgctgtgcatgcgctgccagagcatcctgaacatggccatgttccgctgcaagaaggacatcgccatcaagtacagcaggaccctgaacaagcactttgagagcagcagcaaggtggcccaggcccccagcccctgcatcgcccggagcacaggcacccccagccccctgagccccatgcccagccctgccagctctgtgggcagccagagcagcgctggctctgtgggcagcagcggcgtggccgccaccatcagcacccctgtgaccatccagaacatgaccagcagctatgtgaccatcaccagccacgtgctgacagcctttgacctgtgggagcaggccgaggccctgaccaggaagaacaaggagttctttgcccggctgagcaccaacgtgtgcaccctggccctgaacagcagcctggtggacctggtgcactacacccggcagggcttccagcagctgcaggagctgaccaagaccccctag

SEQ ID NO: 18285 - DNA, 1221 bp, synthetic construct
  misc_feature 1..1221: note = Description of Artificial Sequence: Synthetic coding sequence
  source 1..1221: mol_type = other DNA
atggccttcacagagcgggtgaacagcagcggcaacagcctgtacaatgatgacaggaacctgctgcgcatccgggagaaggagaggaggaaccaggaggcccaccaggagaaggaggccttccctgagaagatccccctgtttggagagccctacaagacagccaagggagatgagctgagcagccgcatccagaacatgctgggcaactatgaggaggtgaaggagttcctgagcaccaagagccacacccaccggctggatgcctctgaaaatcggctgggcaagcccaagtaccccctcatcccagacaagggcagcagcatccccagcagcagcttccacacctctgtgcaccaccagagcatccacaccccagccagcggccccctgtctgtgggcaacatcagccacaaccccaagatggcccagcccaggacagagcccatgcccagcctgcacgccaagagctgtggccccccagacagccagcacctgacccaggaccggctgggccaggagggcttcggcagcagccaccacaagaagggggaccggcgggcagatggagaccactgtgcctctgtgacagattctgcccctgagcgggagctgagccccctcatcagcctgcccagccctgtgccccccctgagccccatccacagcaaccagcagaccctgcccaggacccagggcagcagcaaggtgcacggcagcagcaacaacagcaagggctactgcccagccaagagccccaaggacctggccgtgaaggtgcatgacaaggagaccccccaggacagcctggtggccccagcccagccccccagccagaccttccccccacccagcctgcccagcaagtctgtggccatgcagcagaagcccacagcctacgtgcggcccatggatggccaggaccaggcccccagcgagagccctgagctgaagcccctgcctgaggactaccggcagcagacctttgagaagacagacctgaaggtgcctgccaaggccaagctgaccaagctgaagatgcccagccagagcgtggagacctacagcaatgaggtgcactgtgtggaggagatcctgaaggagatgacccacagctggcccccacccctgacagccatccacacccccagcacagctgagcccagcaagttccccttccccaccaaggacagccagcacgtgtcctctgtgacccagtag

SEQ ID NO: 18286 - DNA, 1473 bp, synthetic construct
  misc_feature 1..1473: note = Description of Artificial Sequence: Synthetic coding sequence
  source 1..1473: mol_type = other DNA
atgcccagccagagcgtggagcagacctacagcaatgaggtgcactgtgtggaggagatcctgaaggagatgacccacagctggcccccacccctgacagccatccacacccccagcacagctgagcccagcaagttccccttccccaccaaggacagccagcacgtgtcctctgtgacccagaaccagaagcagtatgacaccagcagcaagacccacagcaacagccagcagggcaccagctccatgctggaggatgacctgcagctgagtgacagcgaggacagcgacagcgagcagaccccagagaagccaccccacctgcacctgcaggtgctgcacagccccttccagaaccagtggcaccagcacatcccagctgtgcagagccagaaggcccctgtgacccagacagtgccccagacccagagggcccgggctgtgcaggacagtgaagaaaatgagcccctggagaccccagcccctgagcctgagccccccaccaccaacaagtggcagctggacaactggctgaccaaggtgtcccagcctgctgcccctcctgagggccccaggagcacagagcccccccggcggcaccctgagagcaagggcagcagtgacagcgccaccagccaggagcacagcgagagcaaggaccccccacccaagagcagcagcaaggccccccgggcccctcctgaggccccccaccctgggaagaggagctgccagaagagccctgcccagcaggagcccccccagaggcagacagtgggcaccaagcagcccaagaagcctgtgaaggccagcgcccgggccggcagcaggaccagcctgcagggcgagcgggagcccggcctgctgccctacggcagccgggaccagaccagcaaggacaagcccaaggtgaagaccaagggccggcccagggctgctgccagcaatgagcccaagccagctgtgccccccagcagcgagaagaagaagcacaagagcagcctgcctgcccccagcaaggccctgagcggccctgagcccgccaaggacaacgtggaggacaggaccccagagcactttgccctggtgcccctgacagagagccagggccccccccacagcggcagcggcagcaggaccagcggctgccggcaggccgtggtggtgcaggaggacagcaggaaggaccggctgcccctgcccctgcgggacaccaagctgctgagccccctgcgggacaccccaccaccccagagcctgatggtgaagatcaccctggacctgctgagccgcatcccccagcccccaggcaagggcagccggcagaggaaggccgaggacaagcagcccccagctgggaagaagcacagcagcgagaagaggagcagtgacagcagcagcaagctggccaagaagaggaagggggaggccgagcgggactgtgacaacaagaagatccggctggagaagtag

SEQ ID NO: 18287 - DNA, 2550 bp, synthetic construct
  misc_feature 1..2550: note = Description of Artificial Sequence: Synthetic coding sequence
  source 1..2550: mol_type = other DNA
atgacccacagctggcccccacccctgacagccatccacacccccagcacagctgagcccagcaagttccccttccccaccaaggacagccagcacgtgtcctctgtgacccagaaccagaagcagtatgacaccagcagcaagacccacagcaacagccagcagggcaccagctccatgctggaggatgacctgcagctgagtgacagtgaagattctgattctgagcagaccccagagaagccacccagcagcagcgccccacccagcgccccccagagcctgcctgagcctgtggccagcgcccacagcagcagcgctgagagcgagagcaccagtgacagcgacagcagcagtgacagcgagagcgagagcagcagcagtgacagcgaggagaatgagcccctggagaccccagcccctgagcctgagccccccaccaccaacaagtggcagctggacaactggctgaccaaggtgtcccagcctgctgcccctcctgagggccccaggagcacagagcccccaagaagacaccctgagagcaagggcagcagtgacagcgccaccagccaggagcacagcgagagcaaggaccccccacccaagagcagcagcaaggccccccgggcccctcctgaggccccccaccctgggaagaggagctgccagaagagccctgcccagcaggagcccccccagaggcagacagtgggcaccaagcagcccaagaagcctgtgaaggccagcgcccgggccggcagcaggaccagcctgcagggcgagcgggagcccggcctgctgccctacggcagccgggaccagaccagcaaggacaagcccaaggtgaagaccaagggccggcccagggctgctgccagcaatgagcccaagccagctgtgccccccagcagcgagaagaagaagcacaagagcagcctgcctgcccccagcaaggccctgagcggccctgagcccgccaaggacaacgtggaggacaggaccccagagcactttgccctggtgcccctgacagagagccagggccccccccacagcggcagcggcagcaggaccagcggctgccggcaggccgtggtggtgcaggaggacagcaggaaggaccggctgcccctgcccctgcgggacaccaagctgctgagccccctgcgggacaccccaccaccccagagcctgatggtgaagatcaccctggacctgctgagccgcatcccccagcccccaggcaagggcagccggcagaggaaggccgaggacaagcagcccccagctgggaagaagcacagcagcgagaagaggagcagtgacagcagcagcaagctggccaagaagaggaaaggagaggccgagcgggactgtgacaacaagaagatccggctggagaaggagatcaagagccagagcagcagcagcagcagcagccacaaggagagcagcaagaccaagcccagccggcccagcagccagagcagcaagaaggagatgctgcccccacctcctgtgagcagcagcagccagaagccagccaagccagccctgaagaggagccggcgggaggccgacacctgtggccaggacccccccaagagcgccagcagcaccaagagcaaccacaaggacagcagcatccccaagcagaggagagtggagggcaagggcagccgcagcagcagcgagcacaagggcagcagcggggacacagccaaccccttccctgtgcccagcctgcccaatggaaacagcaagccaggcaagccccaggtgaagtttgacaagcagcaggccgacctgcacatgagggaggccaagaagatgaagcagaaggccgagctgatgacagacagagtgggcaaggccttcaagtacctggaggccgtgctgtccttcattgaatgtggcatcgccacagaaagtgagagccagagcagcaagagcgcctacagcgtgtacagcgagaccgtggacctgatcaagttcatcatgagcctgaagagcttcagtgatgccacagcccccacccaggagaagatctttgctgtgctgtgcatgcgctgccagagcatcctgaacatggccatgttccgctgcaagaaggacatcgccatcaagtacagcaggaccctgaacaagcactttgagagcagcagcaaggtggcccaggcccccagcccctgcatcgcccggagcacaggcacccccagccccctgagccccatgcccagccctgccagctctgtgggcagccagagcagcgctggctctgtgggcagcagtggagtggccgccaccatcagcacccctgtgaccatccagaacatgaccagcagctatgtgaccatcaccagccacgtgctgacagcctttgacctgtgggagcaggccgaggccctgaccaggaagaacaaggagttctttgcccggctgagcaccaacgtgtgcaccctggccctgaacagcagcctggtggacctggtgcactacacccggcagggcttccagcagctgcaggagctgaccaagaccccctag

SEQ ID NO: 18288 - DNA, 2376 bp, synthetic construct
  misc_feature 1..2376: note = Description of Artificial Sequence: Synthetic coding sequence
  source 1..2376: mol_type = other DNA
atgccagacatgcacttcaaggcccccaagatctccatgccagatgtggacctgcacctgaagggccccaaggtgaagggagatgtggatgtgtctgtgcccaagctggagggggacctgaccggccccagcgtgggcgtggaggtgcctgatgtggagctggagtgcccagatgccaagctgaagggccccaagttcaagatgcctgagatgcacttcaagacccccaagatctccatgccagatgtggacctgcacctgaagggccccaaggtgaagggggacatggatgtgtctgtgcccaaggtggagggggagatgaaggtgcctgatgtggacatcaagggccccaagatggacattgatgccccagatgtggatgtgcacggccctgactggcacctgaagatgcccaagatgaagatgcccaagttctccatgcctggcttcaaggccgagggccctgaggtggatgtgaacctgcccaaggcagatgtggtggtgtctggccccaaggtggatgtggaggtgcctgatgtgtccctggagggccctgagggcaagctgaagggccccaagctgaagatgcctgagatgcacttcaaggcccccaagatctccatgccagatgtggacctgcacctgaagggccccaaggtgaagggagatgtggatgtgtccctgcccaagctggagggggacctgaccggccccagcgtggatgtggaggtgcctgatgtggagctggagtgcccagatgccaagctgaagggccccaagttcaagatgcctgagatgcacttcaagacccccaagatctccatgccagatgtgaacctgaacctgaagggccccaaggtgaagggggacatggatgtgtctgtgcccaaggtggagggggagatgaaggtgcctgatgtggacatccggggccccaaggtggacattgatgccccagatgtggatgtgcacggccctgactggcacctgaagatgcccaagatgaagatgcccaagttctccatgcctggcttcaagggggagggccctgaggtggatgtgaacctgcccaaggcagatgtggatgtgtctggccccaaggtggatgtggaggtgcctgatgtgtccctggagggccctgagggcaagctgaagggccccaagttcaagatgcctgagatgcacttcaagacccccaagatctccatgccagatgtggacttcaacctgaagggccccaagatcaagggagatgtggatgtgtctgcccccaagctggagggggagctgaagggccctgagctggatgtgaagggccccaagctggatgctgacatgcctgaggtggccgtggagggccccaacgggaagtggaagacccccaagttcaagatgccagacatgcacttcaaggcccccaagatctccatgccagacctggacctgcacctgaagagccccaaggccaagggggaggtggatgtggatgtgcccaagctggagggggacctgaagggcccccacgtggatgtgtctggccctgacatcgacatcgagggccctgagggcaagctgaagggccccaagttcaagatgccagacatgcacttcaaggcccccaacatctccatgccagatgtggacctgaacctgaagggccccaagatcaagggagatgtggatgtgtctgtgcctgaggtggagggcaagctggaggtgcctgacatgaacatccggggccccaaggtggatgtgaatgccccagatgtgcaggccccagactggcacctgaagatgcccaagatgaagatgcccaagttctccatgcctggcttcaaggccgagggccctgaggtggatgtgaacctgcccaaggcagatgtggacatcagcggccccaaggtggacatcgagggcccagatgtgaacatcgagggccctgagggcaagctgaagggccccaagctgaagatgcctgagatgaacatcaaggcccccaagatctccatgccagactttgacctgcacctgaagggccccaaggtgaagggagatgtggatgtgtccctgcccaaggtggagggggacctgaagggccctgaggtggacatcaagggccccaaggtggacatcaatgccccagatgtgggcgtgcagggccctgactggcacctgaagatgcccaaggtgaagatgcccaagttctccatgcctggcttcaagggggagggcccagatggagatgtgaagctgcccaaggctgacattgatgtgtctggccccaaggtggacatcgagggcccagatgtgaacatcgagggccctgagggcaagctgaagggccccaagttcaagatggcccagcgctggtggtag

SEQ ID NO: 18289 - DNA, 450 bp, synthetic construct
  misc_feature 1..450: note = Description of Artificial Sequence: Synthetic coding sequence
  source 1..450: mol_type = other DNA
atggagaaggaggagaccacccgggagctgctgctgcccaactggcagggcagcggcagccacggcctgaccatcgcccagagagatgatggagtgtttgtgcaggaggtgacccagaacagccctgctgccaggactggagtggtgaaggagggggaccagatcgtgggcgccaccatctactttgacaacctgcagagcggggaggtgacccagctgctgaacaccatgggccaccacacagtgggcctgaagctgcacaggaaaggagacaggagccctgagcccggccagacctggacccgggaggtgttcagcagctgcagcagcgaggtggtgctgaacaccccccagcccagcgccctggagtgcaaggaccagaacaagcagaaggaggccagcagccaggccggggctgtgtctgtgtccaccccaaatgccggcctgtag

SEQ ID NO: 18290 - DNA, 17673 bp, synthetic construct
  misc_feature 1..17673: note = Description of Artificial Sequence: Synthetic coding sequence
  source 1..17673: mol_type = other DNA
atggagaaggaggagaccacccgggagctgctgctgcccaactggcagggcagcggcagccacggcctgaccatcgcccagagagatgatggagtgtttgtgcaggaggtgacccagaacagccctgctgccaggactggagtggtgaaggagggggaccagatcgtgggcgccaccatctactttgacaacctgcagagcggggaggtgacccagctgctgaacaccatgggccaccacacagtgggcctgaagctgcacaggaaaggagacaggagccctgagcccggccagacctggacccgggaggtgttcagcagctgcagcagcgaggtggtgctgtctggagatgatgaggagtaccagaggatctacaccaccaagatcaagccccggctgaagtcagaagatggagtggagggggacctgggggagacccagagcaggaccatcaccgtgaccaggagagtgacagcctacacagtggatgtgacaggccgggagggcgccaaggacatcgacatcagcagccctgagttcaagatcaagatccccaggcatgagctgacagagatcagcaatgtggatgtggagacccagagcggcaagacagtcatccggctgcccagcggcagcggggccgccagccccaccggcagcgctgtggacatccgggccggggccatcagcgccagcggccctgagctgcagggcgccggccacagcaagctgcaggtgaccatgcctggcatcaaggtgggcggcagcggcgtgaatgtgaatgccaagggcctggacctgggcggccggggcggcgtgcaggtgcctgctgtggacatcagcagcagcctgggcggccgggctgtggaggtgcagggccccagcctggagagcggggaccacggcaagatcaagttccccaccatgaaggtgcccaagtttggagtgtccacaggccgggagggccagacccccaaggccggcctgcgggtgtctgcccctgaggtgtctgtgggccacaagggcggcaagccaggcctgaccatccaggccccccagctggaggtgtctgtgcccagcgccaacatcgagggcctggagggcaagctgaagggcccccagatcaccggccccagcctggagggggacctgggcctgaagggggccaagccccagggccacatcggcgtggatgccagcgccccccagatcggcggcagcatcaccggccccagcgtggaggtgcaggccccagacattgatgtgcagggccctggcagcaagctgaatgtgcccaagatgaaggtgcccaagttctctgtgtctggggccaagggggaggagactggaattgatgtgaccctgcccactggagaggtgacagtgcctggggtgtctggagatgtgtccctgcctgagatcgccaccggcggcctggagggcaagatgaagggcaccaaggtgaagaccccagagatgatcatccagaagcccaagatctccatgcaggatgtggacctgagcctgggcagccccaagctgaagggggacatcaaggtgtctgcccctggggtgcagggagatgtgaagggcccccaggtggccctgaagggcagccgggtggacatcgagacccccaacctggagggcaccctgaccggcccccggctgggcagccccagcggcaagacaggcacctgccgcatctccatgtctgaggtggacctgaatgtggccgcccccaaggtgaagggcggcgtggatgtgaccctgccccgggtggagggcaaggtgaaggtgcctgaggtggatgtgcggggccccaaggtggatgtgtctgccccagatgtggaggcccacggccctgagtggaacctgaagatgcccaagatgaagatgcccaccttcagcacccctggggccaagggggagggcccagatgtgcacatgaccctgcccaagggggacatcagcatcagcggccccaaggtgaatgtggaggccccagatgtgaacctggagggcctgggcggcaagctgaagggcccagatgtgaagctgcctgacatgtctgtgaagacccccaagatctccatgccagatgtggacctgcacgtgaagggcaccaaggtgaagggggagtatgatgtgacagtgcccaagctggagggggagctgaagggccccaaggtggacattgatgccccagatgtggatgtgcacggccctgactggcacctgaagatgcccaagatgaagatgcccaagttctctgtgcccggcttcaaggccgagggccctgaggtggatgtgaacctgcccaaggcagatgtggacatcagcggccccaagattgatgtgacagccccagatgtgtccattgaggagcctgagggcaagctgaagggccccaagttcaagatgcctgagatgaacatcaaggtgcccaagatctccatgccagatgtggacctgcacctgaagggccccaacgtgaagggggagtatgatgtgaccatgcccaaggtggagagcgagatcaaggtgcctgatgtggagctgaagagcgccaagatggacattgatgtgcctgatgtggaggtgcagggccctgactggcacctgaagatgcccaagatgaagatgcccaagttctccatgcctggcttcaaggccgagggccctgaggtggatgtgaacctgcccaaggcagatgtggacatcagcggccccaaggtgggcgtggaggtgcctgatgtgaacatcgagggccctgagggcaagctgaagggccccaagttcaagatgcctgagatgaacatcaaggcccccaagatctccatgccagatgtggacctgcacatgaagggccccaaggtgaagggggagtatgacatgacagtgcccaagctggagggggacctgaagggccccaaggtggatgtgtctgccccagatgtggagatgcagggccctgactggaacctgaagatgcccaagatcaagatgcccaagttctccatgcccagcctgaagggggagggccctgagtttgatgtgaacctgagcaaggccaacgtggacatcagcgcccccaaggtggacaccaatgccccagacctgagcctggagggccctgagggcaagctgaagggccccaagttcaagatgcctgagatgcacttccgggcccccaagatgagcctgcctgatgtggacctggacctgaagggccccaagatgaagggaaatgtggacatcagcgcccccaagattgaaggagagatgcaggtgcctgatgtggacatccggggccccaaggtggacatcaaggccccagatgtggagggccagggcctggactggagcctgaagatccccaagatgaagatgcccaagttctccatgcccagcctgaagggggagggccctgaggtggatgtgaacctgcccaaggcagatgtggtggtgtctggccccaaggtggacatcgaggccccagatgtgtccctggagggccctgagggcaagctgaagggccccaagttcaagatgcctgagatgcacttcaagacccccaagatctccatgccagatgtggacctgcacctgaagggccccaaggtgaagggagatgtggatgtgtctgtgcccaaggtggagggggagatgaaggtgcctgatgtggagatcaagggccccaagatggacattgatgccccagatgtggaggtgcagggccctgactggcacctgaagatgcccaagatgaagatgcccaagttctccatgcctggcttcaagggggagggccgggaggtggatgtgaacctgcccaaggctgacattgatgtgtctggccccaaggtggatgtggaggtgcctgatgtgtccctggagggccctgagggcaagctgaagggccccaagttcaagatgcctgagatgcacttcaaggcccccaagatctccatgccagatgtggacctgaacctgaagggccccaagctgaagggagatgtggatgtgtccctgcctgaggtggagggggagatgaaggtgcctgatgtggacatcaagggccccaaggtggacatcagcgccccagatgtggatgtgcacggccctgactggcacctgaagatgcccaaggtgaagatgcccaagttctccatgcctggcttcaagggggagggccctgaggtggatgtgaagctgcccaaggcagatgtggatgtgtctggccccaagatggatgctgaggtgcctgatgtgaacatcgagggcccagatgccaagctgaagggccccaagttcaagatgcctgagatgagcatcaagccccagaagatcagcatcccagatgtgggcctgcacctgaagggccccaagatgaagggggactatgatgtgacagtgcccaaggtggagggggagatcaaggccccagatgtggacatcaagggccccaaggtggacatcaatgccccagatgtggaggtgcacggccctgactggcacctgaagatgcccaaggtgaagatgcccaagttctccatgcctggcttcaagggggagggccctgaggtggacatgaacctgcccaaggctgacctgggcgtgtctggccccaaggtggacattgatgtgcctgatgtgaacctggaggcccctgagggcaagctgaagggccccaagttcaagatgcccagcatgaacatccagacccacaagatctccatgccagatgtgggcctgaacctgaaggcccccaagctgaagacagatgtggatgtgtccctgcccaaggtggagggggacctgaagggccctgagattgatgtgaaggcccccaagatggatgtgaatgtgggggacattgatattgagggccctgagggcaagctgaagggccccaagttcaagatgcctgagatgcacttcaaggcccccaagatctccatgccagatgtggacctgcacctgaagggccccaaggtgaagggggacatggatgtgtctgtgcccaaggtggagggggagatgaaggtgcctgatgtggacatcaagggccccaaggtggacattgatgccccagatgtggaggtgcatgaccctgactggcacctgaagatgcccaagatgaagatgcccaagttctccatgcctggcttcaaggccgagggccctgaggtggatgtgaacctgcccaaggctgacattgatgtgtctggccccagcgtggacacagatgccccagacctggacatcgagggccctgagggcaagctgaagggcagcaagttcaagatgcccaagctgaacatcaaggcccccaaggtgtccatgccagatgtggacctgaacctgaagggccccaagctgaagggggagattgatgcctctgtgcctgagctggagggggacctgcggggcccccaggtggatgtgaagggcccctttgtggaggccgaggtgcctgatgtggacctggagtgcccagatgccaagctgaagggccccaagttcaagatgcctgagatgcacttcaaggcccccaagatctccatgccagatgtggacctgcacctgaagggccccaaggtgaagggagatgctgatgtgtctgtgcccaagctggagggggacctgaccggccccagcgtgggcgtggaggtgcctgatgtggagctggagtgcccagatgccaagctgaagggccccaagttcaagatgccagacatgcacttcaaggcccccaagatctccatgccagatgtggacctgcacctgaagggccccaaggtgaagggagatgtggatgtgtctgtgcccaagctggagggggacctgaccggccccagcgtgggcgtggaggtgcctgatgtggagctggagtgcccagatgccaagctgaagggccccaagttcaagatgcctgagatgcacttcaagacccccaagatctccatgccagatgtggacctgcacctgaagggccccaaggtgaagggggacatggatgtgtctgtgcccaaggtggagggggagatgaaggtgcctgatgtggacatcaagggccccaagatggacattgatgccccagatgtggatgtgcacggccctgactggcacctgaagatgcccaagatgaagatgcccaagttctccatgcctggcttcaaggccgagggccctgaggtggatgtgaacctgcccaaggcagatgtggtggtgtctggccccaaggtggatgtggaggtgcctgatgtgtccctggagggccctgagggcaagctgaagggccccaagctgaagatgcctgagatgcacttcaaggcccccaagatctccatgccagatgtggacctgcacctgaagggccccaaggtgaagggagatgtggatgtgtccctgcccaagctggagggggacctgaccggccccagcgtggatgtggaggtgcctgatgtggagctggagtgcccagatgccaagctgaagggccccaagttcaagatgcctgagatgcacttcaagacccccaagatctccatgccagatgtgaacctgaacctgaagggccccaaggtgaagggggacatggatgtgtctgtgcccaaggtggagggggagatgaaggtgcctgatgtggacatccggggccccaaggtggacattgatgccccagatgtggatgtgcacggccctgactggcacctgaagatgcccaagatgaagatgcccaagttctccatgcctggcttcaagggggagggccctgaggtggatgtgaacctgcccaaggcagatgtggatgtgtctggccccaaggtggatgtggaggtgcctgatgtgtccctggagggccctgagggcaagctgaagggccccaagttcaagatgcctgagatgcacttcaagacccccaagatctccatgccagatgtggacttcaacctgaagggccccaagatcaagggagatgtggatgtgtctgcccccaagctggagggggagctgaagggccctgagctggatgtgaagggccccaagctggatgctgacatgcctgaggtggccgtggagggccccaacgggaagtggaagacccccaagttcaagatgccagacatgcacttcaaggcccccaagatctccatgccagacctggacctgcacctgaagagccccaaggccaagggggaggtggatgtggatgtgcccaagctggagggggacctgaagggcccccacgtggatgtgtctggccctgacattgatattgagggccctgagggcaagctgaagggccccaagttcaagatgccagacatgcacttcaaggcccccaacatctccatgccagatgtggacctgaacctgaagggccccaagatcaagggagatgtggatgtgtctgtgcctgaggtggagggcaagctggaggtgcctgacatgaacatccggggccccaaggtggatgtgaatgccccagatgtgcaggccccagactggcacctgaagatgcccaagatgaagatgcccaagttctccatgcctggcttcaaggccgagggccctgaggtggatgtgaacctgcccaaggcagatgtggacatcagcggccccaaggtggacatcgagggcccagatgtgaacatcgagggccctgagggcaagctgaagggccccaagctgaagatgcctgagatgaacatcaaggcccccaagatctccatgccagactttgacctgcacctgaagggccccaaggtgaagggagatgtggatgtgtccctgcccaaggtggagggggacctgaagggccctgaggtggacatcaagggccccaaggtggacatcaatgccccagatgtgggcgtgcagggccctgactggcacctgaagatgcccaaggtgaagatgcccaagttctccatgcctggcttcaagggggagggcccagatggagatgtgaagctgcccaaggctgacattgatgtgtctggccccaaggtggacatcgagggcccagatgtgaacatcgagggccctgagggcaagctgaagggccccaagttcaagatgcctgagatgaacatcaaggcccccaagatctccatgccagacatcgacctgaacctgaagggccccaaggtgaagggagatgtggatgtgtccctgcccaaggtggagggggacctgaagggccctgaggtggacatcaagggccccaaggtggacattgatgccccagatgtggatgtgcacggccctgactggcacctgaagatgcccaagatcaagatgcccaagatctccatgcctggcttcaagggggagggcccagatgtggatgtgaacctgcccaaggctgacattgatgtgtctggccccaaggtggatgtggagtgcccagatgtgaacatcgagggccctgagggcaagtggaagagccccaagttcaagatgcctgagatgcacttcaagacccccaagatctccatgccagacatcgacctgaacctgaccggccccaagatcaagggagatgtggatgtgacaggccccaaggtggagggggacctgaagggccctgaggtggacctgaagggccccaaggtggacattgatgtgcctgatgtgaatgtgcagggccctgactggcacctgaagatgcccaagatgaagatgcccaagttctccatgcctggcttcaaggccgagggccctgaggtggatgtgaacctgcccaaggcagatgtggatgtgtctggccccaaggtggatgtggagggcccagatgtgaacatcgagggccctgagggcaagctgaagggccccaagttcaagatgcctgagatgaacatcaaggcccccaagatccccatgccagactttgacctgcacctgaagggccccaaggtgaagggagatgtggacatcagcctgcccaaggtggagggggacctgaagggccctgaggtggacatccggggcccccaggtggacattgatgtgcctgatgtgggcgtgcagggccctgactggcacctgaagatgcccaaggtgaagatgcccaagttctccatgcctggcttcaagggggagggcccagatgtggatgtgaacctgcccaaggctgacctggatgtgtctggccccaaggtggacattgatgtgcctgatgtgaacatcgagggccctgagggcaagctgaagggccccaagttcaagatgcctgagatgaacatcaaggcccccaagatctccatgccagacatcgacctgaacctgaagggccccaaggtgaagggggacatggatgtgtccctgcccaaggtggagggggacatgaaggtgcctgatgtggacatcaagggccccaaggtggacatcaatgccccagatgtggatgtgcagggccctgactggcacctgaagatgcccaagatcaagatgcccaagatctccatgcctggcttcaagggggagggccctgaggtggatgtgaacctgcccaaggctgacctggatgtgtctggccccaaggtggatgtggatgtgcctgatgtgaacatcgagggcccagatgccaagctgaagggccccaagttcaagatgcctgagatgaacatcaaggcccccaagatctccatgccagacctggacctgaacctgaagggccccaagatgaagggggaggtggatgtgtccctggccaacgtggagggggacctgaagggccctgccctggacatcaagggccccaagattgatgtggatgccccagacatcgacatccacggcccagatgccaagctgaagggccccaagctgaagatgccagacatgcacgtgaacatgcccaagatctccatgcctgagattgacctgaacctgaagggcagcaagctgaagggagatgtggatgtgtctggccccaagctggagggggacatcaaggcccccagcctggacatcaagggccctgaggtggatgtgtctggccccaagctgaacatcgagggcaagagcaagaagagccgcttcaagctgcccaagttcaacttcagcggcagcaaggtgcagaccccagaggtggatgtgaagggcaagaagccagacatcgacatcaccggccccaaggtggacatcaatgccccagatgtggaggtgcagggcaaggtgaagggcagcaagttcaagatgcccttcctgagcatcagcagccccaaggtgtccatgccagatgtggagctgaacctgaagagccccaaggtgaagggggacctggacattgctggccccaacctggagggggacttcaagggccccaaggtggacatcaaggcccctgaggtgaacctgaatgccccagatgtggatgtgcacggccctgactggaacctgaagatgcccaagatgaagatgcccaagttctctgtgtctggcctgaaggccgagggcccagatgtggccgtggacctgcccaagggggacatcaacatcgagggccccagcatgaacatcgagggccctgacctgaatgtggagggccctgagggcggcctgaagggccccaagttcaagatgccagacatgaacatcaaggcccccaagatctccatgccagacatcgacctgaacctgaagggccccaaggtgaagggagatgtggacatcagcctgcccaagctggagggggacctgaagggccctgaggtggacatcaagggccccaaggtggacatcaatgccccagatgtggatgtgcacggccctgactggcacctgaagatgcccaaggtgaagatgcccaagttctccatgcctggcttcaagggggagggccctgaggtggatgtgaccctgcccaaggctgacatcgacatcagcggccccaacgtggatgtggatgtgcctgatgtgaacatcgagggcccagatgccaagctgaagggccccaagttcaagatgcctgagatgaacatcaaggcccccaagatctccatgccagactttgacctgaacctgaagggccccaagatgaagggagatgtggtggtgtccctgcccaaggtggagggggacctgaagggccctgaggtggacatcaagggccccaaggtggacatcgacaccccagacatcaacatcgagggcagcgagggcaagttcaagggccccaagttcaagatccctgagatgcacctgaaggcccccaagatctccatgccagacatcgacctgaacctgaagggccccaaggtgaagggagatgtggatgtgtccctgcccaagatggagggggacctgaagggccctgaggtggacatcaagggccccaaggtggacatcaatgccccagatgtggatgtgcagggccctgactggcacctgaagatgcccaaggtgaagatgcccaagttctccatgcctggcttcaagggggagggcccagatgtggatgtgaacctgcccaaggctgacctggatgtgtctggccccaaggtggacattgatgtgcctgatgtgaacatcgagggccctgagggcaagctgaagggccccaagttcaagatgcctgagatgaacatcaaggcccccaagatctccatgccagacatcgacctgaacctgaagggccccaaggtgaagggggacatggatgtgtccctgcccaaggtggagggggacatgcaggtgcctgacctggacatcaagggccccaaggtggacatcaatgccccagatgtggatgtgcggggccctgactggcacctgaagatgcccaagatcaagatgcccaagatctccatgcctggcttcaagggggagggccctgaggtggatgtgaacctgcccaaggctgacctggatgtgtctggccccaaggtggatgtggatgtgcctgatgtgaacatcgagggcccagatgccaagctgaagggccccaagttcaagatgcctgagatgaacatcaaggcccccaagatctccatgccagactttgacctgcacctgaagggccccaaggtgaagggagatgtggatgtgtccctgcccaagatggagggggacctgaaggcccctgaggtggacatcaagggccccaaggtggacattgatgccccagatgtggatgtgcacggccctgactggcacctgaagatgcccaaggtgaagatgcccaagttctccatgcctggcttcaagggggagggccctgaggtggatgtgaacctgcccaaggctgacattgatgtgtctggccccaaggtggacatcgacaccccagacatcgacatccacggccctgagggcaagctgaagggccccaagttcaagatgccagacctgcacctgaaggcccccaagatctccatgcctgaggtggacctgaacctgaagggccccaagatgaagggagatgtggatgtgtccctgcccaaggtggagggggacctgaagggccctgaggtggacatcaagggccccaaggtggacattgatgtgcctgatgtggatgtgcagggccctgactggcacctgaagatgcccaaggtgaagatgcccaagttctccatgcctggcttcaagggggagggcccagatgtggatgtgaacctgcccaaggctgacctggatgtgtctggccccaaggtggacattgatgtgcctgatgtgaacatcgagggcccagatgccaagctgaagggccccaagttcaagatgcctgagatgaacatcaaggcccccaagatctccatgccagactttgacctgcacctgaagggccccaaggtgaagggagatgtggatgtgtccctgcccaaggtggagggggacctgaagggccctgaggtggacatcaagggccccaaggtggacattgatgccccagatgtggatgtgcacggccctgactggcacctgaagatgcccaaggtgaagatgcccaagttctccatgcctggcttcaagggggagggcccagatgtggatgtgaccctgcccaaggctgacatcgagatcagcggccccaaggtggacattgatgccccagatgtgtccattgagggcccagatgccaagctgaagggccccaagttcaagatgcctgagatgaacatcaaggcccccaagatctccatgccagacatcgacttcaacctgaagggccccaaggtgaagggagatgtggatgtgtccctgcccaaggtggagggggacctgaagggccctgagattgacatcaagggccccagcctggacatcgacaccccagatgtgaacatcgagggccctgagggcaagctgaagggccccaagttcaagatgcctgagatgaacatcaaggcccccaagatctccatgccagactttgacctgcacctgaagggccccaaggtgaagggagatgtggatgtgtccctgcccaaggtggagagtgacctgaagggccctgaggtggacatcgagggccctgagggcaagctgaagggccccaagttcaagatgccagatgtgcacttcaagagcccccagatctccatgtctgacatcgacctgaacctgaagggccccaagatcaagggggacatggacatctctgtgcccaagctggagggggacctgaagggccccaaggtggatgtgaagggccccaaggtgggcatcgacaccccagacatcgacatccacggccctgagggcaagctgaagggccccaagttcaagatgccagacctgcacctgaaggcccccaagatctccatgcctgaggtggacctgaacctgaagggccccaaggtgaagggggacatggacatcagcctgcccaaggtggagggggacctgaagggccctgaggtggacatccgggaccccaaggtggacattgatgtgcctgatgtggatgtgcagggccctgactggcacctgaagatgcccaaggtgaagatgcccaagttctccatgcctggcttcaagggggagggcccagatgtggatgtgaacctgcccaaggctgacattgatgtgtctggccccaaggtggatgtggatgtgcctgatgtgaacatcgagggcccagatgccaagctgaagggccccaagttcaagatgcctgagatgagcatcaaggcccccaagatctccatgccagacatcgacctgaacctgaagggccccaaggtgaagggagatgtggatgtgaccctgcccaaggtggagggggacctgaagggccctgaggccgacatcaagggccccaaggtggacatcaacaccccagatgtggatgtgcacggccctgactggcacctgaagatgcccaaggtgaagatgcccaagttctccatgcctggcttcaagggggagggcccagatgtggatgtgtccctgcccaaggctgacattgatgtgtctggccccaaggtggatgtggacatcccagatgtgaacatcgagggcccagatgccaagctgaagggccccaagttcaagatgcctgagatcaacatcaaggcccccaagatcagcatcccagatgtggacctggacctgaagggccccaaggtgaagggggactttgatgtgtctgtgcccaaggtggagggcaccctgaagggccctgaggtggacctgaagggcccccggctggactttgagggcccagatgccaagctgagcggccccagcctgaagatgcccagcctggagatcagcgcccccaaggtgacagccccagatgtggacctgcacctgaaggcccccaagattggcttcagcggccccaagctggagggcggggaggtggacctgaagggccccaaggtggaggcccccagcctggatgtgcacatggacagcccagacatcaacatcgagggcccagatgtgaagatccccaagttcaagaagcccaagtttggatttggagccaagagccccaaggctgacatcaagagccccagcctggatgtgacagtgcctgaggccgagctgaacctggagaccccagagatctctgtgggcggcaagggcaagaagagcaagttcaagatgcccaagatccacatgagcggccccaagatcaaggccaagaagcagggctttgacctgaatgtgcctggaggagaaattgatgccagcctgaaggccccagatgtggatgtgaacattgctggcccagatgctgccctgaaggtggatgtgaagagccccaagaccaagaagaccatgtttgggaagatgtacttcccagatgtggagtttgacatcaagagccccaagttcaaggccgaggcccccctgcccagccccaagctggagggggagctgcaggccccagacctggagctgagcctgcctgccatccacgtggagggcctggacatcaaggccaaggcccccaaggtgaagatgccagatgtggacatctctgtgcccaagattgaaggagacctgaagggccccaaggtgcaggccaacctgggcgccccagacatcaacatcgagggcctggatgccaaggtgaagacccccagctttggcatcagcgccccccaggtgtccatcccagatgtgaatgtgaacctgaagggccccaagatcaagggagatgtgcccagcgtgggcctggagggcccagatgtggacctgcagggccctgaggccaagatcaagttccccaagttctccatgcccaagattggcatccctggggtgaagatggagggcggcggcgctgaggtgcacgcccagctgcccagcctggagggggacctgcggggcccagatgtgaagctggagggcccagatgtgtccctgaagggccctggggtggacctgcccagcgtgaacctgtccatgcccaaggtgtctggccctgacctggacctgaacctgaagggccccagcctgaagggggacctggatgcctctgtgcccagcatgaaggtgcacgcccctggcctgaacctgagcggcgtgggcggcaagatgcaggtgggcggagatggagtgaaggtgcccggcattgatgccaccaccaagctgaatgtgggcgccccagatgtgaccctgcggggccccagcctgcagggcgacctggccgtgtctggggacatcaagtgccccaaggtgtctgtgggcgccccagacctgagcctggaggccagcgagggcagcatcaagctgcccaagatgaagctgccccagtttggcatcagcaccccaggcagtgacctgcacgtgaatgccaagggcccccaggtgtctggagagctgaagggccctggggtggatgtgaacctgaagggcccccgcatcagcgccccaaatgtggacttcaacctggagggccccaaggtgaagggcagcctgggcgccaccggggagatcaagggccccaccgtgggcggcggcctgcccggcattggagtgcagggcctggagggcaacctgcagatgcctggcatcaagagcagcggctgtgatgtgaacctgcccggggtgaatgtgaagctgcccaccggccagatcagcggccctgagatcaagggcggcctgaagggcagcgaggtgggcttccatggagctgccccagacatctctgtgaagggccctgccttcaacatggccagccctgagagtgactttggcatcaacctgaagggccccaagatcaagggcggcgcagatgtgtctggaggagtgtctgccccagacatcagcctgggggagggccacctgtctgtgaagggcagcggcggggagtggaagggcccccaggtgagcagcgccctgaacctggacaccagcaagtttgctgggggcctgcacttcagcggccccaaggtggagggcggcgtgaagggcggccagatcggcctgcaggcccctggcctgtctgtgtctggcccccagggccacctggagagcggcagcggcaaggtgaccttccccaagatgaagatccccaagttcaccttcagcggccgggagctggtgggccgggagatgggcgtggatgtgcacttccccaaggccgaggccagcatccaggccggggctggagatggagagtgggaggagagcgaggtgaagctgaagaagagcaagatcaagatgcccaagttcaacttcagcaagcccaagggcaaaggaggagtgacaggcagccctgaggccagcatcagcggcagcaagggggacctgaagagcagcaaggccagcctgggcagcctggagggggaggccgaggccgaggccagcagccccaagggcaagttcagcctcttcaagagcaagaagcccaggcacaggagcaacagcttcagtgatgagcgggagttcagcggccccagcacccccaccggcaccctggagtttgaaggaggagaggtgtccctggagggcggcaaggtgaagggcaagcacggcaagctgaagtttggcacctttggaggcctgggcagcaagagcaagggccactatgaggtgactggaagtgatgatgaaacaggcaagctgcagggcagcggcgtgtccctggccagcaagaagagccggctgagcagcagcagcagcaatgacagcggcaacaaggtgggcatccagctgcctgaggtggagctgtctgtgtccaccaagaaggagtag

SEQ ID NO: 18291 - DNA, 372 bp, synthetic construct
  misc_feature 1..372: note = Description of Artificial Sequence: Synthetic coding sequence
  source 1..372: mol_type = other DNA
atggagaaggaggagaccacccgggagctgctgctgcccaactggcagggcagcggcagccacggcctgaccatcgcccagagagatgatggagtgtttgtgcaggaggtgacccagaacagccctgctgccaggactggagtggtgaaggagggggaccagatcgtgggcgccaccatctactttgacaacctgcagagcggggaggtgacccagctgctgaacaccatgggccaccacacagtgggcctgaagctgcacaggaaaggagacaggagccctgagcccggccagacctggacccgggaggtgttcagcagctgcagcagcgaggtggtgctgtctggagatgatgaggagtaccagaggtag

SEQ ID NO: 18292 - DNA, 435 bp, synthetic construct
  misc_feature 1..435: note = Description of Artificial Sequence: Synthetic coding sequence
  source 1..435: mol_type = other DNA
atggagaaggaggagaccacccgggagctgctgctgcccaactggcagggcagcggcagccacggcctgaccatcgcccagagagatgatggagtgtttgtgcaggaggtgacccagaacagccctgctgccaggactggagtggtgaaggagggggaccagatcgtgggcgccaccatctactttgacaacctgcagagcggggaggtgacccagctgctgaacaccatgggccaccacacagtgggcctgaagctgcacaggaaaggagacaggagccctgagcccggccagacctggacccgggaggtgttcagcagctgcagcagcgaggtggtgctgtctggagatgatgaggagtaccagaggatctacaccaccaagatcaagccccggctgaagtcagaagatggagtggagggggacctgggctag

SEQ ID NO: 18293 - DNA, 261 bp, synthetic construct
  misc_feature 1..261: note = Description of Artificial Sequence: Synthetic coding sequence
  source 1..261: mol_type = other DNA
atggagaaggaggagaccacccgggagctgctgctgcccaactggcagggcagcggcagccacggcctgaccatcgcccagagagatgatggagtgtttgtgcaggaggtgacccagaacagccctgctgccaggactggagtggtgaaggagggggaccagatcgtgggcgccaccatctactttgacaacctgcagagcggggaggtgacccagctgctgaacaccatgggccaccacacagtgggcctgaagctgtag

SEQ ID NO: 18294 - DNA, 366 bp, synthetic construct
  misc_feature 1..366: note = Description of Artificial Sequence: Synthetic coding sequence
  source 1..366: mol_type = other DNA
atggagaaggaggagaccacccgggagctgctgctgcccaactggcagggcagcggcagccacggcctgaccatcgcccagagagatgatggagtgtttgtgcaggaggtgacccagaacagccctgctgccaggactggagtggtgaaggagggggaccagatcgtgggcgccaccatctactttgacaacctgcagagcggggaggtgacccagctgctgaacaccatgggccaccacacagtgggcctgaagctgcacaggaaaggagacaggagccctgagcccggccagacctggacccgggaggtgttcagcagctgcagcagcgaggtggtgctgaacaccccccagcccagcgcctag

SEQ ID NO: 18295 - DNA, 2904 bp, synthetic construct
  misc_feature 1..2904: note = Description of Artificial Sequence: Synthetic coding sequence
  source 1..2904: mol_type = other DNA
atggccaagggcttctacatcagcaagagcctgggcatcctgggcatcctgctgggcgtggccgctgtgtgcaccatcatcgccctgtctgtggtgtacagccaggagaagaacaagaatgccaacagcagccctgtggccagcaccacccccagcgccagcgccaccaccaacccagccagcgccaccaccctggaccagagcaaggcctggaaccgctaccgcctgcccaacaccctgaagccagacagctacagagtgaccctgcggccctacctgaccccaaatgaccggggcctgtatgtgttcaagggcagcagcacagtgcgcttcacctgcaaggaggccacagatgtgatcatcatccacagcaagaagctgaactacaccctgagccagggccaccgggtggtgctgcggggcgtgggcggcagccagcccccagacatcgacaagacagagctggtggagcccacagagtacctggtggtgcacctgaagggcagcctggtgaaggacagccagtatgagatggacagcgagtttgaaggagagctggctgatgacctggccggcttctacagaagtgagtacatggagggcaatgtgaggaaggtggtggccaccacccagatgcaggccgcagatgccaggaagagcttcccctgctttgatgagcccgccatgaaggccgagttcaacatcaccctcatccaccccaaggacctgacagccctgagcaacatgctgcccaagggccccagcacccccctgcctgaggaccccaactggaatgtgacagagttccacaccacccccaagatgagcacctacctgctggccttcatcgtgtctgaatttgattatgtggagaagcaggccagcaatggagtgctgatccgcatctgggcccggcccagcgccatcgctgctggccatggagactatgccctgaatgtgacaggccccatcctgaacttctttgctggccactatgacaccccctaccccctgcccaagagtgaccagatcggcctgcctgacttcaatgctggggccatggagaactggggcctggtgacctaccgggagaacagcctgctgtttgaccccctgagcagcagcagcagcaacaaggagcgggtggtgaccgtcatcgcccacgagctggcccaccagtggtttggaaacctggtgaccatcgagtggtggaatgacctgtggctgaatgaaggatttgccagctatgtggagtacctgggcgctgactatgcagagcccacctggaacctgaaggacctgatggtgctgaatgatgtgtacagagtgatggctgtggatgccctggccagcagccaccccctgagcaccccagccagcgagatcaacaccccagcccagatcagcgagctgtttgatgccatctcctacagcaaaggagcctctgtgctgaggatgctgagcagcttcctgtctgaagatgtgttcaagcagggcctggccagctacctgcacacctttgcctaccagaacaccatctacctgaacctgtgggaccacctgcaggaggccgtgaacaacagaagcatccagctgcccaccaccgtgcgggacatcatgaaccgctggaccctgcagatgggcttccctgtgatcaccgtggacaccagcacaggcaccctgagccaggagcacttcctgctggaccctgacagcaatgtgacccggcccagcgagttcaactacgtgtggatcgtgcccatcaccagcatcagagatggccggcagcagcaggactactggctgattgatgtgcgggcccagaatgacctcttcagcaccagcggaaatgagtgggtgctgctgaacctgaatgtgacaggctactacagagtgaactatgatgaggagaactggaggaagatccagacccagctgcagagggaccacagcgccatccctgtgatcaacagagcccagatcatcaatgatgccttcaacctggccagcgcccacaaggtgcctgtgaccctggccctgaacaacaccctcttcctgattgaggagcggcagtacatgccctgggaggccgccctgagcagcctgagctacttcaagctgatgtttgacagaagtgaggtgtatggccccatgaagaactacctgaagaagcaggtgacccccctcttcatccacttcaggaacaacaccaacaactggagggagatccctgagaacctgatggaccagtacagcgaggtgaatgccatcagcacagcctgcagcaatggagtgcctgaatgtgaggagatggtgtctggcctcttcaagcagtggatggagaaccccaacaacaaccccatccaccccaacctgcggagcacagtgtactgcaatgccatcgcccagggcggggaggaggagtgggactttgcctgggagcagttcagaaatgccaccctggtgaatgaagctgacaagctgcgggccgccctggcctgcagcaaggagctgtggatcctgaaccgctacctgagctacaccctgaacccagacctgatcaggaagcaggatgccaccagcaccatcatcagcatcaccaacaacgtgattggccagggcctggtgtgggactttgtgcagagcaactggaagaagctgttcaatgactatggaggcggcagcttctccttcagcaacctgatccaggccgtgacccggcgcttcagcacagaatatgagctgcagcagctggagcagttcaagaaggacaatgaggagaccggcttcggcagcggcacccgggccctggagcaggccctggagaagaccaaggccaacatcaagtgggtgaaggagaacaaggaggtggtgctgcagtggttcacagagaacagcaagtag

SEQ ID NO: 18296 - DNA, 312 bp, synthetic construct
  misc_feature 1..312: note = Description of Artificial Sequence: Synthetic coding sequence
  source 1..312: mol_type = other DNA
atggccaagggcttctacatcagcaagagcctgggcatcctgggcatcctgctgggcgtggccgctgtgtgcaccatcatcgccctgtctgtggtgtacagccaggagaagaacaagaatgccaacagcagccctgtggccagcaccacccccagcgccagcgccaccaccaacccagccagcgccaccaccctggaccagagcaaggcctggaaccgctaccgcctgcccaacaccctgaagccagacagctacagagtgaccctgcggccctacctgaccccaaatgaccggggcctgtatgtgttctag

SEQ ID NO: 18297 - DNA, 186 bp, synthetic construct
  misc_feature 1..186: note = Description of Artificial Sequence: Synthetic coding sequence
  source 1..186: mol_type = other DNA
atggccaagggcttctacatcagcaagagcctgggcatcctgggcatcctgctgggcgtggccgctgtgtgcaccatcatcgccctgtctgtggtgtacagccaggagaagaacaagaatgccaacagcagccctgtggccagcaccacccccagcgccagcgccaccaccaacccagccagctag

SEQ ID NO: 18298 - DNA, 381 bp, synthetic construct
  misc_feature 1..381: note = Description of Artificial Sequence: Synthetic coding sequence
  source 1..381: mol_type = other DNA
atgaaccagaacacagacaagatcagcggcagcggcagcaacagcgacatgatggagaacagcaaggaggagggcaccagcagcagcgagaagagcaagagcagcggcagcagccgcagcaagaggaagcccagcatcgtgaccaagtatgtggagagtgatgatgagaagcccctggatgatgaaacagtgaatgaagatgccagcaatgaaaattctgaaaatgacatcaccatgcagagcctgcccaagggcaccgtcatcgtgcagcctgagcctgtgctgaatgaagacaaggatgacttcaagggccctgagttccgcagccgcagcaagatgaagacagagaacctgaagaagaggggcggcaagtacaagtag

SEQ ID NO: 18299 - DNA, 7479 bp, synthetic construct
  misc_feature 1..7479: note = Description of Artificial Sequence: Synthetic coding sequence
  source 1..7479: mol_type = other DNA
atgacagctgagcccatgtctgagagcaagctgaacaccctggtgcagaagctgcatgacttcctggcccacagcagcgaggagagcgaggagaccagcagccccccccggctggccatgaaccagaacacagacaagatcagcggcagcggcagcaacagcgacatgatggagaacagcaaggaggagggcaccagcagcagcgagaagagcaagagcagcggcagcagccgcagcaagaggaagcccagcatcgtgaccaagtatgtggagagtgatgatgagaagcccctggatgatgagaccgtgaatgaagatgccagcaatgaaaattctgaaaatgacatcaccatgcagagcctgcccaagggcaccgtgattgtgcagcctgagcctgtgctgaatgaagacaaggatgacttcaagggccctgagttccgcagccgcagcaagatgaagacagagaacctgaagaagagaggagaagatggcctgcacggcatcgtgtcctgcacagcctgtggccagcaggtgaaccacttccagaaggacagcatctaccgccaccccagcctgcaggtgctgatctgcaagaactgcttcaagtactacatgtctgatgacatcagccgggacagtgatggcatggatgagcagtgccgctggtgtgccgagggcggcaacctgatctgctgtgacttctgccacaatgccttctgcaagaagtgcatcctgaggaacctgggcaggaaggagctgagcaccatcatggatgagaacaaccagtggtactgctacatctgccaccctgagcccctgctggacctggtgacagcctgcaacagcgtgtttgagaacctggagcagctgctgcagcagaacaagaagaagatcaaggtggacagcgagaagagcaacaaggtgtatgagcacaccagccgcttcagccccaagaagaccagcagcaactgcaatggagaggagaagaagctggatgacagctgcagcggctctgtgacctacagctacagcgccctgattgtgcccaaggagatgatcaagaaggccaagaagctgattgagaccacagccaacatgaacagcagctatgtgaagttcctgaagcaggccacagacaacagcgagatcagcagcgccaccaagctgcggcagctgaaggccttcaagtctgtgctggccgacatcaagaaggcccacctggccctggaggaggacctgaacagcgagttccgggccatggatgctgtgaacaaggagaagaacaccaaggagcacaaggtgattgatgccaagtttgagaccaaggccaggaaaggagagaagccctgtgccctggagaagaaggacatcagcaagtctgaggccaagctgagcaggaagcaggtggacagcgagcacatgcaccagaatgtgcccacagaggagcagaggaccaacaagagcactggaggagagcacaagaagagtgacaggaaggaggagccccagtatgagcccgccaacaccagcgaggacctggacatggacatcgtgtctgtgcccagctctgtgcctgaggacatctttgagaacctggagacagccatggaggtgcagagctctgtggaccaccagggagatggcagcagcggcacagagcaggaggtggagagcagctctgtgaagctgaacatcagcagcaaggacaacagaggaggcatcaagagcaagaccacagccaaggtgaccaaggagctgtatgtgaagctgacccctgtgtccctgagcaacagccccatcaagggagctgactgccaggaggtgccccaggacaaggatggctacaagagctgtggcctgaaccccaagctggagaagtgtggcctgggccaggagaacagcgacaatgagcacctggtggagaatgaggtgtccctgctgctggaggagagtgacctgcggcgcagcccccgggtgaagaccacccccctgcggcggcccacagagaccaaccctgtgaccagcaacagtgatgaggagtgcaatgagaccgtgaaggagaagcagaagctgtctgtgcctgtgaggaagaaggacaagaggaacagcagtgacagcgccatcgacaaccccaagcccaacaagctgcccaagagcaagcagagcgagaccgtggaccagaacagcgacagtgatgagatgctggccatcctgaaggaggtgtccaggatgagccacagcagcagcagtgacacagacatcaatgagatccacaccaaccacaagaccctgtatgacctgaagacccaggccggcaaggatgacaagggcaagaggaagaggaagagcagcaccagcggcagtgactttgacaccaagaagggcaagagcgccaagagcagcatcatcagcaagaagaagaggcagacccagagcgagagcagcaactatgattctgagctggagaaggagatcaagtccatgagcaagattggagctgcccggaccaccaagaagaggatccccaacaccaaggactttgacagcagtgaagatgagaagcacagcaagaagggcatggacaaccagggccacaagaacctgaagaccagccaggagggcagcagtgatgatgctgagaggaagcaggagcgggagaccttcagcagcgctgagggcaccgtggacaaggacaccaccatcatggagctgcgggaccggctgcccaagaagcagcaggccagcgccagcacagatggagtggacaagctgagcggcaaggagcagagcttcaccagcctggaggtgaggaaggtggccgagaccaaggagaagagcaagcacctgaagaccaagacctgcaagaaggtgcaggacggcctgagtgacattgctgagaagttcctgaagaaggaccagagtgatgagaccagtgaagatgacaagaagcagagcaagaagggcacagaggagaagaagaagcccagcgacttcaagaagaaggtgatcaagatggagcagcagtatgagagcagcagtgatggaacagagaagctgcctgagcgggaggagatctgccacttccccaagggcatcaagcagatcaagaatggcaccacagatggagagaagaagagcaagaagatccgggacaagaccagcaagaagaaggatgagctgagtgactatgcagagaagagcacaggcaagggggacagctgtgacagcagcgaggacaagaagagcaagaatggagcctacggccgggagaagaagcgctgcaagctgctgggcaagagcagcaggaagaggcaggactgcagcagcagtgacacagagaagtacagcatgaaggaggatggctgcaacagcagtgacaagaggctgaagagaattgagctgcgggagaggaggaacctgagcagcaagaggaacaccaaggagatccagagcggcagcagcagcagtgatgctgaggagagcagcgaggacaacaagaagaagaagcagaggaccagcagcaagaagaaggccgtcatcgtgaaggagaagaagaggaacagcctgcggaccagcaccaagaggaagcaggccgacatcaccagcagcagcagcagtgacattgaagatgatgaccagaacagcatcggggagggcagcagtgatgagcagaagatcaagcctgtgacagagaacctggtgctgagcagccacacaggcttctgccagagcagtggagatgaggccctgagcaagtctgtgcctgtgacagtggatgatgatgatgatgacaatgaccctgagaacagaattgccaagaagatgctgctggaggagatcaaggccaacctgagcagtgatgaagatggcagcagtgatgatgagcctgaggagggcaagaagaggacaggcaagcagaatgaagaaaatcctggagatgaggaggccaagaaccaggtgaacagcgagagtgacagcgacagcgaggagagcaagaagccccgctaccgccaccggctgctgcggcacaagctgactgtgtctgatggagagagcggggaggagaagaagaccaagcccaaggagcacaaggaggtgaagggcaggaacagaaggaaggtgtccagtgaagattctgaggacagcgacttccaggagagcggcgtgtctgaggaggtgtctgagagtgaagatgagcagaggcccaggaccaggtctgccaagaaggccgagctggaggagaaccagaggagctacaagcagaagaagaagagaagacgcatcaaggtgcaggaggacagcagcagcgagaacaagagcaacagcgaggaggaggaggaggagaaggaggaggaggaggaggaggaggaggaggaggaggaggaggaggaggatgaaaatgatgacagcaagagccctggaaaaggaaggaagaagatcaggaagatcctgaaggatgacaagctgaggacagagacccagaatgccctgaaggaggaggaggagaggaggaagagaattgctgagcgggagcgggagcgggagaagctgcgggaggtgattgaaattgaagatgccagccccaccaagtgccccatcaccaccaagctggtgctggatgaagatgaggagaccaaggagcccctggtgcaggtgcacaggaacatggtgatcaagctgaagccccaccaggtggatggagtgcagttcatgtgggactgctgctgtgagagcgtgaagaagaccaagaagagccctggcagcggctgcatcctggcccactgcatgggcctgggcaagaccctgcaggtggtgtccttcctgcacacagtgctgctgtgtgacaagctggacttcagcacagccctggtggtgtgccccctgaacacagccctgaactggatgaatgaatttgagaagtggcaggagggcctgaaggatgatgagaagctggaggtgtctgagctggccaccgtgaagaggccccaggagaggagctacatgctgcagcgctggcaggaggatggaggagtgatgatcatcggctatgagatgtacagaaacctggcccagggcagaaatgtgaagagcaggaagctgaaggagatcttcaacaaggccctggtggaccccggccctgactttgtggtgtgtgatgagggccacatcctgaagaatgaggccagcgctgtgtccaaggccatgaacagcatccgcagcagaagacgcatcatcctgaccggcacccccctgcagaacaacctgattgagtaccactgcatggtgaacttcatcaaggagaacctgctgggcagcatcaaggagttcaggaaccgcttcatcaaccccatccagaatggccagtgtgccgacagcaccatggtggatgtgcgggtgatgaagaagagggcccacatcctgtatgagatgctggccggctgtgtgcagaggaaggactacacagccctgaccaagttcctgccccccaagcatgaatatgtgctggccgtgaggatgaccagcatccagtgcaagctgtaccagtactacctggaccacctgactggagtgggcaacaacagcgagggcggccggggcaaggccggggccaagctgttccaggacttccagatgctgagccgcatctggacccacccctggtgcctgcagctggactacatcagcaaagaaaataaaggctactttgatgaggacagcatggatgagttcatcgccagtgacagtgatgagacctccatgagcctgagcagtgatgactacaccaagaagaagaagaagggcaagaagggcaagaaggacagcagcagcagcggcagcggcagtgacaatgatgtggaggtgatcaaggtgtggaacagccgcagccggggcggcggggagggcaatgtggatgaaacaggcaacaaccccagcgtgtccctgaagctggaggagagcaaggccaccagcagcagcaaccccagcagccctgccccagactggtacaaggactttgtgacagatgctgatgctgaggtgctggagcacagcggcaagatggtgctgctgtttgagatcctgaggatggccgaggagattggagacaaggtgctggtgttcagccagagcctcatcagcctggacctgattgaggacttcctggagctggccagccgggagaagacagaggacaaggacaagcccctcatctacaagggggagggcaagtggctgagaaatattgactactaccgcctggatggcagcaccacagcccagagcaggaagaagtgggccgaggagttcaatgatgagaccaacgtgcggggccgcctcttcatcatcagcaccaaggccggcagcctgggcatcaacctggtggccgccaacagagtcatcatctttgatgcctcctggaaccccagctatgacatccagagcatcttccgggtgtaccgcttcggccagaccaagcctgtgtatgtgtaccgcttcctggcccagggcaccatggaggacaagatctatgaccggcaggtgaccaagcagagcctgtccttccgggtggtggaccagcagcaggtggagcggcacttcaccatgaatgagctgacagagctgtacacctttgagccagacctgctggatgaccccaacagcgagaagaagaagaagagggacacccccatgctgcccaaggacaccatcctggccgagctgctgcagatccacaaggagcacatcgtgggctaccacgagcatgacagcctgctggaccacaaggaggaggaggagctgacagaggaggagaggaaggccgcctgggccgagtatgaggccgagaagaagggcctgaccatgaggttcaacatccccaccggcaccaacctgccccctgtgtccttcaacagccagaccccctacatccccttcaacctgggcgccctgagcgccatgagcaaccagcagctggaggacctgatcaaccagggccgggagaaggtggtggaggccaccaacagcgtgacagctgtgcgcatccagcccctggaggacatcatctctgctgtgtggaaggagaacatgaacctgtctgaggcccaggtgcaggccctggccctgagccggcaggccagccaggagctggatgtgaagaggcgggaggccatctacaatgatgtgctgaccaagcagcagatgctgatcagctgtgtgcagaggatcctgatgaacagaaggctgcagcagcagtacaaccagcagcagcagcagcagatgacctaccagcaggccaccctgggccacctgatgatgcccaagccacccaacctgatcatgaaccccagcaactaccagcagattgacatgaggggcatgtaccagcctgtggccggcggcatgcagcccccacccctgcagagggcccccccacccatgaggagcaagaaccctggccccagccagggcaagtccatgtag

SEQ ID NO: 18300 - DNA, 7365 bp, synthetic construct
  misc_feature 1..7365: note = Description of Artificial Sequence: Synthetic coding sequence
  source 1..7365: mol_type = other DNA
atgacagctgagcccatgtctgagagcaagctgaacaccctggtgcagaagctgcatgacttcctggcccacagcagcgaggagagcgaggagaccagcagccccccccggctggccatgaaccagaacacagacaagatcagcggcagcggcagcaacagcgacatgatggagaacagcaaggaggagggcaccagcagcagcgagaagagcaagagcagcggcagcagccgcagcaagaggaagcccagcatcgtgaccaagtatgtggagagtgatgatgagaagcccctggatgatgagaccgtgaatgaagatgccagcaatgaaaattctgaaaatgacatcaccatgcagagcctgcccaaggaggatggcctgcacggcatcgtgtcctgcacagcctgtggccagcaggtgaaccacttccagaaggacagcatctaccgccaccccagcctgcaggtgctgatctgcaagaactgcttcaagtactacatgtctgatgacatcagccgggacagtgatggcatggatgagcagtgccgctggtgtgccgagggcggcaacctgatctgctgtgacttctgccacaatgccttctgcaagaagtgcatcctgaggaacctgggcaggaaggagctgagcaccatcatggatgagaacaaccagtggtactgctacatctgccaccctgagcccctgctggacctggtgacagcctgcaacagcgtgtttgagaacctggagcagctgctgcagcagaacaagaagaagatcaaggtggacagcgagaagagcaacaaggtgtatgagcacaccagccgcttcagccccaagaagaccagcagcaactgcaatggagaggagaagaagctggatgacagctgcagcggctctgtgacctacagctacagcgccctgattgtgcccaaggagatgatcaagaaggccaagaagctgattgagaccacagccaacatgaacagcagctatgtgaagttcctgaagcaggccacagacaacagcgagatcagcagcgccaccaagctgcggcagctgaaggccttcaagtctgtgctggccgacatcaagaaggcccacctggccctggaggaggacctgaacagcgagttccgggccatggatgctgtgaacaaggagaagaacaccaaggagcacaaggtgattgatgccaagtttgagaccaaggccaggaaaggagagaagccctgtgccctggagaagaaggacatcagcaagtctgaggccaagctgagcaggaagcaggtggacagcgagcacatgcaccagaatgtgcccacagaggagcagaggaccaacaagagcactggaggagagcacaagaagagtgacaggaaggaggagccccagtatgagcccgccaacaccagcgaggacctggacatggacatcgtgtctgtgcccagctctgtgcctgaggacatctttgagaacctggagacagccatggaggtgcagagctctgtggaccaccagggagatggcagcagcggcacagagcaggaggtggagagcagctctgtgaagctgaacatcagcagcaaggacaacagaggaggcatcaagagcaagaccacagccaaggtgaccaaggagctgtatgtgaagctgacccctgtgtccctgagcaacagccccatcaagggagctgactgccaggaggtgccccaggacaaggatggctacaagagctgtggcctgaaccccaagctggagaagtgtggcctgggccaggagaacagcgacaatgagcacctggtggagaatgaggtgtccctgctgctggaggagagtgacctgcggcgcagcccccgggtgaagaccacccccctgcggcggcccacagagaccaaccctgtgaccagcaacagtgatgaggagtgcaatgagaccgtgaaggagaagcagaagctgtctgtgcctgtgaggaagaaggacaagaggaacagcagtgacagcgccatcgacaaccccaagcccaacaagctgcccaagagcaagcagagcgagaccgtggaccagaacagcgacagtgatgagatgctggccatcctgaaggaggtgtccaggatgagccacagcagcagcagtgacacagacatcaatgagatccacaccaaccacaagaccctgtatgacctgaagacccaggccggcaaggatgacaagggcaagaggaagaggaagagcagcaccagcggcagtgactttgacaccaagaagggcaagagcgccaagagcagcatcatcagcaagaagaagaggcagacccagagcgagagcagcaactatgattctgagctggagaaggagatcaagtccatgagcaagattggagctgcccggaccaccaagaagaggatccccaacaccaaggactttgacagcagtgaagatgagaagcacagcaagaagggcatggacaaccagggccacaagaacctgaagaccagccaggagggcagcagtgatgatgctgagaggaagcaggagcgggagaccttcagcagcgctgagggcaccgtggacaaggacaccaccatcatggagctgcgggaccggctgcccaagaagcagcaggccagcgccagcacagatggagtggacaagctgagcggcaaggagcagagcttcaccagcctggaggtgaggaaggtggccgagaccaaggagaagagcaagcacctgaagaccaagacctgcaagaaggtgcaggacggcctgagtgacattgctgagaagttcctgaagaaggaccagagtgatgagaccagtgaagatgacaagaagcagagcaagaagggcacagaggagaagaagaagcccagcgacttcaagaagaaggtgatcaagatggagcagcagtatgagagcagcagtgatggaacagagaagctgcctgagcgggaggagatctgccacttccccaagggcatcaagcagatcaagaatggcaccacagatggagagaagaagagcaagaagatccgggacaagaccagcaagaagaaggatgagctgagtgactatgcagagaagagcacaggcaagggggacagctgtgacagcagcgaggacaagaagagcaagaatggagcctacggccgggagaagaagcgctgcaagctgctgggcaagagcagcaggaagaggcaggactgcagcagcagtgacacagagaagtacagcatgaaggaggatggctgcaacagcagtgacaagaggctgaagagaattgagctgcgggagaggaggaacctgagcagcaagaggaacaccaaggagatccagagcggcagcagcagcagtgatgctgaggagagcagcgaggacaacaagaagaagaagcagaggaccagcagcaagaagaaggccgtcatcgtgaaggagaagaagaggaacagcctgcggaccagcaccaagaggaagcaggccgacatcaccagcagcagcagcagtgacattgaagatgatgaccagaacagcatcggggagggcagcagtgatgagcagaagatcaagcctgtgacagagaacctggtgctgagcagccacacaggcttctgccagagcagtggagatgaggccctgagcaagtctgtgcctgtgacagtggatgatgatgatgatgacaatgaccctgagaacagaattgccaagaagatgctgctggaggagatcaaggccaacctgagcagtgatgaagatggcagcagtgatgatgagcctgaggagggcaagaagaggacaggcaagcagaatgaagaaaatcctggagatgaggaggccaagaaccaggtgaacagcgagagtgacagcgacagcgaggagagcaagaagccccgctaccgccaccggctgctgcggcacaagctgactgtgtctgatggagagagcggggaggagaagaagaccaagcccaaggagcacaaggaggtgaagggcaggaacagaaggaaggtgtccagtgaagattctgaggacagcgacttccaggagagcggcgtgtctgaggaggtgtctgagagtgaagatgagcagaggcccaggaccaggtctgccaagaaggccgagctggaggagaaccagaggagctacaagcagaagaagaagagaagacgcatcaaggtgcaggaggacagcagcagcgagaacaagagcaacagcgaggaggaggaggaggagaaggaggaggaggaggaggaggaggaggaggaggaggaggaggaggaggatgaaaatgatgacagcaagagccctggaaaaggaaggaagaagatcaggaagatcctgaaggatgacaagctgaggacagagacccagaatgccctgaaggaggaggaggagaggaggaagagaattgctgagcgggagcgggagcgggagaagctgcgggaggtgattgaaattgaagatgccagccccaccaagtgccccatcaccaccaagctggtgctggatgaagatgaggagaccaaggagcccctggtgcaggtgcacaggaacatggtgatcaagctgaagccccaccaggtggatggagtgcagttcatgtgggactgctgctgtgagagcgtgaagaagaccaagaagagccctggcagcggctgcatcctggcccactgcatgggcctgggcaagaccctgcaggtggtgtccttcctgcacacagtgctgctgtgtgacaagctggacttcagcacagccctggtggtgtgccccctgaacacagccctgaactggatgaatgaatttgagaagtggcaggagggcctgaaggatgatgagaagctggaggtgtctgagctggccaccgtgaagaggccccaggagaggagctacatgctgcagcgctggcaggaggatggaggagtgatgatcatcggctatgagatgtacagaaacctggcccagggcagaaatgtgaagagcaggaagctgaaggagatcttcaacaaggccctggtggaccccggccctgactttgtggtgtgtgatgagggccacatcctgaagaatgaggccagcgctgtgtccaaggccatgaacagcatccgcagcagaagacgcatcatcctgaccggcacccccctgcagaacaacctgattgagtaccactgcatggtgaacttcatcaaggagaacctgctgggcagcatcaaggagttcaggaaccgcttcatcaaccccatccagaatggccagtgtgccgacagcaccatggtggatgtgcgggtgatgaagaagagggcccacatcctgtatgagatgctggccggctgtgtgcagaggaaggactacacagccctgaccaagttcctgccccccaagcatgaatatgtgctggccgtgaggatgaccagcatccagtgcaagctgtaccagtactacctggaccacctgactggagtgggcaacaacagcgagggcggccggggcaaggccggggccaagctgttccaggacttccagatgctgagccgcatctggacccacccctggtgcctgcagctggactacatcagcaaagaaaataaaggctactttgatgaggacagcatggatgagttcatcgccagtgacagtgatgagacctccatgagcctgagcagtgatgactacaccaagaagaagaagaagggcaagaagggcaagaaggacagcagcagcagcggcagcggcagtgacaatgatgtggaggtgatcaaggtgtggaacagccgcagccggggcggcggggagggcaatgtggatgaaacaggcaacaaccccagcgtgtccctgaagctggaggagagcaaggccaccagcagcagcaaccccagcagccctgccccagactggtacaaggactttgtgacagatgctgatgctgaggtgctggagcacagcggcaagatggtgctgctgtttgagatcctgaggatggccgaggagattggagacaaggtgctggtgttcagccagagcctcatcagcctggacctgattgaggacttcctggagctggccagccgggagaagacagaggacaaggacaagcccctcatctacaagggggagggcaagtggctgagaaatattgactactaccgcctggatggcagcaccacagcccagagcaggaagaagtgggccgaggagttcaatgatgagaccaacgtgcggggccgcctcttcatcatcagcaccaaggccggcagcctgggcatcaacctggtggccgccaacagagtcatcatctttgatgcctcctggaaccccagctatgacatccagagcatcttccgggtgtaccgcttcggccagaccaagcctgtgtatgtgtaccgcttcctggcccagggcaccatggaggacaagatctatgaccggcaggtgaccaagcagagcctgtccttccgggtggtggaccagcagcaggtggagcggcacttcaccatgaatgagctgacagagctgtacacctttgagccagacctgctggatgaccccaacagcgagaagaagaagaagagggacacccccatgctgcccaaggacaccatcctggccgagctgctgcagatccacaaggagcacatcgtgggctaccacgagcatgacagcctgctggaccacaaggaggaggaggagctgacagaggaggagaggaaggccgcctgggccgagtatgaggccgagaagaagggcctgaccatgaggttcaacatccccaccggcaccaacctgccccctgtgtccttcaacagccagaccccctacatccccttcaacctgggcgccctgagcgccatgagcaaccagcagctggaggacctgatcaaccagggccgggagaaggtggtggaggccaccaacagcgtgacagctgtgcgcatccagcccctggaggacatcatctctgctgtgtggaaggagaacatgaacctgtctgaggcccaggtgcaggccctggccctgagccggcaggccagccaggagctggatgtgaagaggcgggaggccatctacaatgatgtgctgaccaagcagcagatgctgatcagctgtgtgcagaggatcctgatgaacagaaggctgcagcagcagtacaaccagcagcagcagcagcagatgacctaccagcaggccaccctgggccacctgatgatgcccaagccacccaacctgatcatgaaccccagcaactaccagcagattgacatgaggggcatgtaccagcctgtggccggcggcatgcagcccccacccctgcagagggcccccccacccatgaggagcaagaaccctggccccagccagggcaagtccatgtag

SEQ ID NO: 18301 - DNA, 369 bp, synthetic construct
  misc_feature 1..369: note = Description of Artificial Sequence: Synthetic coding sequence
  source 1..369: mol_type = other DNA
atcaactacaacagagacaagatcagcggcagcggcagcaacagcgacatgatggagaacagcaaggaggagggcaccagcagcagcgagaagagcaagagcagcggcagcagccgcagcaagaggaagcccagcatcgtgaccaagtatgtggagagtgatgatgagaagcccctggatgatgaaacagtgaatgaagatgccagcaatgaaaattctgaaaatgacatcaccatgcagagcctgcccaagggcaccgtcatcgtgcagcctgagcctgtgctgaatgaagacaaggatgacttcaagggccctgagttccgcagccgcagcaagatgaagacagagaacctgaagaagaggggctag

SEQ ID NO: 18302 - DNA, 4038 bp, synthetic construct
  misc_feature 1..4038: note = Description of Artificial Sequence: Synthetic coding sequence
  source 1..4038: mol_type = other DNA
atgtctgagagcaagctgaacaccctggtgcagaagctgcatgacttcctggcccacagcagcgaggagagcgaggagaccagcagccccccccggctggccatgaaccagaacacagacaagatcagcggcagcggcagcaacagcgacatgatggagaacagcaaggaggagggcaccagcagcagcgagaagagcaagagcagcggcagcagccgcagcaagaggaagcccagcatcgtgaccaagtatgtggagagtgatgatgagaagcccctggatgatgaaacagtgaatgaagatgccagcaatgaaaattctgaaaatgacatcaccatgcagagcctgcccaaggatggcctgcacggcatcgtgtcctgcacagcctgtggccagcaggtgaaccacttccagaaggacagcatctaccgccaccccagcctgcaggtgctgatctgcaagaactgcttcaagtactacatgtctgatgacatcagccgggacagtgatggcatggatgagcagtgccgctggtgtgccgagggcggcaacctgatctgctgtgacttctgccacaatgccttctgcaagaagtgcatcctgaggaacctgggcaggaaggagctgagcaccatcatggatgagaacaaccagtggtactgctacatctgccaccctgagcccctgctggacctggtgacagcctgcaacagcgtgtttgagaacctggagcagctgctgcagcagaacaagaagaagatcaaggtggacagcgagaagagcaacaaggtgtatgagcacaccagccgcttcagccccaagaagaccagcagcaactgcaatggagaggagaagaagctggatgacagctgcagcggctctgtgacctacagctacagcgccctgattgtgcccaaggagatgatcaagaaggccaagaagctgattgagaccacagccaacatgaacagcagctatgtgaagttcctgaagcaggccacagacaacagcgagatcagcagcgccaccaagctgcggcagctgaaggccttcaagtctgtgctggccgacatcaagaaggcccacctggccctggaggaggacctgaacagcgagttccgggccatggatgctgtgaacaaggagaagaacaccaaggagcacaaggtgattgatgccaagtttgagaccaaggccaggaaaggagagaagccctgtgccctggagaagaaggacatcagcaagtctgaggccaagctgagcaggaagcaggtggacagcgagcacatgcaccagaatgtgcccacagaggagcagaggaccaacaagagcactggaggagagcacaagaagagtgacaggaaggaggagccccagtatgagcccgccaacaccagcgaggacctggacatggacatcgtgtctgtgcccagctctgtgcctgaggacatctttgagaacctggagacagccatggaggtgcagagctctgtggaccaccagggagatggcagcagcggcacagagcaggaggtggagagcagctctgtgaagctgaacatcagcagcaaggacaacagaggaggagctgactgccaggaggtgccccaggacaaggatggctacaagagctgtggcctgaaccccaagctggagaagtgtggcctgggccaggagaacagcgacaatgagcacctggtggagaatgaggtgtccctgctgctggaggagagtgacctgcggcgcagcccccgggtgaagaccacccccctgcggcggcccacagagaccaaccctgtgaccagcaacagtgatgaagaatgtaatgaaacagtgaaggagaagcagaagctgtctgtgcctgtgaggaagaaggacaagaggaacagcagtgacagcgccatcgacaaccccaagcccaacaagctgcccaagagcaagcagagcgagaccgtggaccagaacagcgacagtgatgagatgctggccatcctgaaggaggtgtccaggatgagccacagcagcagcagtgacacagacatcaatgagatccacaccaaccacaagaccctgtatgacctgaagacccaggccggcaaggatgacaagggcaagaggaagaggaagagcagcaccagcggcagtgactttgacaccaagaagggcaagagcgccaagagcagcatcatcagcaagaagaagaggcagacccagagcgagagcagcaactatgacagcgagctggagaaggagatcaagtccatgagcaagatcggggccgcccggaccaccaagaagaggatccccaacaccaaggactttgacagcagtgaagatgagaagcacagcaagaagggcatggacaaccagggccacaagaacctgaagaccagccaggagggcagcagtgatgatgctgagaggaagcaggagcgggagaccttcagcagcgctgagggcaccgtggacaaggacaccaccatcatggagctgcgggaccggctgcccaagaagcagcaggccagcgccagcacagatggagtggacaagctgagcggcaaggagcagagcttcaccagcctggaggtgaggaaggtggccgagaccaaggagaagagcaagcacctgaagaccaagacctgcaagaaggtgcaggacggcctgagtgacattgctgagaagttcctgaagaaggaccagagtgatgagaccagtgaagatgacaagaagcagagcaagaagggcacagaggagaagaagaagcccagcgacttcaagaagaaggtgatcaagatggagcagcagtatgagagcagcagtgatggaacagagaagctgcctgagcgggaggagatctgccacttccccaagggcatcaagcagatcaagaatggcaccacagatggagagaagaagagcaagaagatccgggacaagaccagcaagaagaaggatgagctgagtgactatgcagagaagagcactggaaaaggagacagctgtgacagcagcgaggacaagaagagcaagaatggagcctacggccgggagaagaagcgctgcaagctgctgggcaagagcagcaggaagaggcaggactgcagcagcagtgacacagagaagtacagcatgaaggaggatggctgcaacagcagtgacaagaggctgaagagaattgagctgcgggagaggaggaacctgagcagcaagaggaacaccaaggagatccagagcggcagcagcagcagtgatgctgaggagagcagcgaggacaacaagaagaagaagcagaggaccagcagcaagaagaaggctgtgattgtgaaggagaagaagaggaacagcctgcggaccagcaccaagaggaagcaggccgacatcaccagcagcagcagcagtgacattgaagatgatgaccagaacagcattggagagggcagcagtgatgagcagaagatcaagcctgtgacagagaacctggtgctgagcagccacacaggcttctgccagagcagtggagatgaggccctgagcaagtctgtgcctgtgacagtggatgatgatgatgatgacaatgaccctgaaaatcgcatcgccaagaagatgctgctggaggagatcaaggccaacctgagcagtgatgaagatggcagcagtgatgatgagcctgaggagggcaagaagaggacaggcaagcagaatgaggagaaccctggagatgaggaggccaagaaccaggtgaacagcgagagtgacagcgacagcgaggagagcaagaagccccgctaccgccaccggctgctgcggcacaagctgactgtgtctgatggagagagcggggaggagaagaagaccaagcccaaggagcacaaggaggtgaagggcaggaacagaaggaaggtgtcctctgaggacagtgaagattctgacttccaggagagcggcgtgtctgaggaggtgtctgagagtgaagatgagcagaggcccaggaccaggtctgccaagaaggccgagctggaggagaaccagaggagctag

SEQ ID NO: 18303 - DNA, 483 bp, synthetic construct
  misc_feature 1..483: note = Description of Artificial Sequence: Synthetic coding sequence
  source 1..483: mol_type = other DNA
tgaccagactttgtggtgtgtgatgagggccacatcctgaagaatgaggccagcgctgtgtccaaggccatgaacagcatccgcagcagaagacgcatcatcctgaccggcacccccctgcagaacaacctgattgagtaccactgcatggtgaacttcatcaaggagaacctgctgggcagcatcaaggagttcaggaaccgcttcatcaaccccatccagaatggccagtgtgccgacagcaccatggtggatgtgcgggtgatgaagaagagggcccacatcctgtatgagatgctggccggctgtgtgcagaggaaggactacacagccctgaccaagttcctgccccccaagcatgaatatgtgctggccgtgaggatgaccagcatccagtgcaagctgtaccagtactacctggaccacctgactgtgctgcacctgaacaagatgggcatgctgaagagcatcaagtacttctag

SEQ ID NO: 18304 - DNA, 2514 bp, synthetic construct
  misc_feature 1..2514: note = Description of Artificial Sequence: Synthetic coding sequence
  source 1..2514: mol_type = other DNA
atgaaccacctggagggcagcgctgaggtggaggtgacagatgaggccgccggcggggaggtgaatgaatctgtggaggccgacctggagcaccctgaggtggaggaggagcagcagcagcccccccagcagcagcactacgtgggccgccaccagaggggccgggccctggaggacctgcgggcccagctgggccaggaggaggaggagagaggagaatgtctggcccggagcgccagcacagaaagtggcttccacaaccacacagacacagcagaaggagatgtgattgctgctgccagagatggctatgatgctgagcgggcccaggaccctgaagatgagagcgcctatgctgtgcagtacagacctgaggccgaggagtacacagagcaggccgaggccgagcacgccgaggccacccacagaagagccctgcccaaccacctgcacttccacagcctggagcacgaggaggccatgaatgctgcctacagcggctacgtgtacacccacaggctcttccacagaggagaagatgagccctacagcgagccctatgctgactatggaggcctgcaggagcacgtgtatgaggagattggagatgcccctgagctggatgccagagatggcctgcggctgtatgagcaggagagagatgaagctgctgcctaccggcaggaggccctgggcgcccggctgcaccactatgatgagaggagtgatggagagagtgacagccctgagaaggaggccgagtttgccccctaccccaggatggacagctatgagcaggaggaggacatcgaccagatcgtggccgaggtgaagcagagcatgagcagccagagcctggacaaggctgctgaggacatgcctgaggccgagcaggacctggagaggcctcccaccccagctgggggccgcccagacagccctggcctgcaggccccagctggccagcagagagctgtgggccctgctgggggcggggaggccggccagcgctacagcaaggagaagagagatgccatcagcctggccatcaaggacatcaaggaggccatcgaggaggtgaagaccaggaccatccgcagcccctacaccccagatgagcccaaggagcccatctgggtgatgaggcaggacatcagccccacccgggactgtgatgaccagaggcccatggatggagacagccccagccctggcagcagcagccccctgggcgctgagagcagcagcaccagcctgcaccccagcgaccctgtggaggccagcaccaacaaggagagcaggaagagcctggccagcttccccacctacgtggaggtgcccggcccctgtgaccctgaggacctgattgatggcatcatctttgctgccaactacctgggcagcacccagctgctgagtgacaagacccccagcaagaatgtgaggatgatgcaggcccaggaggccgtgagccgcatcaagatggcccagaagctggccaagagcaggaagaaggcccctgagggggagagccagcccatgacagaggtggacctcttcatcagcacccagaggatcaaggtgctgaatgctgacacccaggagaccatgatggaccaccccctgcggaccatctcctacatcgctgacatcggcaacatcgtggtgctgatggcccggcggaggatgcccaggagcaacagccaggagaatgtggaggccagccaccccagccaggacggcaagaggcagtacaagatgatctgccacgtgtttgaaagtgaagatgcccagctgattgcccagagcatcggccaggccttctctgtggcctaccaggagttcctgcgggccaacggcatcaaccctgaggacctgagccagaaggagtacagcgacctgctgaacacccaggacatgtacaatgatgacctgatccacttcagcaagtctgagaactgcaaggatgtgttcatcgagaagcagaagggggagatcctgggcgtggtgattgtggagagcggctggggcagcatcctgcccaccgtcatcatcgccaacatgatgcacggcggccctgctgagaagagcggcaagctgaacatcggggaccagatcatgagcatcaatggcaccagcctggtgggcctgcccctgagcacctgccagagcatcatcaagggcctgaagaaccagagccgggtgaagctgaacatcgtgcgctgcccccctgtgaccaccgtgctgatcagaagaccagacctgcgctaccagctgggcttctctgtgcagaatggcatcatctgcagcctgatgaggggcggcattgctgagcggggcggcgtgcgggtgggccaccgcatcatcgagatcaatggccagagcgtggtggccacccctcatgagaagatcgtgcacatcctgagcaatgctgtgggggagatccacatgaagaccatgcctgctgccatgtaccgcctgctgacagcccaggagcagcctgtgtacatctag

SEQ ID NO: 18305 - DNA, 2469 bp, synthetic construct
  misc_feature 1..2469: note = Description of Artificial Sequence: Synthetic coding sequence
  source 1..2469: mol_type = other DNA
atggctgctgctgtggtggtggccgagggggacagcgacagccggcccggccaggagctgctggtggcctggaacacagtgtccacaggcctggtgcccccagctgccctgggcctggtgagcagcaggaccagcggggctgtgccccccaaggaggaggagctgcgggctgctgtggaggtgctgcggggccacggcctgcacagcgtgctggaggagtggtttgtggaggtgctgcagaatgacctgcaggccaacatcagccctgagttctggaatgccatcagccagtgtgaaaattctgcagatgagccccagtgcctgctgctgctgctggatgccttcggcctgctggagagccggctggacccctacctgcggagcctggagctgctggagaagtggacccggctgggcctgctgatgggcaccggggcccagggcctgcgggaggaggtgcacaccatgctgcggggcgtgctcttcttcagcacccccaggaccttccaggagatgatccagaggctgtatggctgcttcctgcgggtgtacatgcagagcaagaggaagggggagggcggcacagatcctgagctggagggggagctggacagccgctatgcccggcggcgctactaccgcctgctgcagagccccctgtgtgccggctgcagcagtgacaagcagcagtgctggtgccggcaggccctggagcagttccaccagctgagccaggtgctgcaccggctgagcctgctggagcgggtgtctgctgaggccgtgaccaccaccctgcaccaggtgacccgggagaggatggaggaccgctgccgcggggagtatgaaagaagcttcctgcgggagttccacaagtggattgagcgggtggtgggctggctgggcaaggtgttcctgcaggacggccctgcccggcctgccagccctgaggccggcaacaccctgcggcgctggcgctgccacgtgcagcgcttcttctaccgcatctatgccagcctgagaattgaggagctgttcagcatcgtgcgggacttcccagacagcaggcctgccatcgaggacctgaagtactgcctggagaggacagaccagaggcagcagctgctggtgtccctgaaggccgccctggagacccggctgctgcaccctggggtgaacacctgtgacatcatcaccctgtacatcagcgccatcaaggccctgcgggtgctggaccccagcatggtgatcctggaggtggcctgtgagcccatccgccgctacctgcggacccgggaggacacagtgcggcagatcgtggccggcctgactggagacagtgatggcactggagacctggccgtggagctgagcaagacagatcctgccagcctggagaccggccaggacagtgaagatgacagcggggagcctgaggactgggtgcctgaccctgtggatgctgaccccgggaagagcagcagcaagaggaggagcagtgacatcatcagcctgctggtgtccatctacggcagcaaggacctcttcatcaatgagtaccgcagcctgctggccgaccggctgctgcaccagttctccttcagccctgagcgggagatcagaaatgtggagctgctgaagctgcgctttggagaggcccccatgcacttctgtgaggtgatgctgaaggacatggctgacagccgccgcatcaatgccaacatccgggaggaggatgagaagaggcctgctgaggagcagcccccatttggagtgtatgctgtgatcctgagcagcgagttctggccacccttcaaggatgagaagctggaggtgcctgaggacatccgggccgccctggaggcctactgcaagaagtatgagcagctgaaggccatgaggaccctgtcctggaagcacaccctgggcctggtgaccatggatgtggagctggccgacaggaccctgtctgtggccgtgacccctgtgcaggccgtcatcctgctgtacttccaggaccaggcctcctggaccctggaggagctgagcaaggctgtgaagatgcctgtggccctgctgcggcggaggatgtctgtgtggctgcagcagggcgtgctgcgggaggagcccccaggcaccttcagcgtcatcgaggaggagcggccccaggaccgggacaacatggtgctgattgacagtgatgatgaaagtgacagcggcatggccagccaggccgaccagaaggaggaggagctgctgctcttctggacctacatccaggccatgctgaccaacctggagagcctgagcctggaccgcatctacaacatgctgaggatgtttgtggtgactggacctgccctggccgagattgacctgcaggagctgcagggctacctgcagaagaaggtgcgggaccagcagctggtgtacagcgctggggtgtaccgcctgcccaagaactgcagctag

SEQ ID NO: 18306 - DNA, 4863 bp, synthetic construct
  misc_feature 1..4863: note = Description of Artificial Sequence: Synthetic coding sequence
  source 1..4863: mol_type = other DNA
atgggcgccatcggcctgctgtggctgctgcccctgctgctgagcacagctgctgtgggcagcggcatgggcaccggccagagagctggcagccctgctgctggcccccccctgcagccccgggagcccctgagctacagccggctgcagaggaagagcctggccgtggactttgtggtgcccagcctcttccgggtgtatgcccgggacctgctgctgccccccagcagcagcgagctgaaggccggccggcctgaggcccggggcagcctggccctggactgtgcccccctgctgcggctgctgggccctgcccctggggtgtcctggacagctggcagccctgccccagctgaggcccggaccctgagccgggtgctgaagggcggctctgtgaggaagctgcggcgggccaagcagctggtgctggagctgggggaggaggccatcctggagggctgtgtgggccccccaggagaggccgctgtgggcctgctgcagttcaacctgtctgagctgttctcctggtggatccggcagggcgagggccgcctgcgcatccggctgatgcctgagaagaaggccagcgaggtgggccgggagggccgcctgtctgctgccatccgggccagccagccccggctgctcttccagatcttcggcaccggccacagcagcctggagagccccaccaacatgcccagccccagcccagactacttcacctggaacctgacctggatcatgaaggacagcttccccttcctgagccacaggagccgctatggcctggagtgcagctttgacttcccctgtgagctggagtacagcccccccctgcatgacctgaggaaccagagctggagctggaggcgcatccccagcgaggaggccagccagatggacctgctggatggccctggagctgagaggagcaaggagatgccccggggcagcttcctgctgctgaacaccagcgctgacagcaagcacaccatcctgagcccctggatgaggagcagcagcgagcactgcaccctggccgtgtctgtgcaccgccacctgcagcccagcggccgctacatcgcccagctgctgccccacaatgaagctgcccgggagatcctgctgatgcccaccccaggcaagcacggctggacagtgctgcagggcagaattggccgcccagacaaccccttccgggtggccctggagtacatcagcagcggcaacagaagcctgtctgctgtggacttctttgccctgaagaactgcagcgagggcaccagccctggcagcaagatggccctgcagagcagcttcacctgctggaatggaacagtgctgcagctgggccaggcctgtgacttccaccaggactgtgcccagggagaagatgagagccagatgtgcaggaagctgcctgtgggcttctactgcaactttgaagatggcttctgtggctggacccagggcaccctgagcccccacaccccccagtggcaggtgaggaccctgaaggatgcccgcttccaggaccaccaggaccacgccctgctgctgagcaccacagatgtgcctgccagcgagagcgccaccgtgaccagcgccaccttccctgcccccatcaagagcagcccctgtgagctgaggatgtcctggctgatccggggcgtgctgcggggaaatgtgtccctggtgctggtggagaacaagacaggcaaggagcagggccgcatggtgtggcacgtggccgcctatgagggcctgagcctgtggcagtggatggtgctgcccctgctggatgtgtctgaccgcttctggctgcagatggtggcctggtggggccagggcagccgggccatcgtggcctttgacaacatcagcatcagcctggactgctacctgaccatctctggagaggacaagatcctgcagaacacagcccccaagagcaggaacctgtttgagaggaaccccaacaaggagctgaagccaggagagaacagcccccggcagacccccatctttgaccccaccgtgcactggctgttcaccacctgtggggccagcggcccccacggccccacccaggcccagtgcaacaatgcctaccagaacagcaacctgtctgtggaggtgggcagcgagggccccctgaagggcatccagatctggaaggtgcctgccacagacacctacagcatcagcggctatggagctgctgggggcaaaggaggcaagaacaccatgatgaggagccatggagtgtctgtgctgggcatcttcaacctggagaaggatgacatgctgtacatcctggtgggccagcagggagaagatgcctgccccagcaccaaccagctgatccagaaggtgtgcattggagaaaataatgtgattgaggaggagatccgggtgaacagatctgtgcatgagtgggccggcggcggcggcggcggcggcggggccacctacgtgttcaagatgaaggatggagtgcctgtgcccctcatcatcgccgccggcggcggcggccgggcctatggagccaagacagacaccttccaccctgagcggctggagaacaacagctctgtgctgggcctgaatggaaacagcggggctgctgggggcggcggcggctggaatgacaacaccagcctgctgtgggccggcaagagcctgcaggagggcgccactggaggccacagctgcccccaggccatgaagaagtggggctgggagacccggggcggctttggaggcggcggcggcggctgcagcagcggcggcggcggcggcggctacatcggcggcaatgctgccagcaacaatgaccctgagatggatggagaagatggagtgtccttcatcagccccctgggcatcctgtacaccccagccctgaaggtgatggagggccacggggaggtgaacatcaagcactacctgaactgcagccactgtgaggtggatgagtgccacatggaccctgagagccacaaggtgatctgcttctgtgaccacggcaccgtgctggccgaggatggagtgtcctgcatcgtgagccccaccccagagccccacctgcccctgagcctcatcctgtctgtggtgaccagcgccctggtggccgccctggtgctggccttcagcggcatcatgattgtgtacagaaggaagcaccaggagctgcaggccatgcagatggagctgcagagccctgagtacaagctgagcaagctgcggaccagcaccatcatgacagactacaaccccaactactgctttgctgggaagaccagcagcatcagtgacctgaaggaggtgcccaggaagaacatcaccctcatccggggcctgggccacggggcctttggagaggtgtatgagggccaggtgtctggcatgcccaatgaccccagccccctgcaggtggccgtgaagaccctgcctgaggtgtgcagcgagcaggatgagctggacttcctgatggaggccctgatcatcagcaagttcaaccaccagaacatcgtgcgctgcattggagtgtccctgcagagcctgccccgcttcatcctgctggagctgatggccggcggggacctgaagagcttcctgcgggagacccggccccggcccagccagcccagcagcctggccatgctggacctgctgcacgtggcccgggacatcgcctgtggctgccagtacctggaggagaaccacttcatccaccgggacattgctgccaggaactgcctgctgacctgccccggccctggccgggtggccaagatcggggactttggcatggcccgggacatctaccgggccagctactacagaaaaggaggctgtgccatgctgcctgtgaagtggatgcctcctgaggccttcatggagggcatcttcaccagcaagacagacacctggagctttggagtgctgctgtgggagatcttcagcctgggctacatgccctaccccagcaagagcaaccaggaggtgctggagtttgtgaccagcggcggccgcatggacccccccaagaactgccccggccctgtgtaccgcatcatgacccagtgctggcagcaccagccagaagatcggcccaactttgccatcatcctggagagaattgagtactgcacccaggaccctgatgtgatcaacacagccctgcccattgaatatggccccctggtggaggaggaggagaaggtgcctgtgcggcccaaggaccctgagggcgtgccccccctgctggtgtcccagcaggccaagcgggaggaggagaggagccctgctgcccccccacccctgcccaccaccagcagcggcaaggccgccaagaagcccacagctgctgagatctctgtgcgggtgccccggggccctgctgtggagggcggccacgtgaacatggccttcagccagagcaaccccccatctgagctgcacaaggtgcacggcagcaggaacaagcccaccagcctgtggaaccccacctacggctcctggttcacagagaagcccaccaagaagaacaaccccatcgccaagaaggagccccatgaccggggcaacctgggcctggagggcagctgcaccgtgccccccaacgtggccaccggccgcctgcccggggccagcctgctgctggagcccagcagcctgacagccaacatgaaggaggtgcccctcttccggctgcggcacttcccctgtggaaatgtgaactacggctaccagcagcagggcctgcccctggaggccgccacagcccctggagctggccactatgaggacaccatcctgaagagcaagaacagcatgaaccagcccggcccctag

SEQ ID NO: 18307 - DNA, 1353 bp, synthetic construct
  misc_feature 1..1353: note = Description of Artificial Sequence: Synthetic coding sequence
  source 1..1353: mol_type = other DNA
atgggcgccatcggcctgctgtggctgctgcccctgctgctgagcacagctgctgtgggcagcggcatgggcaccggccagagagctggcagccctgctgctggcccccccctgcagccccgggagcccctgagctacagccggctgcagaggaagagcctggccgtggactttgtggtgcccagcctcttccgggtgtatgcccgggacctgctgctgccccccagcagcagcgagctgaaggccggccggcctgaggcccggggcagcctggccctggactgtgcccccctgctgcggctgctgggccctgcccctggggtgtcctggacagctggcagccctgccccagctgaggcccggaccctgagccgggtgctgaagggcggctctgtgaggaagctgcggcgggccaagcagctggtgctggagctgggggaggaggccatcctggagggctgtgtgggccccccaggagaggccgctgtgggcctgctgcagttcaacctgtctgagctgttctcctggtggatccggcagggcgagggccgcctgcgcatccggctgatgcctgagaagaaggccagcgaggtgggccgggagggccgcctgtctgctgccatccgggccagccagccccggctgctcttccagatcttcggcaccggccacagcagcctggagagccccaccaacatgcccagccccagcccagactacttcacctggaacctgacctggatcatgaaggacagcttccccttcctgagccacaggagccgctatggcaaggagaggagccctgctgcccccccacccctgcccaccaccagcagcggcaaggccgccaagaagcccacagctgctgagatctctgtgcgggtgccccggggccctgctgtggagggcggccacgtgaacatggccttcagccagagcaaccccccatctgagctgcacaaggtgcacggcagcaggaacaagcccaccagcctgtggaaccccacctacggctcctggttcacagagaagcccaccaagaagaacaaccccatcgccaagaaggagccccatgaccggggcaacctgggcctggagggcagctgcaccgtgccccccaacgtggccaccggccgcctgcccggggccagcctgctgctggagcccagcagcctgacagccaacatgaaggaggtgcccctcttccggctgcggcacttcccctgtggaaatgtgaactacggctaccagcagcagggcctgcccctggaggccgccacagcccctggagctggccactatgaggacaccatcctgaagagcaagaacagcatgaaccagcccggcccctag

SEQ ID NO: 18308 - DNA, 1935 bp, synthetic construct
  misc_feature 1..1935: note = Description of Artificial Sequence: Synthetic coding sequence
  source 1..1935: mol_type = other DNA
atggaggtgcagctgggcctgggccgggtgtacccccggccccccagcaagacctacagaggagccttccagaacctcttccagagcgtgcgggaggtgatccagaaccctggccccaggcaccctgaggccgccagcgctgcccctcctggggccagcctgctgctgctgcagcagcagcagcagcagcagcagcagcagcagcagcagcagcagcagcagcagcagcagcagcagcaggagaccagcccccggcagcagcagcagcagcagggagaagatggcagcccccaggcccacagaagaggccccaccggctacctggtgctggatgaggagcagcagcccagccagccccagagcgccctggagtgccaccctgagcggggctgtgtgcctgagcctggagctgctgtggccgccagcaagggcctgccccagcagctgcctgcccccccagatgaagatgacagcgctgcccccagcaccctgagcctgctgggccccaccttccctggcctgagcagctgcagcgctgacctgaaggacatcctgtctgaggccagcaccatgcagctgctgcagcagcagcagcaggaggccgtgtctgagggcagcagcagcggccgggcccgggaggccagcggggcccccaccagcagcaaggacaactacctgggcggcaccagcaccatcagtgacaatgccaaggagctgtgcaaggctgtgtctgtgtccatgggcctgggcgtggaggccctggagcacctgagccctggagagcagctgcggggggactgcatgtatgcccccctgctgggcgtgcccccagctgtgcggcccaccccctgtgcccccctggctgaatgtaaaggcagcctgctggatgacagcgctgggaagagcacagaggacacagctgagtacagccccttcaagggcggctacaccaagggcctggagggggagagcctgggctgcagcggcagcgctgctgctggcagcagcggcaccctggagctgcccagcaccctgagcctgtacaagagcggggccctggatgaggccgccgcctaccagagccgggactactacaacttccccctggccctggccggccccccacctcctcctcctccaccccacccccacgcccgcatcaagctggagaaccccctggactatggcagcgcctgggccgctgctgctgcccagtgccgctacggggacctggccagcctgcatggagctggagctgctggccctggcagcggcagccccagcgctgctgccagcagctcctggcacaccctcttcaccgctgaggagggccagctgtatggcccctgtggcggcggcggcggcggcggcggcggcggcggcggcggcggcggcggcggcggcggcggcggcggcggggaggccggggctgtggccccctacggctacacccggcccccccagggcctggccggccaggagagtgacttcaccgccccagatgtgtggtacccaggcggcatggtgtcccgggtgccctaccccagccccacctgtgtgaagtctgagatgggcccctggatggacagctacagcggcccctatggagacatgaggctggagacagcccgggaccacgtgctgcccatcgactactacttccccccccagaagacctgcctgatctgtggagatgaggccagcggctgccactacggggccctgacctgtggcagctgcaaggtgttcttcaagagagctgctgagggcaagcagaagtacctgtgtgccagcagaaatgactgcaccatcgacaagttccggaggaagaactgccccagctgccgcctgaggaaatgttatgaagctggcatgaccctgggggagaagttccgggtgggcaactgcaagcacctgaagatgacccggccctag

SEQ ID NO: 18309 - DNA, 1803 bp, synthetic construct
  misc_feature 1..1803: note = Description of Artificial Sequence: Synthetic coding sequence
  source 1..1803: mol_type = other DNA
atggaggtgcagctgggcctgggccgggtgtacccccggccccccagcaagacctacagaggagccttccagaacctcttccagagcgtgcgggaggtgatccagaaccctggccccaggcaccctgaggccgccagcgctgcccctcctggggccagcctgctgctgctgcagcagcagcagcagcagcagcagcagcagcagcagcagcagcagcagcagcagcagcagcagcagcaggagaccagcccccggcagcagcagcagcagcagggagaagatggcagcccccaggcccacagaagaggccccaccggctacctggtgctggatgaggagcagcagcccagccagccccagagcgccctggagtgccaccctgagcggggctgtgtgcctgagcctggagctgctgtggccgccagcaagggcctgccccagcagctgcctgcccccccagatgaagatgacagcgctgcccccagcaccctgagcctgctgggccccaccttccctggcctgagcagctgcagcgctgacctgaaggacatcctgtctgaggccagcaccatgcagctgctgcagcagcagcagcaggaggccgtgtctgagggcagcagcagcggccgggcccgggaggccagcggggcccccaccagcagcaaggacaactacctgggcggcaccagcaccatcagtgacaatgccaaggagctgtgcaaggctgtgtctgtgtccatgggcctgggcgtggaggccctggagcacctgagccctggagagcagctgcggggggactgcatgtatgcccccctgctgggcgtgcccccagctgtgcggcccaccccctgtgcccccctggctgaatgtaaaggcagcctgctggatgacagcgctgggaagagcacagaggacacagctgagtacagccccttcaagggcggctacaccaagggcctggagggggagagcctgggctgcagcggcagcgctgctgctggcagcagcggcaccctggagctgcccagcaccctgagcctgtacaagagcggggccctggatgaggccgccgcctaccagagccgggactactacaacttccccctggccctggccggccccccacctcctcctcctccaccccacccccacgcccgcatcaagctggagaaccccctggactatggcagcgcctgggccgctgctgctgcccagtgccgctacggggacctggccagcctgcatggagctggagctgctggccctggcagcggcagccccagcgctgctgccagcagctcctggcacaccctcttcaccgctgaggagggccagctgtatggcccctgtggcggcggcggcggcggcggcggcggcggcggcggcggcggcggcggcggcggcggcggcggcggcggggaggccggggctgtggccccctacggctacacccggcccccccagggcctggccggccaggagagtgacttcaccgccccagatgtgtggtacccaggcggcatggtgtcccgggtgccctaccccagccccacctgtgtgaagtctgagatgggcccctggatggacagctacagcggcccctatggagacatgaggctggagacagcccgggaccacgtgctgcccatcgactactacttccccccccagaagacctgcctgatctgtggagatgaggccagcggctgccactacggggccctgacctgtggcagctgcaaggtgttcttcaagagagctgctgagggcttcttcaggatgaacaagctgaaggagagctag

SEQ ID NO: 18310 - DNA, 444 bp, synthetic construct
  misc_feature 1..444: note = Description of Artificial Sequence: Synthetic coding sequence
  source 1..444: mol_type = other DNA
atggtgatgggcctgggcgtgctgctgctggtgtttgtgctgggcctgggcctgaccccacccaccctggcccaggacaacagccgctacacccacttcctgacccagcactatgatgccaagccccagggcagagatgaccgctactgtgagagcatcatgagaagaagaggcctgaccagcccctgcaaggacatcaacaccttcatccacggcaacaagaggagcatcaaggccatctgtgagaacaagaatggaaacccccaccgggagaacctgcgcatcagcaagagcagcttccaggtgaccacctgcaagctgcacggcggcagcccctggccaccctgccagtaccgggccacagctggcttcagaaatgtggtggtggcctgtgaaaatggcctgcctgtgcacctggaccagagcatcttcagaagaccctag

SEQ ID NO: 18311 - DNA, 444 bp, synthetic construct; identical to SEQ ID NO: 18310
  misc_feature 1..444: note = Description of Artificial Sequence: Synthetic coding sequence
  source 1..444: mol_type = other DNA

SEQ ID NO: 18312 - DNA, 1494 bp, synthetic construct
  misc_feature 1..1494: note = Description of Artificial Sequence: Synthetic coding sequence
  source 1..1494: mol_type = other DNA
atgaccgtcttcctgagctttgccttcctggccgccatcctgacccacatcggctgcagcaaccagaggaggagcccagaaaattctggaagacgctacaaccgcatccagcacggccagtgtgcctacaccttcatcctgcctgagcatgatggcaactgccgggagagcaccacagaccagtacaacaccaatgccctgcagagagatgcccctcatgtggagccagacttcagcagccagaagctgcagcacctggagcacgtgatggagaactacacccagtggctgcagaagctggagaactacatcgtggagaacatgaagtctgagatggcccagatccagcagaatgctgtgcagaaccacacagccaccatgctggagatcggcaccagcctgctgagccagacagctgagcagaccaggaagctgacagatgtggagacccaggtgctgaaccagaccagccggctggagatccagctgctggagaacagcctgagcacctacaagctggagaagcagctgctgcagcagaccaatgagatcctgaagatccacgagaagaacagcctgctggagcacaagatcctggagatggagggcaagcacaaggaggagctggacaccctgaaggaggagaaggagaacctgcagggcctggtgacccggcagacctacatcatccaggagctggagaagcagctgaacagagccaccaccaacaacagcgtgctgcagaagcagcagctggagctgatggacacagtgcacaacctggtgaacctgtgcaccaaggaggtgctgctgaagggcggcaagcgggaggaggagaagcccttccgggactgtgctgatgtgtaccaggccggcttcaacaagagcggcatctacaccatctacatcaacaacatgcctgagcccaagaaggtgttctgcaacatggatgtgaatggaggcggctggacagtcatccagcaccgggaggatggcagcctggacttccagaggggctggaaggagtacaagatgggctttggaaaccccagcggggagtactggctgggcaatgagttcatctttgccatcaccagccagaggcagtacatgctgcgcatcgagctgatggactgggagggcaacagagcctacagccagtatgaccgcttccacatcggaaatgagaagcagaactaccgcctgtacctgaagggccacactggaacagctgggaagcagagcagcctcatcctgcacggggctgacttcagcaccaaggatgctgacaatgacaactgcatgtgcaagtgtgccctgatgctgactggaggctggtggtttgatgcctgtggccccagcaacctgaatggcatgttctacacagctggccagaaccacggcaagctgaatggcatcaagtggcactacttcaagggccccagctacagcctgcggagcaccaccatgatgatccggcccctggacttctag

SEQ ID NO: 18313 - DNA, 459 bp, synthetic construct
  misc_feature 1..459: note = Description of Artificial Sequence: Synthetic coding sequence
  source 1..459: mol_type = other DNA
actgtgagcaacctgctggagcacaagatcctggagatggagggcaagcacaaggaggagctggacaccctgaaggaggagaaggagaacctgcagggcctggtgacccggcagacctacatcatccaggagctggagaagcagctgaacagagccaccaccaacaacagcgtgctgcagaagcagcagctggagctgatggacacagtgcacaacctggtgaacctgtgcaccaaggagggcgtgctgctgaagggcggcaagcgggaggaggagaagcccttccgggactgtgctgatgtgtaccaggccggcttcaacaagagcggcatctacaccatctacatcaacaacatgcctgagcccaagaaggtgttctgcaacatggatgtgaatggaggcggctggacagtcatccagcacagagaagatggcagcctggacttccagaggggctag

SEQ ID NO: 18314 - DNA, 1497 bp, synthetic construct
  misc_feature 1..1497: note = Description of Artificial Sequence: Synthetic coding sequence
  source 1..1497: mol_type = other DNA
atgaccgtcttcctgagctttgccttcctggccgccatcctgacccacatcggctgcagcaaccagaggaggagcccagaaaattctggaagacgctacaaccgcatccagcacggccagtgtgcctacaccttcatcctgcctgagcatgatggcaactgccgggagagcaccacagaccagtacaacaccaatgccctgcagagagatgcccctcatgtggagccagacttcagcagccagaagctgcagcacctggagcacgtgatggagaactacacccagtggctgcagaagctggagaactacatcgtggagaacatgaagtctgagatggcccagatccagcagaatgctgtgcagaaccacacagccaccatgctggagatcggcaccagcctgctgagccagacagctgagcagaccaggaagctgacagatgtggagacccaggtgctgaaccagaccagccggctggagatccagctgctggagaacagcctgagcacctacaagctggagaagcagctgctgcagcagaccaatgagatcctgaagatccacgagaagaacagcctgctggagcacaagatcctggagatggagggcaagcacaaggaggagctggacaccctgaaggaggagaaggagaacctgcagggcctggtgacccggcagacctacatcatccaggagctggagaagcagctgaacagagccaccaccaacaacagcgtgctgcagaagcagcagctggagctgatggacacagtgcacaacctggtgaacctgtgcaccaaggagggcgtgctgctgaagggcggcaagcgggaggaggagaagcccttccgggactgtgctgatgtgtaccaggccggcttcaacaagagcggcatctacaccatctacatcaacaacatgcctgagcccaagaaggtgttctgcaacatggatgtgaatggaggcggctggacagtcatccagcacagagaagatggcagcctggacttccagaggggctggaaggagtacaagatgggcttcggcaaccccagcggggagtactggctgggcaatgagttcatctttgccatcaccagccagaggcagtacatgctgagaattgagctgatggactgggagggcaacagagcctacagccagtatgaccgcttccacatcggaaatgagaagcagaactaccgcctgtacctgaagggccacactggaacagctgggaagcagagcagcctcatcctgcatggagctgacttcagcaccaaggatgctgacaatgacaactgcatgtgcaagtgtgccctgatgctgaccggcggctggtggtttgatgcctgtggccccagcaacctgaatggcatgttctacacagctggccagaaccacggcaagctgaatggcatcaagtggcactacttcaagggccccagctacagcctgcggagcaccaccatgatgatccggcccctggacttctag

SEQ ID NO: 18315 - DNA, 894 bp, synthetic construct
  misc_feature 1..894: note = Description of Artificial Sequence: Synthetic coding sequence
  source 1..894: mol_type = other DNA
atggagggcaagcacaaggaggagctggacaccctgaaggaggagaaggagaacctgcagggcctggtgacccggcagacctacatcatccaggagctggagaagcagctgaacagagccaccaccaacaacagcgtgctgcagaagcagcagctggagctgatggacacagtgcacaacctggtgaacctgtgcaccaaggaggtgctgctgaagggcggcaagcgggaggaggagaagcccttccgggactgtgctgatgtgtaccaggccggcttcaacaagagcggcatctacaccatctacatcaacaacatgcctgagcccaagaaggtgttctgcaacatggatgtgaatggaggcggctggacagtcatccagcaccgggaggatggcagcctggacttccagaggggctggaaggagtacaagatgggctttggaaaccccagcggggagtactggctgggcaatgagttcatctttgccatcaccagccagaggcagtacatgctgcgcatcgagctgatggactgggagggcaacagagcctacagccagtatgaccgcttccacatcggaaatgagaagcagaactaccgcctgtacctgaagggccacactggaacagctgggaagcagagcagcctcatcctgcacggggctgacttcagcaccaaggatgctgacaatgacaactgcatgtgcaagtgtgccctgatgctgactggaggctggtggtttgatgcctgtggccccagcaacctgaatggcatgttctacacagctggccagaaccacggcaagctgaatggcatcaagtggcactacttcaagggccccagctacagcctgcggagcaccaccatgatgatccggcccctggacttctag

SEQ ID NO: 18316 - DNA, 897 bp, synthetic construct
  misc_feature 1..897: note = Description of Artificial Sequence: Synthetic coding sequence
  source 1..897: mol_type = other DNA
atggagggcaagcacaaggaggagctggacaccctgaaggaggagaaggagaacctgcagggcctggtgacccggcagacctacatcatccaggagctggagaagcagctgaacagagccaccaccaacaacagcgtgctgcagaagcagcagctggagctgatggacacagtgcacaacctggtgaacctgtgcaccaaggagggcgtgctgctgaagggcggcaagcgggaggaggagaagcccttccgggactgtgctgatgtgtaccaggccggcttcaacaagagcggcatctacaccatctacatcaacaacatgcctgagcccaagaaggtgttctgcaacatggatgtgaatggaggcggctggacagtcatccagcacagagaagatggcagcctggacttccagaggggctggaaggagtacaagatgggcttcggcaaccccagcggggagtactggctgggcaatgagttcatctttgccatcaccagccagaggcagtacatgctgagaattgagctgatggactgggagggcaacagagcctacagccagtatgaccgcttccacatcggaaatgagaagcagaactaccgcctgtacctgaagggccacactggaacagctgggaagcagagcagcctcatcctgcatggagctgacttcagcaccaaggatgctgacaatgacaactgcatgtgcaagtgtgccctgatgctgaccggcggctggtggtttgatgcctgtggccccagcaacctgaatggcatgttctacacagctggccagaaccacggcaagctgaatggcatcaagtggcactacttcaagggccccagctacagcctgcggagcaccaccatgatgatccggcccctggacttctag

SEQ ID NO: 18317 - DNA, 1491 bp, synthetic construct
  misc_feature 1..1491: note = Description of Artificial Sequence: Synthetic coding sequence
  source 1..1491: mol_type = other DNA
atgtggcagatcgtgttcttcaccctgagctgtgacctggtgctggccgccgcctacaacaacttcaggaagtccatggacagcatcggcaagaagcagtaccaggtgcagcacggcagctgcagctacaccttcctgctgcctgagatggacaactgccgcagcagcagcagcccctacgtgtccaatgctgtgcagagagatgcccccctggagtatgatgacagcgtgcagaggctgcaggtgctggagaacatcatggagaacaacacccagtggctgatgaagctggagaactacatccaggacaacatgaagaaggagatggtggagatccagcagaatgctgtgcagaaccagacagctgtgatgattgaaattggcaccaacctgctgaaccagacagctgagcagaccaggaagctgacagatgtggaggcccaggtgctgaaccagaccacccggctggagctgcagctgctggagcacagcctgagcaccaacaagctggagaagcagatcctggaccagaccagcgagatcaacaagctgcaggacaagaacagcttcctggagaagaaggtgctggccatggaggacaagcacatcatccagctgcagagcatcaaggaggagaaggaccagctgcaggtgctggtgtccaagcagaacagcatcatcgaggagctggagaagaagatcgtgacagccaccgtgaacaacagcgtgctgcagaagcagcagcacgacctgatggagaccgtgaacaacctgctgaccatgatgagcaccagcaacagcgccaaggaccccaccgtggccaaggaggagcagatctccttccgggactgtgccgaggtgttcaagagcggccacaccaccaacggcatctacaccctgaccttccccaacagcacagaggagatcaaggcctactgtgacatggaggccggcggcggcggctggaccatcatccagaggagagaagatggctctgtggacttccagaggacctggaaggagtacaaggtgggcttcggcaaccccagcggggagtactggctgggcaatgaatttgtgtcccagctgaccaaccagcagagatatgtgctgaagatccacctgaaggactgggagggcaatgaggcctacagcctgtatgagcacttctacctgagcagcgaggagctgaactaccgcatccacctgaagggcctgactggaacagctgggaagatcagcagcatcagccagcctggaaatgacttcagcaccaaggatggagacaatgacaagtgcatctgcaagtgcagccagatgctgaccggcggctggtggtttgatgcctgtggccccagcaacctgaatggcatgtactacccccagaggcagaacaccaacaagttcaacggcatcaagtggtactactggaagggcagcggctacagcctgaaggccaccaccatgatgatccggcctgctgacttctag

SEQ ID NO: 18318 - DNA, 1488 bp, synthetic construct
  misc_feature 1..1488: note = Description of Artificial Sequence: Synthetic coding sequence
  source 1..1488: mol_type = other DNA
atgtggcagatcgtgttcttcaccctgagctgtgacctggtgctggccgccgcctacaacaacttcaggaagtccatggacagcatcggcaagaagcagtaccaggtgcagcacggcagctgcagctacaccttcctgctgcctgagatggacaactgccgcagcagcagcagcccctacgtgtccaatgctgtgcagagagatgcccccctggagtatgatgacagcgtgcagaggctgcaggtgctggagaacatcatggagaacaacacccagtggctgatgaagctggagaactacatccaggacaacatgaagaaggagatggtggagatccagcagaatgctgtgcagaaccagacagctgtgatgattgaaattggcaccaacctgctgaaccagacagctgagcagaccaggaagctgacagatgtggaggcccaggtgctgaaccagaccacccggctggagctgcagctgctggagcacagcctgagcaccaacaagctggagaagcagatcctggaccagaccagcgagatcaacaagctgcaggacaagaacagcttcctggagaagaaggtgctggccatggaggacaagcacatcatccagctgcagagcatcaaggaggagaaggaccagctgcaggtgctggtgtccaagcagaacagcatcatcgaggagctggagaagaagatcgtgacagccaccgtgaacaacagcgtgctgcagaagcagcagcacgacctgatggagaccgtgaacaacctgctgaccatgatgagcaccagcaacagcaaggaccccaccgtggccaaggaggagcagatctccttccgggactgtgccgaggtgttcaagagcggccacaccaccaacggcatctacaccctgaccttccccaacagcacagaggagatcaaggcctactgtgacatggaggccggcggcggcggctggaccatcatccagaggcgggaggatggctctgtggacttccagaggacctggaaggagtacaaggtgggctttggaaaccccagcggggagtactggctgggcaatgaatttgtgtcccagctgaccaaccagcagcgctacgtgctgaagatccacctgaaggactgggagggcaatgaggcctacagcctgtatgagcacttctacctgagcagcgaggagctgaactaccgcatccacctgaagggcctgaccggcacagctgggaagatcagcagcatcagccagcctggaaatgacttcagcaccaaggatggagacaatgacaagtgcatctgcaagtgcagccagatgctgactggaggctggtggtttgatgcctgtggccccagcaacctgaatggcatgtactacccccagaggcagaacaccaacaagttcaacggcatcaagtggtactactggaagggcagcggctacagcctgaaggccaccaccatgatgatccggcctgctgacttctag

SEQ ID NO: 18319 - DNA, 1335 bp, synthetic construct
  misc_feature 1..1335: note = Description of Artificial Sequence: Synthetic coding sequence
  source 1..1335: mol_type = other DNA
atgtggcagatcgtgttcttcaccctgagctgtgacctggtgctggccgccgcctacaacaacttcaggaagtccatggacagcatcggcaagaagcagtaccaggtgcagcacggcagctgcagctacaccttcctgctgcctgagatggacaactgccgcagcagcagcagcccctacgtgtccaatgctgtgcagagagatgcccccctggagtatgatgacagcgtgcagaggctgcaggtgctggagaacatcatggagaacaacacccagtggctgatgaaggtgctgaaccagaccacccggctggagctgcagctgctggagcacagcctgagcaccaacaagctggagaagcagatcctggaccagaccagcgagatcaacaagctgcaggacaagaacagcttcctggagaagaaggtgctggccatggaggacaagcacatcatccagctgcagagcatcaaggaggagaaggaccagctgcaggtgctggtgtccaagcagaacagcatcatcgaggagctggagaagaagatcgtgacagccaccgtgaacaacagcgtgctgcagaagcagcagcacgacctgatggagaccgtgaacaacctgctgaccatgatgagcaccagcaacagcgccaaggaccccaccgtggccaaggaggagcagatctccttccgggactgtgccgaggtgttcaagagcggccacaccaccaacggcatctacaccctgaccttccccaacagcacagaggagatcaaggcctactgtgacatggaggccggcggcggcggctggaccatcatccagaggagagaagatggctctgtggacttccagaggacctggaaggagtacaaggtgggcttcggcaaccccagcggggagtactggctgggcaatgaatttgtgtcccagctgaccaaccagcagagatatgtgctgaagatccacctgaaggactgggagggcaatgaggcctacagcctgtatgagcacttctacctgagcagcgaggagctgaactaccgcatccacctgaagggcctgactggaacagctgggaagatcagcagcatcagccagcctggaaatgacttcagcaccaaggatggagacaatgacaagtgcatctgcaagtgcagccagatgctgaccggcggctggtggtttgatgcctgtggccccagcaacctgaatggcatgtactacccccagaggcagaacaccaacaagttcaacggcatcaagtggtactactggaagggcagcggctacagcctgaaggccaccaccatgatgatccggcctgctgacttctag

SEQ ID NO: 18320 - DNA, 1221 bp, synthetic construct
  misc_feature 1..1221: note = Description of Artificial Sequence: Synthetic coding sequence
  source 1..1221: mol_type = other DNA
atgtctggggcccccacagctggagctgccctgatgctgtgtgccgccacagctgtgctgctgagcgcccagggcggccctgtgcagagcaagagccccaggtttgcctcctgggatgagatgaatgtgctggcccacggcctgctgcagctgggccagggcctgcgggagcacgccgagaggaccaggagccagctgagcgccctggagcggcggctgagcgcctgtggcagcgcctgccagggcacagagggcagcacagacctgcccctggcccctgagagccgggtggaccctgaggtgctgcacagcctgcagacccagctgaaggcccagaacagccgcatccagcagctgttccacaaggtggcccagcagcagaggcacctggagaagcagcacctgcgcatccagcacctgcagagccagtttggcctgctggaccacaagcacctggaccacgaggtggccaagccagcccggaggaagaggctgcctgagatggcccagcctgtggaccctgcccacaacgtgtcccggctgcaccggctgccccgggactgccaggagctgttccaggtgggggagcggcagagcggcctgtttgagatccagccccagggcagcccccccttcctggtgaactgcaagatgaccagtgatggcggctggacagtcatccagaggagacatgatggctctgtggacttcaaccggccctgggaggcctacaaggccggctttggagacccccacggggagttctggctgggcctggagaaggtgcacagcatcaccggggacaggaacagccggctggccgtgcagctgcgggactgggatggaaatgctgagctgctgcagttctctgtgcacctgggcggggaggacacagcctacagcctgcagctgacagcccctgtggccggccagctgggcgccaccaccgtgccccccagcggcctgtctgtgcccttcagcacctgggaccaggaccatgacctgcggcgggacaagaactgtgccaagagcctgagcggcggctggtggtttggcacctgcagccacagcaacctgaatggccagtacttccgcagcatcccccagcagaggcagaagctgaagaagggcatcttctggaagacctggaggggccgctactaccccctgcaggccaccaccatgctgatccagcccatggctgctgaggccgccagctag

SEQ ID NO: 18321 - DNA, 1107 bp, synthetic construct
  misc_feature 1..1107: note = Description of Artificial Sequence: Synthetic coding sequence
  source 1..1107: mol_type = other DNA
atgtctggggcccccacagctggagctgccctgatgctgtgtgccgccacagctgtgctgctgagcgcccagggcggccctgtgcagagcaagagccccaggtttgcctcctgggatgagatgaatgtgctggcccacggcctgctgcagctgggccagggcctgcgggagcacgccgagaggaccaggagccagctgagcgccctggagcggcggctgagcgcctgtggcagcgcctgccagggcacagagggcagcacagacctgcccctggcccctgagagccgggtggaccctgaggtgctgcacagcctgcagacccagctgaaggcccagaacagccgcatccagcagctgttccacaaggtggcccagcagcagaggcacctggagaagcagcacctgcgcatccagcacctgcagagccagtttggcctgctggaccacaagcacctggaccacgaggtggccaagccagcccggaggaagaggctgcctgagatggcccagcctgtggaccctgcccacaacgtgtcccggctgcaccacggcggctggacagtcatccagaggagacatgatggctctgtggacttcaaccggccctgggaggcctacaaggccggctttggagacccccacggggagttctggctgggcctggagaaggtgcacagcatcaccggggacaggaacagccggctggccgtgcagctgcgggactgggatggaaatgctgagctgctgcagttctctgtgcacctgggcggggaggacacagcctacagcctgcagctgacagcccctgtggccggccagctgggcgccaccaccgtgccccccagcggcctgtctgtgcccttcagcacctgggaccaggaccatgacctgcggcgggacaagaactgtgccaagagcctgagcggcggctggtggtttggcacctgcagccacagcaacctgaatggccagtacttccgcagcatcccccagcagaggcagaagctgaagaagggcatcttctggaagacctggaggggccgctactaccccctgcaggccaccaccatgctgatccagcccatggctgctgaggccgccagctag

SEQ ID NO: 18322 - DNA, 720 bp, synthetic construct
  misc_feature 1..720: note = Description of Artificial Sequence: Synthetic coding sequence
  source 1..720: mol_type = other DNA
atggcccagcctgtggaccctgcccacaacgtgtcccggctgcaccggctgccccgggactgccaggagctgttccaggtgggggagcggcagagcggcctgtttgagatccagccccagggcagcccccccttcctggtgaactgcaagatgaccagtgatggcggctggacagtcatccagaggagacatgatggctctgtggacttcaaccggccctgggaggcctacaaggccggctttggagacccccatggagagttctggctgggcctggagaaggtgcacagcatcactggagacaggaacagccggctggccgtgcagctgcgggactgggatggaaatgctgagctgctgcagttctctgtgcacctgggcggggaggacacagcctacagcctgcagctgacagcccctgtggccggccagctgggcgccaccaccgtgcccccatctggcctgtctgtgcccttcagcacctgggaccaggaccatgacctgcggcgggacaagaactgtgccaagagcctgagcggcggctggtggtttggcacctgcagccacagcaacctgaatggccagtacttccgcagcatcccccagcagaggcagaagctgaagaagggcatcttctggaagacctggaggggccgctactaccccctgcaggccaccaccatgctgatccagcccatggctgctgaggccgccagctag

SEQ ID NO: 18323 - DNA, 837 bp, synthetic construct
  misc_feature 1..837: note = Description of Artificial Sequence: Synthetic coding sequence
  source 1..837: mol_type = other DNA
atggagcccagggctgctgatggctgcttcctgggagatgtgggcttctgggtggagaggacccctgtgcatgaggccgcccagagaggagagagcctgcagctgcagcagctgattgaaagtggggcctgtgtgaaccaggtgacagtggacagcatcacccccctgcacgccgccagcctgcagggccaggcccgctgtgtgcagctgctgctggccgccggggcccaggtggatgccagaaatattgatggcagcacccccctgtgtgatgcctgtgccagcggcagcattgaatgtgtgaagctgctgctgtcctatggagccaaggtgaacccccccctgtacacagccagccccctgcacgaggcctgcatgagcggcagcagtgaatgtgtgcggctgctgattgatgtgggcgccaacctggaggcccatgactgccacttcggcacccccctgcacgtggcctgtgcccgggagcacctggactgtgtgaaggtgctgctgaatgctggggccaacgtgaatgctgccaagctgcacgagacagccctgcaccacgccgccaaggtgaagaatgtggacctgattgagatgctgattgaatttggaggcaacatctatgcccgggacaacagaggcaagaagcccagcgactacacctggagcagcagcgccccagccaagtgctttgagtactatgagaagacccccctgaccctgagccagctgtgccgggtgaacctgaggaaggccaccggggtgcggggcctggagaagatcgccaagctgaacatccccccccggctgattgactacctgagctacaactag

SEQ ID NO: 18324 - DNA, 396 bp, synthetic construct
  misc_feature 1..396: note = Description of Artificial Sequence: Synthetic coding sequence
  source 1..396: mol_type = other DNA
atggagaagatccctgtgtctgccttcctgctgctggtggccctgagctacaccctggcccgggacaccaccgtgaagccaggggccaagaaggacaccaaggacagccggcccaagctgccccagaccctgagccggggctggggagaccagctgatctggacccagacctatgaggaggccctgtacaagagcaagaccagcaacaagcccctgatgatcatccaccacctggatgagtgcccccacagccaggccctgaagaaggtgtttgctgagaacaaggagatccagaagctggccgagcagtttgtgctgctgaacctggtgtatgagaccacagacaagcacctgagcccagatggccagtatgtgccccgcatcatgtttgtgtag

SEQ ID NO: 18325 - DNA, 528 bp, synthetic construct
  misc_feature 1..528: note = Description of Artificial Sequence: Synthetic coding sequence
  source 1..528: mol_type = other DNA
atggagaagatccctgtgtctgccttcctgctgctggtggccctgagctacaccctggcccgggacaccaccgtgaagccaggggccaagaaggacaccaaggacagccggcccaagctgccccagaccctgagccggggctggggagaccagctgatctggacccagacctatgaggaggccctgtacaagagcaagaccagcaacaagcccctgatgatcatccaccacctggatgagtgcccccacagccaggccctgaagaaggtgtttgctgagaacaaggagatccagaagctggccgagcagtttgtgctgctgaacctggtgtatgagaccacagacaagcacctgagcccagatggccagtatgtgccccgcatcatgtttgtggaccccagcctgactgtgcgggctgacatcaccggccgctacagcaaccggctgtatgcctatgagcctgctgacacagccctgctgctggacaacatgaagaaggccctgaagctgctgaagacagagctgtag

SEQ ID NO: 18326 - DNA, 588 bp, synthetic construct
  misc_feature 1..588: note = Description of Artificial Sequence: Synthetic coding sequence
  source 1..588: mol_type = other DNA
atgagcaactacacagatgctgagagcagcttcagcaagcaggagatcatccgggtggccatggagaagatccctgtgtctgccttcctgctgctggtggccctgagctacaccctggcccgggacaccaccgtgaagccaggggccaagaaggacaccaaggacagccggcccaagctgccccagaccctgagccggggctggggagaccagctgatctggacccagacctatgaggaggccctgtacaagagcaagaccagcaacaagcccctgatgatcatccaccacctggatgagtgcccccacagccaggccctgaagaaggtgtttgctgagaacaaggagatccagaagctggccgagcagtttgtgctgctgaacctggtgtatgagaccacagacaagcacctgagcccagatggccagtatgtgccccgcatcatgtttgtggaccccagcctgactgtgcgggctgacatcaccggccgctacagcaaccggctgtatgcctatgagcctgctgacacagccctgctgctggacaacatgaagaaggccctgaagctgctgaagacagagctgtag

SEQ ID NO: 18327 - DNA, 1251 bp, synthetic construct
  misc_feature 1..1251: note = Description of Artificial Sequence: Synthetic coding sequence
  source 1..1251: mol_type = other DNA
atgtggcccacccggcggctggtgaccatcaagaggtctggagtggatggcccccacttccccctgagcctgagcacctgcctgtttggccgctatgaaaatgaaagcctgcagaatggaaggaagagcacagagttccccaggaagatccgggagcaggagcccgccaggagagtgagccgcagcagcttcagcagtgaccctgatgaaagtgagggcatccccctgaagagaagaagagtgtcctttggaggccacctgcggcctgagctgtttgatgagaacctgccccccaacacccccctgaagagaggagaggcccccaccaagaggaagagcctggtgatgcacaccccacctgtgctgaagaagatcatcaaggagcagccccagcccagcggcaagcaggagagcggcagcgagatccacgtggaggtgaaggcccagagcctggtgatcagccccccagcccccagccccaggaagacccctgtggccagtgaccagaggagaagaagctgcaagacagccccagccagcagcagcaagagccagacagaggtgcccaagaggggcggcaggaagagcggcaacctgcccagcaagagggtgtccatcagccgcagccagcacgacatcctgcagatgatctgcagcaagagaagaagtggggccagcgaggccaacctgattgtggccaagtcctgggcagatgtggtgaagctgggcgccaagcagacccagaccaaggtgatcaagcacggcccccagaggtccatgaacaagaggcagaggaggcctgccacccccaagaagcctgtgggggaggtgcacagccagttcagcactggacatgccaacagcccctgcaccatcatcatcggcaaggcccacacagagaaggtgcacgtgcctgcccggccctacagagtgctgaacaacttcatcagcaaccagaagatggacttcaaggaggacctgagcggcattgctgagatgttcaagacccctgtgaaggagcagccccagctgaccagcacctgccacatcgccatcagcaacagcgagaacctgctgggcaagcagttccagggcacagacagcggggaggagcccctgctgcccaccagcgagagctttggaggaaatgtgttcttcagcgcccagaatgctgccaagcagcccagcgacaagtgcagcgccagcccccccctgcggcggcagtgcatccgggagaatggaaatgtgtag

SEQ ID NO: 18328 - DNA, 8691 bp, synthetic construct
  misc_feature 1..8691: note = Description of Artificial Sequence: Synthetic coding sequence
  source 1..8691: mol_type = other DNA
atgtggcccacccggcggctggtgaccatcaagaggtctggagtggatggcccccacttccccctgagcctgagcacctgcctgtttggccggggcattgaatgtgacatccgcatccagctgcctgtggtgtccaagcagcactgcaagattgagatccacgagcaggaggccatcctgcacaacttcagcagcaccaaccccacccaggtgaatggatctgtgattgatgagcctgtgcggctgaagcatggagatgtgatcaccatcatcgacaggagcttccgctatgaaaatgaaagcctgcagaatggaaggaagagcacagagttccccaggaagatccgggagcaggagcccgcccggcgggtgagccgcagcagcttcagcagtgaccctgatgagagcgagggcatccccctgaagagaagaagagtgtcctttggaggccacctgcggcctgagctgtttgatgagaacctgccccccaacacccccctgaagagaggagaggcccccaccaagaggaagagcctggtgatgcacaccccacctgtgctgaagaagatcatcaaggagcagccccagcccagcggcaagcaggagagcggcagcgagatccacgtggaggtgaaggcccagagcctggtgatcagccccccagcccccagccccaggaagacccctgtggccagtgaccagaggcggcgcagctgcaagacagccccagccagcagcagcaagagccagacagaggtgcccaagagaggaggcaggaagagcggcaacctgcccagcaagagggtgtccatcagccgcagccagcacgacatcctgcagatgatctgcagcaagagaagaagtggggccagcgaggccaacctgattgtggccaagtcctgggcagatgtggtgaagctgggcgccaagcagacccagaccaaggtgatcaagcacggcccccagaggtccatgaacaagaggcagaggaggcctgccacccccaagaagcctgtgggggaggtgcacagccagttcagcacaggccacgccaacagcccctgcaccatcatcatcggcaaggcccacacagagaaggtgcacgtgcctgcccggccctacagagtgctgaacaacttcatcagcaaccagaagatggacttcaaggaggacctgtctggaattgctgagatgttcaagacccctgtgaaggagcagccccagctgaccagcacctgccacatcgccatcagcaacagcgagaacctgctgggcaagcagttccagggcacagattctggagaggagcccctgctgcccaccagcgagagctttggaggaaatgtgttcttcagcgcccagaatgctgccaagcagcccagcgacaagtgcagcgccagcccccccctgcggcggcagtgcatcagagaaaatggaaatgtggccaagacccccaggaacacctacaagatgaccagcctggagaccaagaccagtgacacagaaacagagcccagcaagacagtgtccacagccaacagaagtggccgcagcacagagttcaggaacatccagaagctgcctgtggagagcaagtctgaggagaccaacacagagatcgtggagtgcatcctgaagaggggccagaaggccaccctgctgcagcagaggcgggagggggagatgaaggagattgagcggccctttgagacctacaaggagaacatcgagctgaaggaaaatgatgagaagatgaaggccatgaagaggagcaggacctggggccagaagtgtgcccccatgtctgacctgacagacctgaagagcctgcctgacacagagctgatgaaggacacagcccggggccagaacctgctgcagacccaggaccacgccaaggcccccaagtctgagaagggcaagatcaccaagatgccctgccagagcctgcagcctgagcccatcaacacccccacccacaccaagcagcagctgaaggccagcctgggcaaggtgggcgtgaaggaggagctgctggccgtgggcaagttcaccaggaccagcggggagaccacccacacccaccgggagcctgctggagatggcaagagcatccgcaccttcaaggagagccccaagcagatcctggaccctgctgcccgggtgacaggcatgaagaagtggcccaggacccccaaggaggaggcccagagcctggaggacctggccggcttcaaggagctgttccagaccccaggccccagcgaggagagcatgacagatgagaagaccaccaagatcgcctgcaagagccccccacctgagagcgtggacacccccaccagcaccaagcagtggcccaagaggagcctgaggaaggcagatgtggaggaggagttcctggccctgaggaagctgaccccatctgctgggaaggccatgctgacccccaagccagctggaggagatgagaaggacatcaaggccttcatgggcacccctgtgcagaagctggacctggccggcaccctgcccggcagcaagaggcagctgcagacccccaaggagaaggcccaggccctggaggacctggccggcttcaaggagctgttccagaccccaggccacacagaggagctggtggccgccggcaagaccaccaagatcccctgtgacagcccccagagcgaccctgtggacacccccaccagcaccaagcagaggcccaagaggagcatcaggaaggcagatgtggagggggagctgctggcctgcaggaacctgatgcccagcgctgggaaggccatgcacacccccaagcccagcgtgggggaggagaaggacatcatcatctttgtgggcacccctgtgcagaagctggacctgacagagaacctgaccggcagcaagagaagaccccagacccccaaggaggaggcccaggccctggaggacctgaccggcttcaaggagctgttccagaccccaggccacacagaggaggccgtggccgccggcaagaccaccaagatgccctgtgagagcagccccccagagagcgctgacacccccaccagcacccggcggcagcccaagacccccctggagaagagagatgtgcagaaggagctgagcgccctgaagaagctgacccagaccagcggggagaccacccacacagacaaggtgcctggaggagaggacaagagcatcaatgccttccgggagacagccaagcagaagctggaccctgctgcctctgtgacaggcagcaagaggcaccccaagaccaaggagaaggcccagcccctggaggacctggccggcctgaaggagctgttccagacccctgtgtgcacagacaagcccaccacccatgagaagaccaccaagatcgcctgccgcagccagcctgaccctgtggacacccccaccagcagcaagccccagagcaagaggagcctgaggaaggtggatgtggaggaggagttctttgccctgaggaagaggaccccatctgctgggaaggccatgcacacccccaagccagctgtgtctggagagaagaacatctatgccttcatgggcacccctgtgcagaagctggacctgacagagaacctgaccggcagcaagaggcggctgcagacccccaaggagaaggcccaggccctggaggacctggccggcttcaaggagctgttccagacccggggccacacagaggagagcatgaccaatgacaagacagccaaggtggcctgcaagagcagccagcctgaccctgacaagaacccagccagcagcaagaggcggctgaagaccagcctgggcaaggtgggcgtgaaggaggagctgctggccgtgggcaagctgacccagaccagcggggagaccacccacacccacacagagcccactggagatggcaagtccatgaaggccttcatggagagccccaagcagatcctggacagcgctgccagcctgaccggcagcaagaggcagctgcggacccccaagggcaagtctgaggtgcctgaggacctggccggcttcatcgagctgttccagacccccagccacaccaaggagagcatgaccaatgagaagaccaccaaggtgtcctaccgggccagccagcctgacctggtggacacccccaccagcagcaagccccagcccaagaggagcctgaggaaggctgacacagaggaggagttcctggccttcaggaagcagaccccatctgctgggaaggccatgcacacccccaagccagctgtgggggaggagaaggacatcaacaccttcctgggcacccctgtgcagaagctggaccagcccggcaacctgcccggcagcaacagaaggctgcagaccaggaaggagaaggcccaggccctggaggagctgaccggcttccgggagctgttccagaccccctgcacagacaaccccaccacagatgagaagaccaccaagaagatcctgtgcaagagcccccagagcgaccctgctgacacccccaccaacaccaagcagaggcccaagaggagcctgaagaaggcagatgtggaggaggagttcctggccttcaggaagctgaccccatctgctgggaaggccatgcacacccccaaggctgctgtgggggaggagaaggacatcaacacctttgtgggcacccctgtggagaagctggacctgctgggcaacctgcccggcagcaagagaagaccccagacccccaaggagaaggccaaggccctggaggacctggccggcttcaaggagctgttccagaccccaggccacacagaggagagcatgacagatgacaagatcacagaggtgtcctgcaagagcccccagcctgaccctgtgaagacccccaccagcagcaagcagaggctgaagatcagcctgggcaaggtgggcgtgaaggaggaggtgctgcctgtgggcaagctgacccagaccagcggcaagaccacccagacccaccgggagacagctggagatggcaagagcatcaaggccttcaaggagagcgccaagcagatgctggaccctgccaactatggaacaggcatggagcgctggcccaggacccccaaggaggaggcccagagcctggaggacctggccggcttcaaggagctgttccagaccccagaccacacagaggagagcaccacagatgacaagaccaccaagatcgcctgcaagagccccccacctgagagcatggacacccccaccagcaccaggagaagacccaagacccccctgggcaagagggacatcgtggaggagctgagcgccctgaagcagctgacccagaccacccacacagacaaggtgcctggagatgaagataaaggcatcaacgtgttccgggagacagccaagcagaagctggaccctgctgcctctgtgacaggcagcaagaggcagcccaggacccccaagggcaaggcccagcccctggaggacctggccggcctgaaggagctgttccagacccccatctgcacagacaagcccaccacccatgagaagaccaccaagatcgcctgccgcagcccccagcctgaccctgtgggcacccccaccatcttcaagccccagagcaagaggagcctgaggaaggcagatgtggaggaggagagcctggccctgaggaagaggaccccatctgtgggcaaggccatggacacccccaagccagctggaggagatgagaaggacatgaaggccttcatgggcacccctgtgcagaagctggacctgcccggcaacctgcccggcagcaagcgctggccccagacccccaaggagaaggcccaggccctggaggacctggccggcttcaaggagctgttccagaccccaggcacagacaagcccaccacagatgagaagaccaccaagatcgcctgcaagagcccccagcctgaccctgtggacaccccagccagcaccaagcagaggcccaagaggaacctgaggaaggcagatgtggaggaggagttcctggccctgaggaagaggacccccagcgctgggaaggccatggacacccccaagccagctgtgtctgatgagaagaacatcaacacctttgtggagacccctgtgcagaagctggacctgctgggcaacctgcccggcagcaagaggcagccccagacccccaaggagaaggccgaggccctggaggacctggtgggcttcaaggagctgttccagaccccaggccacacagaggagagcatgacagatgacaagatcacagaggtgtcctgcaagagcccccagcctgagagcttcaagaccagccgcagcagcaagcagaggctgaagatccccctggtgaaggtggacatgaaggaggagcccctggccgtgtccaagctgaccaggaccagcggggagaccacccagacccacacagagcccaccggggacagcaagagcatcaaggccttcaaggagagccccaagcagatcctggaccctgctgcctctgtgacaggcagccggcggcagctgcggaccaggaaggagaaggcccgggccctggaggacctggtggacttcaaggagctgttcagcgcccctggccacacagaggagagcatgaccatcgacaagaacaccaagatcccctgcaagagccccccacctgagctgacagacacagccaccagcaccaagcgctgccccaagacccggcccaggaaggaggtgaaggaggagctgtctgctgtggagcggctgacccagaccagcggccagagcacccacacccacaaggagcccgccagcggagatgagggcatcaaggtgctgaagcagagggccaagaagaagcccaaccctgtggaggaggagcccagcagaagaagaccccgggcccccaaggagaaggcccagcccctggaggacctggccggcttcacagagctgtctgagaccagcggccacacccaggagagcctgacagctgggaaggccaccaagatcccctgtgagagcccccccctggaggtggtggacaccacagccagcaccaagaggcacctgcggaccagggtgcagaaggtgcaggtgaaggaggagcccagcgctgtgaagttcacccagaccagcggggagaccacagatgctgacaaggagcctgctggagaagataaaggcatcaaggccctgaaggagagcgccaagcagaccccagccccagctgcctctgtgacaggcagcagaagaagaccccgggccccccgggagagcgcccaggccatcgaggacctggccggcttcaaggaccctgctgctggccacacagaggagagcatgacagatgacaagaccaccaagatcccctgcaagagcagccctgagctggaggacacagccaccagcagcaagaggcggcccaggacccgggcccagaaggtggaggtgaaggaggagctgctggccgtgggcaagctgacccagaccagcggggagaccacccacacagacaaggagcctgtgggggagggcaagggcaccaaggccttcaagcagcctgccaagaggaagctggatgctgaagatgtgattggcagccggcggcagccccgggcccccaaggagaaggcccagcccctggaggacctggccagcttccaggagctgagccagaccccaggccacacagaggagctggccaacggggctgctgacagcttcaccagcgcccccaagcagaccccagacagcggcaagcccctgaagatcagccggcgggtgctgcgggcccccaaggtggagcctgtgggagatgtggtgtccacccgggaccctgtgaagagccagagcaagagcaacaccagcctgccccccctgcccttcaagagaggaggcggcaaggatggctctgtgacaggcaccaagaggctgcgctgcatgcctgcccctgaggagatcgtggaggagctgcctgccagcaagaagcagagggtggccccccgggcccggggcaagagcagcgagcctgtggtgatcatgaagaggagcctgcggaccagcgccaagagaattgagcctgctgaggagctgaacagcaatgacatgaagaccaacaaggaggagcacaagctgcaggacagcgtgcctgaaaataaaggcatcagcctgcggagccggcggcagaacaagacagaagctgagcagcagatcacagaggtgtttgtgctggccgagagaattgagatcaacagaaatgagaagaagcccatgaagaccagccctgagatggacatccagaacccagatgatggagccaggaagcccatcccccgggacaaggtgacagagaacaagcgctgcctgcggagcgcccggcagaatgaaagcagccagcccaaggtggccgaggagagcggcggccagaagagcgccaaggtgctgatgcagaaccagaagggcaaaggagaggccggcaacagcgacagcatgtgcctgcggagcaggaagaccaagagccagcctgctgccagcaccctggagagcaagtctgtgcagagggtgaccaggtctgtgaagagatgtgccgagaaccccaagaaggcagaagataatgtgtgtgtgaagaagatccgcaccaggagccaccgggacagcgaggacatctag

SEQ ID NO: 18329 - DNA, 9771 bp, synthetic construct
  misc_feature 1..9771: note = Description of Artificial Sequence: Synthetic coding sequence
  source 1..9771: mol_type = other DNA
atgtggcccacccggcggctggtgaccatcaagaggtctggagtggatggcccccacttccccctgagcctgagcacctgcctgtttggccggggcattgaatgtgacatccgcatccagctgcctgtggtgtccaagcagcactgcaagattgagatccacgagcaggaggccatcctgcacaacttcagcagcaccaaccccacccaggtgaatggatctgtgattgatgagcctgtgcggctgaagcatggagatgtgatcaccatcatcgacaggagcttccgctatgaaaatgaaagcctgcagaatggaaggaagagcacagagttccccaggaagatccgggagcaggagcccgcccggcgggtgagccgcagcagcttcagcagtgaccctgatgagaaggcccaggacagcaaggcctacagcaagatcacagagggcaaggtgtctggcaacccccaggtgcacatcaagaatgtgaaggaggacagcacagcagatgacagcaaggacagcgtggcccagggcaccaccaacgtgcacagcagcgagcacgccggcagaaatggaagaaatgctgctgaccccatcagcggggacttcaaggagatcagctctgtgaagctggtgagccgctatggagagctgaagtctgtgcccaccacccagtgcctggacaacagcaagaagaatgaaagccccttctggaagctgtatgaatctgtgaagaaggagctggatgtgaagagccagaaggaaaatgtgctgcagtactgcaggaagagcggcctgcagacagattatgccacagagaaggagagcgcagatggcctgcagggcgagacccagctgctggtgtccaggaagagccggcccaagagcggcggcagcggccatgctgtggccgagcccgccagccctgagcaggagctggaccagaacaagggcaagggcagagatgtggagagcgtgcagacccccagcaaggctgtgggcgccagcttccccctgtatgagcccgccaagatgaagacccctgtgcagtacagccagcagcagaacagcccccagaagcacaagaacaaggacctgtacaccactggaagaagagagagcgtgaacctgggcaagtctgagggcttcaaggccggggacaagaccctgacccccaggaagctgagcaccaggaacagaacaccagccaaggtggaggatgctgctgacagcgccaccaagccagagaacctgagcagcaagacccggggcagcatccccacagatgtggaggtgctgcccacagaaacagagatccacaatgagcccttcctgaccctgtggctgacccaggtggagaggaagatccagaaggacagcctgagcaagccagagaagctgggcaccacagctggccagatgtgcagcggcctgcccggcctgagctctgtggacatcaacaactttggagacagcatcaatgaaagtgagggcatccccctgaagagaagaagagtgtcctttggaggccacctgcggcctgagctgtttgatgagaacctgccccccaacacccccctgaagagaggagaggcccccaccaagaggaagagcctggtgatgcacaccccacctgtgctgaagaagatcatcaaggagcagccccagcccagcggcaagcaggagagcggcagcgagatccacgtggaggtgaaggcccagagcctggtgatcagccccccagcccccagccccaggaagacccctgtggccagtgaccagaggcggcgcagctgcaagacagccccagccagcagcagcaagagccagacagaggtgcccaagagaggaggcaggaagagcggcaacctgcccagcaagagggtgtccatcagccgcagccagcacgacatcctgcagatgatctgcagcaagagaagaagtggggccagcgaggccaacctgattgtggccaagtcctgggcagatgtggtgaagctgggcgccaagcagacccagaccaaggtgatcaagcacggcccccagaggtccatgaacaagaggcagaggaggcctgccacccccaagaagcctgtgggggaggtgcacagccagttcagcacaggccacgccaacagcccctgcaccatcatcatcggcaaggcccacacagagaaggtgcacgtgcctgcccggccctacagagtgctgaacaacttcatcagcaaccagaagatggacttcaaggaggacctgtctggaattgctgagatgttcaagacccctgtgaaggagcagccccagctgaccagcacctgccacatcgccatcagcaacagcgagaacctgctgggcaagcagttccagggcacagattctggagaggagcccctgctgcccaccagcgagagctttggaggaaatgtgttcttcagcgcccagaatgctgccaagcagcccagcgacaagtgcagcgccagcccccccctgcggcggcagtgcatcagagaaaatggaaatgtggccaagacccccaggaacacctacaagatgaccagcctggagaccaagaccagtgacacagaaacagagcccagcaagacagtgtccacagccaacagaagtggccgcagcacagagttcaggaacatccagaagctgcctgtggagagcaagtctgaggagaccaacacagagatcgtggagtgcatcctgaagaggggccagaaggccaccctgctgcagcagaggcgggagggggagatgaaggagattgagcggccctttgagacctacaaggagaacatcgagctgaaggaaaatgatgagaagatgaaggccatgaagaggagcaggacctggggccagaagtgtgcccccatgtctgacctgacagacctgaagagcctgcctgacacagagctgatgaaggacacagcccggggccagaacctgctgcagacccaggaccacgccaaggcccccaagtctgagaagggcaagatcaccaagatgccctgccagagcctgcagcctgagcccatcaacacccccacccacaccaagcagcagctgaaggccagcctgggcaaggtgggcgtgaaggaggagctgctggccgtgggcaagttcaccaggaccagcggggagaccacccacacccaccgggagcctgctggagatggcaagagcatccgcaccttcaaggagagccccaagcagatcctggaccctgctgcccgggtgacaggcatgaagaagtggcccaggacccccaaggaggaggcccagagcctggaggacctggccggcttcaaggagctgttccagaccccaggccccagcgaggagagcatgacagatgagaagaccaccaagatcgcctgcaagagccccccacctgagagcgtggacacccccaccagcaccaagcagtggcccaagaggagcctgaggaaggcagatgtggaggaggagttcctggccctgaggaagctgaccccatctgctgggaaggccatgctgacccccaagccagctggaggagatgagaaggacatcaaggccttcatgggcacccctgtgcagaagctggacctggccggcaccctgcccggcagcaagaggcagctgcagacccccaaggagaaggcccaggccctggaggacctggccggcttcaaggagctgttccagaccccaggccacacagaggagctggtggccgccggcaagaccaccaagatcccctgtgacagcccccagagcgaccctgtggacacccccaccagcaccaagcagaggcccaagaggagcatcaggaaggcagatgtggagggggagctgctggcctgcaggaacctgatgcccagcgctgggaaggccatgcacacccccaagcccagcgtgggggaggagaaggacatcatcatctttgtgggcacccctgtgcagaagctggacctgacagagaacctgaccggcagcaagagaagaccccagacccccaaggaggaggcccaggccctggaggacctgaccggcttcaaggagctgttccagaccccaggccacacagaggaggccgtggccgccggcaagaccaccaagatgccctgtgagagcagccccccagagagcgctgacacccccaccagcacccggcggcagcccaagacccccctggagaagagagatgtgcagaaggagctgagcgccctgaagaagctgacccagaccagcggggagaccacccacacagacaaggtgcctggaggagaggacaagagcatcaatgccttccgggagacagccaagcagaagctggaccctgctgcctctgtgacaggcagcaagaggcaccccaagaccaaggagaaggcccagcccctggaggacctggccggcctgaaggagctgttccagacccctgtgtgcacagacaagcccaccacccatgagaagaccaccaagatcgcctgccgcagccagcctgaccctgtggacacccccaccagcagcaagccccagagcaagaggagcctgaggaaggtggatgtggaggaggagttctttgccctgaggaagaggaccccatctgctgggaaggccatgcacacccccaagccagctgtgtctggagagaagaacatctatgccttcatgggcacccctgtgcagaagctggacctgacagagaacctgaccggcagcaagaggcggctgcagacccccaaggagaaggcccaggccctggaggacctggccggcttcaaggagctgttccagacccggggccacacagaggagagcatgaccaatgacaagacagccaaggtggcctgcaagagcagccagcctgaccctgacaagaacccagccagcagcaagaggcggctgaagaccagcctgggcaaggtgggcgtgaaggaggagctgctggccgtgggcaagctgacccagaccagcggggagaccacccacacccacacagagcccactggagatggcaagtccatgaaggccttcatggagagccccaagcagatcctggacagcgctgccagcctgaccggcagcaagaggcagctgcggacccccaagggcaagtctgaggtgcctgaggacctggccggcttcatcgagctgttccagacccccagccacaccaaggagagcatgaccaatgagaagaccaccaaggtgtcctaccgggccagccagcctgacctggtggacacccccaccagcagcaagccccagcccaagaggagcctgaggaaggctgacacagaggaggagttcctggccttcaggaagcagaccccatctgctgggaaggccatgcacacccccaagccagctgtgggggaggagaaggacatcaacaccttcctgggcacccctgtgcagaagctggaccagcccggcaacctgcccggcagcaacagaaggctgcagaccaggaaggagaaggcccaggccctggaggagctgaccggcttccgggagctgttccagaccccctgcacagacaaccccaccacagatgagaagaccaccaagaagatcctgtgcaagagcccccagagcgaccctgctgacacccccaccaacaccaagcagaggcccaagaggagcctgaagaaggcagatgtggaggaggagttcctggccttcaggaagctgaccccatctgctgggaaggccatgcacacccccaaggctgctgtgggggaggagaaggacatcaacacctttgtgggcacccctgtggagaagctggacctgctgggcaacctgcccggcagcaagagaagaccccagacccccaaggagaaggccaaggccctggaggacctggccggcttcaaggagctgttccagaccccaggccacacagaggagagcatgacagatgacaagatcacagaggtgtcctgcaagagcccccagcctgaccctgtgaagacccccaccagcagcaagcagaggctgaagatcagcctgggcaaggtgggcgtgaaggaggaggtgctgcctgtgggcaagctgacccagaccagcggcaagaccacccagacccaccgggagacagctggagatggcaagagcatcaaggccttcaaggagagcgccaagcagatgctggaccctgccaactatggaacaggcatggagcgctggcccaggacccccaaggaggaggcccagagcctggaggacctggccggcttcaaggagctgttccagaccccagaccacacagaggagagcaccacagatgacaagaccaccaagatcgcctgcaagagccccccacctgagagcatggacacccccaccagcaccaggagaagacccaagacccccctgggcaagagggacatcgtggaggagctgagcgccctgaagcagctgacccagaccacccacacagacaaggtgcctggagatgaagataaaggcatcaacgtgttccgggagacagccaagcagaagctggaccctgctgcctctgtgacaggcagcaagaggcagcccaggacccccaagggcaaggcccagcccctggaggacctggccggcctgaaggagctgttccagacccccatctgcacagacaagcccaccacccatgagaagaccaccaagatcgcctgccgcagcccccagcctgaccctgtgggcacccccaccatcttcaagccccagagcaagaggagcctgaggaaggcagatgtggaggaggagagcctggccctgaggaagaggaccccatctgtgggcaaggccatggacacccccaagccagctggaggagatgagaaggacatgaaggccttcatgggcacccctgtgcagaagctggacctgcccggcaacctgcccggcagcaagcgctggccccagacccccaaggagaaggcccaggccctggaggacctggccggcttcaaggagctgttccagaccccaggcacagacaagcccaccacagatgagaagaccaccaagatcgcctgcaagagcccccagcctgaccctgtggacaccccagccagcaccaagcagaggcccaagaggaacctgaggaaggcagatgtggaggaggagttcctggccctgaggaagaggacccccagcgctgggaaggccatggacacccccaagccagctgtgtctgatgagaagaacatcaacacctttgtggagacccctgtgcagaagctggacctgctgggcaacctgcccggcagcaagaggcagccccagacccccaaggagaaggccgaggccctggaggacctggtgggcttcaaggagctgttccagaccccaggccacacagaggagagcatgacagatgacaagatcacagaggtgtcctgcaagagcccccagcctgagagcttcaagaccagccgcagcagcaagcagaggctgaagatccccctggtgaaggtggacatgaaggaggagcccctggccgtgtccaagctgaccaggaccagcggggagaccacccagacccacacagagcccaccggggacagcaagagcatcaaggccttcaaggagagccccaagcagatcctggaccctgctgcctctgtgacaggcagccggcggcagctgcggaccaggaaggagaaggcccgggccctggaggacctggtggacttcaaggagctgttcagcgcccctggccacacagaggagagcatgaccatcgacaagaacaccaagatcccctgcaagagccccccacctgagctgacagacacagccaccagcaccaagcgctgccccaagacccggcccaggaaggaggtgaaggaggagctgtctgctgtggagcggctgacccagaccagcggccagagcacccacacccacaaggagcccgccagcggagatgagggcatcaaggtgctgaagcagagggccaagaagaagcccaaccctgtggaggaggagcccagcagaagaagaccccgggcccccaaggagaaggcccagcccctggaggacctggccggcttcacagagctgtctgagaccagcggccacacccaggagagcctgacagctgggaaggccaccaagatcccctgtgagagcccccccctggaggtggtggacaccacagccagcaccaagaggcacctgcggaccagggtgcagaaggtgcaggtgaaggaggagcccagcgctgtgaagttcacccagaccagcggggagaccacagatgctgacaaggagcctgctggagaagataaaggcatcaaggccctgaaggagagcgccaagcagaccccagccccagctgcctctgtgacaggcagcagaagaagaccccgggccccccgggagagcgcccaggccatcgaggacctggccggcttcaaggaccctgctgctggccacacagaggagagcatgacagatgacaagaccaccaagatcccctgcaagagcagccctgagctggaggacacagccaccagcagcaagaggcggcccaggacccgggcccagaaggtggaggtgaaggaggagctgctggccgtgggcaagctgacccagaccagcggggagaccacccacacagacaaggagcctgtgggggagggcaagggcaccaaggccttcaagcagcctgccaagaggaagctggatgctgaagatgtgattggcagccggcggcagccccgggcccccaaggagaaggcccagcccctggaggacctggccagcttccaggagctgagccagaccccaggccacacagaggagctggccaacggggctgctgacagcttcaccagcgcccccaagcagaccccagacagcggcaagcccctgaagatcagccggcgggtgctgcgggcccccaaggtggagcctgtgggagatgtggtgtccacccgggaccctgtgaagagccagagcaagagcaacaccagcctgccccccctgcccttcaagagaggaggcggcaaggatggctctgtgacaggcaccaagaggctgcgctgcatgcctgcccctgaggagatcgtggaggagctgcctgccagcaagaagcagagggtggccccccgggcccggggcaagagcagcgagcctgtggtgatcatgaagaggagcctgcggaccagcgccaagagaattgagcctgctgaggagctgaacagcaatgacatgaagaccaacaaggaggagcacaagctgcaggacagcgtgcctgaaaataaaggcatcagcctgcggagccggcggcagaacaagacagaagctgagcagcagatcacagaggtgtttgtgctggccgagagaattgagatcaacagaaatgagaagaagcccatgaagaccagccctgagatggacatccagaacccagatgatggagccaggaagcccatcccccgggacaaggtgacagagaacaagcgctgcctgcggagcgcccggcagaatgaaagcagccagcccaaggtggccgaggagagcggcggccagaagagcgccaaggtgctgatgcagaaccagaagggcaaaggagaggccggcaacagcgacagcatgtgcctgcggagcaggaagaccaagagccagcctgctgccagcaccctggagagcaagtctgtgcagagggtgaccaggtctgtgaagagatgtgccgagaaccccaagaaggcagaagataatgtgtgtgtgaagaagatccgcaccaggagccaccgggacagcgaggacatctag

SEQ ID NO: 18330 - DNA, 9768 bp, synthetic construct
  misc_feature 1..9768: note = Description of Artificial Sequence: Synthetic coding sequence
  source 1..9768: mol_type = other DNA
atgtggcccacccggcggctggtgaccatcaagaggtctggagtggatggcccccacttccccctgagcctgagcacctgcctgtttggccggggcattgaatgtgacatccgcatccagctgcctgtggtgtccaagcagcactgcaagattgagatccacgagcaggaggccatcctgcacaacttcagcagcaccaaccccacccaggtgaatggatctgtgattgatgagcctgtgcggctgaagcatggagatgtgatcaccatcatcgacaggagcttccgctatgaaaatgaaagcctgcagaatggaaggaagagcacagagttccccaggaagatccgggagcaggagcccgcccggcgggtgagccgcagcagcttcagcagtgaccctgatgagaaggcccaggacagcaaggcctacagcaagatcacagagggcaaggtgtctggcaacccccaggtgcacatcaagaatgtgaaggaggacagcacagcagatgacagcaaggacagcgtggcccagggcaccaccaacgtgcacagcagcgagcacgccggcagaaatggaagaaatgctgctgaccccatcagcggggacttcaaggagatcagctctgtgaagctggtgagccgctatggagagctgaagtctgtgcccaccacccagtgcctggacaacagcaagaagaatgaaagccccttctggaagctgtatgaatctgtgaagaaggagctggatgtgaagagccagaaggaaaatgtgctgcagtactgcaggaagagcggcctgcagacagattatgccacagagaaggagagcgcagatggcctgcagggcgagacccagctgctggtgtccaggaagagccggcccaagagcggcggcagcggccatgctgtggccgagcccgccagccctgagcaggagctggaccagaacaagggcaagggcagagatgtggagagcgtgcagacccccagcaaggctgtgggcgccagcttccccctgtatgagcccgccaagatgaagacccctgtgcagtacagccagcagcagaacagcccccagaagcacaagaacaaggacctgtacaccactggaagaagagagagcgtgaacctgggcaagtctgagggcttcaaggccggggacaagaccctgacccccaggaagctgagcaccaggaacagaacaccagccaaggtggaggatgctgctgacagcgccaccaagccagagaacctgagcagcaagacccggggcagcatccccacagatgtggaggtgctgcccacagaaacagagatccacaatgagcccttcctgaccctgtggctgacccaggtggagaggaagatccagaaggacagcctgagcaagccagagaagctgggcaccacagctggccagatgtgcagcggcctgcccggcctgagctctgtggacatcaacaactttggagacagcatcaatgaaagtgagggcatccccctgaagagaagaagagtgtcctttggaggccacctgcggcctgagctgtttgatgagaacctgccccccaacacccccctgaagagaggagaggcccccaccaagaggaagagcctggtgatgcacaccccacctgtgctgaagaagatcatcaaggagcagccccagcccagcggcaagcaggagagcggcagcgagatccacgtggaggtgaaggcccagagcctggtgatcagccccccagcccccagccccaggaagacccctgtggccagtgaccagaggcggcgcagctgcaagacagccccagccagcagcagcaagagccagacagaggtgcccaagagaggaggagagcgggtggccacctgcctgcagagggtgtccatcagccgcagccagcacgacatcctgcagatgatctgcagcaagagaagaagtggggccagcgaggccaacctgattgtggccaagtcctgggcagatgtggtgaagctgggcgccaagcagacccagaccaaggtgatcaagcacggcccccagaggtccatgaacaagaggcagaggaggcctgccacccccaagaagcctgtgggggaggtgcacagccagttcagcactggacatgccaacagcccctgcaccatcatcatcggcaaggcccacacagagaaggtgcacgtgcctgcccggccctacagagtgctgaacaacttcatcagcaaccagaagatggacttcaaggaggacctgagcggcattgctgagatgttcaagacccctgtgaaggagcagccccagctgaccagcacctgccacatcgccatcagcaacagcgagaacctgctgggcaagcagttccagggcacagacagcggggaggagcccctgctgcccaccagcgagagctttggaggaaatgtgttcttcagcgcccagaatgctgccaagcagcccagcgacaagtgcagcgccagcccccccctgcggcggcagtgcatccgggagaatggaaatgtggccaagaccccaagaaacacctacaagatgaccagcctggagaccaagaccagtgacacagaaacagagcccagcaagacagtgtccacagccaacagaagtggccgcagcacagagttcaggaacatccagaagctgcctgtggagagcaagtctgaggagaccaacacagaaattgtggagtgcatcctgaagaggggccagaaggccaccctgctgcagcagaggcgggagggggagatgaaggagattgaaagaccatttgagacctacaaggaaaatattgagctgaaggaaaatgatgagaagatgaaggccatgaagaggagcaggacctggggccagaagtgtgcccccatgtctgacctgacagacctgaagagcctgcctgacacagagctgatgaaggacacagcccggggccagaacctgctgcagacccaggaccacgccaaggcccccaagtctgagaagggcaagatcaccaagatgccctgccagagcctgcagcctgagcccatcaacacccccacccacaccaagcagcagctgaaggccagcctgggcaaggtgggcgtgaaggaggagctgctggccgtgggcaagttcaccaggaccagcggggagaccacccacacccaccgggagcctgctggagatggcaagagcatccgcaccttcaaggagagccccaagcagatcctggaccctgctgcccgggtgacaggcatgaagaagtggcccaggacccccaaggaggaggcccagagcctggaggacctggccggcttcaaggagctgttccagaccccaggccccagcgaggagagcatgacagatgagaagaccaccaagatcgcctgcaagagccccccacctgagagcgtggacacccccaccagcaccaagcagtggcccaagaggagcctgaggaaggcagatgtggaggaggagttcctggccctgaggaagctgacccccagcgctgggaaggccatgctgacccccaagccagctggaggagatgagaaggacatcaaggccttcatgggcacccctgtgcagaagctggacctggccggcaccctgcccggcagcaagaggcagctgcagacccccaaggagaaggcccaggccctggaggacctggccggcttcaaggagctgttccagaccccaggccacacagaggagctggtggccgccggcaagaccaccaagatcccctgtgacagcccccagagcgaccctgtggacacccccaccagcaccaagcagaggcccaagaggagcatcaggaaggcagatgtggagggggagctgctggcctgcaggaacctgatgcccagcgctgggaaggccatgcacacccccaagcccagcgtgggggaggagaaggacatcatcatctttgtgggcacccctgtgcagaagctggacctgacagagaacctgaccggcagcaagaggcggccccagacccccaaggaggaggcccaggccctggaggacctgaccggcttcaaggagctgttccagaccccaggccacacagaggaggccgtggccgccggcaagaccaccaagatgccctgtgagagcagccccccagagagcgctgacacccccaccagcacccggcggcagcccaagacccccctggagaagagagatgtgcagaaggagctgagcgccctgaagaagctgacccagaccagcggggagaccacccacacagacaaggtgcctggaggagaggacaagagcatcaatgccttccgggagacagccaagcagaagctggaccctgctgcctctgtgacaggcagcaagaggcaccccaagaccaaggagaaggcccagcccctggaggacctggccggcctgaaggagctgttccagacccctgtgtgcacagacaagcccaccacccatgagaagaccaccaagatcgcctgccgcagccagcctgaccctgtggacacccccaccagcagcaagccccagagcaagaggagcctgaggaaggtggatgtggaggaggagttctttgccctgaggaagaggacccccagcgctgggaaggccatgcacacccccaagccagctgtgtctggagagaagaacatctatgccttcatgggcacccctgtgcagaagctggacctgacagagaacctgaccggcagcaagaggcggctgcagacccccaaggagaaggcccaggccctggaggacctggccggcttcaaggagctgttccagacccggggccacacagaggagagcatgaccaatgacaagacagccaaggtggcctgcaagagcagccagcctgaccctgacaagaacccagccagcagcaagaggcggctgaagaccagcctgggcaaggtgggcgtgaaggaggagctgctggccgtgggcaagctgacccagaccagcggggagaccacccacacccacacagagcccactggagatggcaagtccatgaaggccttcatggagagccccaagcagatcctggacagcgctgccagcctgaccggcagcaagaggcagctgcggacccccaagggcaagtctgaggtgcctgaggacctggccggcttcatcgagctgttccagacccccagccacaccaaggagagcatgaccaatgagaagaccaccaaggtgtcctaccgggccagccagcctgacctggtggacacccccaccagcagcaagccccagcccaagaggagcctgaggaaggctgacacagaggaggagttcctggccttcaggaagcagacccccagcgctgggaaggccatgcacacccccaagccagctgtgggggaggagaaggacatcaacaccttcctgggcacccctgtgcagaagctggaccagcccggcaacctgcccggcagcaacagaaggctgcagaccaggaaggagaaggcccaggccctggaggagctgaccggcttccgggagctgttccagaccccctgcacagacaaccccaccacagatgagaagaccaccaagaagatcctgtgcaagagcccccagagcgaccctgctgacacccccaccaacaccaagcagaggcccaagaggagcctgaagaaggcagatgtggaggaggagttcctggccttcaggaagctgacccccagcgctgggaaggccatgcacacccccaaggctgctgtgggggaggagaaggacatcaacacctttgtgggcacccctgtggagaagctggacctgctgggcaacctgcccggcagcaagaggcggccccagacccccaaggagaaggccaaggccctggaggacctggccggcttcaaggagctgttccagaccccaggccacacagaggagagcatgacagatgacaagatcacagaggtgtcctgcaagagcccccagcctgaccctgtgaagacccccaccagcagcaagcagaggctgaagatcagcctgggcaaggtgggcgtgaaggaggaggtgctgcctgtgggcaagctgacccagaccagcggcaagaccacccagacccaccgggagacagctggagatggcaagagcatcaaggccttcaaggagagcgccaagcagatgctggaccctgccaactacggcaccggcatggagcgctggcccaggacccccaaggaggaggcccagagcctggaggacctggccggcttcaaggagctgttccagaccccagaccacacagaggagagcaccacagatgacaagaccaccaagatcgcctgcaagagccccccacctgagagcatggacacccccaccagcacccggcggcggcccaagacccccctgggcaagagggacatcgtggaggagctgagcgccctgaagcagctgacccagaccacccacacagacaaggtgcctggagatgaggacaagggcatcaacgtgttccgggagacagccaagcagaagctggaccctgctgcctctgtgacaggcagcaagaggcagcccaggacccccaagggcaaggcccagcccctggaggacctggccggcctgaaggagctgttccagacccccatctgcacagacaagcccaccacccatgagaagaccaccaagatcgcctgccgcagcccccagcctgaccctgtgggcacccccaccatcttcaagccccagagcaagaggagcctgaggaaggcagatgtggaggaggagagcctggccctgaggaagaggacccccagcgtgggcaaggccatggacacccccaagccagctggaggagatgagaaggacatgaaggccttcatgggcacccctgtgcagaagctggacctgcccggcaacctgcccggcagcaagcgctggccccagacccccaaggagaaggcccaggccctggaggacctggccggcttcaaggagctgttccagaccccaggcacagacaagcccaccacagatgagaagaccaccaagatcgcctgcaagagcccccagcctgaccctgtggacaccccagccagcaccaagcagaggcccaagaggaacctgaggaaggcagatgtggaggaggagttcctggccctgaggaagaggaccccatctgctgggaaggccatggacacccccaagccagctgtgtctgatgagaagaacatcaacacctttgtggagacccctgtgcagaagctggacctgctgggcaacctgcccggcagcaagaggcagccccagacccccaaggagaaggccgaggccctggaggacctggtgggcttcaaggagctgttccagaccccaggccacacagaggagagcatgacagatgacaagatcacagaggtgtcctgcaagagcccccagcctgagagcttcaagaccagccgcagcagcaagcagaggctgaagatccccctggtgaaggtggacatgaaggaggagcccctggccgtgtccaagctgaccaggaccagcggggagaccacccagacccacacagagcccactggagacagcaagagcatcaaggccttcaaggagagccccaagcagatcctggaccctgctgcctctgtgacaggcagccggcggcagctgcggaccaggaaggagaaggcccgggccctggaggacctggtggacttcaaggagctgttcagcgcccctggccacacagaggagagcatgaccatcgacaagaacaccaagatcccctgcaagagccccccacctgagctgacagacacagccaccagcaccaagcgctgccccaagacccggcccaggaaggaggtgaaggaggagctgtctgctgtggagcggctgacccagaccagcggccagagcacccacacccacaaggagcccgccagcggagatgagggcatcaaggtgctgaagcagagggccaagaagaagcccaaccctgtggaggaggagcccagcagaagaagaccccgggcccccaaggagaaggcccagcccctggaggacctggccggcttcacagagctgtctgagaccagcggccacacccaggagagcctgacagctgggaaggccaccaagatcccctgtgagagcccccccctggaggtggtggacaccacagccagcaccaagaggcacctgcggaccagggtgcagaaggtgcaggtgaaggaggagcccagcgctgtgaagttcacccagaccagcggggagaccacagatgctgacaaggagcctgctggggaggacaagggcatcaaggccctgaaggagagcgccaagcagaccccagccccagctgcctctgtgacaggcagcagaagaagaccccgggccccccgggagagcgcccaggccatcgaggacctggccggcttcaaggaccctgctgctggccacacagaggagagcatgacagatgacaagaccaccaagatcccctgcaagagcagccctgagctggaggacacagccaccagcagcaagagaagacccaggacccgggcccagaaggtggaggtgaaggaggagctgctggccgtgggcaagctgacccagaccagcggggagaccacccacacagacaaggagcctgtgggggagggcaagggcaccaaggccttcaagcagcctgccaagaggaagctggatgctgaagatgtgattggcagccggcggcagccccgggcccccaaggagaaggcccagcccctggaggacctggccagcttccaggagctgagccagaccccaggccacacagaggagctggccaatggagctgctgacagcttcaccagcgcccccaagcagaccccagattctgggaagcccctgaagatcagcagaagagtgctgcgggcccccaaggtggagcctgtgggagatgtggtgtccacccgggaccctgtgaagagccagagcaagagcaacaccagcctgccccccctgcccttcaagaggggcggcggcaaggatggctctgtgacaggcaccaagaggctgcgctgcatgcctgcccctgaggagatcgtggaggagctgcctgccagcaagaagcagagggtggccccccgggcccggggcaagagcagcgagcctgtggtgatcatgaagaggagcctgcggaccagcgccaagagaattgagcctgctgaggagctgaacagcaatgacatgaagaccaacaaggaggagcacaagctgcaggacagcgtgcctgagaacaagggcatcagcctgcggagccggcggcagaacaagacagaggccgagcagcagatcacagaggtgtttgtgctggccgagcgcatcgagatcaacagaaatgagaagaagcccatgaagaccagccctgagatggacatccagaacccagatgatggagccaggaagcccatcccccgggacaaggtgacagagaacaagcgctgcctgcggagcgcccggcagaatgaaagcagccagcccaaggtggccgaggagagcggcggccagaagagcgccaaggtgctgatgcagaaccagaagggcaagggggaggccggcaacagcgacagcatgtgcctgcggagcaggaagaccaagagccagcctgctgccagcaccctggagagcaagtctgtgcagagggtgaccaggtctgtgaagagatgtgccgagaaccccaagaaggccgaggacaacgtgtgtgtgaagaagatccgcaccaggagccaccgggacagcgaggacatctag

SEQ ID NO: 18331 - DNA, 141 bp, synthetic construct
  misc_feature 1..141: note = Description of Artificial Sequence: Synthetic coding sequence
  source 1..141: mol_type = other DNA
atgtggcccacccggcggctggtgaccatcaagaggtctggagtggatggcccccacttccccctgagcctgagcacctgcctgtttggaagaagaaaatgtgtgctgcagtgcacagagtgcagcaagacagccatctag

SEQ ID NO: 18332 - DNA, 1557 bp, synthetic construct
  misc_feature 1..1557: note = Description of Artificial Sequence: Synthetic coding sequence
  source 1..1557: mol_type = other DNA
atgctgcgggtggtgtcctggaacatcaatggcatcagaagacccctgcagggcgtggccaaccaggagcccagcaactgtgccgctgtggccgtgggccgcatcctggatgagctggatgctgacatcgtgtgcctgcaggagaccaaggtgaccagagatgccctgacagagcccctggccatcgtggagggctacaacagctacttctccttcagcaggaacagaagtggctacagcggcgtggccaccttctgcaaggacaatgccacccctgtggccgctgaggagggcctgagcggcctgtttgccacccagaatggagatgtgggctgctacggcaacatggatgagttcacccaggaggagctgcgggccctggacagcgagggccgggccctgctgacccagcacaagatccgcacctgggagggcaaggagaagaccctgaccctcatcaacgtgtactgcccccacgccgaccccggccggcctgagcggctggtgttcaagatgaggttctaccgcctgctgcagatccgggcagaggccctgctggccgccggcagccacgtgatcatcctgggggacctgaacacagcccaccggcccatcgaccactgggatgctgtgaacctggagtgctttgaggaggaccccggcaggaagtggatggacagcctgctgagcaacctgggctgccagagcgccagccacgtgggccccttcatcgacagctaccgctgcttccagcccaagcaggagggcgccttcacctgctggagcgctgtgactggagcccggcacctgaactacggcagccggctggactatgtgctgggggacaggaccctggtgattgacaccttccaggccagcttcctgctgcctgaggtgatgggcagtgaccactgccctgtgggcgctgtgctgtctgtgtcctctgtgcctgccaagcagtgcccccccctgtgcacccgcttcctgcctgagtttgctggcacccagctgaagatcctgcgcttcctggtgcccctggagcagagccctgtgctggagcagagcaccctgcagcacaacaaccagaccagggtgcagacctgccagaacaaggcccaggtgcgcagcacccggccccagcccagccaggtgggcagcagccggggccagaagaacctgaagagctacttccagcccagccccagctgcccccaggccagcccagacatcgagctgcccagcctgcccctgatgtctgccctgatgacccccaagaccccagaggagaaggctgtggccaaggtggtgaagggccaggccaagaccagcgaggccaaggatgagaaggagctgcggaccagcttctggaagtctgtgctggccggccccctgcggacccccctgtgtggcggccaccgggagccctgtgtgatgaggacagtgaagaagccaggccccaacctgggccgccgcttctacatgtgtgcccggccccggggccccccaacagaccccagcagccgctgcaacttcttcctgtggagccggcccagctag

SEQ ID NO: 18333 - DNA, 1191 bp, synthetic construct
  misc_feature 1..1191: note = Description of Artificial Sequence: Synthetic coding sequence
  source 1..1191: mol_type = other DNA
atgccccgggtgaaggccgcccaggccggccggcagagcagcgccaagaggcacctggccgagcagtttgctgtgggggagatcatcacagacatggccaagaaggagtggaaggtgggcctgcccatcggccagggcggcttcggctgcatctacctggccgacatgaacagcagcgagagcgtgggcagtgatgccccctgtgtggtgaaggtggagcccagcgacaatggccccctcttcacagagctgaagttctaccagagagctgccaagccagagcagatccagaagtggatccgcaccaggaagctgaagtacctgggcgtgcccaagtactggggcagcggcctgcatgacaagaatggcaagagctaccgcttcatgatcatggaccgcttcggcagtgacctgcagaagatctatgaggccaatgccaagcgcttcagcaggaagacagtgctgcagctgagcctgcgcatcctggacatcctggagtacatccatgaacatgaatatgtgcatggagacatcaaggccagcaacctgctgctgaactacaagaacccagaccaggtgtacctggtggactatggcctggcctaccgctactgcccagagggcgtgcacaaggagtacaaggaggaccccaagcgctgccatgatggcaccatcgagttcaccagcattgatgcccacaacggggtggcccccagccggcggggggacctggagatcctgggctactgcatgatccagtggctgaccggccacctgccctgggaggacaacctgaaggaccccaagtatgtgcgggacagcaagatccgctaccgggagaacatcgccagcctgatggacaagtgcttccctgagaagaacaagccaggagaaattgccaagtacatggagaccgtgaagctgctggactacacagagaagcccctgtatgagaacctgcgggacatcctgctgcagggcctgaaggccatcggcagcaaggatgatggcaagctggacctgtctgtggtggagaatggaggcctgaaggccaagaccatcaccaagaagaggaagaaggagattgaggagagcaaggagcccggggtggaggacacagagtggagcaacacccagacagaggaggccatccagaccaggagcaggaccaggaagagggtgcagaagtag

SEQ ID NO: 18334 - DNA, 957 bp, synthetic construct
  misc_feature 1..957: note = Description of Artificial Sequence: Synthetic coding sequence
  source 1..957: mol_type = other DNA
atgcccaagaggggcaagaagggagctgtggccgaggatggagatgagctgaggacagagcctgaggccaagaagagcaagacagctgccaagaagaatgacaaggaggccgccggggagggccctgccctgtatgaggaccccccagaccagaagaccagccccagcggcaagccagccaccctgaagatctgctcctggaatgtggatggcctgcgggcctggatcaagaagaagggcctggactgggtgaaggaggaggccccagacatcctgtgcctgcaggagaccaagtgcagcgagaacaagctgcctgctgagctgcaggagctgcccggcctgagccaccagtactggagcgcccccagcgacaaggagggctacagcggcgtgggcctgctgagccggcagtgccccctgaaggtgtcctatggaattggagatgaggagcatgaccaggagggccgggtcatcgtggccgagtttgacagctttgtgctggtgacagcctacgtgcccaatgccggccggggcctggtgcggctggagtaccggcagcgctgggatgaggccttcaggaagttcctgaagggcctggccagcaggaagcccctggtgctgtgtggggacctgaatgtggcccacgaggagattgacctgaggaaccccaagggcaacaagaagaatgccggcttcaccccccaggagcggcagggctttggagagctgctgcaggccgtgcccctggccgacagcttccgccacctgtaccccaacaccccctatgcctacaccttctggacctacatgatgaatgcccggagcaagaatgtgggctggaggctggactacttcctgctgagccacagcctgctgcctgccctgtgtgacagcaagatccgcagcaaggccctgggcagtgaccactgccccatcaccctgtacctggccctgtag

SEQ ID NO: 18335 - DNA, 792 bp, synthetic construct
  misc_feature 1..792: note = Description of Artificial Sequence: Synthetic coding sequence
  source 1..792: mol_type = other DNA
atgcccaagaggggcaagaagggagctgtggccgaggatggagatgagctgaggacagagcctgaggccaagaagagcaagacagctgccaagaagaatgacaaggaggccgccggggagggccctgccctgtatgaggaccccccagaccagaagaccagccccagcggcaagccagccaccctgaagatctgctcctggaatgtggatggcctgcgggcctggatcaagaagaagggcctggactgggtgaaggaggaggccccagacatcctgtgcctgcaggagaccaagtgcagcgagaacaagctgcctgctgagctgcaggagctgcccggcctgagccaccagtactggagcgcccccagcgacaaggagggctacagcggcgtgggcctgctgagccggcagtgccccctgaaggtgtcctatggaattggagatgaggagcatgaccaggagggccgggtcatcgtggccgagtttgacagctttgtgctggtgacagcctacgtgcccaatgccggccggggcctggtgcggctggagtaccggcagcgctgggatgaggccttcaggaagttcctgaagggcctggccagcaggaagcccctggtgctgtgtggggacctgaatgtggcccacgaggagattgacctgaggaaccccaagggcaacaagaagaatgccggcttcaccccccaggagcggcagggctttggagagctgctgcaggccgtgcccctggccgacagcttccgccacctgtaccccaacaccccctatgcctag

SEQ ID NO: 18336 - DNA, 957 bp, synthetic construct; identical to SEQ ID NO: 18334
  misc_feature 1..957: note = Description of Artificial Sequence: Synthetic coding sequence
  source 1..957: mol_type = other DNA

SEQ ID NO: 18337 - DNA, 525 bp, synthetic construct
  misc_feature 1..525: note = Description of Artificial Sequence: Synthetic coding sequence
  source 1..525: mol_type = other DNA
atgcccaagaggggcaagaagggagctgtggccgaggatggagatgagctgaggacagagcctgaggccaagaagagcaagacagctgccaagaagaatgacaaggaggccgccggggagggccctgccctgtatgaggaccccccagaccagaagaccagccccagcggcaagccagccaccctgaagatctgctcctggaatgtggatggcctgcgggcctggatcaagaagaagggcctggactgggtgaaggaggaggccccagacatcctgtgcctgcaggagaccaagtgcagcgagaacaagctgcctgctgagctgcaggagctgcccggcctgagccaccagtactggagcgcccccagcgacaaggagggctacagcggcgtgggcctgctgagccggcagtgccccctgaaggtgtcctatggaattggagatgaggagcatgaccaggagggccgggtcatcgtggccgagtttgacagctttgtgctggtgacagcctacgtgcccaactag

SEQ ID NO: 18338 - DNA, 327 bp, synthetic construct
  misc_feature 1..327: note = Description of Artificial Sequence: Synthetic coding sequence
  source 1..327: mol_type = other DNA
atgcccaagaggggcaagaagggagctgtggccgaggatggagatgagctgaggacagagcctgaggccaagaagagcaagacagctgccaagaagaatgacaaggaggccgccggggagggccctgccctgtatgaggaccccccagaccagaagaccagccccagcggcaagccagccaccctgaagatctgctcctggaatgtggatggcctgcgggcctggatcaagaagaagggcctggactgggtgaaggaggaggccccagacatcctgtgcctgcaggagaccaagtgcagcgagaacaagctgcctgctgagctgtag

SEQ ID NO: 18339 - DNA, 441 bp, synthetic construct
  misc_feature 1..441: note = Description of Artificial Sequence: Synthetic coding sequence
  source 1..441: mol_type = other DNA
atgcccaagaggggcaagaagggagctgtggccgaggatggagatgagctgaggacagagcctgaggccaagaagagcaagacagctgccaagaagaatgacaaggaggccgccggggagggccctgccctgtatgaggaccccccagaccagaagaccagccccagcggcaagccagccaccctgaagatctgctcctggaatgtggatggcctgcgggcctggatcaagaagaagggcctggactgggtgaaggaggaggccccagacatcctgtgcctgcaggagaccaagtgcagcgagaacaagctgcctgctgagctgcaggagctgcccggcctgagccaccagtactggagcgcccccagcgacaaggagggctacagcggcgtgggcctgctgagccggcagtgccccctgaaggtgtcctatggcatctag

SEQ ID NO: 18340 - DNA, 975 bp, synthetic construct
  misc_feature 1..975: note = Description of Artificial Sequence: Synthetic coding sequence
  source 1..975: mol_type = other DNA
atgttccgctgtggcggcctggccgccggggccctgaagcagaagctggtgcccctggtgaggacagtgtgtgtgcgcagcccccggcagaggaaccggctgcccggcaacctcttccagcgctggcacgtgcccctggagctgcagatgacccggcagatggccagcagcggggccagcggcggcaagattgacaacagcgtgctggtgctgattgtgggcctgagcacagtgggcgctggggcctatgcctacaagaccatgaaggaggatgagaagcgctacaatgaaagaatcagcggcctgggcctgaccccagagcagaagcagaagaaggccgccctgagcgccagcgagggggaggaggtgccccaggacaaggcccccagccacgtgcccttcctgctgattggaggcggcacagctgcctttgctgctgcccggagcatccgggcccgggaccccggggcccgggtgctgattgtgtctgaggaccctgagctgccctacatgaggcctcccctgagcaaggagctgtggttcagtgatgaccccaacgtgaccaagaccctgcgcttcaagcagtggaatggcaaggagaggagcatctacttccagcccccatccttctacgtgtctgcccaggacctgccccacattgaaaatggaggagtggccgtgctgaccgggaagaaggtggtgcagctggatgtgcgggacaacatggtgaagctgaatgatggcagccagatcacctatgaaaaatgtctcatcgccaccggcggcacccccaggagcctgagcgccatcgacagagctggagctgaggtgaagagcaggaccaccctcttcaggaagattggagacttccgcagcctggagaagatcagccgggaggtgaagagcatcaccatcatcggcggcggcttcctgggcagcgagctggcctgtgccctgggcaggaaggacatctag

SEQ ID NO: 18341 - DNA, 1842 bp, synthetic construct
  misc_feature 1..1842: note = Description of Artificial Sequence: Synthetic coding sequence
  source 1..1842: mol_type = other DNA
atgttccgctgtggcggcctggccgccggggccctgaagcagaagctggtgcccctggtgaggacagtgtgtgtgcgcagcccccggcagaggaaccggctgcccggcaacctcttccagcgctggcacgtgcccctggagctgcagatgacccggcagatggccagcagcggggccagcggcggcaagattgacaacagcgtgctggtgctgattgtgggcctgagcacagtgggcgctggggcctatgcctacaagaccatgaaggaggatgagaagcgctacaatgaaagaatcagcggcctgggcctgaccccagagcagaagcagaagaaggccgccctgagcgccagcgagggggaggaggtgccccaggacaaggcccccagccacgtgcccttcctgctgattggaggcggcacagctgcctttgctgctgcccggagcatccgggcccgggaccccggggcccgggtgctgattgtgtctgaggaccctgagctgccctacatgaggcctcccctgagcaaggagctgtggttcagtgatgaccccaacgtgaccaagaccctgcgcttcaagcagtggaatggcaaggagaggagcatctacttccagcccccatccttctacgtgtctgcccaggacctgccccacattgaaaatggaggagtggccgtgctgaccgggaagaaggtggtgcagctggatgtgcgggacaacatggtgaagctgaatgatggcagccagatcacctatgaaaaatgtctcatcgccaccggcggcacccccaggagcctgagcgccatcgacagagctggagctgaggtgaagagcaggaccaccctcttcaggaagattggagacttccgcagcctggagaagatcagccgggaggtgaagagcatcaccatcatcggcggcggcttcctgggcagcgagctggcctgtgccctgggcaggaaggcccgggccctgggcacagaggtgatccagctgtttcctgagaagggcaacatgggcaagatcctgcctgagtacctgagcaactggaccatggagaaggtgagaagagagggcgtgaaggtgatgcccaatgccatcgtgcagagcgtgggcgtgagcagcggcaagctgctgatcaagctgaaggatggcaggaaggtggagacagaccacatcgtggccgctgtgggcctggagcccaacgtggagctggccaagacaggaggcctggagattgacagcgactttggaggcttccgggtgaatgctgagctgcaggcccggagcaacatctgggtggccggagatgctgcctgcttctatgacatcaagctgggcagaagaagagtggagcaccacgaccatgctgtggtgtctggccgcctggccggggagaacatgaccggggccgccaagccctactggcaccagagcatgttctggagcgacctgggcccagatgtgggctatgaggccatcggcctggtggacagcagcctgcccaccgtgggcgtgtttgccaaggccacagcccaggacaaccccaagagcgccacagagcagagcggcaccggcatccgctctgagagcgagacagagagcgaggccagcgagatcaccatcccccccagcaccccagctgtgccccaggcccctgtgcagggcgaggactatggcaagggcgtcatcttctacctgcgggacaaggtggtggtgggcatcgtgctgtggaacatcttcaacaggatgcccatcgccaggaagatcatcaaggatggagagcagcacgaggacctgaatgaggtggccaagctgttcaacatccacgaggactag

SEQ ID NO: 18342 - DNA, 1830 bp, synthetic construct
  misc_feature 1..1830: note = Description of Artificial Sequence: Synthetic coding sequence
  source 1..1830: mol_type = other DNA
atgttccgctgtggcggcctggccgccggggccctgaagcagaagctggtgcccctggtgaggacagtgtgtgtgcgcagcccccggcagaggaaccggctgcctgtggtgcagagccaccacctgggcagccccagccgcagcctggccagcactggagccagcggcaaggatggcagcaacctggtgtacttcctgattgtgggcgccaccgtgactggagctggggtgtactatgcctacaagaccatgaaggaggatgagaagcgctacaatgaaagaatcagcggcctgggcctgaccccagagcagaagcagaagaaggccgccctgagcgccagcgagggggaggaggtgccccaggacaaggcccccagccacgtgcccttcctgctgattggaggcggcacagctgcctttgctgctgcccggagcatccgggcccgggaccccggggcccgggtgctgattgtgtctgaggaccctgagctgccctacatgaggcctcccctgagcaaggagctgtggttcagtgatgaccccaacgtgaccaagaccctgcgcttcaagcagtggaatggcaaggagaggagcatctacttccagcccccatccttctacgtgtctgcccaggacctgccccacattgaaaatggaggagtggccgtgctgaccgggaagaaggtggtgcagctggatgtgcgggacaacatggtgaagctgaatgatggcagccagatcacctatgaaaaatgtctcatcgccaccggcggcacccccaggagcctgagcgccatcgacagagctggagctgaggtgaagagcaggaccaccctcttcaggaagattggagacttccgcagcctggagaagatcagccgggaggtgaagagcatcaccatcatcggcggcggcttcctgggcagcgagctggcctgtgccctgggcaggaaggcccgggccctgggcacagaggtgatccagctgtttcctgagaagggcaacatgggcaagatcctgcctgagtacctgagcaactggaccatggagaaggtgagaagagagggcgtgaaggtgatgcccaatgccatcgtgcagagcgtgggcgtgagcagcggcaagctgctgatcaagctgaaggatggcaggaaggtggagacagaccacatcgtggccgctgtgggcctggagcccaacgtggagctggccaagacaggaggcctggagattgacagcgactttggaggcttccgggtgaatgctgagctgcaggcccggagcaacatctgggtggccggagatgctgcctgcttctatgacatcaagctgggcagaagaagagtggagcaccacgaccatgctgtggtgtctggccgcctggccggggagaacatgaccggggccgccaagccctactggcaccagagcatgttctggagcgacctgggcccagatgtgggctatgaggccatcggcctggtggacagcagcctgcccaccgtgggcgtgtttgccaaggccacagcccaggacaaccccaagagcgccacagagcagagcggcaccggcatccgctctgagagcgagacagagagcgaggccagcgagatcaccatcccccccagcaccccagctgtgccccaggcccctgtgcagggcgaggactatggcaagggcgtcatcttctacctgcgggacaaggtggtggtgggcatcgtgctgtggaacatcttcaacaggatgcccatcgccaggaagatcatcaaggatggagagcagcacgaggacctgaatgaggtggccaagctgttcaacatccacgaggactag

SEQ ID NO: 18343 - DNA, 981 bp, synthetic construct
  misc_feature 1..981: note = Description of Artificial Sequence: Synthetic coding sequence
  source 1..981: mol_type = other DNA
atgttccgctgtggcggcctggccgccggggccctgaagcagaagctggtgcccctggtgaggacagtgtgtgtgcgcagcccccggcagaggaaccggctgcctgcccgggccctgggcacagaggtgatccagctgtttcctgagaagggcaacatgggcaagatcctgcctgagtacctgagcaactggaccatggagaaggtgcggcgggagggcgtgaaggtgatgcccaatgccatcgtgcagagcgtgggcgtgtcctctgggaagctgctgatcaagctgaaggatggcaggaaggtggagacagaccacatcgtggccgctgtgggcctggagcccaacgtggagctggccaagacaggaggcctggagattgacagcgactttggaggcttccgggtgaatgctgagctgcaggcccggagcaacatctgggtggccggagatgctgcctgcttctatgacatcaagctgggcagaagaagagtggagcaccacgaccatgctgtggtgtctggccgcctggccggggagaacatgactggagctgccaagccctactggcaccagagcatgttctggagcgacctgggcccagatgtgggctatgaggccatcggcctggtggacagcagcctgcccaccgtgggcgtgtttgccaaggccacagcccaggacaaccccaagagcgccacagagcagagcggcaccggcatccgctctgagagcgagacagaaagtgaggccagcgagatcaccatcccccccagcaccccagctgtgccccaggcccctgtgcagggagaagattatggaaaaggagtcatcttctacctgcgggacaaggtggtggtgggcatcgtgctgtggaacatcttcaacaggatgcccatcgccaggaagatcatcaaggatggagagcagcacgaggacctgaatgaggtggccaagctgttcaacatccatgaagattag

SEQ ID NO: 18344 - DNA, 786 bp, synthetic construct
  misc_feature 1..786: note = Description of Artificial Sequence: Synthetic coding sequence
  source 1..786: mol_type = other DNA
atggagaaggtgagaagagagggcgtgaaggtgatgcccaatgccatcgtgcagagcgtgggcgtgagcagcggcaagctgctgatcaagctgaaggatggcaggaaggtggagacagaccacatcgtggccgctgtgggcctggagcccaacgtggagctggccaagacaggaggcctggagattgacagcgactttggaggcttccgggtgaatgctgagctgcaggcccggagcaacatctgggtggccggagatgctgcctgcttctatgacatcaagctgggcagaagaagagtggagcaccacgaccatgctgtggtgtctggccgcctggccggggagaacatgaccggggccgccaagccctactggcaccagagcatgttctggagcgacctgggcccagatgtgggctatgaggccatcggcctggtggacagcagcctgcccaccgtgggcgtgtttgccaaggccacagcccaggacaaccccaagagcgccacagagcagagcggcaccggcatccgctctgagagcgagacagagagcgaggccagcgagatcaccatcccccccagcaccccagctgtgccccaggcccctgtgcagggcgaggactatggcaagggcgtcatcttctacctgcgggacaaggtggtggtgggcatcgtgctgtggaacatcttcaacaggatgcccatcgccaggaagatcatcaaggatggagagcagcacgaggacctgaatgaggtggccaagctgttcaacatccacgaggactag

SEQ ID NO: 18345 - DNA, 825 bp, synthetic construct
  misc_feature 1..825: note = Description of Artificial Sequence: Synthetic coding sequence
  source 1..825: mol_type = other DNA
atgggcaagatcctgcctgagtacctgagcaactggaccatggagaaggtgcggcgggagggcgtgaaggtgatgcccaatgccatcgtgcagagcgtgggcgtgtcctctgggaagctgctgatcaagctgaaggatggcaggaaggtggagacagaccacatcgtggccgctgtgggcctggagcccaacgtggagctggccaagacaggaggcctggagattgacagcgactttggaggcttccgggtgaatgctgagctgcaggcccggagcaacatctgggtggccggagatgctgcctgcttctatgacatcaagctgggcagaagaagagtggagcaccacgaccatgctgtggtgtctggccgcctggccggggagaacatgactggagctgccaagccctactggcaccagagcatgttctggagcgacctgggcccagatgtgggctatgaggccatcggcctggtggacagcagcctgcccaccgtgggcgtgtttgccaaggccacagcccaggacaaccccaagagcgccacagagcagagcggcaccggcatccgctctgagagcgagacagaaagtgaggccagcgagatcaccatcccccccagcaccccagctgtgccccaggcccctgtgcagggagaagattatggaaaaggagtcatcttctacctgcgggacaaggtggtggtgggcatcgtgctgtggaacatcttcaacaggatgcccatcgccaggaagatcatcaaggatggagagcagcacgaggacctgaatgaggtggccaagctgttcaacatccatgaagattag

SEQ ID NO: 18346 - DNA, 714 bp, synthetic construct
  misc_feature 1..714: note = Description of Artificial Sequence: Synthetic coding sequence
  source 1..714: mol_type = other DNA
atgaaggaggatgagaagcgctacaatgaaagaatttctggcctgggcctgaccccagagcagaagcagaagaaggccgccctgagcgccagcgagggggaggaggtgccccaggacaaggcccccagccacgtgcccttcctgctgattggaggcggcacagctgcctttgctgctgcccggagcatccgggcccgggaccccggggcccgggtgctgattgtgtctgaagatcctgagctgccctacatgaggcctcccctgagcaaggagctgtggttcagtgatgaccccaacgtgaccaagaccctgcgcttcaagcagtggaatggcaaggagaggagcatctacttccagccccccagcttctacgtgtctgcccaggacctgccccacattgaaaatggaggagtggccgtgctgaccgggaagaaggtggtgcagctggatgtgcgggacaacatggtgaagctgaatgatggcagccagatcacctatgagaagtgcctgattgccactggaggcacccccaggagcctgagcgccatcgaccgggccggggctgaggtgaagagcaggaccaccctcttcaggaagatcggggacttccgcagcctggagaagatcagccgggaggtgaagagcatcaccatcattggaggcggcttcctgggcagcgagctggcctgtgccctgggcaggaaggacatctag

SEQ ID NO: 18347 - DNA, 1017 bp, synthetic construct
  misc_feature 1..1017: note = Description of Artificial Sequence: Synthetic coding sequence
  source 1..1017: mol_type = other DNA
atggatgccaaggccaggaactgcctgctgcagcaccgggaggccctggagaaggacatcaagaccagctacatcatggaccacatgatcagtgatggcttcctgaccatcagcgaggaggagaaggtgagaaatgagcccacccagcagcagagagctgccatgctgatcaagatgatcctgaagaaggacaatgacagctatgtgtccttctacaatgccctgctgcacgagggctacaaggacctggccgccctgctgcatgatggcatccctgtggtgagcagcagcagcggcaaggacagcgtgtctggcatcaccagctatgtgaggacagtgctgtgtgagggcggcgtgccccagaggcctgtggtgtttgtgaccaggaagaagctggtgaatgccatccagcagaagctgagcaagctgaagggggagcccggctgggtgaccatccacggcatggccggctgtgggaagtctgtgctggccgctgaggccgtgcgggaccacagcctgctggagggctgcttccctggaggagtgcactgggtgtctgtgggcaagcaggacaagagcggcctgctgatgaagctgcagaacctgtgcacccggctggaccaggatgagagcttcagccagaggctgcccctgaacatcgaggaggccaaggaccggctgcgcatcctgatgctgaggaagcaccccaggagcctgctgatcctggatgatgtgtgggacagctgggtgctgaaggcctttgacagccagtgccagatcctgctgaccacccgggacaagtctgtgacagacagcgtgatgggccccaagtatgtggtgcctgtggagagcagcctgggcaaggagaagggcctggagatcctgagcctgtttgtgaacatgaagaaggctgacctgcctgagcaggcccacagcatcatcaaggagtgcaaggtggtggagcgctgccactggggcatcctgacagacctgctgcacaagtggaaccagagctag

SEQ ID NO: 18348 - DNA, 3492 bp, synthetic construct
  misc_feature 1..3492: note = Description of Artificial Sequence: Synthetic coding sequence
  source 1..3492: mol_type = other DNA
atggatgccaaggccaggaactgcctgctgcagcaccgggaggccctggagaaggacatcaagaccagctacatcatggaccacatgatcagtgatggcttcctgaccatcagcgaggaggagaaggtgagaaatgagcccacccagcagcagagagctgccatgctgatcaagatgatcctgaagaaggacaatgacagctatgtgtccttctacaatgccctgctgcacgagggctacaaggacctggccgccctgctgcatgatggcatccctgtggtgagcagcagcagcggcaaggacagcgtgtctggcatcaccagctatgtgaggacagtgctgtgtgagggcggcgtgccccagaggcctgtggtgtttgtgaccaggaagaagctggtgaatgccatccagcagaagctgagcaagctgaagggggagcccggctgggtgaccatccacggcatggccggctgtgggaagtctgtgctggccgctgaggccgtgcgggaccacagcctgctggagggctgcttccctggaggagtgcactgggtgtctgtgggcaagcaggacaagagcggcctgctgatgaagctgcagaacctgtgcacccggctggaccaggatgagagcttcagccagaggctgcccctgaacatcgaggaggccaaggaccggctgcgcatcctgatgctgaggaagcaccccaggagcctgctgatcctggatgatgtgtgggacagctgggtgctgaaggcctttgacagccagtgccagatcctgctgaccacccgggacaagtctgtgacagacagcgtgatgggccccaagtatgtggtgcctgtggagagcagcctgggcaaggagaagggcctggagatcctgagcctgtttgtgaacatgaagaaggctgacctgcctgagcaggcccacagcatcatcaaggagtgcaagggcagccccctggtggtgtccctgattggagccctgctgcgggacttccccaaccgctgggagtactacctgaagcagctgcagaacaagcagttcaagaggatcaggaagagcagcagctatgactatgaggccctggatgaggccatgagcatctctgtggagatgctgcgggaggacatcaaggactactacacagacctgagcatcctgcagaaggatgtgaaggtgcccaccaaggtgctgtgcatcctgtgggacatggagacagaggaggtggaggacatcctgcaggagtttgtgaacaagagcctgctcttctgtgacagaaatggcaagagcttccgctactacctgcatgacctgcaggtggacttcctgacagagaagaactgcagccagctgcaggacctgcacaagaagatcatcacccagttccagcgctaccaccagccccacaccctgagcccagaccaggaggactgcatgtactggtacaacttcctggcctaccacatggccagcgccaagatgcacaaggagctgtgtgccctgatgttcagcctggactggatcaaggccaagacagagctggtgggccctgcccacctgatccacgagtttgtggagtaccgccacatcctggatgagaaggactgtgctgtgtctgagaacttccaggagttcctgagcctgaatggccacctgctgggccggcagcccttccccaacatcgtgcagctgggcctgtgtgagcctgagaccagcgaggtgtaccagcaggccaagctgcaggccaagcaggaggtggacaatggcatgctgtacctggagtggatcaacaagaagaacatcaccaacctgagccggctggtggtgcggccccacacagatgctgtgtaccacgcctgcttctctgaagatggccagagaattgccagctgtggggctgacaagaccctgcaggtgttcaaggccgagaccggggagaagctgctggagatcaaggcccatgaagatgaggtgctgtgctgtgccttcagcacagatgaccgcttcatcgccacctgcagcgtggacaagaaggtgaagatctggaacagcatgaccggggagctggtgcacacctatgatgagcacagcgagcaggtgaactgctgccacttcaccaacagcagccaccacctgctgctggccaccggcagcagtgactgcttcctgaagctgtgggacctgaaccagaaggagtgcaggaacaccatgtttggccacaccaacagcgtgaaccactgccgcttctccccagatgacaagctgctggccagctgcagcgcagatggcaccctgaagctgtgggatgccaccagcgccaatgaaaggaagagcatcaacgtgaagcagttcttcctgaacctggaggacccccaggaggacatggaggtgattgtgaagtgctgctcctggagcgcagatggagcccgcatcatggtggccgccaagaacaagatcttcctgtggaacacagacagccgcagcaaggtggccgactgccggggccacctgtcctgggtgcatggagtgatgttctccccagatggcagcagcttcctgaccagcagtgatgaccagaccatccggctgtgggagaccaagaaggtgtgcaagaacagcgctgtgatgctgaagcaggaggtggatgtggtgttccaggagaatgaggtgatggtgctggccgtggaccacatccggcggctgcagctgatcaatggaagaacaggccagattgactacctgacagaggcccaggtgtcctgctgctgcctgagcccccacctgcagtacatcgcctttggagatgaaaatggagccatcgagatcctggagctggtgaacaaccgcatcttccagagccgcttccagcacaagaagacagtgtggcacatccagttcaccgcagatgagaagaccctcatcagcagcagtgatgatgctgagatccaggtgtggaactggcagctggacaagtgcatcttcctgcggggccaccaggagaccgtgaaggacttccggctgctgaagaacagccggctgctgtcctggagctttgatggcaccgtgaaggtgtggaacatcatcactggaaacaaggagaaggactttgtgtgccaccagggcaccgtgctgagctgtgacatcagccatgatgccaccaagttcagcagcaccagcgctgacaagacagccaagatctggaatgtgtccaatggagagctgctgcacctgtgtgcccccctgtctgaggagggcgccgccacccatggaggctgggtgacagacctgtgcttctccccagatggcaagatgctgatctctgctgggggctacatcaagtggtggaatgtggtgactggagagagcagccagaccttctacaccaacggcaccaacctgaagaagatccacgtgtccccagacttcaagacctacgtgacagtggacaacctgggcatcctgtacatcctgcagaccctggagtag

SEQ ID NO: 18349 - DNA, 3618 bp, synthetic construct
  misc_feature 1..3618: note = Description of Artificial Sequence: Synthetic coding sequence
  source 1..3618: mol_type = other DNA
atggatgccaaggccaggaactgcctgctgcagcaccgggaggccctggagaaggacatcaagaccagctacatcatggaccacatgatcagtgatggcttcctgaccatcagcgaggaggagaaggtgagaaatgagcccacccagcagcagagagctgccatgctgatcaagatgatcctgaagaaggacaatgacagctatgtgtccttctacaatgccctgctgcacgagggctacaaggacctggccgccctgctgcatgatggcatccctgtggtgagcagcagcagcggcaaggacagcgtgtctggcatcaccagctatgtgaggacagtgctgtgtgagggcggcgtgccccagaggcctgtggtgtttgtgaccaggaagaagctggtgaatgccatccagcagaagctgagcaagctgaagggggagcccggctgggtgaccatccacggcatggccggctgtgggaagtctgtgctggccgctgaggccgtgcgggaccacagcctgctggagggctgcttccctggaggagtgcactgggtgtctgtgggcaagcaggacaagagcggcctgctgatgaagctgcagaacctgtgcacccggctggaccaggatgagagcttcagccagaggctgcccctgaacatcgaggaggccaaggaccggctgcgcatcctgatgctgaggaagcaccccaggagcctgctgatcctggatgatgtgtgggacagctgggtgctgaaggcctttgacagccagtgccagatcctgctgaccacccgggacaagtctgtgacagacagcgtgatgggccccaagtatgtggtgcctgtggagagcagcctgggcaaggagaagggcctggagatcctgagcctgtttgtgaacatgaagaaggctgacctgcctgagcaggcccacagcatcatcaaggagtgcaagggcagccccctggtggtgtccctgattggagccctgctgcgggacttccccaaccgctgggagtactacctgaagcagctgcagaacaagcagttcaagaggatcaggaagagcagcagctatgactatgaggccctggatgaggccatgagcatctctgtggagatgctgcgggaggacatcaaggactactacacagacctgagcatcctgcagaaggatgtgaaggtgcccaccaaggtgctgtgcatcctgtgggacatggagacagaggaggtggaggacatcctgcaggagtttgtgaacaagagcctgctcttctgtgacagaaatggcaagagcttccgctactacctgcatgacctgcaggtggacttcctgacagagaagaactgcagccagctgcaggacctgcacaagaagatcatcacccagttccagcgctaccaccagccccacaccctgagcccagaccaggaggactgcatgtactggtacaacttcctggcctaccacatggccagcgccaagatgcacaaggagctgtgtgccctgatgttcagcctggactggatcaaggccaagacagagctggtgggccctgcccacctgatccacgagtttgtggagtaccgccacatcctggatgagaaggactgtgctgtgtctgagaacttccaggagttcctgagcctgaatggccacctgctgggccggcagcccttccccaacatcgtgcagctgggcctgtgtgagcctgagaccagcgaggtgtaccagcaggccaagctgcaggccaagcaggaggtggacaatggcatgctgtacctggagtggatcaacaagaagaacatcaccaacctgagccggctggtggtgcggccccacacagatgctgtgtaccacgcctgcttctctgaagatggccagagaattgccagctgtggggctgacaagaccctgcaggtgttcaaggccgagaccggggagaagctgctggagatcaaggcccatgaagatgaggtgctgtgctgtgccttcagcacagatgaccgcttcatcgccacctgcagcgtggacaagaaggtgaagatctggaacagcatgaccggggagctggtgcacacctatgatgagcacagcgagcaggtgaactgctgccacttcaccaacagcagccaccacctgctgctggccaccggcagcagtgactgcttcctgaagctgtgggacctgaaccagaaggagtgcaggaacaccatgtttggccacaccaacagcgtgaaccactgccgcttctccccagatgacaagctgctggccagctgcagcgcagatggcaccctgaagctgtgggatgccaccagcgccaatgaaaggaagagcatcaacgtgaagcagttcttcctgaacctggaggacccccaggaggacatggaggtgattgtgaagtgctgctcctggagcgcagatggagcccgcatcatggtggccgccaagaacaagatcttcctgtggaacacagacagccgcagcaaggtggccgactgccggggccacctgtcctgggtgcatggagtgatgttctccccagatggcagcagcttcctgaccagcagtgatgaccagaccatccggctgtgggagaccaagaaggtgtgcaagaacagcgctgtgatgctgaagcaggaggtggatgtggtgttccaggagaatgaggtgatggtgctggccgtggaccacatccggcggctgcagctgatcaatggaagaacaggccagattgactacctgacagaggcccaggtgtcctgctgctgcctgagcccccacctgcagtacatcgcctttggagatgaaaatggagccatcgagatcctggagctggtgaacaaccgcatcttccagagccgcttccagcacaagaagacagtgtggcacatccagttcaccgcagatgagaagaccctcatcagcagcagtgatgatgctgagatccaggtgtggaactggcagctggacaagtgcatcttcctgcggggccaccaggagaccgtgaaggacttccggctgctgaagaacagccggctgctgtcctggagctttgatggcaccgtgaaggtgtggaacatcatcactggaaacaaggagaaggactttgtgtgccaccagggcaccgtgctgagctgtgacatcagccatgatgccaccaagttcagcagcaccagcgctgacaagacagccaagatctggagctttgacctgctgctgcccctgcacgagctgcggggccacaacggctgtgtgcgctgcagcgccttctctgtggacagcaccctgctggccactggagatgacaatggagagatccgcatctggaatgtgtccaatggagagctgctgcacctgtgtgcccccctgtctgaggagggcgccgccacccatggaggctgggtgacagacctgtgcttctccccagatggcaagatgctgatctctgctgggggctacatcaagtggtggaatgtggtgactggagagagcagccagaccttctacaccaacggcaccaacctgaagaagatccacgtgtccccagacttcaagacctacgtgacagtggacaacctgggcatcctgtacatcctgcagaccctggagtag

SEQ ID NO: 18350 - DNA, 3585 bp, synthetic construct
  misc_feature 1..3585: note = Description of Artificial Sequence: Synthetic coding sequence
  source 1..3585: mol_type = other DNA
atggatgccaaggccaggaactgcctgctgcagcaccgggaggccctggagaaggacatcaagaccagctacatcatggaccacatgatcagtgatggcttcctgaccatcagcgaggaggagaaggtgagaaatgagcccacccagcagcagagagctgccatgctgatcaagatgatcctgaagaaggacaatgacagctatgtgtccttctacaatgccctgctgcacgagggctacaaggacctggccgccctgctgcatgatggcatccctgtggtgagcagcagctctgtgaggacagtgctgtgtgagggcggcgtgccccagaggcctgtggtgtttgtgaccaggaagaagctggtgaatgccatccagcagaagctgagcaagctgaagggggagcccggctgggtgaccatccacggcatggccggctgcggcaagtctgtgctggccgctgaggccgtgcgggaccacagcctgctggagggctgcttccctgggggcgtgcactgggtgtctgtgggcaagcaggacaagagcggcctgctgatgaagctgcagaacctgtgcacccggctggaccaggatgagagcttcagccagaggctgcccctgaacatcgaggaggccaaggaccggctgcgcatcctgatgctgaggaagcaccccaggagcctgctgatcctggatgatgtgtgggacagctgggtgctgaaggcctttgacagccagtgccagatcctgctgaccacccgggacaagtctgtgacagattctgtgatgggccccaagtatgtggtgcctgtggagagcagcctgggcaaggagaagggcctggagatcctgagcctgtttgtgaacatgaagaaggctgacctgcctgagcaggcccacagcatcatcaaggaatgtaaaggcagccccctggtggtgtccctcatcggggccctgctgcgggacttccccaaccgctgggagtactacctgaagcagctgcagaacaagcagttcaagaggatcaggaagagcagcagctatgactatgaggccctggatgaggccatgagcatctctgtggagatgctgcgggaggacatcaaggactactacacagacctgagcatcctgcagaaggatgtgaaggtgcccaccaaggtgctgtgcatcctgtgggacatggagacagaggaggtggaggacatcctgcaggagtttgtgaacaagagcctgctcttctgtgacagaaatggcaagagcttccgctactacctgcatgacctgcaggtggacttcctgacagagaagaactgcagccagctgcaggacctgcacaagaagatcatcacccagttccagcgctaccaccagccccacaccctgagcccagaccaggaggactgcatgtactggtacaacttcctggcctaccacatggccagcgccaagatgcacaaggagctgtgtgccctgatgttcagcctggactggatcaaggccaagacagagctggtgggccctgcccacctgattcatgaatttgtggagtaccgccacatcctggatgagaaggactgtgctgtgtctgagaacttccaggagttcctgagcctgaatggccacctgctgggccggcagcccttccccaacatcgtgcagctgggcctgtgtgagcctgagaccagcgaggtgtaccagcaggccaagctgcaggccaagcaggaggtggacaatggcatgctgtacctggagtggatcaacaagaagaacatcaccaacctgagccggctggtggtgcggccccacacagatgctgtgtaccacgcctgcttctctgaagatggccagagaattgccagctgtggggctgacaagaccctgcaggtgttcaaggccgagactggagagaagctgctggagatcaaggcccatgaagatgaggtgctgtgctgtgccttcagcacagatgaccgcttcatcgccacctgcagcgtggacaagaaggtgaagatctggaacagcatgactggagagctggtgcacacctatgatgagcacagcgagcaggtgaactgctgccacttcaccaacagcagccaccacctgctgctggccaccggcagcagtgactgcttcctgaagctgtgggacctgaaccagaaggaatgtagaaacaccatgtttggccacaccaacagcgtgaaccactgccgcttctccccagatgacaagctgctggccagctgcagcgcagatggcaccctgaagctgtgggatgccaccagcgccaatgaaaggaagagcatcaacgtgaagcagttcttcctgaacctggaggacccccaggaggacatggaggtgattgtgaagtgctgctcctggagcgcagatggagcccgcatcatggtggccgccaagaacaagatcttcctgtggaacacagacagccgcagcaaggtggccgactgccggggccacctgtcctgggtgcacggcgtgatgttctccccagatggcagcagcttcctgaccagcagtgatgaccagaccatccggctgtgggagaccaagaaggtgtgcaagaacagcgctgtgatgctgaagcaggaggtggatgtggtgttccaggagaatgaggtgatggtgctggccgtggaccacatccggcggctgcagctgatcaatggccgcacaggccagattgactacctgacagaggcccaggtgtcctgctgctgcctgagcccccacctgcagtacatcgcctttggagatgaaaatggagccatcgagatcctggagctggtgaacaaccgcatcttccagagccgcttccagcacaagaagacagtgtggcacatccagttcaccgcagatgagaagaccctcatcagcagcagtgatgatgctgagatccaggtgtggaactggcagctggacaagtgcatcttcctgcggggccaccaggagaccgtgaaggacttccggctgctgaagaacagccggctgctgtcctggagctttgatggcaccgtgaaggtgtggaacatcatcaccggcaacaaggagaaggactttgtgtgccaccagggcaccgtgctgagctgtgacatcagccatgatgccaccaagttcagcagcaccagcgctgacaagacagccaagatctggagctttgacctgctgctgcccctgcacgagctgcggggccacaacggctgtgtgcgctgcagcgccttctctgtggacagcaccctgctggccactggagatgacaacggggagatccgcatctggaatgtgtccaatggagagctgctgcacctgtgtgcccccctgtctgaggagggcgccgccacccacggcggctgggtgacagacctgtgcttctccccagatggcaagatgctgatctctgctgggggctacatcaagtggtggaatgtggtgactggagagagcagccagaccttctacaccaacggcaccaacctgaagaagatccacgtgtccccagacttcaagacctacgtgacagtggacaacctgggcatcctgtacatcctgcagaccctggagtag

SEQ ID NO: 18351 - DNA, 3618 bp, synthetic construct; identical to SEQ ID NO: 18349
  misc_feature 1..3618: note = Description of Artificial Sequence: Synthetic coding sequence
  source 1..3618: mol_type = other DNA

SEQ ID NO: 18352 - DNA, 3492 bp, synthetic construct; identical to SEQ ID NO: 18348
  misc_feature 1..3492: note = Description of Artificial Sequence: Synthetic coding sequence
  source 1..3492: mol_type = other DNA

SEQ ID NO: 18353 - DNA, 3714 bp, synthetic construct
  misc_feature 1..3714: note = Description of Artificial Sequence: Synthetic coding sequence
  source 1..3714: mol_type = other DNA
atggatgccaaggccaggaactgcctgctgcagcaccgggaggccctggagaaggacatcaagaccagctacatcatggaccacatgatcagtgatggcttcctgaccatcagcgaggaggagaaggtgagaaatgagcccacccagcagcagagagctgccatgctgatcaagatgatcctgaagaaggacaatgacagctatgtgtccttctacaatgccctgctgcacgagggctacaaggacctggccgccctgctgcatgatggcatccctgtggtgagcagcagctctgtgaggacagtgctgtgtgagggcggcgtgccccagaggcctgtggtgtttgtgaccaggaagaagctggtgaatgccatccagcagaagctgagcaagctgaagggggagcccggctgggtgaccatccacggcatggccggctgcggcaagtctgtgctggccgctgaggccgtgcgggaccacagcctgctggagggctgcttccctgggggcgtgcactgggtgtctgtgggcaagcaggacaagagcggcctgctgatgaagctgcagaacctgtgcacccggctggaccaggatgagagcttcagccagaggctgcccctgaacatcgaggaggccaaggaccggctgcgcatcctgatgctgaggaagcaccccaggagcctgctgatcctggatgatgtgtgggacagctgggtgctgaaggcctttgacagccagtgccagatcctgctgaccacccgggacaagtctgtgacagattctgtgatgggccccaagtatgtggtgcctgtggagagcagcctgggcaaggagaagggcctggagatcctgagcctgtttgtgaacatgaagaaggctgacctgcctgagcaggcccacagcatcatcaaggaatgtaaaggcagccccctggtggtgtccctcatcggggccctgctgcgggacttccccaaccgctgggagtactacctgaagcagctgcagaacaagcagttcaagaggatcaggaagagcagcagctatgactatgaggccctggatgaggccatgagcatctctgtggagatgctgcgggaggacatcaaggactactacacagacctgagcatcctgcagaaggatgtgaaggtgcccaccaaggtgctgtgcatcctgtgggacatggagacagaggaggtggaggacatcctgcaggagtttgtgaacaagagcctgctcttctgtgacagaaatggcaagagcttccgctactacctgcatgacctgcaggtggacttcctgacagagaagaactgcagccagctgcaggacctgcacaagaagatcatcacccagttccagcgctaccaccagccccacaccctgagcccagaccaggaggactgcatgtactggtacaacttcctggcctaccacatggccagcgccaagatgcacaaggagctgtgtgccctgatgttcagcctggactggatcaaggccaagacagagctggtgggccctgcccacctgattcatgaatttgtggagtaccgccacatcctggatgagaaggactgtgctgtgtctgagaacttccaggagttcctgagcctgaatggccacctgctgggccggcagcccttccccaacatcgtgcagctgggcctgtgtgagcctgagaccagcgaggtgtaccagcaggccaagctgcaggccaagcaggaggtggacaatggcatgctgtacctggagtggatcaacaagaagaacatcaccaacctgagccggctggtggtgcggccccacacagatgctgtgtaccacgcctgcttctctgaagatggccagagaattgccagctgtggggctgacaagaccctgcaggtgttcaaggccgagactggagagaagctgctggagatcaaggcccatgaagatgaggtgctgtgctgtgccttcagcacagatgaccgcttcatcgccacctgcagcgtggacaagaaggtgaagatctggaacagcatgactggagagctggtgcacacctatgatgagcacagcgagcaggtgaactgctgccacttcaccaacagcagccaccacctgctgctggccaccggcagcagtgactgcttcctgaagctgtgggacctgaaccagaaggaatgtagaaacaccatgtttggccacaccaacagcgtgaaccactgccgcttctccccagatgacaagctgctggccagctgcagcgcagatggcaccctgaagctgtgggatgccaccagcgccaatgaaaggaagagcatcaacgtgaagcagttcttcctgaacctggaggacccccaggaggacatggaggtgattgtgaagtgctgctcctggagcgcagatggagcccgcatcatggtggccgccaagaacaagatcttcctgtttgacatccacaccagcggcctgctgggggagatccacacaggccaccacagcaccatccagtactgtgacttcagcccccagaaccacctggccgtggtggccctgagccagtactgtgtggagctgtggaacacagacagccgcagcaaggtggccgactgccggggccacctgtcctgggtgcatggagtgatgttctccccagatggcagcagcttcctgaccagcagtgatgaccagaccatccggctgtgggagaccaagaaggtgtgcaagaacagcgctgtgatgctgaagcaggaggtggatgtggtgttccaggagaatgaggtgatggtgctggccgtggaccacatccggcggctgcagctgatcaatggaagaacaggccagattgactacctgacagaggcccaggtgtcctgctgctgcctgagcccccacctgcagtacatcgcctttggagatgaaaatggagccatcgagatcctggagctggtgaacaaccgcatcttccagagccgcttccagcacaagaagacagtgtggcacatccagttcaccgcagatgagaagaccctcatcagcagcagtgatgatgctgagatccaggtgtggaactggcagctggacaagtgcatcttcctgcggggccaccaggagaccgtgaaggacttccggctgctgaagaacagccggctgctgtcctggagctttgatggcaccgtgaaggtgtggaacatcatcactggaaacaaggagaaggactttgtgtgccaccagggcaccgtgctgagctgtgacatcagccatgatgccaccaagttcagcagcaccagcgctgacaagacagccaagatctggagctttgacctgctgctgcccctgcacgagctgcggggccacaacggctgtgtgcgctgcagcgccttctctgtggacagcaccctgctggccactggagatgacaatggagagatccgcatctggaatgtgtccaatggagagctgctgcacctgtgtgcccccctgtctgaggagggcgccgccacccatggaggctgggtgacagacctgtgcttctccccagatggcaagatgctgatctctgctgggggctacatcaagtggtggaatgtggtgactggagagagcagccagaccttctacaccaacggcaccaacctgaagaagatccacgtgtccccagacttcaagacctacgtgacagtggacaacctgggcatcctgtacatcctgcagaccctggagtag

SEQ ID NO: 18354 - DNA, 3747 bp, synthetic construct
  misc_feature 1..3747: note = Description of Artificial Sequence: Synthetic coding sequence
  source 1..3747: mol_type = other DNA
atggatgccaaggccaggaactgcctgctgcagcaccgggaggccctggagaaggacatcaagaccagctacatcatggaccacatgatcagtgatggcttcctgaccatcagcgaggaggagaaggtgagaaatgagcccacccagcagcagagagctgccatgctgatcaagatgatcctgaagaaggacaatgacagctatgtgtccttctacaatgccctgctgcacgagggctacaaggacctggccgccctgctgcatgatggcatccctgtggtgagcagcagcagcggcaaggacagcgtgtctggcatcaccagctatgtgaggacagtgctgtgtgagggcggcgtgccccagaggcctgtggtgtttgtgaccaggaagaagctggtgaatgccatccagcagaagctgagcaagctgaagggggagcccggctgggtgaccatccacggcatggccggctgtgggaagtctgtgctggccgctgaggccgtgcgggaccacagcctgctggagggctgcttccctggaggagtgcactgggtgtctgtgggcaagcaggacaagagcggcctgctgatgaagctgcagaacctgtgcacccggctggaccaggatgagagcttcagccagaggctgcccctgaacatcgaggaggccaaggaccggctgcgcatcctgatgctgaggaagcaccccaggagcctgctgatcctggatgatgtgtgggacagctgggtgctgaaggcctttgacagccagtgccagatcctgctgaccacccgggacaagtctgtgacagacagcgtgatgggccccaagtatgtggtgcctgtggagagcagcctgggcaaggagaagggcctggagatcctgagcctgtttgtgaacatgaagaaggctgacctgcctgagcaggcccacagcatcatcaaggagtgcaagggcagccccctggtggtgtccctgattggagccctgctgcgggacttccccaaccgctgggagtactacctgaagcagctgcagaacaagcagttcaagaggatcaggaagagcagcagctatgactatgaggccctggatgaggccatgagcatctctgtggagatgctgcgggaggacatcaaggactactacacagacctgagcatcctgcagaaggatgtgaaggtgcccaccaaggtgctgtgcatcctgtgggacatggagacagaggaggtggaggacatcctgcaggagtttgtgaacaagagcctgctcttctgtgacagaaatggcaagagcttccgctactacctgcatgacctgcaggtggacttcctgacagagaagaactgcagccagctgcaggacctgcacaagaagatcatcacccagttccagcgctaccaccagccccacaccctgagcccagaccaggaggactgcatgtactggtacaacttcctggcctaccacatggccagcgccaagatgcacaaggagctgtgtgccctgatgttcagcctggactggatcaaggccaagacagagctggtgggccctgcccacctgatccacgagtttgtggagtaccgccacatcctggatgagaaggactgtgctgtgtctgagaacttccaggagttcctgagcctgaatggccacctgctgggccggcagcccttccccaacatcgtgcagctgggcctgtgtgagcctgagaccagcgaggtgtaccagcaggccaagctgcaggccaagcaggaggtggacaatggcatgctgtacctggagtggatcaacaagaagaacatcaccaacctgagccggctggtggtgcggccccacacagatgctgtgtaccacgcctgcttctctgaagatggccagagaattgccagctgtggggctgacaagaccctgcaggtgttcaaggccgagaccggggagaagctgctggagatcaaggcccatgaagatgaggtgctgtgctgtgccttcagcacagatgaccgcttcatcgccacctgcagcgtggacaagaaggtgaagatctggaacagcatgaccggggagctggtgcacacctatgatgagcacagcgagcaggtgaactgctgccacttcaccaacagcagccaccacctgctgctggccaccggcagcagtgactgcttcctgaagctgtgggacctgaaccagaaggagtgcaggaacaccatgtttggccacaccaacagcgtgaaccactgccgcttctccccagatgacaagctgctggccagctgcagcgcagatggcaccctgaagctgtgggatgccaccagcgccaatgaaaggaagagcatcaacgtgaagcagttcttcctgaacctggaggacccccaggaggacatggaggtgattgtgaagtgctgctcctggagcgcagatggagcccgcatcatggtggccgccaagaacaagatcttcctgtttgacatccacaccagcggcctgctgggggagatccacacaggccaccacagcaccatccagtactgtgacttcagcccccagaaccacctggccgtggtggccctgagccagtactgtgtggagctgtggaacacagacagccgcagcaaggtggccgactgccggggccacctgtcctgggtgcacggcgtgatgttctccccagatggcagcagcttcctgaccagcagtgatgaccagaccatccggctgtgggagaccaagaaggtgtgcaagaacagcgctgtgatgctgaagcaggaggtggatgtggtgttccaggagaatgaggtgatggtgctggccgtggaccacatccggcggctgcagctgatcaatggccgcacaggccagattgactacctgacagaggcccaggtgtcctgctgctgcctgagcccccacctgcagtacatcgcctttggagatgaaaatggagccatcgagatcctggagctggtgaacaaccgcatcttccagagccgcttccagcacaagaagacagtgtggcacatccagttcaccgcagatgagaagaccctcatcagcagcagtgatgatgctgagatccaggtgtggaactggcagctggacaagtgcatcttcctgcggggccaccaggagaccgtgaaggacttccggctgctgaagaacagccggctgctgtcctggagctttgatggcaccgtgaaggtgtggaacatcatcaccggcaacaaggagaaggactttgtgtgccaccagggcaccgtgctgagctgtgacatcagccatgatgccaccaagttcagcagcaccagcgctgacaagacagccaagatctggagctttgacctgctgctgcccctgcacgagctgcggggccacaacggctgtgtgcgctgcagcgccttctctgtggacagcaccctgctggccactggagatgacaacggggagatccgcatctggaatgtgtccaatggagagctgctgcacctgtgtgcccccctgtctgaggagggcgccgccacccacggcggctgggtgacagacctgtgcttctccccagatggcaagatgctgatctctgctgggggctacatcaagtggtggaatgtggtgactggagagagcagccagaccttctacaccaacggcaccaacctgaagaagatccacgtgtccccagacttcaagacctacgtgacagtggacaacctgggcatcctgtacatcctgcagaccctggagtag

SEQ ID NO: 18355 - DNA, 1017 bp, synthetic construct; identical to SEQ ID NO: 18347
  misc_feature 1..1017: note = Description of Artificial Sequence: Synthetic coding sequence
  source 1..1017: mol_type = other DNA

SEQ ID NO: 18356 - DNA, 2025 bp, synthetic construct
  misc_feature 1..2025: note = Description of Artificial Sequence: Synthetic coding sequence
  source 1..2025: mol_type = other DNA
atgcccagctacacagtgacagtggccaccggcagccagtggtttgctggaacagatgactacatctacctgagcctggtgggcagcgctggctgcagcgagaagcacctgctggacaagcccttctacaatgactttgaaagaggagctgtggacagctatgatgtgacagtggatgaggagctgggggagatccagctggtgcgcatcgagaagaggaagtactggctgaatgatgactggtacctgaagtacatcaccctgaagaccccccacggggactacatcgagttcccctgctaccgctggatcactggagatgtggaggtggtgctgagagatggccgggccaagctggccagagatgaccagatccacatcctgaagcagcacaggaggaaggagctggagacccggcagaagcagtaccgctggatggagtggaaccctggcttccccctgagcattgatgccaagtgccacaaggacctgccccgggacatccagtttgacagcgagaagggcgtggactttgtgctgaactacagcaaggccatggagaacctcttcatcaaccgcttcatgcacatgttccagagctcctggaatgactttgctgactttgagaagatctttgtgaagatcagcaacaccatcagcgagcgggtgatgaaccactggcaggaggacctgatgtttggctaccagttcctgaatggctgcaaccctgtgctgatccgccgctgcacagagctgcctgagaagctgcctgtgaccacagagatggtggagtgcagcctggagcggcagctgagcctggagcaggaggtgcagcagggcaacatcttcatcgtggactttgagctgctggatggcattgatgccaacaagacagacccctgcaccctgcagttcctggccgcccccatctgcctgctgtacaagaacctggccaacaagatcgtgcccatcgccatccagctgaaccagatccctggagatgagaaccccatcttcctgcccagtgatgccaagtatgactggctgctggccaagatctgggtgcgcagcagtgacttccacgtgcaccagaccatcacccacctgctgcggacccacctggtgtctgaggtgtttggaattgccatgtaccggcagctgcctgctgtgcaccccatcttcaagctgctggtggcccacgtgcgcttcaccatcgccatcaacaccaaggcccgggagcagctgatctgtgaatgtggcctgtttgacaaggccaatgccaccggcggcggcggccacgtgcagatggtgcagagggccatgaaggacctgacctacgccagcctgtgcttccctgaggccatcaaggcccggggcatggagagcaaggaggacatcccctactacttctacagagatgatggcctgctggtgtgggaggccatccgcaccttcaccgctgaggtggtggacatctactatgaaggagaccaggtggtggaggaggaccctgagctgcaggactttgtgaatgatgtgtatgtgtatggcatgaggggcaggaagagcagcggcttccccaagtctgtgaagagccgggagcagctgtctgagtacctgactgtggtgatcttcaccgccagcgcccagcacgccgctgtgaactttggccagtatgactggtgctcctggatccccaatgccccacccaccatgagggcccccccacccacagccaagggcgtggtgaccatcgagcagatcgtggacaccctgcctgaccggggccgcagctgctggcacctgggcgctgtgtgggccctgagccagttccaggagaatgagctgttcctgggcatgtacccagaggagcacttcatcgagaagcctgtgaaggaggccatggcccgcttcaggaagaacctggaggccatcgtgtctgtgattgctgagaggaacaagaagaagcagctgccctactactacctgagcccagaccgcatccccaacagcgtggccatctag

SEQ ID NO: 18357 - DNA, 1854 bp, synthetic construct
  misc_feature 1..1854: note = Description of Artificial Sequence: Synthetic coding sequence
  source 1..1854: mol_type = other DNA
atgcccagctacacagtgacagtggccaccggcagccagtggtttgctggaacagatgactacatctacctgagcctggtgggcagcgctggctgcagcgagaagcacctgctggacaagcccttctacaatgactttgaaagaggagctgtggacagctatgatgtgacagtggatgaggagctgggggagatccagctggtgcgcatcgagaagaggaagtactggctgaatgatgactggtacctgaagtacatcaccctgaagaccccccacggggactacatcgagttcccctgctaccgctggatcactggagatgtggaggtggtgctgagagatggccgggccaagctggccagagatgaccagatccacatcctgaagcagcacaggaggaaggagctggagacccggcagaagcagtaccgctggatggagtggaaccctggcttccccctgagcattgatgccaagtgccacaaggacctgccccgggacatccagtttgacagcgagaagggcgtggactttgtgctgaactacagcaaggccatggagaacctcttcatcaaccgcttcatgcacatgttccagagctcctggaatgactttgctgactttgagaagatctttgtgaagatcagcaacaccatcagcgagcgggtgatgaaccactggcaggaggacctgatgtttggctaccagttcctgaatggctgcaaccctgtgctgatccgccgctgcacagagctgcctgagaagctgcctgtgaccacagagatggtggagtgcagcctggagcggcagctgagcctggagcaggaggtgcagcagggcaacatcttcatcgtggactttgagctgctggatggcattgatgccaacaagacagacccctgcaccctgcagttcctggccgcccccatctgcctgctgtacaagaacctggccaacaagatcgtgcccatcgccatccagctgaaccagatccctggagatgagaaccccatcttcctgcccagtgatgccaagtatgactggctgctggccaagatctgggtgcgcagcagtgacttccacgtgcaccagaccatcacccacctgctgcggacccacctggtgtctgaggtgtttggaattgccatgtaccggcagctgcctgctgtgcaccccatcttcaagctgctggtggcccacgtgcgcttcaccatcgccatcaacaccaaggcccgggagcagctgatctgtgaatgtggcctgtttgacaaggccaatgccaccggcggcggcggccacgtgcagatggtgcagagggccatgaaggacctgacctacgccagcctgtgcttccctgaggccatcaaggcccggggcatggagagcaaggaggacatcccctactacttctacagagatgatggcctgctggtgtgggaggccatccgcaccttcaccgctgaggtggtggacatctactatgaaggagaccaggtggtggaggaggaccctgagctgcaggactttgtgaatgatgtgtatgtgtatggcatgaggggcaggaagagcagcggcttccccaagtctgtgaagagccgggagcagctgtctgagtacctgactgtggtgatcttcaccgccagcgcccagcacgccgctgtgaactttggccagctgttcctgggcatgtacccagaggagcacttcatcgagaagcctgtgaaggaggccatggcccgcttcaggaagaacctggaggccatcgtgtctgtgattgctgagaggaacaagaagaagcagctgccctactactacctgagcccagaccgcatccccaacagcgtggccatctag

SEQ ID NO: 18358 - DNA, 2511 bp, synthetic construct
  misc_feature 1..2511: note = Description of Artificial Sequence: Synthetic coding sequence
  source 1..2511: mol_type = other DNA
atgcacgcccagaggcagtttgtggtggccgctgtgcgggcagaggtgagaagacatgaggtggccaagcaggccctgaaccggctgaggaagctggccgagcgggtggatgatcctgagctgcaggacagcatccaggccagcctggacagcatccgggaggccgtcatcaacagccaggagtggaccctgagccgcagcatccctgagctgcggctgggcgtgctgggagatgcccggagcggcaagagcagcctcatccaccgcttcctgaccggcagctaccaggtgctggagaagacagaaagtgagcagtacaagaaggagatgctggtggatggccagacccacctggtgctgatccgggaggaggccggggccccagatgccaagttcagcggctgggcagatgctgtgatctttgtgttcagcctggaggatgagaacagcttccaggccgtgtcccggctgcacggccagctgagcagcctgcggggggagggccggggcggcctggccctggccctggtgggcacccaggaccgcatcagcgccagcagcccccgggtggtgggagatgcccgggcccgggccctgtgtgccgacatgaagcgctgcagctactatgagacctgtgccacctacggcctgaatgtggacagagtcttccaggaggtggcccagaaggtggtgaccctgaggaagcagcagcagctgctggccgcctgcaagagcctgcccagcagccccagccacagcgctgccagcacccctgtggccggccaggccagcaatggaggccacaccagtgactacagcagcagcctgcccagcagccccaacgtgggccaccgggagctgcgggcagaggccgctgctgtggccggcctgagcaccccaggcagcctgcaccgggccgccaagaggaggaccagcctgtttgccaacagaagaggaagtgacagcgagaagaggagcctggacagcagaggagagaccaccggcagcggccgggccatccccatcaagcagagcttcctgctgaagaggagcggcaacagcctgaacaaggagtggaagaagaagtatgtgaccctgagcagcaatggcttcctgctgtaccaccccagcatcaatgactacatccacagcacccacggcaaggagatggacctgctgcggaccaccgtgaaggtgcctgggaagaggcctccccgggccatcagcgccttcggccccagcgccagcatcaatggcctggtgaaggacatgagcacagtgcagatgggagagggcctggaggccaccacccccatgcccagccccagccccagccccagcagcctgcagcccccaccagaccagaccagcaagcacctgctgaagccagacaggaacctggcccgggccctgagcacagactgcacccccagcggggacctgagccccctgagccgggagcccccacccagccccatggtgaagaagcagaggaggaagaagctgaccacccccagcaagacagagggcagcgctggccaggccgaggaggagaactttgagttcctgattgtgagcagcacaggccagacctggcactttgaggccgccagctttgaggagagagatgcctgggtgcaggccatcgagagccagatcctggccagcctgcagtgctgtgagagcagcaaggtgaagctgaggacagacagccagagcgaggccgtggccatccaggccatcagaaatgccaagggcaacagcatctgtgtggactgtggggcccccaaccccacctgggccagcctgaacctgggcgccctgatctgcatcgagtgcagcggcatccacaggaacctgggcacccacctgagccgggtgcgcagcctggacctggatgactggccccgggagctgaccctggtgctgacagccatcggaaatgacacagccaacagagtgtgggagagtgacacccggggccgggccaagcccagccgggacagcagccgggaggagcgggagagctggatccgggccaagtatgagcagctgctcttcctggcccccctgagcaccagcgaggagcccctgggccggcagctgtgggccgctgtgcaggcccaggatgtggccaccgtgctgctgctgctggcccacgcccggcacggccccctggacacctctgtggaggacccccagctgcggagccccctgcacctggccgctgagctggcccacgtggtgatcacccagctgctgctgtggtatggagcagatgtggccgccagagatgcccagggccgcacagccctcttctacgcccggcaggccggcagccagctgtgtgccgacatcctgctgcagcacggctgccctggagagggcggcagcgctgccaccacccccagcgctgccaccacccccagcatcacagccacccccagccccaggagaagaagcagcgctgcctctgtgggccgggcagatgcccctgtggccctggtgtag

SEQ ID NO: 18359 - DNA, 3579 bp, synthetic construct
  misc_feature 1..3579: note = Description of Artificial Sequence: Synthetic coding sequence
  source 1..3579: mol_type = other DNA
atgagcagaggagctggggccctgcagaggaggaccaccacctacctgatcagcctgaccctggtgaagctggagagcgtgcccccacctccacccagccccagcgctgctgctgctggagctgctggggcccggggcagcgagactggagaccccggcagccccagaggagctgaggagcccgggaagaagagacatgagcggctcttccaccggcaggatgccctgtggatcagcaccagcagcgctggcactggaggagctgagcccccagccctgagccctgccccagccagccctgcccggcctgtgtccccagcccctggccggcggctgagcctgtgggccgtgcccccaggcccccccctgagcggcggcctgagcccagaccccaagccaggaggagcccccaccagcagcagaagacccctgctgagcagccccagctggggcggccctgagcctgagggccgggccggcggcggcatccctggcagcagcagcccccaccctggcaccggcagccggcggctgaaggtggcccctcctcctccagcccccaagccctgcaagacagtgaccaccagcggggccaaggccggcggcggcaagggggccggcagccggctgtcctggccagagagcgagggcaagccccgggtgaagggcagcaagagcagcgctggcaccggggcctctgtgtctgctgctgccacagctgctgctgctgggggcggcggcagcacagccagcaccagcggaggagtgggcgctggggccggggcccggggcaagctgagccccaggaagggcaagagcaagaccctggacaacagcgacctgcaccctggccccccagctggcagccccccacccctgaccctgccccccacccccagccctgccacagctgtgacagctgccagcgcccagcccccaggccctgccccacccatcaccctggagcccccagcccctggcctgaagaggggccgggagggcggccgggccagcacccgggacaggaagatgctgaagttcatcagcggcatcttcaccaagagcactggaggccccccaggcagcggccccctgcccggcccccccagcctgagcagcggcagcggcagccgggagctgctgggcgctgagctgcgggccagccccaaggctgtgatcaacagccaggagtggaccctgagccgcagcatccctgagctgcggctgggcgtgctgggagatgcccggagcggcaagagcagcctcatccaccgcttcctgaccggcagctaccaggtgctggagaagacagaaagtgagcagtacaagaaggagatgctggtggatggccagacccacctggtgctgatccgggaggaggccggggccccagatgccaagttcagcggctgggcagatgctgtgatctttgtgttcagcctggaggatgagaacagcttccaggccgtgtcccggctgcacggccagctgagcagcctgcggggggagggccggggcggcctggccctggccctggtgggcacccaggaccgcatcagcgccagcagcccccgggtggtgggagatgcccgggcccgggccctgtgtgccgacatgaagcgctgcagctactatgagacctgtgccacctacggcctgaatgtggacagagtcttccaggaggtggcccagaaggtggtgaccctgaggaagcagcagcagctgctggccgcctgcaagagcctgcccagcagccccagccacagcgctgccagcacccctgtggccggccaggccagcaatggaggccacaccagtgactacagcagcagcctgcccagcagccccaacgtgggccaccgggagctgcgggcagaggccgctgctgtggccggcctgagcaccccaggcagcctgcaccgggccgccaagaggaggaccagcctgtttgccaacagaagaggaagtgacagcgagaagaggagcctggacagcagaggagagaccaccggcagcggccgggccatccccatcaagcagagcttcctgctgaagaggagcggcaacagcctgaacaaggagtggaagaagaagtatgtgaccctgagcagcaatggcttcctgctgtaccaccccagcatcaatgactacatccacagcacccacggcaaggagatggacctgctgcggaccaccgtgaaggtgcctgggaagaggcctccccgggccatcagcgccttcggccccagcgccagcatcaatggcctggtgaaggacatgagcacagtgcagatgggagagggcctggaggccaccacccccatgcccagccccagccccagccccagcagcctgcagcccccaccagaccagaccagcaagcacctgctgaagccagacaggaacctggcccgggccctgagcacagactgcacccccagcggggacctgagccccctgagccgggagcccccacccagccccatggtgaagaagcagaggaggaagaagctgaccacccccagcaagacagagggcagcgctggccaggccgaggccaagaggaagatgtggaagctgaagagctttggcagcctgaggaacatctacaaggccgaggagaactttgagttcctgattgtgagcagcacaggccagacctggcactttgaggccgccagctttgaggagagagatgcctgggtgcaggccatcgagagccagatcctggccagcctgcagtgctgtgagagcagcaaggtgaagctgaggacagacagccagagcgaggccgtggccatccaggccatcagaaatgccaagggcaacagcatctgtgtggactgtggggcccccaaccccacctgggccagcctgaacctgggcgccctgatctgcatcgagtgcagcggcatccacaggaacctgggcacccacctgagccgggtgcgcagcctggacctggatgactggccccgggagctgaccctggtgctgacagccatcggaaatgacacagccaacagagtgtgggagagtgacacccggggccgggccaagcccagccgggacagcagccgggaggagcgggagagctggatccgggccaagtatgagcagctgctcttcctggcccccctgagcaccagcgaggagcccctgggccggcagctgtgggccgctgtgcaggcccaggatgtggccaccgtgctgctgctgctggcccacgcccggcacggccccctggacacctctgtggaggacccccagctgcggagccccctgcacctggccgctgagctggcccacgtggtgatcacccagctgctgctgtggtatggagcagatgtggccgccagagatgcccagggccgcacagccctcttctacgcccggcaggccggcagccagctgtgtgccgacatcctgctgcagcacggctgccctggagagggcggcagcgctgccaccacccccagcgctgccaccacccccagcatcacagccacccccagccccaggagaagaagcagcgctgcctctgtgggccgggcagatgcccctgtggccctggtgtag

SEQ ID NO: 18360 - DNA, 1185 bp, synthetic construct
  misc_feature 1..1185: note = Description of Artificial Sequence: Synthetic coding sequence
  source 1..1185: mol_type = other DNA
atggacagccagggcaggaaggtggtggtgtgtgacaatggaactggatttgtgaagtgtggctacgccggcagcaacttccctgagcacatcttccctgccctggtgggccggcccatcatccgcagcaccaccaaggtgggcaacatcgagatcaaggacctgatggtgggagatgaggccagcgagctgcgctccatgctggaggtgaactaccccatggagaatggcatcgtgaggaactgggatgacatgaagcacctgtgggactacacctttggacctgagaagctgaacatcgacaccaggaactgcaagatcctgctgacagagccccccatgaaccccaccaagaaccgggagaagatcgtggaggtgatgtttgagacctaccagttcagcggcgtgtatgtggccatccaggccgtgctgaccctgtatgcccagggcctgctgactggagtggtggtggacagcggagatggagtgacccacatctgccctgtgtatgagggcttcagcctgccccacctgacccggcggctggacattgctggccgggacatcacccgctacctgatcaagctgctgctgctgcggggctacgccttcaaccacagcgctgactttgagaccgtgaggatgatcaaggagaagctgtgctacgtgggctacaacatcgagcaggagcagaagctggccctggagaccaccgtgctggtggagagctacaccctgcctgatggccgcatcatcaaggtgggcggggagagatttgaggcccctgaggccctcttccagccccacctgatcaacgtggagggcgtgggcgtggccgagctgctcttcaacaccatccaggccgctgacatcgacaccaggtctgagttctacaagcacatcgtgctgagcggcggcagcaccatgtacccaggcctgcccagccggctggagcgggagctgaagcagctgtacctggagcgggtgctgaagggagatgtggagaagctgagcaagttcaagatcagaattgaagatcctcccaggaggaagcacatggtgttcctgggcggcgctgtgctggccgacatcatgaaggacaaggacaacttctggatgacccggcaggagtaccaggagaagggcgtgcgggtgctggagaagctgggcgtgacagtgaggtag

SEQ ID NO: 18361 - DNA, 1200 bp, synthetic construct
  misc_feature 1..1200: note = Description of Artificial Sequence: Synthetic coding sequence
  source 1..1200: mol_type = other DNA
atggacagccagggcaggaaggtggtggtgtgtgacaatggaactggatttgtgaagtgtggctacgccggcagcaacttccctgagcacatcttccctgccctggtgggccggcccatcatccgcagcaccaccaaggtgggcaacatcgagatcaagaacaacaagaagatggacctgatggtgggagatgaggccagcgagctgcgctccatgctggaggtgaactaccccatggagaatggaattgtgaggaactgggatgacatgaagcacctgtgggactacaccttcggccctgagaagctgaacatcgacaccaggaactgcaagatcctgctgacagagccccccatgaaccccaccaagaaccgggagaagatcgtggaggtgatgtttgagacctaccagttctctggagtgtatgtggccatccaggccgtgctgaccctgtatgcccagggcctgctgactggagtggtggtggacagcggagatggagtgacccacatctgccctgtgtatgagggcttcagcctgccccacctgacccggcggctggacattgctggccgggacatcacccgctacctgatcaagctgctgctgctgcggggctacgccttcaaccacagcgctgactttgaaacagtgaggatgatcaaggagaagctgtgctacgtgggctacaacatcgagcaggagcagaagctggccctggagaccaccgtgctggtggagagctacaccctgcctgatggccgcatcatcaaggtgggcggggagagatttgaggcccctgaggccctcttccagccccacctgatcaacgtggagggcgtgggcgtggccgagctgctcttcaacaccatccaggccgctgacatcgacaccaggtctgagttctacaagcacatcgtgctgagcggcggcagcaccatgtacccaggcctgcccagccggctggagcgggagctgaagcagctgtacctggagcgggtgctgaagggagatgtggagaagctgagcaagttcaagatcagaattgaggacccccccaggaggaagcacatggtgttcctgggcggcgctgtgctggccgacatcatgaaggacaaggacaacttctggatgacccggcaggagtaccaggagaagggcgtgcgggtgctggagaagctgggcgtgacagtgaggtag

SEQ ID NO: 18362 - DNA, 1020 bp, synthetic construct
  misc_feature 1..1020: note = Description of Artificial Sequence: Synthetic coding sequence
  source 1..1020: mol_type = other DNA
atggtgggagatgaggccagcgagctgcgctccatgctggaggtgaactaccccatggagaatggaattgtgaggaactgggatgacatgaagcacctgtgggactacaccttcggccctgagaagctgaacatcgacaccaggaactgcaagatcctgctgacagagccccccatgaaccccaccaagaaccgggagaagatcgtggaggtgatgtttgagacctaccagttctctggagtgtatgtggccatccaggccgtgctgaccctgtatgcccagggcctgctgactggagtggtggtggacagcggagatggagtgacccacatctgccctgtgtatgagggcttcagcctgccccacctgacccggcggctggacattgctggccgggacatcacccgctacctgatcaagctgctgctgctgcggggctacgccttcaaccacagcgctgactttgaaacagtgaggatgatcaaggagaagctgtgctacgtgggctacaacatcgagcaggagcagaagctggccctggagaccaccgtgctggtggagagctacaccctgcctgatggccgcatcatcaaggtgggcggggagagatttgaggcccctgaggccctcttccagccccacctgatcaacgtggagggcgtgggcgtggccgagctgctcttcaacaccatccaggccgctgacatcgacaccaggtctgagttctacaagcacatcgtgctgagcggcggcagcaccatgtacccaggcctgcccagccggctggagcgggagctgaagcagctgtacctggagcgggtgctgaagggagatgtggagaagctgagcaagttcaagatcagaattgaggacccccccaggaggaagcacatggtgttcctgggcggcgctgtgctggccgacatcatgaaggacaaggacaacttctggatgacccggcaggagtaccaggagaagggcgtgcgggtgctggagaagctgggcgtgacagtgaggtag

SEQ ID NO: 18363 - DNA, 918 bp, synthetic construct
  misc_feature 1..918: note = Description of Artificial Sequence: Synthetic coding sequence
  source 1..918: mol_type = other DNA
atggtgggagatgaggccagcgagctgcgctccatgctggaggtgaactaccccatggagaatggaattgtgaggaactgggatgacatgaagcacctgtgggactacaccttcggccctgagaagctgaacatcgacaccaggaactgcaagatcctgctgacagagccccccatgaaccccaccaagaaccgggagaagatcgtggaggtgatgtttgagacctaccagttctctggagtgtatgtggccatccaggccgtgctgaccctgtatgcccagggcctgctgactggagtggtggtggacagcggagatggagtgacccacatctgccctgtgtatgagggcttcagcctgccccacctgacccggcggctggacattgctggccgggacatcacccgctacctgatcaagctgctgctgctgcggggctacgccttcaaccacagcgctgactttgaaacagtgaggatgatcaaggagaagctgtgctacgtgggctacaacatcgagcaggagcagaagctggccctggagaccaccgtgctggtggagagctacaccctgcctgatggccgcatcatcaaggtgggcggggagagatttgaggcccctgaggccctcttccagccccacctgatcaacgtggagggcgtgggcgtggccgagctgctcttcaacaccatccaggccgctgacatcgacaccaggtctgagttctacaagcacatcgtgctgagcggcggcagcaccatgtacccaggcctgcccagccggctggagcgggagctgaagcagctgtacctggagcgggtgctgaagggagatgtggagaagctgtctgtgtccatcagcaagagcaccatcaccaacatcctgctgaagggctacacagtggtgtgtgagagctag

SEQ ID NO: 18364 - DNA, 1257 bp, synthetic construct
  misc_feature 1..1257: note = Description of Artificial Sequence: Synthetic coding sequence
  source 1..1257: mol_type = other DNA
atggccggccgcctgcctgcctgtgtggtggactgtggcaccggctacaccaagctgggctacgccggcaacacagagccccagttcatcatccccagctgcatcgccatcaaggagagcgccaaggtgggggaccaggcccagaggagagtgatgaagggcgtggatgacctggacttcttcatcggagatgaggccatcgagaagcccacctacgccaccaagtggcccatccgccacggcatcgtggaggactgggacctgatggagcgcttcatggagcaggtgatcttcaagtacctgcgggcagagcctgaggaccactacttcctgctgacagagccccccctgaacaccccagaaaatcgggagtacacagctgagatcatgtttgagagcttcaacgtgcccggcctgtacatcgctgtgcaggccgtgctggccctggccgcctcctggaccagccggcaggtgggggagaggaccctgaccggcaccgtcatcgacagcggagatggagtgacccacgtgattcctgtggccgagggctacgtgattggcagctgcatcaagcacatccccatcgccggccgggacatcacctacttcatccagcagctgctgcgggaccgggaggtgggcatccccccagagcagagcctggagacagccaaggctgtgaaggagcgctacagctatgtgtgcccagacctggtgaaggagttcaacaagtatgacacagatggcagcaagtggatcaagcagtacacaggcatcaatgccatcagcaagaaggagttcagcattgatgtgggctatgagcgcttcctgggccctgagatcttcttccaccctgagtttgccaacccagacttcacccagcccatcagcgaggtggtggatgaagtcatccagaactgccccattgatgtgcggcggcccctgtacaagaacatcgtgctgagcggcggcagcaccatgttccgggactttggaagaaggctgcagagggacctgaagaggacagtggatgcccggctgaagctgtctgaggagctgagcggcggccgcctgaagcccaagcccattgatgtgcaggtgatcacccaccacatgcagagatatgctgtgtggtttggaggctccatgctggccagcaccccagagttctaccaggtgtgccacaccaagaaggactatgaggagatcggccccagcatctgccgccacaaccctgtgtttggagtgatgtcctag

SEQ ID NO: 18365 - DNA, 1104 bp, synthetic construct
  misc_feature 1..1104: note = Description of Artificial Sequence: Synthetic coding sequence
  source 1..1104: mol_type = other DNA
atgaagggcgtggatgacctggacttcttcatcggagatgaggccatcgagaagcccacctacgccaccaagtggcccatcagacatggaattgtggaggactgggacctgatggagcgcttcatggagcaggtgatcttcaagtacctgcgggcagagcctgaggaccactacttcctgctgacagagccccccctgaacaccccagagaaccgggagtacacagctgagatcatgtttgagagcttcaacgtgcccggcctgtacatcgctgtgcaggccgtgctggccctggccgcctcctggaccagccggcaggtgggggagaggaccctgactggaacagtgattgattctggagatggagtgacccacgtgattcctgtggccgagggctacgtgattggcagctgcatcaagcacatccccatcgccggccgggacatcacctacttcatccagcagctgctgcgggaccgggaggtgggcatccccccagagcagagcctggagacagccaaggctgtgaaggagcgctacagctatgtgtgcccagacctggtgaaggagttcaacaagtatgacacagatggcagcaagtggatcaagcagtacacaggcatcaatgccatcagcaagaaggagttcagcattgatgtgggctatgagcgcttcctgggccctgagatcttcttccaccctgagtttgccaacccagacttcacccagcccatcagcgaggtggtggatgaggtgatccagaactgccccattgatgtgagaagacccctgtacaagaacatcgtgctgagcggcggcagcaccatgttccgggactttggccggcggctgcagagggacctgaagaggacagtggatgcccggctgaagctgtctgaggagctgagcggcggccgcctgaagcccaagcccattgatgtgcaggtgatcacccaccacatgcagagatatgctgtgtggtttggaggctccatgctggccagcaccccagagttctaccaggtgtgccacaccaagaaggactatgaggagatcggccccagcatctgccgccacaaccctgtgtttggagtgatgtcctag

SEQ ID NO: 18366 - DNA, 1071 bp, synthetic construct
  misc_feature 1..1071: note = Description of Artificial Sequence: Synthetic coding sequence
  source 1..1071: mol_type = other DNA
atgctggagatccagaaccacagcctgagcagcctgccctggcccatccgccacggcatcgtggaggactgggacctgatggagcgcttcatggagcaggtgatcttcaagtacctgcgggcagagcctgaggaccactacttcctgctgacagagccccccctgaacaccccagaaaatcgggagtacacagctgagatcatgtttgagagcttcaacgtgcccggcctgtacatcgctgtgcaggccgtgctggccctggccgcctcctggaccagccggcaggtgggggagaggaccctgaccggcaccgtcatcgacagcggagatggagtgacccacgtgattcctgtggccgagggctacgtgattggcagctgcatcaagcacatccccatcgccggccgggacatcacctacttcatccagcagctgctgcgggaccgggaggtgggcatccccccagagcagagcctggagacagccaaggctgtgaaggagcgctacagctatgtgtgcccagacctggtgaaggagttcaacaagtatgacacagatggcagcaagtggatcaagcagtacacaggcatcaatgccatcagcaagaaggagttcagcattgatgtgggctatgagcgcttcctgggccctgagatcttcttccaccctgagtttgccaacccagacttcacccagcccatcagcgaggtggtggatgaagtcatccagaactgccccattgatgtgcggcggcccctgtacaagaacatcgtgctgagcggcggcagcaccatgttccgggactttggaagaaggctgcagagggacctgaagaggacagtggatgcccggctgaagctgtctgaggagctgagcggcggccgcctgaagcccaagcccattgatgtgcaggtgatcacccaccacatgcagagatatgctgtgtggtttggaggctccatgctggccagcaccccagagttctaccaggtgtgccacaccaagaaggactatgaggagatcggccccagcatctgccgccacaaccctgtgtttggagtgatgtcctag

SEQ ID NO: 18367 - DNA, 870 bp, synthetic construct
  misc_feature 1..870: note = Description of Artificial Sequence: Synthetic coding sequence
  source 1..870: mol_type = other DNA
atgtttgagagcttcaacgtgcccggcctgtacatcgctgtgcaggccgtgctggccctggccgcctcctggaccagccggcaggtgggggagaggaccctgactggaacagtgattgattctggagatggagtgacccacgtgattcctgtggccgagggctacgtgattggcagctgcatcaagcacatccccatcgccggccgggacatcacctacttcatccagcagctgctgcgggaccgggaggtgggcatccccccagagcagagcctggagacagccaaggctgtgaaggagcgctacagctatgtgtgcccagacctggtgaaggagttcaacaagtatgacacagatggcagcaagtggatcaagcagtacacaggcatcaatgccatcagcaagaaggagttcagcattgatgtgggctatgagcgcttcctgggccctgagatcttcttccaccctgagtttgccaacccagacttcacccagcccatcagcgaggtggtggatgaggtgatccagaactgccccattgatgtgagaagacccctgtacaagaacatcgtgctgagcggcggcagcaccatgttccgggactttggccggcggctgcagagggacctgaagaggacagtggatgcccggctgaagctgtctgaggagctgagcggcggccgcctgaagcccaagcccattgatgtgcaggtgatcacccaccacatgcagagatatgctgtgtggtttggaggctccatgctggccagcaccccagagttctaccaggtgtgccacaccaagaaggactatgaggagatcggccccagcatctgccgccacaaccctgtgtttggagtgatgtcctag

SEQ ID NO: 18368 - DNA, 1749 bp, synthetic construct
  misc_feature 1..1749: note = Description of Artificial Sequence: Synthetic coding sequence
  source 1..1749: mol_type = other DNA
attgatattgaatccatggacacagacaaggatgacccccacggccgcctggagtacacagagcaccagggccgcatcaagaatgcccgggaggcccacagccagatcgagaagagaagaagagacaagatgaacagcttcattgatgagctggccagcctggtgcccacctgcaatgccatgagcaggaagctggacaagctgactgtgctgaggatggctgtgcagcacatgaagaccctgcggggggccaccaacccctacacagaggccaactacaagcccaccttcctgagtgatgatgagctgaagcacctgatcctgcgggctgctgatggcttcctgtttgtggtgggctgtgaccggggcaagatcctgtttgtgtctgagagcgtcttcaagatcctgaactacagccagaatgacctgattggccagagcctgtttgactacctgcaccccaaggacatcgccaaggtgaaggagcagctgagcagcagtgacacagccccccgggagcggctgattgatgccaagacaggcctgcctgtgaagacagacatcaccccaggccccagccggctgtgcagcggggcccggcgctccttcttctgcaggatgaagtgcaaccggcccagcgtgaaggtggaggacaaggacttccccagcacctgcagcaagaagaaggctgacaggaagagcttctgcaccatccacagcacaggctacctgaagtcctggccacccaccaagatgggcctggatgaggacaatgaaccagacaatgaaggctgcaacctgagctgcctggtggccatcggccgcctgcacagccacgtggtgccccagcctgtgaatggagagatccgggtgaagtccatggagtatgtgtccagacatgccattgatggcaagtttgtgtttgtggaccagagggccacagccatcctggcctacctgccccaggagctgctgggcaccagctgctatgagtacttccaccaggatgacatcggccacctggccgagtgccaccggcaggtgctgcagacccgggagaagatcaccaccaactgctacaagttcaagatcaaggatggcagcttcatcaccctgcggagccgctggttctccttcatgaacccctggaccaaggaggtggagtacatcgtgtccaccaacacagtggtgctggccaacgtgctggagggcggggaccccaccttcccccagctgacagccagcccccacagcatggacagcatgctgcccagcggggagggcggccccaagaggacccaccccaccgtgcccggcatccctgggggcacccgggccggggccggcaagattggaaggatgattgctgaggagatcatggagatccaccgcatccggggcagcagccccagcagctgtggcagcagccccctgaacatcaccagcaccccacctccagatgccagcagccctgggggcaagaagatcctgaatggaggcaccccagacatccccagcagcggcctgctgagcggccaggcccaggagaaccctggctacccctacagcgacagcagcagcatcctgggggagaacccccacatcggcatcgacatgattgacaatgaccagggcagcagcagccccagcaatgatgaggccgccatggctgtgatcatgagcctgctggaggctgatgctggcctgggcggccctgtggacttcagtgacctgccctggcccctgtag

SEQ ID NO: 18369 - DNA, 1527 bp, synthetic construct
  misc_feature 1..1527: note = Description of Artificial Sequence: Synthetic coding sequence
  source 1..1527: mol_type = other DNA
atggctgaccagaggatggacatcagcagcaccatcagtgacttcatgagccctggccccacagacctgctgagcagcagcctgggcaccagcggcgtggactgcaacaggaagaggaagggcagcagcacagactaccaggagagcatggacacagacaaggatgacccccacggccgcctggagtacacagagcaccagggccgcatcaagaatgcccgggaggcccacagccagatcgagaagagaagaagagacaagatgaacagcttcattgatgagctggccagcctggtgcccacctgcaatgccatgagcaggaagctggacaagctgactgtgctgaggatggctgtgcagcacatgaagaccctgcggggggccaccaacccctacacagaggccaactacaagcccaccttcctgagtgatgatgagctgaagcacctgatcctgcgggctgctgatggcttcctgtttgtggtgggctgtgaccggggcaagatcctgtttgtgtctgagagcgtcttcaagatcctgaactacagccagaatgacctgattggccagagcctgtttgactacctgcaccccaaggacatcgccaaggtgaaggagcagctgagcagcagtgacacagccccccgggagcggctgattgatgccaagacaggcctgcctgtgaagacagacatcaccccaggccccagccggctgtgcagcggggcccggcgctccttcttctgcaggatgaagtgcaaccggcccagcgtgaaggtggaggacaaggacttccccagcacctgcagcaagaagaaggtgctgcagacccgggagaagatcaccaccaactgctacaagttcaagatcaaggatggcagcttcatcaccctgcggagccgctggttctccttcatgaacccctggaccaaggaggtggagtacatcgtgtccaccaacacagtggtgctggccaacgtgctggagggcggggaccccaccttcccccagctgacagccagcccccacagcatggacagcatgctgcccagcggggagggcggccccaagaggacccaccccaccgtgcccggcatccctgggggcacccgggccggggccggcaagattggaaggatgattgctgaggagatcatggagatccaccgcatccggggcagcagccccagcagctgtggcagcagccccctgaacatcaccagcaccccacctccagatgccagcagccctgggggcaagaagatcctgaatggaggcaccccagacatccccagcagcggcctgctgagcggccaggcccaggagaaccctggctacccctacagcgacagcagcagcatcctgggggagaacccccacatcggcatcgacatgattgacaatgaccagggcagcagcagccccagcaatgatgaggccgccatggctgtgatcatgagcctgctggaggctgatgctggcctgggcggccctgtggacttcagtgacctgccctggcccctgtag

SEQ ID NO: 18370 - DNA, 1878 bp, synthetic construct
  misc_feature 1..1878: note = Description of Artificial Sequence: Synthetic coding sequence
  source 1..1878: mol_type = other DNA
atggctgaccagaggatggacatcagcagcaccatcagtgacttcatgagccctggccccacagacctgctgagcagcagcctgggcaccagcggcgtggactgcaacaggaagaggaagggcagcagcacagactaccaggagagcatggacacagacaaggatgacccccacggccgcctggagtacacagagcaccagggccgcatcaagaatgcccgggaggcccacagccagatcgagaagagaagaagagacaagatgaacagcttcattgatgagctggccagcctggtgcccacctgcaatgccatgagcaggaagctggacaagctgactgtgctgaggatggctgtgcagcacatgaagaccctgcggggggccaccaacccctacacagaggccaactacaagcccaccttcctgagtgatgatgagctgaagcacctgatcctgcgggctgctgatggcttcctgtttgtggtgggctgtgaccggggcaagatcctgtttgtgtctgagagcgtcttcaagatcctgaactacagccagaatgacctgattggccagagcctgtttgactacctgcaccccaaggacatcgccaaggtgaaggagcagctgagcagcagtgacacagccccccgggagcggctgattgatgccaagacaggcctgcctgtgaagacagacatcaccccaggccccagccggctgtgcagcggggcccggcgctccttcttctgcaggatgaagtgcaaccggcccagcgtgaaggtggaggacaaggacttccccagcacctgcagcaagaagaaggacaggaagagcttctgcaccatccacagcacaggctacctgaagtcctggccacccaccaagatgggcctggatgaagataatgaaccagacaatgaaggctgcaacctgagctgcctggtggccatcggccgcctgcacagccacgtggtgccccagcctgtgaatggagagatccgggtgaagtccatggagtatgtgtccagacatgccattgatggcaagtttgtgtttgtggaccagagggccacagccatcctggcctacctgccccaggagctgctgggcaccagctgctatgagtacttccaccaggatgacatcggccacctggccgagtgccaccggcaggtgctgcagacccgggagaagatcaccaccaactgctacaagttcaagatcaaggatggcagcttcatcaccctgcggagccgctggttctccttcatgaacccctggaccaaggaggtggagtacatcgtgtccaccaacacagtggtgctggccaacgtgctggagggcggggaccccaccttcccccagctgacagccagcccccacagcatggacagcatgctgcccagcggggagggcggccccaagaggacccaccccaccgtgcccggcatccctgggggcaccagggctggagctgggaagattggccgcatgattgctgaggagatcatggagatccaccgcatccggggcagcagccccagcagctgtggcagcagccccctgaacatcaccagcaccccacctccagatgccagcagccctgggggcaagaagatcctgaatggaggcaccccagacatccccagcagcggcctgctgagcggccaggcccaggagaaccctggctacccctacagcgacagcagcagcatcctgggggagaacccccacatcggcatcgacatgattgacaatgaccagggcagcagcagccccagcaatgatgaagctgccatggccgtcatcatgagcctgctggaggctgatgctggcctgggcggccctgtggacttcagtgacctgccctggcccctgtag

SEQ ID NO: 18371 - DNA, 1581 bp, synthetic construct
  misc_feature 1..1581: note = Description of Artificial Sequence: Synthetic coding sequence
  source 1..1581: mol_type = other DNA
atggctgaccagaggatggacatcagcagcaccatcagtgacttcatgagccctggccccacagacctgctgagcagcagcctgggcaccagcggcgtggactgcaacaggaagaggaagggcagcagcacagactaccaggagagcatggacacagacaaggatgacccccacggccgcctggagtacacagagcaccagggccgcatcaagaatgcccgggaggcccacagccagatcgagaagagaagaagagacaagatgaacagcttcattgatgagctggccagcctggtgcccacctgcaatgccatgagcaggaagctggacaagctgactgtgctgaggatggctgtgcagcacatgaagaccctgcggggggccaccaacccctacacagaggccaactacaagcccaccttcctgagtgatgatgagctgaagcacctgatcctgcgggctgctgatggcttcctgtttgtggtgggctgtgaccggggcaagatcctgtttgtgtctgagagcgtcttcaagatcctgaactacagccagaatgacctgattggccagagcctgtttgactacctgcaccccaaggacatcgccaaggtgaaggagcagctgagcagcagtgacacagccccccgggagcggctgattgatgccaagacaggcctgcctgtgaagacagacatcaccccaggccccagccggctgtgcagcggggcccggcgctccttcttctgcaggatgaagtgcaaccggcccagcgtgaaggtggaggacaaggacttccccagcacctgcagcaagaagaaggctgacaggaagagcttctgcaccatccacagcacaggctacctgaagtcctggccacccaccaagatgggcctggatgaggacaatgaaccagacaatgaaggctgcaacctgagctgcctggtggccatcggccgcctgcacagccacgtggtgccccagcctgtgaatggagagatccgggtgaagtccatggagtatgtgtccagacatgccattgatggcaagtttgtgtttgtggaccagagggccacagccatcctggcctacctgccccaggagctgctgggcaccagctgctatgagtacttccaccaggatgacatcggccacctggccgagtgccaccggcaggtgctgcagacccgggagaagatcaccaccaactgctacaagttcaagatcaaggatggcagcttcatcaccctgcggagccgctggttctccttcatgaacccctggaccaaggaggtggagtacatcgtgtccaccaacacagtggtgctgagccgggtggacaccggccacctgggccaggtggagtggtgcaccgtgctgagcaggccagacagccgcttcctgattgctggcatgttcacagagcccacctcctggaaggccggcacccagcccagccacagcagccagcaccccccaacagcctggacagcctgctgccccctggagaaggtggcccagaggggccccacccccctcttccagggcttccagggcgagcccggcctgggccaggagaagtag

SEQ ID NO: 18372 - DNA, 1878 bp, synthetic construct; identical to SEQ ID NO: 18370
  misc_feature 1..1878: note = Description of Artificial Sequence: Synthetic coding sequence
  source 1..1878: mol_type = other DNA

SEQ ID NO: 18373 - DNA, 1752 bp, synthetic construct
  misc_feature 1..1752: note = Description of Artificial Sequence: Synthetic coding sequence
  source 1..1752: mol_type = other DNA
atgatcaacatcgagagcatggacacagacaaggatgacccccacggccgcctggagtacacagagcaccagggccgcatcaagaatgcccgggaggcccacagccagatcgagaagagaagaagagacaagatgaacagcttcattgatgagctggccagcctggtgcccacctgcaatgccatgagcaggaagctggacaagctgactgtgctgaggatggctgtgcagcacatgaagaccctgcggggggccaccaacccctacacagaggccaactacaagcccaccttcctgagtgatgatgagctgaagcacctgatcctgcgggcagcagatggcttcctgtttgtggtgggctgtgaccggggcaagatcctgtttgtgtctgagagcgtcttcaagatcctgaactacagccagaatgacctgattggccagagcctgtttgactacctgcaccccaaggacatcgccaaggtgaaggagcagctgagcagcagtgacacagccccccgggagcggctgattgatgccaagacaggcctgcctgtgaagacagacatcaccccaggccccagccggctgtgcagcggggcccggcgctccttcttctgcaggatgaagtgcaaccggcccagcgtgaaggtggaggacaaggacttccccagcacctgcagcaagaagaaggctgacaggaagagcttctgcaccatccacagcacaggctacctgaagtcctggccacccaccaagatgggcctggatgaagataatgaaccagacaatgaaggctgcaacctgagctgcctggtggccatcggccgcctgcacagccacgtggtgccccagcctgtgaatggagagatccgggtgaagtccatggagtatgtgtccagacatgccattgatggcaagtttgtgtttgtggaccagagggccacagccatcctggcctacctgccccaggagctgctgggcaccagctgctatgagtacttccaccaggatgacatcggccacctggccgagtgccaccggcaggtgctgcagacccgggagaagatcaccaccaactgctacaagttcaagatcaaggatggcagcttcatcaccctgcggagccgctggttctccttcatgaacccctggaccaaggaggtggagtacatcgtgtccaccaacacagtggtgctggccaacgtgctggagggcggggaccccaccttcccccagctgacagccagcccccacagcatggacagcatgctgcccagcggggagggcggccccaagaggacccaccccaccgtgcccggcatccctgggggcaccagggctggagctgggaagattggccgcatgattgctgaggagatcatggagatccaccgcatccggggcagcagccccagcagctgtggcagcagccccctgaacatcaccagcaccccacctccagatgccagcagccctgggggcaagaagatcctgaatggaggcaccccagacatccccagcagcggcctgctgagcggccaggcccaggagaaccctggctacccctacagcgacagcagcagcatcctgggggagaacccccacatcggcatcgacatgattgacaatgaccagggcagcagcagccccagcaatgatgaagctgccatggccgtcatcatgagcctgctggaggctgatgctggcctgggcggccctgtggacttcagtgacctgccctggcccctgtag

SEQ ID NO: 18374 - DNA, 1881 bp, synthetic construct
  misc_feature 1..1881: note = Description of Artificial Sequence: Synthetic coding sequence
  source 1..1881: mol_type = other DNA
atggctgaccagaggatggacatcagcagcaccatcagtgacttcatgagccctggccccacagacctgctgagcagcagcctgggcaccagcggcgtggactgcaacaggaagaggaagggcagcagcacagactaccaggagagcatggacacagacaaggatgacccccacggccgcctggagtacacagagcaccagggccgcatcaagaatgcccgggaggcccacagccagatcgagaagagaagaagagacaagatgaacagcttcattgatgagctggccagcctggtgcccacctgcaatgccatgagcaggaagctggacaagctgactgtgctgaggatggctgtgcagcacatgaagaccctgcggggggccaccaacccctacacagaggccaactacaagcccaccttcctgagtgatgatgagctgaagcacctgatcctgcgggctgctgatggcttcctgtttgtggtgggctgtgaccggggcaagatcctgtttgtgtctgagagcgtcttcaagatcctgaactacagccagaatgacctgattggccagagcctgtttgactacctgcaccccaaggacatcgccaaggtgaaggagcagctgagcagcagtgacacagccccccgggagcggctgattgatgccaagacaggcctgcctgtgaagacagacatcaccccaggccccagccggctgtgcagcggggcccggcgctccttcttctgcaggatgaagtgcaaccggcccagcgtgaaggtggaggacaaggacttccccagcacctgcagcaagaagaaggctgacaggaagagcttctgcaccatccacagcacaggctacctgaagtcctggccacccaccaagatgggcctggatgaggacaatgaaccagacaatgaaggctgcaacctgagctgcctggtggccatcggccgcctgcacagccacgtggtgccccagcctgtgaatggagagatccgggtgaagtccatggagtatgtgtccagacatgccattgatggcaagtttgtgtttgtggaccagagggccacagccatcctggcctacctgccccaggagctgctgggcaccagctgctatgagtacttccaccaggatgacatcggccacctggccgagtgccaccggcaggtgctgcagacccgggagaagatcaccaccaactgctacaagttcaagatcaaggatggcagcttcatcaccctgcggagccgctggttctccttcatgaacccctggaccaaggaggtggagtacatcgtgtccaccaacacagtggtgctggccaacgtgctggagggcggggaccccaccttcccccagctgacagccagcccccacagcatggacagcatgctgcccagcggggagggcggccccaagaggacccaccccaccgtgcccggcatccctgggggcacccgggccggggccggcaagattggaaggatgattgctgaggagatcatggagatccaccgcatccggggcagcagccccagcagctgtggcagcagccccctgaacatcaccagcaccccacctccagatgccagcagccctgggggcaagaagatcctgaatggaggcaccccagacatccccagcagcggcctgctgagcggccaggcccaggagaaccctggctacccctacagcgacagcagcagcatcctgggggagaacccccacatcggcatcgacatgattgacaatgaccagggcagcagcagccccagcaatgatgaggccgccatggctgtgatcatgagcctgctggaggctgatgctggcctgggcggccctgtggacttcagtgacctgccctggcccctgtag

SEQ ID NO: 18375 - DNA, 1749 bp, synthetic construct
  misc_feature 1..1749: note = Description of Artificial Sequence: Synthetic coding sequence
  source 1..1749: mol_type = other DNA
atgatcaacatcgagagcatggacacagacaaggatgacccccacggccgcctggagtacacagagcaccagggccgcatcaagaatgcccgggaggcccacagccagatcgagaagagaagaagagacaagatgaacagcttcattgatgagctggccagcctggtgcccacctgcaatgccatgagcaggaagctggacaagctgactgtgctgaggatggctgtgcagcacatgaagaccctgcggggggccaccaacccctacacagaggccaactacaagcccaccttcctgagtgatgatgagctgaagcacctgatcctgcgggcagcagatggcttcctgtttgtggtgggctgtgaccggggcaagatcctgtttgtgtctgagagcgtcttcaagatcctgaactacagccagaatgacctgattggccagagcctgtttgactacctgcaccccaaggacatcgccaaggtgaaggagcagctgagcagcagtgacacagccccccgggagcggctgattgatgccaagacaggcctgcctgtgaagacagacatcaccccaggccccagccggctgtgcagcggggcccggcgctccttcttctgcaggatgaagtgcaaccggcccagcgtgaaggtggaggacaaggacttccccagcacctgcagcaagaagaaggacaggaagagcttctgcaccatccacagcacaggctacctgaagtcctggccacccaccaagatgggcctggatgaggacaatgaaccagacaatgaaggctgcaacctgagctgcctggtggccatcggccgcctgcacagccacgtggtgccccagcctgtgaatggagagatccgggtgaagtccatggagtatgtgtccagacatgccattgatggcaagtttgtgtttgtggaccagagggccacagccatcctggcctacctgccccaggagctgctgggcaccagctgctatgagtacttccaccaggatgacatcggccacctggccgagtgccaccggcaggtgctgcagacccgggagaagatcaccaccaactgctacaagttcaagatcaaggatggcagcttcatcaccctgcggagccgctggttctccttcatgaacccctggaccaaggaggtggagtacatcgtgtccaccaacacagtggtgctggccaacgtgctggagggcggggaccccaccttcccccagctgacagccagcccccacagcatggacagcatgctgcccagcggggagggcggccccaagaggacccaccccaccgtgcccggcatccctgggggcacccgggccggggccggcaagattggaaggatgattgctgaggagatcatggagatccaccgcatccggggcagcagccccagcagctgtggcagcagccccctgaacatcaccagcaccccacctccagatgccagcagccctgggggcaagaagatcctgaatggaggcaccccagacatccccagcagcggcctgctgagcggccaggcccaggagaaccctggctacccctacagcgacagcagcagcatcctgggggagaacccccacatcggcatcgacatgattgacaatgaccagggcagcagcagccccagcaatgatgaggccgccatggctgtgatcatgagcctgctggaggctgatgctggcctgggcggccctgtggacttcagtgacctgccctggcccctgtag

SEQ ID NO: 18376 - DNA, 219 bp, synthetic construct
  misc_feature 1..219: note = Description of Artificial Sequence: Synthetic coding sequence
  source 1..219: mol_type = other DNA
atgatcaacatcgagagcatggacacagacaaggatgacccccacggccgcctggagtacacagagcaccagggccgcatcaagaatgcccgggaggcccacagccagatcgagaagagaagaagagacaagatgaacagcttcattgatgagctggccagcctggtgcccacctgcaatgccatgagcaggaagctggacaagctgactgtgctgtag

SEQ ID NO: 18377 - DNA, 231 bp, synthetic construct
  misc_feature 1..231: note = Description of Artificial Sequence: Synthetic coding sequence
  source 1..231: mol_type = other DNA
atggctgaccagaggatggacatcagcagcaccatcagtgacttcatgagccctggccccacagacctgctgagcagcagcctgggcaccagcggcgtggactgcaacaggaagaggaagggcagcagcacagactaccaggagagcatggacacagacaaggatgacccccacggccgcctggagtacacagagcaccagggccgcatcaagaatgcccgggaggcctag

SEQ ID NO: 18378 - DNA, 72 bp, synthetic construct
  misc_feature 1..72: note = Description of Artificial Sequence: Synthetic coding sequence
  source 1..72: mol_type = other DNA
atggctgaccagaggatggacatcagcagcaccatcagtgacttcatgagccctggccccacagacctgtag

SEQ ID NO: 18379 - DNA, 408 bp, synthetic construct
  misc_feature 1..408: note = Description of Artificial Sequence: Synthetic coding sequence
  source 1..408: mol_type = other DNA
atggctgaccagaggatggacatcagcagcaccatcagtgacttcatgagccctggccccacagacctgctgagcagcagcctgggcaccagcggcgtggactgcaacaggaagaggaagggcagcagcacagactaccaggagagcatggacacagacaaggatgacccccacggccgcctggagtacacagagcaccagggccgcatcaagaatgcccgggaggcccacagccagatcgagaagagaagaagagacaagatgaacagcttcattgatgagctggccagcctggtgcccacctgcaatgccatgagcaggaagctggacaagctgactgtgctgaggatggctgtgcagcacatgaagaccctgcggggggccaccaacccctacacagaggcctag

SEQ ID NO: 18380 - DNA, 141 bp, synthetic construct
  misc_feature 1..141: note = Description of Artificial Sequence: Synthetic coding sequence
  source 1..141: mol_type = other DNA
atgatcaacatcgagagcatggacacagacaaggatgacccccacggccgcctggagtacacagagcaccagggccgcatcaagaatgcccgggaggcccacagccagatcgagaagagaagaagagacaagatgaactag

SEQ ID NO: 18381 - DNA, 426 bp, synthetic construct
  misc_feature 1..426: note = Description of Artificial Sequence: Synthetic coding sequence
  source 1..426: mol_type = other DNA
atgatcaacatcgagagcatggacacagacaaggatgacccccacggccgcctggagtacacagagcaccagggccgcatcaagaatgcccgggaggcccacagccagatcgagaagagaagaagagacaagatgaacagcttcattgatgagctggccagcctggtgcccacctgcaatgccatgagcaggaagctggacaagctgactgtgctgaggatggctgtgcagcacatgaagaccctgcggggggccaccaacccctacacagaggccaactacaagcccaccttcctgagtgatgatgagctgaagcacctgatcctgcgggcagcagatggcttcctgtttgtggtgggctgtgaccggggcaagatcctgtttgtgtctgagagcgtcttcaagatcctgaactacagccagtag

SEQ ID NO: 18382 - DNA, 306 bp, synthetic construct
  misc_feature 1..306: note = Description of Artificial Sequence: Synthetic coding sequence
  source 1..306: mol_type = other DNA
atggctgaccagaggatggacatcagcagcaccatcagtgacttcatgagccctggccccacagacctgctgagcagcagcctgggcaccagcggcgtggactgcaacaggaagaggaagggcagcagcacagactaccaggagagcatggacacagacaaggatgacccccacggccgcctggagtacacagagcaccagggccgcatcaagaatgcccgggaggcccacagccagatcgagaagagaagaagagacaagatgaacagcttcattgatgagctggccagcctggtgcccacctag

SEQ ID NO: 18383 - DNA, 180 bp, synthetic construct
  misc_feature 1..180: note = Description of Artificial Sequence: Synthetic coding sequence
  source 1..180: mol_type = other DNA
atggctgaccagaggatggacatcagcagcaccatcagtgacttcatgagccctggccccacagacctgctgagcagcagcctgggcaccagcggcgtggactgcaacaggaagaggaagggcagcagcacagactaccaggagagcatggacacagacaaggatgacccccacggctag

SEQ ID NO: 18384 - DNA, 1683 bp, synthetic construct
  misc_feature 1..1683: note = Description of Artificial Sequence: Synthetic coding sequence
  source 1..1683: mol_type = other DNA
atggagcccctgcagcagcagcagcagcagcagcagcagcagcagaagcagccccacctggcccccctgcagatggatgcccgggagaagcagggccagcagatgagggaggcccagttcctgtatgcccagaagctggtgacccagcccaccctgctgagcgccacagctggccggcccagcggcagcacccccctgggccccctggcccgggtgcccccaacagctgctgtggcccaggtgtttgagcggggcaacatgaacagcgagcctgaggaggaggatggcggcctggaggatgaagatggagatgatgaggtggccgaggtggccgagaaggagacccaggccgccagcaagtacttccacgtgcagaaggtggcccggcaggacccccgggtggcccccatgagcaacctgctgcctgcccctggcctgccccctcatggccagcaggccaaggaggaccacaccaaggatgccagcaaggccagccccagcgtgtccacagctggccagcccaactggaacctggatgagcagctgaagcagaatggaggcctggcctggagcgatgatgctgatggcggccggggccgggagatcagccgggactttgccaagctgtatgagctggatggagaccctgagaggaaggagttcctggatgacctgtttgtgttcatgcagaagaggggcacccccatcaaccgcatccccatcatggccaagcagatcctggacctgtacatgctgtacaagctggtgacagagaagggcggcctggtggagatcatcaacaagaagatctggagggagatcaccaagggcctgaacctgcccaccagcatcaccagcgctgccttcaccctgcggacccagtacatgaagtacctgtatgcctatgaatgtgagaagaaggccctgagcagccctgctgagctgcaggccgccattgatggcaacagaagagagggcagaagacccagctacagcagcagcctgtttggctacagccctgctgctgccacagctgctgctgctgctggggccccagccctgctgagcccccccaagatccgcttccccatcctgggcctgggcagcagcagcggcaccaacaccagcagcccccgcatcagccctgccaccaccctgaggaaaggagatggagcccctgtgaccaccgtgcctgtgcccaaccggctggccgtgcctgtgaccctggccagccagcaggccggcaccaggacagctgccctggagcagctgcgggagcggctggagagcggggagcctgctgagaagaaggccagccggctgtctgaggaggagcagaggctggtgcagcaggccttccagaggaacttcttctccatggcccggcagctgcccatgaagatccgcatcaatggccgggaggacagagctgaggccagcgctgctgccctgaacctgaccaccagcagcatcggcagcatcaacatgtctgtggacattgatggcaccacctacgccggcgtgctgtttgcccagaagcctgtggtgcacctgatcaccggcagcgccccccagagcctgggcagcagcgccagcagcagcagcagcagccactgcagccccagccccaccagcagccggggcaccccatctgctgagcccagcacctcctggagcctgtag

SEQ ID NO: 18385 - DNA, 1335 bp, synthetic construct
  misc_feature 1..1335: note = Description of Artificial Sequence: Synthetic coding sequence
  source 1..1335: mol_type = other DNA
atggagcccctgcagcagcagcagcagcagcagcagcagcagcagaagcagccccacctggcccccctgcagatggatgcccgggagaagcagggccagcagatgagggaggcccagttcctgtatgcccagaagctggtgacccagcccaccctgctgagcgccacagctggccggcccagcggcagcacccccctgggccccctggcccgggtgcccccaacagctgctgtggcccaggtgtttgagcggggcaacatgaacagcgagcctgaggaggaggatggcggcctggaggatgaagatggagatgatgaggtggccgaggtggccgagaaggagacccaggccgccagcaagtacttccacgtgcagaaggtggcccggcaggacccccgggtggcccccatgagcaacctgctgcctgcccctggcctgccccctcatggccagcaggccaaggaggaccacaccaaggatgccagcaaggccagccccagcgtgtccacagctggccagcccaactggaacctggatgagcagctgaagcagaatggaggcctggcctggagcgatgatgctgatggcggccggggccgggagatcagccgggactttgccaagctgtatgagctggatggagaccctgagaggaaggagttcctggatgacctgtttgtgttcatgcagaagaggggcacccccatcaaccgcatccccatcatggccaagcagatcctggacctgtacatgctgtacaagctggtgacagagaagggcggcctggtggagatcatcaacaagaagatctggagggagatcaccaagggcctgaacctgcccaccagcatcaccagcgctgccttcaccctgcggacccagtacatgaagtacctgtatgcctatgaatgtgagaagaaggccctgagcagccctgctgagctgcaggccgccattgatggcaacagaagagagggcagaagacccagctacagcagcagcctgtttggctacagccctgctgctgccacagctgctgctgctgctggggccccagccctgctgagcccccccaagatccgcttccccatcctgggcctgggcagcagcagcggcaccaacaccagcagcccccgcatcagccctgccaccaccctgaggaaaggagatggagcccctgtgaccaccgtgcctgtgcccaaccggctggccgtgcctgtgaccctggccagccagcaggccggcaccaggacagctgccctggagcagctgcgggagcggctggagagcggggagcctgctgagaagaaggccagcggcacctggtgccagtag

SEQ ID NO: 18386 - DNA, 1413 bp, synthetic construct
  misc_feature 1..1413: note = Description of Artificial Sequence: Synthetic coding sequence
  source 1..1413: mol_type = other DNA
atggagcccctgcagcagcagcagcagcagcagcagcagcagcagaagcagccccacctggcccccctgcagatggatgcccgggagaagcagggccagcagatgagggaggcccagttcctgtatgcccagaagctggtgacccagcccaccctgctgagcgccacagctggccggcccagcggcagcacccccctgggccccctggcccgggtgcccccaacagctgctgtggcccaggtgtttgagcggggcaacatgaacagcgagcctgaggaggaggatggcggcctggaggatgaagatggagatgatgaggtggccgaggtggccgagaaggagacccaggccgccagcaagtacttccacgtgcagaaggtggcccggcaggacccccgggtggcccccatgagcaacctgctgcctgcccctggcctgccccctcatggccagcaggccaaggaggaccacaccaaggatgccagcaaggccagccccagcgtgtccacagctggccagcccaactggaacctggatgagcagctgaagcagaatggaggcctggcctggagcgatgatgctgatggcggccggggccgggagatcagccgggactttgccaagctgtatgagctggatggagaccctgagaggaaggagttcctggatgacctgtttgtgttcatgcagaagaggggcacccccatcaaccgcatccccatcatggccaagcagatcctggacctgtacatgctgtacaagctggtgacagagaagggcggcctggtggagatcatcaacaagaagatctggagggagatcaccaagggcctgaacctgcccaccagcatcaccagcgctgccttcaccctgcggacccagtacatgaagtacctgtatgcctatgaatgtgagaagaaggccctgagcagccctgctgagctgcaggccgccattgatggcaacagaagagagggcagaagacccagctacagcagcagcctgtttggctacagccctgctgctgccacagctgctgctgctgctggggccccagccctgctgagcccccccaagatccgcttccccatcctgggcctgggcagcagcagcggcaccaacaccagcagcccccgcatcagccctgccaccaccctgaggaaaggagatggagcccctgtgaccaccgtgcctgtgcccaaccggctggccgtgcctgtgaccctggccagccagcaggccggcaccaggacagctgccctggagcagctgcgggagcggctggagagcggggagcctgctgagaagaaggccagccggctgtctgaggaggagcagaggctggtgcagcaggccttccagaggaacttcttctccatggcccggcagctgagcatcctgtatgtgttctag

SEQ ID NO: 18387 - DNA, 7935 bp, synthetic construct
  misc_feature 1..7935: note = Description of Artificial Sequence: Synthetic coding sequence
  source 1..7935: mol_type = other DNA
atgggagagcacggcctggagctggcctccatgatcccagccctgcgggagctgggcagcgccaccccagaggagtacaacacagtggtgcagaagccccggcagatcctgtgccagttcatcgaccgcatcctgacagatgtgaatgtggtggccgtggagctggtgaagaagacagacagccagcccacctctgtgatgctgctggacttcatccagcacatcatgaagagcagccccctgatgtttgtgaatgtgtctggcagccatgaggccaagggcagctgcatcgagttcagcaactggatcatcacccggctgctgagaattgctgccacccccagctgccacctgctgcacaagaagatctgtgaggtgatctgcagcctgctcttcctgttcaagagcaagagccctgccatcttcggcgtgctgaccaaggagctgctgcagctgtttgaggacctggtgtacctgcacagaagaaatgtgatgggccatgctgtggagtggcctgtggtgatgagccgcttcctgagccagctggatgagcacatgggctacctgcagagcgcccccctgcagctgatgtccatgcagaacctggagttcatcgaggtgaccctgctgatggtgctgacccgcatcatcgccatcgtgttcttccggcggcaggagctgctgctgtggcagatcggctgtgtgctgctggagtatggcagccccaagatcaagagcctggccatctccttcctgacagagctgttccagctgggcggcctgcctgcccagcctgccagcaccttcttcagcagcttcctggagctgctgaagcacctggtggagatggacacagaccagctgaagctgtatgaggagcccctgagcaagctgatcaagaccctcttcccctttgaagctgaggcctacagaaatattgagcctgtgtacctgaacatgctgctggagaagctgtgtgtgatgtttgaagatggagtgctgatgaggctgaagagtgacctgctgaaggccgccctgtgccacctgctgcagtacttcctgaagtttgtgcctgctggctatgaaagtgccctgcaggtgaggaaggtgtatgtgaggaacatctgcaaggccctgctggatgtgctgggcatcgaggtggatgctgagtacctgctgggccccctgtatgctgccctgaagatggagagcatggagatcatcgaggagatccagtgccagacccagcaggagaacctgagcagcaacagtgatggcatcagccccaagagaagaaggctgagcagcagcctgaaccccagcaagagggcccccaagcagacagaggagatcaagcacgtggacatgaaccagaagagcatcctgtggagcgccctgaagcagaaggccgagagcctgcagatcagcctggagtacagcggcctgaagaaccctgtgattgagatgctggagggcattgctgtggtgctgcagctgacagccctgtgcaccgtgcactgcagccaccagaacatgaactgcaggaccttcaaggactgccagcacaagagcaagaagaagcccagcgtggtgatcacctggatgagcctggacttctacaccaaggtgctgaagagctgccgcagcctgctggagagcgtgcagaagctggacctggaggccaccatcgacaaggtggtgaagatctatgatgccctgatctacatgcaggtgaacagcagctttgaggaccacatcctggaggacctgtgtggcatgctgagcctgccctggatctacagccacagtgatgatggctgcctgaagctgaccacctttgctgccaacctgctgaccctgagctgccgcatcagtgacagctacagcccccaggcccagagccgctgtgtgttcctgctgaccctcttcccccggcgcatcttcctggagtggaggacagctgtgtacaactgggccctgcagagcagccatgaggtgatccgggccagctgtgtgtctggcttcttcatcctgctgcagcagcagaacagctgcaacagagtgcccaagatcctgattgacaaggtgaaggatgacagcgacatcgtgaagaaggagtttgccagcatcctgggccagctggtgtgcaccctgcacggcatgttctacctgaccagcagcctgacagagcccttcagcgagcacggccacgtggacctcttctgcaggaacctgaaggccaccagccagcacgagtgcagcagcagccagctgaaggcctctgtgtgcaagcccttcctgttcctgctgaagaagaagatccccagccctgtgaagctggccttcatcgacaacctgcaccacctgtgcaagcacctggacttcagagaagatgaaacagatgtgaaggctgtgctgggcaccctgctgaacctgatggaggaccctgacaaggatgtgcgggtggccttcagcggcaacatcaagcacatcctggagagcctggacagtgaagatggcttcatcaaggagctgtttgtgctgaggatgaaggaggcctacacccacgcccagatcagcagaaataatgagctgaaggacaccctcatcctgaccactggagacatcggccgggccgccaagggggacctggtgccctttgccctgctgcacctgctgcactgcctgctgagcaagagcgcctctgtgtctggggccgcctacacagagatccgggccctggtggccgccaagtctgtgaagctgcagagcttcttcagccagtacaagaagcccatctgccagttcctggtggagagcctgcacagcagccagatgacagccctgcccaacaccccctgccagaatgctgatgtgaggaagcaggatgtggcccaccagcgggagatggccctgaacaccctgtctgagatcgccaacgtgtttgacttcccagacctgaaccgcttcctgaccaggaccctgcaggtgctgctgcctgacctggccgccaaggccagccctgctgccagcgccctgatccgcaccctgggcaagcagctgaatgtgaacagaagagagatcctgatcaacaacttcaagtacatcttcagccacctggtgtgcagctgcagcaaggatgagctggagcgggccctgcactacctgaagaatgaaacagaaattgagctgggcagcctgctgcggcaggacttccagggcctgcacaatgagctgctgctgagaattggagagcactaccagcaggtgttcaacggcctgagcatcctggccagctttgccagcagtgatgacccctaccagggcccccgggacatcatcagccctgagctgatggctgactacctgcagcccaagctgctgggcatcctggccttcttcaacatgcagctgctgagcagctctgtgggcatcgaggacaagaagatggccctgaacagcctgatgagcctgatgaagctgatgggccccaagcacgtgtcctctgtgcgggtgaagatgatgaccaccctgaggacaggcctgcgcttcaaggatgacttccctgagctgtgctgccgggcctgggactgctttgtgcgctgcctggaccacgcctgcctgggcagcctgctgagccacgtgattgtggccctgctgcccctcatccacatccagcccaaggagacagctgccatcttccactacctgatcatcgagaacagagatgctgtgcaggacttcctgcacgagatctacttcctgcctgaccaccctgagctgaagaagatcaaggctgtgctgcaggagtacaggaaggagaccagcgagagcacagacctgcagaccaccctgcagctgtccatgaaggccatccagcatgaaaatgtggatgtgcgcatccacgccctgaccagcctgaaggagaccctgtacaagaaccaggagaagctgatcaagtatgccacagattctgaaacagtggagcccatcatcagccagctggtgacagtgctgctgaagggctgccaggatgccaacagccaggcccggctgctgtgtggggagtgcctgggggagctgggcgccatcgaccccggccgcctggacttcagcaccacagagacccagggcaaggacttcacctttgtgactggagtggaggacagcagctttgcctacggcctgctgatggagctgacccgggcctacctggcctatgctgacaacagccgggcccaggacagcgctgcctatgccatccaggagctgctgagcatctatgactgccgggagatggagaccaacggccctggccaccagctgtggaggcgcttccctgagcacgtgcgggagatcctggagccccacctgaacacccgctacaagagcagccagaagagcacagactggagcggcgtgaagaagcccatctacctgagcaagctgggcagcaactttgctgagtggagcgcctcctgggccggctacctgatcaccaaggtgagacatgacctggccagcaagatcttcacctgctgcagcatcatgatgaagcatgacttcaaggtgaccatctacctgctgccccacatcctggtgtatgtgctgctgggctgcaaccaggaggaccagcaggaggtgtatgcagagatcatggctgtgctgaagcatgatgaccagcacaccatcaacacccaggacatcgccagtgacctgtgccagctgagcacccagaccgtcttctccatgctggaccacctgacccagtgggcccggcacaagttccaggccctgaaggccgagaagtgcccccacagcaagagcaacagaaacaaggtggacagcatggtgtccacagtggactatgaggactaccagagcgtgacccgcttcctggacctgatcccccaggacaccctggccgtggccagcttccgcagcaaggcctacaccagggctgtgatgcactttgagagcttcatcacagagaagaagcagaacatccaggagcacctgggcttcctgcagaagctgtatgctgccatgcatgagccagatggagtggccggcgtgtctgccatcaggaaggccgagcccagcctgaaggagcagatcctggagcacgagagcctgggcctgctgagagatgccacagcctgctatgaccgggccatccagctggagccagaccagatcatccactaccatggagtggtgaagtccatgctgggcctgggccagctgagcaccgtcatcacccaggtgaatggagtgcacgccaacagaagtgagtggacagatgagctgaacacctacagagtggaggccgcctggaagctgagccagtgggacctggtggagaactacctggccgcagatggcaagagcaccacctggagcgtgcggctgggccagctgctgctgagcgccaagaagagggacatcacagccttctatgacagcctgaagctggtgcgggcagagcagatcgtgcccctgtctgctgccagctttgagcggggcagctaccagaggggctatgagtacatcgtgcggctgcacatgctgtgtgagctggagcacagcatcaagcccctcttccagcacagccctggggacagcagccaggaggacagcctgaactgggtggcccggctggagatgacccagaacagctaccgggccaaggagcccatcctggccctgcggcgggccctgctgagcctgaacaagaggccagactacaatgagatggtgggggagtgctggctgcagagcgcccgggtggccaggaaggccggccaccaccagacagcctacaatgccctgctgaatgctggggagagccggctggccgagctgtatgtggagcgggccaagtggctgtggagcaaaggagatgtgcaccaggccctgattgtgctgcagaagggcgtggagctgtgcttcccagaaaatgagaccccacctgagggcaagaacatgctgattcatggccgggccatgctgctggtgggccgcttcatggaggagacagccaactttgagagcaatgccatcatgaagaagtacaaggatgtgacagcctgcctgcctgagtgggaggatggccacttctacctggccaagtactatgacaagctgatgcccatggtgacagacaacaagatggagaagcagggcgacctgatccgctacatcgtgctgcacttcggccgcagcctgcagtatggcaaccagttcatctaccagagcatgcccaggatgctgaccctgtggctggactatggcaccaaggcctatgagtgggagaaggccggccgcagtgacagagtgcagatgagaaatgacctgggcaagatcaacaaggtgatcacagagcacaccaactacctggccccctaccagttcctgacagccttcagccagctgatcagccgcatctgccacagccatgatgaggtgtttgtggtgctgatggagatcatcgccaaggtgttcctggcctacccccagcaggccatgtggatgatgacagctgtgtccaagagcagctaccccatgagggtgaaccgctgcaaggagatcctgaacaaggccatccacatgaagaagagcctggagaagtttgtgggagatgccacccggctgacagacaagctgctggagctgtgcaacaagcctgtggatggcagcagcagcaccctgtccatgagcacccacttcaagatgctgaagaagctggtggaggaggccaccttcagcgagatcctgatccccctgcagagcgtgatgatccccaccctgcccagcatcctgggcacccacgccaaccacgccagccatgagcccttccctggccactgggcctacatcgccggctttgatgacatggtggagatcctggccagcctgcagaagcccaagaagatcagcctgaagggcagtgatggcaagttctacatcatgatgtgcaagcccaaggatgacctgaggaaggactgccgcctgatggagttcaacagcctcatcaacaagtgcctgaggaaggatgctgagagcagaagaagagagctgcacatccgcacctacgccgtcatccccctgaatgatgaatgtggcatcatcgagtgggtgaacaacacagctggcctgcggcccatcctgaccaagctgtacaaggagaagggcgtgtacatgaccgggaaggagctgcggcagtgcatgctgcccaagtctgctgccctgtctgagaagctgaaggtgttccgggagttcctgctgcccaggcacccccccatcttccacgagtggttcctgcggaccttcccagaccccacctcctggtacagcagccgcagcgcctactgccgcagcacagctgtgatgtccatggtgggctacatcctgggcctgggggacagacatggagagaacatcctgtttgacagcctgactggagaatgtgtgcacgtggacttcaactgcctcttcaacaagggggagacctttgaggtgcctgagatcgtgcccttccggctgacccacaacatggtgaatggcatgggccccatgggcacagagggcctcttcagaagagcctgtgaggtgaccatgaggctgatgagggaccagcgggagcccctgatgtctgtgctgaagaccttcctgcatgaccccctggtggagtggagcaagcctgtgaagggccacagcaaggcccccctgaatgagaccggggaggtggtgaatgagaaggccaagacccacgtgctggacatcgagcagaggctgcagggcgtcatcaagaccaggaacagagtgacaggcctgcccctgagcattgagggccacgtgcactacctgatccaggaggccacagatgagaacctgctgtgccagatgtacctgggctggaccccctacatgtag

SEQ ID NO: 18388 - DNA, 7743 bp, synthetic construct
  misc_feature 1..7743: note = Description of Artificial Sequence: Synthetic coding sequence
  source 1..7743: mol_type = other DNA
atgggagagcacggcctggagctggcctccatgatcccagccctgcgggagctgggcagcgccaccccagaggagtacaacacagtggtgcagaagccccggcagatcctgtgccagttcatcgaccgcatcctgacagatgtgaatgtggtggccgtggagctggtgaagaagacagacagccagcccacctctgtgatgctgctggacttcatccagcacatcatgaagagcagccccctgatgtttgtgaatgtgtctggcagccatgaggccaagggcagctgcatcgagttcagcaactggatcatcacccggctgctgagaattgctgccacccccagctgccacctgctgcacaagaagatctgtgaggtgatctgcagcctgctcttcctgttcaagagcaagagccctgccatcttcggcgtgctgaccaaggagctgctgcagctgtttgaggacctggtgtacctgcacagaagaaatgtgatgggccatgctgtggagtggcctgtggtgatgagccgcttcctgagccagctggatgagcacatgggctacctgcagagcgcccccctgcagctgatgtccatgcagaacctggagttcatcgaggtgaccctgctgatggtgctgacccgcatcatcgccatcgtgttcttccggcggcaggagctgctgctgtggcagatcggctgtgtgctgctggagtatggcagccccaagatcaagagcctggccatctccttcctgacagagctgttccagctgggcggcctgcctgcccagcctgccagcaccttcttcagcagcttcctggagctgctgaagcacctggtggagatggacacagaccagctgaagctgtatgaggagcccctgagcaagctgatcaagaccctcttcccctttgaagctgaggcctacagaaatattgagcctgtgtacctgaacatgctgctggagaagctgtgtgtgatgtttgaagatggagtgctgatgaggctgaagagtgacctgctgaaggccgccctgtgccacctgctgcagtacttcctgaagtttgtgcctgctggctatgaaagtgccctgcaggtgaggaaggtgtatgtgaggaacatctgcaaggccctgctggatgtgctgggcatcgaggtggatgctgagtacctgctgggccccctgtatgctgccctgaagatggagagcatggagatcatcgaggagatccagtgccagacccagcaggagaacctgagcagcaacagtgatggcatcagccccaagagaagaaggctgagcagcagcctgaaccccagcaagagggcccccaagcagacagaggacaggaccttcaaggactgccagcacaagagcaagaagaagcccagcgtggtgatcacctggatgagcctggacttctacaccaaggtgctgaagagctgccgcagcctgctggagagcgtgcagaagctggacctggaggccaccatcgacaaggtggtgaagatctatgatgccctgatctacatgcaggtgaacagcagctttgaggaccacatcctggaggacctgtgtggcatgctgagcctgccctggatctacagccacagtgatgatggctgcctgaagctgaccacctttgctgccaacctgctgaccctgagctgccgcatcagtgacagctacagcccccaggcccagagccgctgtgtgttcctgctgaccctcttcccccggcgcatcttcctggagtggaggacagctgtgtacaactgggccctgcagagcagccatgaggtgatccgggccagctgtgtgtctggcttcttcatcctgctgcagcagcagaacagctgcaacagagtgcccaagatcctgattgacaaggtgaaggatgacagcgacatcgtgaagaaggagtttgccagcatcctgggccagctggtgtgcaccctgcacggcatgttctacctgaccagcagcctgacagagcccttcagcgagcacggccacgtggacctcttctgcaggaacctgaaggccaccagccagcacgagtgcagcagcagccagctgaaggcctctgtgtgcaagcccttcctgttcctgctgaagaagaagatccccagccctgtgaagctggccttcatcgacaacctgcaccacctgtgcaagcacctggacttcagagaagatgaaacagatgtgaaggctgtgctgggcaccctgctgaacctgatggaggaccctgacaaggatgtgcgggtggccttcagcggcaacatcaagcacatcctggagagcctggacagtgaagatggcttcatcaaggagctgtttgtgctgaggatgaaggaggcctacacccacgcccagatcagcagaaataatgagctgaaggacaccctcatcctgaccactggagacatcggccgggccgccaagggggacctggtgccctttgccctgctgcacctgctgcactgcctgctgagcaagagcgcctctgtgtctggggccgcctacacagagatccgggccctggtggccgccaagtctgtgaagctgcagagcttcttcagccagtacaagaagcccatctgccagttcctggtggagagcctgcacagcagccagatgacagccctgcccaacaccccctgccagaatgctgatgtgaggaagcaggatgtggcccaccagcgggagatggccctgaacaccctgtctgagatcgccaacgtgtttgacttcccagacctgaaccgcttcctgaccaggaccctgcaggtgctgctgcctgacctggccgccaaggccagccctgctgccagcgccctgatccgcaccctgggcaagcagctgaatgtgaacagaagagagatcctgatcaacaacttcaagtacatcttcagccacctggtgtgcagctgcagcaaggatgagctggagcgggccctgcactacctgaagaatgaaacagaaattgagctgggcagcctgctgcggcaggacttccagggcctgcacaatgagctgctgctgagaattggagagcactaccagcaggtgttcaacggcctgagcatcctggccagctttgccagcagtgatgacccctaccagggcccccgggacatcatcagccctgagctgatggctgactacctgcagcccaagctgctgggcatcctggccttcttcaacatgcagctgctgagcagctctgtgggcatcgaggacaagaagatggccctgaacagcctgatgagcctgatgaagctgatgggccccaagcacgtgtcctctgtgcgggtgaagatgatgaccaccctgaggacaggcctgcgcttcaaggatgacttccctgagctgtgctgccgggcctgggactgctttgtgcgctgcctggaccacgcctgcctgggcagcctgctgagccacgtgattgtggccctgctgcccctcatccacatccagcccaaggagacagctgccatcttccactacctgatcatcgagaacagagatgctgtgcaggacttcctgcacgagatctacttcctgcctgaccaccctgagctgaagaagatcaaggctgtgctgcaggagtacaggaaggagaccagcgagagcacagacctgcagaccaccctgcagctgtccatgaaggccatccagcatgaaaatgtggatgtgcgcatccacgccctgaccagcctgaaggagaccctgtacaagaaccaggagaagctgatcaagtatgccacagattctgaaacagtggagcccatcatcagccagctggtgacagtgctgctgaagggctgccaggatgccaacagccaggcccggctgctgtgtggggagtgcctgggggagctgggcgccatcgaccccggccgcctggacttcagcaccacagagacccagggcaaggacttcacctttgtgactggagtggaggacagcagctttgcctacggcctgctgatggagctgacccgggcctacctggcctatgctgacaacagccgggcccaggacagcgctgcctatgccatccaggagctgctgagcatctatgactgccgggagatggagaccaacggccctggccaccagctgtggaggcgcttccctgagcacgtgcgggagatcctggagccccacctgaacacccgctacaagagcagccagaagagcacagactggagcggcgtgaagaagcccatctacctgagcaagctgggcagcaactttgctgagtggagcgcctcctgggccggctacctgatcaccaaggtgagacatgacctggccagcaagatcttcacctgctgcagcatcatgatgaagcatgacttcaaggtgaccatctacctgctgccccacatcctggtgtatgtgctgctgggctgcaaccaggaggaccagcaggaggtgtatgcagagatcatggctgtgctgaagcatgatgaccagcacaccatcaacacccaggacatcgccagtgacctgtgccagctgagcacccagaccgtcttctccatgctggaccacctgacccagtgggcccggcacaagttccaggccctgaaggccgagaagtgcccccacagcaagagcaacagaaacaaggtggacagcatggtgtccacagtggactatgaggactaccagagcgtgacccgcttcctggacctgatcccccaggacaccctggccgtggccagcttccgcagcaaggcctacaccagggctgtgatgcactttgagagcttcatcacagagaagaagcagaacatccaggagcacctgggcttcctgcagaagctgtatgctgccatgcatgagccagatggagtggccggcgtgtctgccatcaggaaggccgagcccagcctgaaggagcagatcctggagcacgagagcctgggcctgctgagagatgccacagcctgctatgaccgggccatccagctggagccagaccagatcatccactaccatggagtggtgaagtccatgctgggcctgggccagctgagcaccgtcatcacccaggtgaatggagtgcacgccaacagaagtgagtggacagatgagctgaacacctacagagtggaggccgcctggaagctgagccagtgggacctggtggagaactacctggccgcagatggcaagagcaccacctggagcgtgcggctgggccagctgctgctgagcgccaagaagagggacatcacagccttctatgacagcctgaagctggtgcgggcagagcagatcgtgcccctgtctgctgccagctttgagcggggcagctaccagaggggctatgagtacatcgtgcggctgcacatgctgtgtgagctggagcacagcatcaagcccctcttccagcacagccctggggacagcagccaggaggacagcctgaactgggtggcccggctggagatgacccagaacagctaccgggccaaggagcccatcctggccctgcggcgggccctgctgagcctgaacaagaggccagactacaatgagatggtgggggagtgctggctgcagagcgcccgggtggccaggaaggccggccaccaccagacagcctacaatgccctgctgaatgctggggagagccggctggccgagctgtatgtggagcgggccaagtggctgtggagcaaaggagatgtgcaccaggccctgattgtgctgcagaagggcgtggagctgtgcttcccagaaaatgagaccccacctgagggcaagaacatgctgattcatggccgggccatgctgctggtgggccgcttcatggaggagacagccaactttgagagcaatgccatcatgaagaagtacaaggatgtgacagcctgcctgcctgagtgggaggatggccacttctacctggccaagtactatgacaagctgatgcccatggtgacagacaacaagatggagaagcagggcgacctgatccgctacatcgtgctgcacttcggccgcagcctgcagtatggcaaccagttcatctaccagagcatgcccaggatgctgaccctgtggctggactatggcaccaaggcctatgagtgggagaaggccggccgcagtgacagagtgcagatgagaaatgacctgggcaagatcaacaaggtgatcacagagcacaccaactacctggccccctaccagttcctgacagccttcagccagctgatcagccgcatctgccacagccatgatgaggtgtttgtggtgctgatggagatcatcgccaaggtgttcctggcctacccccagcaggccatgtggatgatgacagctgtgtccaagagcagctaccccatgagggtgaaccgctgcaaggagatcctgaacaaggccatccacatgaagaagagcctggagaagtttgtgggagatgccacccggctgacagacaagctgctggagctgtgcaacaagcctgtggatggcagcagcagcaccctgtccatgagcacccacttcaagatgctgaagaagctggtggaggaggccaccttcagcgagatcctgatccccctgcagagcgtgatgatccccaccctgcccagcatcctgggcacccacgccaaccacgccagccatgagcccttccctggccactgggcctacatcgccggctttgatgacatggtggagatcctggccagcctgcagaagcccaagaagatcagcctgaagggcagtgatggcaagttctacatcatgatgtgcaagcccaaggatgacctgaggaaggactgccgcctgatggagttcaacagcctcatcaacaagtgcctgaggaaggatgctgagagcagaagaagagagctgcacatccgcacctacgccgtcatccccctgaatgatgaatgtggcatcatcgagtgggtgaacaacacagctggcctgcggcccatcctgaccaagctgtacaaggagaagggcgtgtacatgaccgggaaggagctgcggcagtgcatgctgcccaagtctgctgccctgtctgagaagctgaaggtgttccgggagttcctgctgcccaggcacccccccatcttccacgagtggttcctgcggaccttcccagaccccacctcctggtacagcagccgcagcgcctactgccgcagcacagctgtgatgtccatggtgggctacatcctgggcctgggggacagacatggagagaacatcctgtttgacagcctgactggagaatgtgtgcacgtggacttcaactgcctcttcaacaagggggagacctttgaggtgcctgagatcgtgcccttccggctgacccacaacatggtgaatggcatgggccccatgggcacagagggcctcttcagaagagcctgtgaggtgaccatgaggctgatgagggaccagcgggagcccctgatgtctgtgctgaagaccttcctgcatgaccccctggtggagtggagcaagcctgtgaagggccacagcaaggcccccctgaatgagaccggggaggtggtgaatgagaaggccaagacccacgtgctggacatcgagcagaggctgcagggcgtcatcaagaccaggaacagagtgacaggcctgcccctgagcattgagggccacgtgcactacctgatccaggaggccacagatgagaacctgctgtgccagatgtacctgggctggaccccctacatgtag

SEQ ID NO: 18389 - DNA, 9171 bp, synthetic construct
  misc_feature 1..9171: note = Description of Artificial Sequence: Synthetic coding sequence
  source 1..9171: mol_type = other DNA
atgagcctggtgctgaatgacctgctgatctgctgccggcagctggagcatgaccgggccacagagaggaagaaggaggtggagaagttcaagaggctcatccgggaccctgagaccatcaagcacctggacagacacagcgacagcaagcagggcaagtacctgaactgggatgctgtgttccgcttcctgcagaagtacatccagaaggagacagaatgtctgagaattgccaagcccaacgtgtctgccagcacccaggccagccggcagaagaagatgcaggagatcagcagcctggtgaagtacttcatcaagtgtgccaacagaagagccccccggctgaagtgccaggagctgctgaactacatcatggacacagtgaaggacagcagcaatggagccatctatggagctgactgcagcaacatcctgctgaaggacatcctgtctgtgaggaagtactggtgtgagatcagccagcagcagtggctggagctgttctctgtgtacttccggctgtacctgaagcccagccaggatgtgcaccgggtgctggtggcccgcatcatccatgctgtgaccaagggctgctgcagccagacagatggcctgaacagcaagttcctggacttcttcagcaaggccatccagtgtgcccggcaggagaagagcagcagcggcctgaaccacatcctggccgccctgaccatcttcctgaagaccctggccgtgaacttccgcatccgggtgtgtgagctgggagatgagatcctgcccaccctgctgtacatctggacccagcaccggctgaatgacagcctgaaggaggtgatcatcgagctgttccagctgcagatctacatccaccaccccaagggggccaagacccaggagaagggggcctatgagagcaccaagtggaggagcatcctgtacaacctgtatgacctgctggtgaatgagatcagccacatcggcagccggggcaagtacagcagcggcttcagaaatattgctgtgaaggaaaatctcatcgagctgatggctgacatctgccaccaggtgttcaatgaagacaccaggagcctggagatcagccagagctacaccaccacccagcgggagagcagtgactacagcgtgccctgcaagaggaagaagattgagctgggctgggaggtgatcaaggaccacctgcagaagagccagaatgactttgacctggtgccctggctgcagatcgccacccagctgatcagcaagtacccagccagcctgcccaactgtgagctgagccccctgctgatgatcctgagccagctgctgccccagcagagacatggagagaggaccccctacgtgctgcgctgcctgacagaggtggccctgtgccaggacaagaggagcaacctggagagcagccagaagagtgacctgctgaagctgtggaacaagatctggtgcatcaccttccggggcatcagcagcgagcagatccaggctgaaaattttggcctgctgggcgccatcatccagggcagcctggtggaggtggaccgggagttctggaagctgttcaccggcagcgcctgccggcccagctgcccagctgtgtgctgcctgaccctggccctgaccaccagcatcgtgcccggcaccgtgaagatgggcatcgagcagaacatgtgtgaggtgaacagaagcttcagcctgaaggagagcatcatgaagtggctgctcttctaccagctggagggggacctggagaacagcacagaggtgccccccatcctgcacagcaacttcccccacctggtgctggagaagatcctggtgtccctgaccatgaagaactgcaaggccgccatgaacttcttccagagcgtgcctgaatgtgagcaccaccagaaggacaaggaggagctgtccttcagcgaggtggaggagctgttcctgcagaccacctttgacaagatggacttcctgaccatcgtgcgggagtgtggcatcgagaagcaccagagcagcatcggcttctctgtgcaccagaacctgaaggagagcctggaccgctgcctgctgggcctgtctgagcagctgctgaacaactacagcagcgagatcaccaacagcgagaccctggtgcgctgcagccggctgctggtgggcgtgctgggctgctactgctacatgggcgtgattgctgaggaggaggcctacaagtctgagctgttccagaaggccaagagcctgatgcagtgtgccggggagagcatcaccctcttcaagaacaagaccaatgaggagttcagaattggcagcctgaggaacatgatgcagctgtgcacccgctgcctgagcaactgcaccaagaagagccccaacaagatcgccagcggcttcttcctgcggctgctgaccagcaagctgatgaatgacattgctgacatctgcaagagcctggccagcttcatcaagaagccctttgacagaggagaggtggagagcatggaggatgacaccaatggaaacctgatggaggtggaggaccagagctccatgaacctcttcaatgactacccagacagctctgtgtctgatgccaatgagcccggggagagccagagcaccatcggggccatcaaccccctggccgaggagtacctgagcaagcaggacctgctcttcctggacatgctgaagttcctgtgcctgtgtgtgaccacagcccagaccaacacagtgtccttccgggctgctgacatccggaggaagctgctgatgctgattgacagcagcaccctggagcccaccaagagcctgcacctgcacatgtacctgatgctgctgaaggagctgcctggagaggagtaccccctgcccatggaggatgtgctggagctgctgaagcccctgagcaatgtgtgcagcctgtacagaagagaccaggatgtgtgcaagaccatcctgaaccacgtgctgcacgtggtgaagaacctgggccagagcaacatggacagcgagaacaccagagatgcccagggccagttcctgaccgtcatcggggccttctggcacctgaccaaggagaggaagtacatcttctctgtgaggatggccctggtgaactgcctgaagaccctgctggaggccgacccctacagcaagtgggccatcctgaatgtgatgggcaaggacttccctgtgaatgaggtgttcacccagttcctggccgacaaccaccaccaggtgaggatgctggccgctgagagcatcaacagactcttccaggacaccaagggggacagcagccggctgctgaaggccctgcccctgaagctgcagcagacagcctttgaaaatgcctacctgaaggcccaggagggcatgagggagatgagccacagcgcagaaaatcctgagaccctggatgagatctacaacaggaagtctgtgctgctgaccctgattgctgtggtgctgagctgcagccccatctgtgagaagcaggccctgtttgccctgtgcaagtctgtgaaggaaaatggcctggagccccacctggtgaagaaggtgctggagaaggtgtctgagaccttcggctaccgccgcctggaggacttcatggccagccacctggactacctggtgctggagtggctgaacctgcaggacacagagtacaacctgagcagcttccccttcatcctgctgaactacaccaacatcgaggacttctaccgcagctgctacaaggtgctgatcccccacctggtgatccgcagccactttgatgaggtgaagagcatcgccaaccagatccaggaggactggaagagcctgctgacagactgcttccccaagatcctggtgaacatcctgccctactttgcctatgagggcacccgggacagcggcatggcccagcagcgggagacagccaccaaggtgtatgacatgctgaagtctgagaacctgctgggcaagcagattgaccacctgttcatcagcaacctgcctgagatcgtggtggagctgctgatgaccctgcacgagcccgccaacagcagcgccagccagagcacagacctgtgtgacttcagcggggacctggaccctgcccccaaccccccccacttccccagccacgtgatcaaggccacctttgcctacatcagcaactgccacaagaccaagctgaagagcatcctggagatcctgagcaagagcccagacagctaccagaagatcctgctggccatctgtgagcaggccgctgagaccaacaacgtgtacaagaagcaccgcatcctgaagatctaccacctgtttgtgtccctgctgctgaaggacatcaagagcggcctgggcggggcctgggcctttgtgctgagagatgtgatctacaccctcatccactacatcaaccagaggcccagctgcatcatggatgtgtccctgcggagcttcagcctgtgctgtgacctgctgagccaggtgtgccagacagctgtgacctactgcaaggatgccctggagaaccacctgcacgtgattgtgggcaccctcatccccctggtgtatgagcaggtggaggtgcagaagcaggtgctggacctgctgaagtacctggtgattgacaacaaggacaatgaaaatctctacatcaccatcaagctgctggaccccttcccagaccacgtggtgttcaaggacctgcgcatcacccagcagaagatcaagtacagccggggccccttcagcctgctggaggagatcaaccacttcctgtctgtgtctgtgtatgatgccctgcccctgacccggctggagggcctgaaggacctgcggcggcagctggagctgcacaaggaccagatggtggacatcatgagggccagccaggacaacccccaggacggcatcatggtgaagctggtggtgaacctgctgcagctgagcaagatggccatcaaccacactggagagaaggaggtgctggaggccgtgggcagctgcctgggggaggtgggccccatcgacttcagcaccatcgccatccagcacagcaaggatgccagctacaccaaggccctgaagctgtttgaggacaaggagctgcagtggaccttcatcatgctgacctacctgaacaacaccctggtggaggactgtgtgaaggtgcgctctgctgctgtgacctgcctgaagaacatcctggccaccaagacaggccacagcttctgggagatctacaagatgaccacagaccccatgctggcctacctgcagcccttccgcaccagcaggaagaagttcctggaggtgcccaggtttgacaaggagaacccctttgagggcctggatgacatcaacctgtggatccccctgtctgagaaccacgacatctggatcaagaccctgacctgtgccttcctggacagcggcggcaccaagtgtgagatcctgcagctgctgaagcccatgtgtgaggtgaagacagacttctgccagacagtgctgccctacctgattcatgacatcctgctgcaggacaccaatgaatcctggaggaacctgctgagcacccacgtgcagggcttcttcaccagctgcctgcggcacttcagccagaccagccgcagcaccaccccagccaacctggacagcgagagcgagcacttcttccgctgctgcctggacaagaagagccagaggaccatgctggccgtggtggactacatgaggcggcagaagaggcccagcagcggcaccatcttcaatgatgccttctggctggacctgaactacctggaggtggccaaggtggcccagagctgtgccgcccacttcaccgccctgctgtatgcagagatctatgctgacaagaagtccatggatgaccaggagaagaggagcctggcctttgaggagggcagccagaacaccaccatcagcagcctgtctgagaagagcaaggaggagaccggcatcagcctgcaggacctgctgctggagatctaccgcagcatcggggagccagacagcctgtatggctgcggcggcggcaagatgctgcagcccatcacccggctgcggacctatgagcacgaggccatgtggggcaaggccctggtgacctatgacctggagacagccatccccagcagcacccggcaggccggcatcatccaggccctgcagaacctgggcctgtgccacatcctgtctgtgtacctgaagggcctggactatgagaacaaggactggtgcccagagctggaggagctgcactaccaggccgcctggaggaacatgcagtgggaccactgcacctctgtgtccaaggaggtggagggcaccagctaccacgagagcctgtacaatgccctgcagagcctgcgggaccgggagttcagcaccttctatgagagcctgaagtatgcccgggtgaaggaggtggaggagatgtgcaagaggagcctggagagcgtgtacagcctgtaccccaccctgagccggctgcaggccatcggggagctggagagcattggagagctgttcagccgctctgtgacccaccggcagctgtctgaggtgtacatcaagtggcagaagcacagccagctgctgaaggacagcgacttctccttccaggagcccatcatggccctgaggacagtcatcctggagatcctgatggagaaggagatggacaacagccagcgggagtgcatcaaggacatcctgaccaagcacctggtggagctgagcatcctggcccggaccttcaagaacacccagctgcctgagcgggccatcttccagatcaagcagtacaacagcgtgtcctgtggggtgtctgagtggcagctggaggaggcccaggtgttctgggccaagaaggagcagagcctggccctgagcatcctgaagcagatgatcaagaagctggatgccagctgtgccgccaacaaccccagcctgaagctgacctacacagagtgcctgcgggtgtgtggcaactggctggccgagacctgcctggagaacccagctgtgatcatgcagacctacctggagaaggctgtggaggtggccggcaactatgatggagagagcagtgatgagctgagaaatggcaagatgaaggccttcctgagcctggcccgcttcagtgacacccagtaccagagaattgagaactacatgaagagcagcgagtttgagaacaagcaggccctgctgaagagggccaaggaggaggtgggcctgctgcgggagcacaagatccagaccaaccgctacacagtgaaggtgcagcgggagctggagctggatgagctggccctgcgggccctgaaggaggacaggaagcgcttcctgtgcaaggctgtggagaactacatcaactgcctgctgagcggggaggagcatgacatgtgggtgttccggctgtgcagcctgtggctggagaacagcggcgtgtctgaggtgaatggcatgatgaagagagatggcatgaagatccccacctacaagttcctgcccctgatgtaccagctggccgccaggatgggcaccaagatgatgggcggcctgggcttccacgaggtgctgaacaacctgatcagccgcatctccatggaccacccccaccacaccctcttcatcatcctggccctggccaatgccaacagagatgagttcctgaccaagccagaggtggcccggcgcagccgcatcaccaagaatgtgcccaagcagagcagccagctggatgaggacagaacagaagctgccaaccgcatcatctgcaccatccgcagccggcggccccagatggtgcgctctgtggaggccctgtgtgatgcctacatcatcctggccaacctggatgccacccagtggaagacccagaggaagggcatcaacatcccagctgaccagcccatcaccaagctgaagaacctggaggatgtggtggtgcccaccatggagatcaaggtggaccacactggagaatatggcaacctggtgaccatccagagcttcaaggccgagttccggctggccggcggcgtgaacctgcccaagatcatcgactgtgtgggcagtgatggcaaggagcggcggcagctggtgaagggcagagatgacctgcggcaggatgctgtgatgcagcaggtgttccagatgtgcaacaccctgctgcagaggaacacagagaccaggaagaggaagctgaccatctgcacctacaaggtggtgcccctgagccagaggtctggagtgctggagtggtgcacaggaacagtgcccatcggggagttcctggtgaacaatgaagatggagcccacaagcgctaccggcccaatgacttcagcgccttccagtgccagaagaagatgatggaggtgcagaagaagagctttgaggagaagtatgaggtgttcatggatgtgtgccagaacttccagcctgtgttccgctacttctgcatggagaagttcctggaccctgccatctggtttgagaagaggctggcctacaccaggtctgtggccaccagcagcatcgtgggctacatcctgggcctgggggacagacatgtgcagaacatcctgatcaatgagcagagcgctgagctggtgcacatcgacctgggcgtggcctttgagcagggcaagatcctgcccaccccagagaccgtgcccttccggctgacccgggacatcgtggatggcatgggcatcactggagtggagggcgtcttccgccgctgctgtgagaagaccatggaggtgatgaggaacagccaggagaccctgctgaccatcgtggaggtgctgctgtatgaccccctgtttgactggaccatgaaccccctgaaggccctgtacctgcagcagaggccagaagatgaaacagagctgcaccccaccctgaatgctgatgaccaggagtgcaagaggaacctgagtgacatcgaccagagcttcaacaaggtggccgagcgggtgctgatgaggctgcaggagaagctgaagggcgtggaggagggcaccgtgctgtctgtgggcggccaggtgaacctgctgatccagcaggccatcgaccccaagaacctgagccgcctcttccctggctggaaggcctgggtgtag

SEQ ID NO: 18390 - DNA, 417 bp, synthetic construct
  misc_feature 1..417: note = Description of Artificial Sequence: Synthetic coding sequence
  source 1..417: mol_type = other DNA
atgaccctgcacgagcccgccaacagcagcgccagccagagcacagacctgtgtgacttcagcggggacctggaccctgcccccaaccccccccacttccccagccacgtgatcaaggccacctttgcctacatcagcaactgccacaagaccaagctgaagagcatcctggagatcctgagcaagagcccagacagctaccagaagatcctgctggccatctgtgagcaggccgctgagaccaacaacgtgtacaagaagcaccgcatcctgaagatctaccacctgtttgtgtccctgctgctgaaggacatcaagagcggcctgggcggggcctgggcctttgtgctgagagatgtgatctacaccctcatccactacatcaaccagaggaagctgaccatcttcagccagtag

SEQ ID NO: 18391 - DNA, 9171 bp, synthetic construct; identical to SEQ ID NO: 18389
  misc_feature 1..9171: note = Description of Artificial Sequence: Synthetic coding sequence
  source 1..9171: mol_type = other DNA

SEQ ID NO: 18392 - DNA, 4110 bp, synthetic construct
  misc_feature 1..4110: note = Description of Artificial Sequence: Synthetic coding sequence
  source 1..4110: mol_type = other DNA
atgagcctggtgctgaatgacctgctgatctgctgccggcagctggagcatgaccgggccacagagaggaagaaggaggtggagaagttcaagaggctcatccgggaccctgagaccatcaagcacctggacagacacagcgacagcaagcagggcaagtacctgaactgggatgctgtgttccgcttcctgcagaagtacatccagaaggagacagaatgtctgagaattgccaagcccaacgtgtctgccagcacccaggccagccggcagaagaagatgcaggagatcagcagcctggtgaagtacttcatcaagtgtgccaacagaagagccccccggctgaagtgccaggagctgctgaactacatcatggacacagtgaaggacagcagcaatggagccatctatggagctgactgcagcaacatcctgctgaaggacatcctgtctgtgaggaagtactggtgtgagatcagccagcagcagtggctggagctgttctctgtgtacttccggctgtacctgaagcccagccaggatgtgcaccgggtgctggtggcccgcatcatccatgctgtgaccaagggctgctgcagccagacagatggcctgaacagcaagttcctggacttcttcagcaaggccatccagtgtgcccggcaggagaagagcagcagcggcctgaaccacatcctggccgccctgaccatcttcctgaagaccctggccgtgaacttccgcatccgggtgtgtgagctgggagatgagatcctgcccaccctgctgtacatctggacccagcaccggctgaatgacagcctgaaggaggtgatcatcgagctgttccagctgcagatctacatccaccaccccaagggggccaagacccaggagaagggggcctatgagagcaccaagtggaggagcatcctgtacaacctgtatgacctgctggtgaatgagatcagccacatcggcagccggggcaagtacagcagcggcttcagaaatattgctgtgaaggaaaatctcatcgagctgatggctgacatctgccaccaggtgttcaatgaagacaccaggagcctggagatcagccagagctacaccaccacccagcgggagagcagtgactacagcgtgccctgcaagaggaagaagattgagctgggctgggaggtgatcaaggaccacctgcagaagagccagaatgactttgacctggtgccctggctgcagatcgccacccagctgatcagcaagtacccagccagcctgcccaactgtgagctgagccccctgctgatgatcctgagccagctgctgccccagcagagacatggagagaggaccccctacgtgctgcgctgcctgacagaggtggccctgtgccaggacaagaggagcaacctggagagcagccagaagagtgacctgctgaagctgtggaacaagatctggtgcatcaccttccggggcatcagcagcgagcagatccaggctgaaaattttggcctgctgggcgccatcatccagggcagcctggtggaggtggaccgggagttctggaagctgttcaccggcagcgcctgccggcccagctgcccagctgtgtgctgcctgaccctggccctgaccaccagcatcgtgcccggcaccgtgaagatgggcatcgagcagaacatgtgtgaggtgaacagaagcttcagcctgaaggagagcatcatgaagtggctgctcttctaccagctggagggggacctggagaacagcacagaggtgccccccatcctgcacagcaacttcccccacctggtgctggagaagatcctggtgtccctgaccatgaagaactgcaaggccgccatgaacttcttccagagcgtgcctgaatgtgagcaccaccagaaggacaaggaggagctgtccttcagcgaggtggaggagctgttcctgcagaccacctttgacaagatggacttcctgaccatcgtgcgggagtgtggcatcgagaagcaccagagcagcatcggcttctctgtgcaccagaacctgaaggagagcctggaccgctgcctgctgggcctgtctgagcagctgctgaacaactacagcagcgagatcaccaacagcgagaccctggtgcgctgcagccggctgctggtgggcgtgctgggctgctactgctacatgggcgtgattgctgaggaggaggcctacaagtctgagctgttccagaaggccaagagcctgatgcagtgtgccggggagagcatcaccctcttcaagaacaagaccaatgaggagttcagaattggcagcctgaggaacatgatgcagctgtgcacccgctgcctgagcaactgcaccaagaagagccccaacaagatcgccagcggcttcttcctgcggctgctgaccagcaagctgatgaatgacattgctgacatctgcaagagcctggccagcttcatcaagaagccctttgacagaggagaggtggagagcatggaggatgacaccaatggaaacctgatggaggtggaggaccagagctccatgaacctcttcaatgactacccagacagctctgtgtctgatgccaatgagcccggggagagccagagcaccatcggggccatcaaccccctggccgaggagtacctgagcaagcaggacctgctcttcctggacatgctgaagttcctgtgcctgtgtgtgaccacagcccagaccaacacagtgtccttccgggctgctgacatccggaggaagctgctgatgctgattgacagcagcaccctggagcccaccaagagcctgcacctgcacatgtacctgatgctgctgaaggagctgcctggagaggagtaccccctgcccatggaggatgtgctggagctgctgaagcccctgagcaatgtgtgcagcctgtacagaagagaccaggatgtgtgcaagaccatcctgaaccacgtgctgcacgtggtgaagaacctgggccagagcaacatggacagcgagaacaccagagatgcccagggccagttcctgaccgtcatcggggccttctggcacctgaccaaggagaggaagtacatcttctctgtgaggatggccctggtgaactgcctgaagaccctgctggaggccgacccctacagcaagtgggccatcctgaatgtgatgggcaaggacttccctgtgaatgaggtgttcacccagttcctggccgacaaccaccaccaggtgaggatgctggccgctgagagcatcaacagactcttccaggacaccaagggggacagcagccggctgctgaaggccctgcccctgaagctgcagcagacagcctttgaaaatgcctacctgaaggcccaggagggcatgagggagatgagccacagcgcagaaaatcctgagaccctggatgagatctacaacaggaagtctgtgctgctgaccctgattgctgtggtgctgagctgcagccccatctgtgagaagcaggccctgtttgccctgtgcaagtctgtgaaggaaaatggcctggagccccacctggtgaagaaggtgctggagaaggtgtctgagaccttcggctaccgccgcctggaggacttcatggccagccacctggactacctggtgctggagtggctgaacctgcaggacacagagtacaacctgagcagcttccccttcatcctgctgaactacaccaacatcgaggacttctaccgcagctgctacaaggtgctgatcccccacctggtgatccgcagccactttgatgaggtgaagagcatcgccaaccagatccaggaggactggaagagcctgctgacagactgcttccccaagatcctggtgaacatcctgccctactttgcctatgagggcacccgggacagcggcatggcccagcagcgggagacagccaccaaggtgtatgacatgctgaagtctgagaacctgctgggcaagcagattgaccacctgttcatcagcaacctgcctgagatcgtggtggagctgctgatgaccctgcacgagcccgccaacagcagcgccagccagagcacagacctgtgtgacttctcctag

SEQ ID NO: 18393 - DNA, 282 bp, synthetic construct
  misc_feature 1..282: note = Description of Artificial Sequence: Synthetic coding sequence
  source 1..282: mol_type = other DNA
atgagcctggtgctgaatgacctgctgatctgctgccggcagctggagcatgaccgggccacagagaggaagaaggaggtggagaagttcaagaggctcatccgggaccctgagaccatcaagcacctggacagacacagcgacagcaagcagggcaagtacctgaactgggatgctgtgttccgcttcctgcagaagtacatccagaaggagacagaatgtctgagaattgccaagcccaacgtgtctgccagcacccaggccagccggcagaagaagtag

SEQ ID NO: 18394 - DNA, 921 bp, synthetic construct
  misc_feature 1..921: note = Description of Artificial Sequence: Synthetic coding sequence
  source 1..921: mol_type = other DNA
atggagagcatcttccacgagaagcagcccagcggcaacatggatgattctggcttcttcagcatccaggtgatcagcaatgccctgaaggtgtggggcctggagctgatcctcttcaacagccctgagtaccagaggctgagaattgaccccatcaatgaaagaagcttcatctgcaactacaaggagcactggttcaccgtgaggaagctgggcaagcagtggttcaacctgaacagcctgctgactggacctgagctgatcagtgacacctacctggccctcttcctggcccagctgcagcaggagggctacagcatctttgtggtgaagggggacctgcctgactgtgaggccgaccagctgctgcagatgatccgggtgcagcagatgcaccggcccaagctgattggagaggagctggcccagctgaaggagcagagggtgcacaagacagacctggagcgggtgctggaggccaatgatggcagcggcatgctggatgaagatgaggaggacctgcagagggccctggccctgagccggcaggagattgacatggaggatgaggaggccgacctgcggcgggccatccagctgtccatgcagggcagcagcaggaacatcagccaggacatgacccagaccagcggcaccaacctgaccagcgaggagctgaggaagagaagagaggcctactttgagaagcagcagcagaagcagcagcagcagcagcagcagcagcagcagggcgacctgagcggccagagcagccacccctgtgagaggcctgccaccagcagcggggccctgggcagtgacctgggagatgccatgtctgaggaggacatgctgcaggccgctgtgaccatgagcctggagaccgtgagaaatgacctgaagacagagggcaagaagtag

SEQ ID NO: 18395 - DNA, 1110 bp, synthetic construct
  misc_feature 1..1110: note = Description of Artificial Sequence: Synthetic coding sequence
  source 1..1110: mol_type = other DNA
atggagagcatcttccacgagaagcaggagggcagcctgtgtgcccagcactgcctgaacaacctgctgcagggcgagtacttcagccctgtggagctgagcagcatcgcccaccagctggatgaggaggagaggatgaggatggccgagggcggcgtgaccagcgaggactaccgcaccttcctgcagcagcccagcggcaacatggatgacagcggcttcttcagcatccaggtgatcagcaatgccctgaaggtgtggggcctggagctgatcctcttcaacagccctgagtaccagaggctgagaattgaccccatcaatgaaagaagcttcatctgcaactacaaggagcactggttcaccgtgaggaagctgggcaagcagtggttcaacctgaacagcctgctgaccggccctgagctgatcagtgacacctacctggccctcttcctggcccagctgcagcaggagggctacagcatctttgtggtgaagggggacctgcctgactgtgaggccgaccagctgctgcagatgatccgggtgcagcagatgcaccggcccaagctgattggagaggagctggcccagctgaaggagcagagggtgcacaagacagacctggagcgggtgctggaggccaatgatggcagcggcatgctggatgaagatgaggaggacctgcagagggccctggccctgagccggcaggagattgacatggaggatgaggaggccgacctgcggcgggccatccagctgtccatgcagggcagcagcaggaacatcagccaggacatgacccagaccagcggcaccaacctgaccagcgaggagctgaggaagaggcgggaggcctactttgagaaggaccagcacttccacatcctgaagcagcagcagaagcagcagcagcagcagcagcagcagcagcagggcgacctgagcggccagagcagccacccctgtgagaggcctgccaccagcagcggggccctgggcagtgacctgggagatgccatgtctgaggaggacatgctgcaggccgctgtgaccatgagcctggagaccgtgagaaatgacctgaagacagagggcaagaagtag

SEQ ID NO: 18396 - DNA, 1086 bp, synthetic construct
  misc_feature 1..1086: note = Description of Artificial Sequence: Synthetic coding sequence
  source 1..1086: mol_type = other DNA
atggagagcatcttccacgagaagcaggagggcagcctgtgtgcccagcactgcctgaacaacctgctgcagggcgagtacttcagccctgtggagctgagcagcatcgcccaccagctggatgaggaggagaggatgaggatggccgagggcggcgtgaccagcgaggactaccgcaccttcctgcagcagcccagcggcaacatggatgacagcggcttcttcagcatccaggtgatcagcaatgccctgaaggtgtggggcctggagctgatcctcttcaacagccctgagtaccagaggctgagaattgaccccatcaatgaaagaagcttcatctgcaactacaaggagcactggttcaccgtgaggaagctgggcaagcagtggttcaacctgaacagcctgctgaccggccctgagctgatcagtgacacctacctggccctcttcctggcccagctgcagcaggagggctacagcatctttgtggtgaagggggacctgcctgactgtgaggccgaccagctgctgcagatgatccgggtgcagcagatgcaccggcccaagctgattggagaggagctggcccagctgaaggagcagagggtgcacaagacagacctggagcgggtgctggaggccaatgatggcagcggcatgctggatgaagatgaggaggacctgcagagggccctggccctgagccggcaggagattgacatggaggatgaggaggccgacctgcggcgggccatccagctgtccatgcagggcagcagcaggaacatcagccaggacatgacccagaccagcggcaccaacctgaccagcgaggagctgaggaagaggcgggaggcctactttgagaagcagcagcagaagcagcagcagcagcagcagcagcagcagcagggcgacctgagcggccagagcagccacccctgtgagaggcctgccaccagcagcggggccctgggcagtgacctgggagatgccatgtctgaggaggacatgctgcaggccgctgtgaccatgagcctggagaccgtgagaaatgacctgaagacagagggcaagaagtag

SEQ ID NO: 18397 - DNA, 1101 bp, synthetic construct
  misc_feature 1..1101: note = Description of Artificial Sequence: Synthetic coding sequence
  source 1..1101: mol_type = other DNA
atggagagcatcttccacgagaagcaggagggcagcctgtgtgcccagcactgcctgaacaacctgctgcagggcgagtacttcagccctgtggagctgagcagcatcgcccaccagctggatgaggaggagaggatgaggatggccgagggcggcgtgaccagcgaggactaccgcaccttcctgcagcagcccagcggcaacatggatgacagcggcttcttcagcatccaggtgatcagcaatgccctgaaggtgtggggcctggagctgatcctcttcaacagccctgagtaccagaggctgagaattgaccccatcaatgaaagaagcttcatctgcaactacaaggagcactggttcaccgtgaggaagctgggcaagcagtggttcaacctgaacagcctgctgaccggccctgagctgatcagtgacacctacctggccctcttcctggcccagctgcagcaggagggctacagcatctttgtggtgaagggggacctgcctgactgtgaggccgaccagctgctgcagatgatccgggtgcagcagatgcaccggcccaagctgattggagaggagctggcccagctgaaggagcagagggtgcacaagacagacctggagcgggtgctggaggccaatgatggcagcggcatgctggatgaagatgaggaggacctgcagagggccctggccctgagccggcaggagattgacatggaggatgaggaggccgacctgcggcgggccatccagctgtccatgcagggcagcagcaggaacatcagccaggacatgacccagaccagcggcaccaacctgaccagcgaggagctgaggaagaggcgggaggcctactttgaaaatgactactttgacagccagcagcagaagcagcagcagcagcagcagcagcagcagcagggcgacctgagcggccagagcagccacccctgtgagaggcctgccaccagcagcggggccctgggcagtgacctgggagatgccatgtctgaggaggacatgctgcaggccgctgtgaccatgagcctggagaccgtgagaaatgacctgaagacagagggcaagaagtag

SEQ ID NO: 18398 - DNA, 1065 bp, synthetic construct
  misc_feature 1..1065: note = Description of Artificial Sequence: Synthetic coding sequence
  source 1..1065: mol_type = other DNA
atggagagcatcttccacgagaagcaggagggcagcctgtgtgcccagcactgcctgaacaacctgctgcagggcgagtacttcagccctgtggagctgagcagcatcgcccaccagctggatgaggaggagaggatgaggatggccgagggcggcgtgaccagcgaggactaccgcaccttcctgcaggtgatcagcaatgccctgaaggtgtggggcctggagctgatcctcttcaacagccctgagtaccagaggctgagaattgaccccatcaatgaaagaagcttcatctgcaactacaaggagcactggttcaccgtgaggaagctgggcaagcagtggttcaacctgaacagcctgctgactggacctgagctgatcagtgacacctacctggccctcttcctggcccagctgcagcaggagggctacagcatctttgtggtgaagggggacctgcctgactgtgaggccgaccagctgctgcagatgatccgggtgcagcagatgcaccggcccaagctgattggagaggagctggcccagctgaaggagcagagggtgcacaagacagacctggagcgggtgctggaggccaatgatggcagcggcatgctggatgaagatgaggaggacctgcagagggccctggccctgagccggcaggagattgacatggaggatgaggaggccgacctgcggcgggccatccagctgtccatgcagggcagcagcaggaacatcagccaggacatgacccagaccagcggcaccaacctgaccagcgaggagctgaggaagagaagagaggcctactttgagaaggaccagcacttccacatcctgaagcagcagcagaagcagcagcagcagcagcagcagcagcagcagggcgacctgagcggccagagcagccacccctgtgagaggcctgccaccagcagcggggccctgggcagtgacctgggagatgccatgtctgaggaggacatgctgcaggccgctgtgaccatgagcctggagaccgtgagaaatgacctgaagacagagggcaagaagtag

SEQ ID NO: 18399 - DNA, 1113 bp, synthetic construct
  misc_feature 1..1113: note = Description of Artificial Sequence: Synthetic coding sequence
  source 1..1113: mol_type = other DNA
atggagagcatcttccacgagaagcaggagggcagcctgtgtgcccagcactgcctgaacaacctgctgcagggcgagtacttcagccctgtggagctgagcagcatcgcccaccagctggatgaggaggagaggatgaggatggccgagggcggcgtgaccagcgaggactaccgcaccttcctgcagcagcccagcggcaacatggatgacagcggcttcttcagcatccaggtgatcagcaatgccctgaaggtgtggggcctggagctgatcctcttcaacagccctgagtaccagaggctgagaattgaccccatcaatgaaagaagcttcatctgcaactacaaggagcactggttcaccgtgaggaagctgggcaagcagtggttcaacctgaacagcctgctgaccggccctgagctgatcagtgacacctacctggccctcttcctggcccagctgcagcaggagggctacagcatctttgtggtgaagggggacctgcctgactgtgaggccgaccagctgctgcagatgatccgggtgcagcagatgcaccggcccaagctgattggagaggagctggcccagctgaaggagcagagggtgcacaagacagacctggagcgggtgctggaggccaatgatggcagcggcatgctggatgaagatgaggaggacctgcagagggccctggccctgagccggcaggagattgacatggaggatgaggaggccgacctgcggcgggccatccagctgtccatgcagggcagcagcaggaacatcagccaggacatgacccagaccagcggcaccaacctgaccagcgaggagctgaggaagaggcgggaggcctactttgagaagacagagagccgctctgtggcccaggcccagcagcagaagcagcagcagcagcagcagcagcagcagcagggcgacctgagcggccagagcagccacccctgtgagaggcctgccaccagcagcggggccctgggcagtgacctgggagatgccatgtctgaggaggacatgctgcaggccgctgtgaccatgagcctggagaccgtgagaaatgacctgaagacagagggcaagaagtag

SEQ ID NO: 18400 - DNA, 1041 bp, synthetic construct
  misc_feature 1..1041: note = Description of Artificial Sequence: Synthetic coding sequence
  source 1..1041: mol_type = other DNA
atggagagcatcttccacgagaagcaggagggcagcctgtgtgcccagcactgcctgaacaacctgctgcagggcgagtacttcagccctgtggagctgagcagcatcgcccaccagctggatgaggaggagaggatgaggatggccgagggcggcgtgaccagcgaggactaccgcaccttcctgcaggtgatcagcaatgccctgaaggtgtggggcctggagctgatcctcttcaacagccctgagtaccagaggctgagaattgaccccatcaatgaaagaagcttcatctgcaactacaaggagcactggttcaccgtgaggaagctgggcaagcagtggttcaacctgaacagcctgctgactggacctgagctgatcagtgacacctacctggccctcttcctggcccagctgcagcaggagggctacagcatctttgtggtgaagggggacctgcctgactgtgaggccgaccagctgctgcagatgatccgggtgcagcagatgcaccggcccaagctgattggagaggagctggcccagctgaaggagcagagggtgcacaagacagacctggagcgggtgctggaggccaatgatggcagcggcatgctggatgaagatgaggaggacctgcagagggccctggccctgagccggcaggagattgacatggaggatgaggaggccgacctgcggcgggccatccagctgtccatgcagggcagcagcaggaacatcagccaggacatgacccagaccagcggcaccaacctgaccagcgaggagctgaggaagagaagagaggcctactttgagaagcagcagcagaagcagcagcagcagcagcagcagcagcagcagggcgacctgagcggccagagcagccacccctgtgagaggcctgccaccagcagcggggccctgggcagtgacctgggagatgccatgtctgaggaggacatgctgcaggccgctgtgaccatgagcctggagaccgtgagaaatgacctgaagacagagggcaagaagtag

SEQ ID NO: 18401 - DNA, 1095 bp, synthetic construct
  misc_feature 1..1095: note = Description of Artificial Sequence: Synthetic coding sequence
  source 1..1095: mol_type = other DNA
atggagagcatcttccacgagaagcaggagggcagcctgtgtgcccagcactgcctgaacaacctgctgcagggcgagtacttcagccctgtggagctgagcagcatcgcccaccagctggatgaggaggagaggatgaggatggccgagggcggcgtgaccagcgaggactaccgcaccttcctgcagcagcccagcggcaacatggatgacagcggcttcttcagcatccaggtgatcagcaatgccctgaaggtgtggggcctggagctgatcctcttcaacagccctgagtaccagaggctgagaattgaccccatcaatgaaagaagcttcatctgcaactacaaggagcactggttcaccgtgaggaagctgggcaagcagtggttcaacctgaacagcctgctgaccggccctgagctgatcagtgacacctacctggccctcttcctggcccagctgcagcaggagggctacagcatctttgtggtgaagggggacctgcctgactgtgaggccgaccagctgctgcagatgatccgggtgcagcagatgcaccggcccaagctgattggagaggagctggcccagctgaaggagcagagggtgcacaagacagacctggagcgggtgctggaggccaatgatggcagcggcatgctggatgaagatgaggaggacctgcagagggccctggccctgagccggcaggagattgacatggaggatgaggaggccgacctgcggcgggccatccagctgtccatgcagggcagcagcaggaacatcagccaggacatgacccagaccagcggcaccaacctgaccagcgaggagctgaggaagaggcgggaggcctactttgagaagcagcagcagaagcagcagcagcagcagcagcagcagcagcagggcgacctgagcggccagagcagccacccctgtgagaggcctgccaccagcagcggggccctgggcagtgacctgggcaaggcctgcagccccttcatcatgtttgccaccttcaccctgtacctgacctatgagctgcacgtgatctttgccctgcactacagcagcttccccctgtag

SEQ ID NO: 18402 - DNA, 1119 bp, synthetic construct
  misc_feature 1..1119: note = Description of Artificial Sequence: Synthetic coding sequence
  source 1..1119: mol_type = other DNA
atggagagcatcttccacgagaagcaggagggcagcctgtgtgcccagcactgcctgaacaacctgctgcagggcgagtacttcagccctgtggagctgagcagcatcgcccaccagctggatgaggaggagaggatgaggatggccgagggcggcgtgaccagcgaggactaccgcaccttcctgcagcagcccagcggcaacatggatgacagcggcttcttcagcatccaggtgatcagcaatgccctgaaggtgtggggcctggagctgatcctcttcaacagccctgagtaccagaggctgagaattgaccccatcaatgaaagaagcttcatctgcaactacaaggagcactggttcaccgtgaggaagctgggcaagcagtggttcaacctgaacagcctgctgaccggccctgagctgatcagtgacacctacctggccctcttcctggcccagctgcagcaggagggctacagcatctttgtggtgaagggggacctgcctgactgtgaggccgaccagctgctgcagatgatccgggtgcagcagatgcaccggcccaagctgattggagaggagctggcccagctgaaggagcagagggtgcacaagacagacctggagcgggtgctggaggccaatgatggcagcggcatgctggatgaagatgaggaggacctgcagagggccctggccctgagccggcaggagattgacatggaggatgaggaggccgacctgcggcgggccatccagctgtccatgcagggcagcagcaggaacatcagccaggacatgacccagaccagcggcaccaacctgaccagcgaggagctgaggaagaggcgggaggcctactttgagaagtttggccggccccggcgggctgactgcctgcggcagcagcagaagcagcagcagcagcagcagcagcagcagcagggcgacctgagcggccagagcagccacccctgtgagaggcctgccaccagcagcggggccctgggcagtgacctgggagatgccatgtctgaggaggacatgctgcaggccgctgtgaccatgagcctggagaccgtgagaaatgacctgaagacagagggcaagaagtag

SEQ ID NO: 18403 - DNA, 1128 bp, synthetic construct
  misc_feature 1..1128: note = Description of Artificial Sequence: Synthetic coding sequence
  source 1..1128: mol_type = other DNA
gacagcgtgtccaagaagaagcaggagggcagcctgtgtgcccagcactgcctgaacaacctgctgcagggcgagtacttcagccctgtggagctgagcagcatcgcccaccagctggatgaggaggagaggatgaggatggccgagggcggcgtgaccagcgaggactaccgcaccttcctgcagcagcccagcggcaacatggatgattctggcttcttcagcatccaggtgatcagcaatgccctgaaggtgtggggcctggagctgatcctcttcaacagccctgagtaccagaggctgagaattgaccccatcaatgaaagaagcttcatctgcaactacaaggagcactggttcaccgtgaggaagctgggcaagcagtggttcaacctgaacagcctgctgactggacctgagctgatcagtgacacctacctggccctcttcctggcccagctgcagcaggagggctacagcatctttgtggtgaagggggacctgcctgactgtgaggccgaccagctgctgcagatgatccgggtgcagcagatgcaccggcccaagctgattggagaggagctggcccagctgaaggagcagagggtgcacaagacagacctggagcgggtgctggaggccaatgatggcagcggcatgctggatgaagatgaggaggacctgcagagggccctggccctgagccggcaggagattgacatggaggatgaggaggccgacctgcggcgggccatccagctgtccatgcagggcagcagcaggaacatcagccaggacatgacccagaccagcggcaccaacctgaccagcgaggagctgaggaagagaagagaggcctactttgagaagaagttcaccgccaacagaacagaccagcacttccacatcctgaagcagcagcagaagcagcagcagcagcagcagcagcagcagcagggcgacctgagcggccagagcagccacccctgtgagaggcctgccaccagcagcggggccctgggcagtgacctgggagatgccatgtctgaggaggacatgctgcaggccgctgtgaccatgagcctggagaccgtgagaaatgacctgaagacagagggcaagaagtag

SEQ ID NO: 18404 - DNA, 1125 bp, synthetic construct
  misc_feature 1..1125: note = Description of Artificial Sequence: Synthetic coding sequence
  source 1..1125: mol_type = other DNA
atggagagcatcttccacgagaagcaggagggcagcctgtgtgcccagcactgcctgaacaacctgctgcagggcgagtacttcagccctgtggagctgagcagcatcgcccaccagctggatgaggaggagaggatgaggatggccgagggcggcgtgaccagcgaggactaccgcaccttcctgcagcagcccagcggcaacatggatgacagcggcttcttcagcatccaggtgatcagcaatgccctgaaggtgtggggcctggagctgatcctcttcaacagccctgagtaccagaggctgagaattgaccccatcaatgaaagaagcttcatctgcaactacaaggagcactggttcaccgtgaggaagctgggcaagcagtggttcaacctgaacagcctgctgaccggccctgagctgatcagtgacacctacctggccctcttcctggcccagctgcagcaggagggctacagcatctttgtggtgaagggggacctgcctgactgtgaggccgaccagctgctgcagatgatccgggtgcagcagatgcaccggcccaagctgattggagaggagctggcccagctgaaggagcagagggtgcacaagacagacctggagcgggtgctggaggccaatgatggcagcggcatgctggatgaagatgaggaggacctgcagagggccctggccctgagccggcaggagattgacatggaggatgaggaggccgacctgcggcgggccatccagctgtccatgcagggcagcagcaggaacatcagccaggacatgacccagaccagcggcaccaacctgaccagcgaggagctgaggaagaggcgggaggcctactttgagaaggtgttcttcaagaacctgcagcagatcggccgggcccggcagcagcagaagcagcagcagcagcagcagcagcagcagcagggcgacctgagcggccagagcagccacccctgtgagaggcctgccaccagcagcggggccctgggcagtgacctgggagatgccatgtctgaggaggacatgctgcaggccgctgtgaccatgagcctggagaccgtgagaaatgacctgaagacagagggcaagaagtag

SEQ ID NO: 18405 - DNA, 1113 bp, synthetic construct
  misc_feature 1..1113: note = Description of Artificial Sequence: Synthetic coding sequence
  source 1..1113: mol_type = other DNA
atggagagcatcttccacgagaagcaggagggcagcctgtgtgcccagcactgcctgaacaacctgctgcagggcgagtacttcagccctgtggagctgagcagcatcgcccaccagctggatgaggaggagaggatgaggatggccgagggcggcgtgaccagcgaggactaccgcaccttcctgcagcagcccagcggcaacatggatgacagcggcttcttcagcatccaggtgatcagcaatgccctgaaggtgtggggcctggagctgatcctcttcaacagccctgagtaccagaggctgagaattgaccccatcaatgaaagaagcttcatctgcaactacaaggagcactggttcaccgtgaggaagctgggcaagcagtggttcaacctgaacagcctgctgaccggccctgagctgatcagtgacacctacctggccctcttcctggcccagctgcagcaggagggctacagcatctttgtggtgaagggggacctgcctgactgtgaggccgaccagctgctgcagatgatccgggtgcagcagatgcaccggcccaagctgattggagaggagctggcccagctgaaggagcagagggtgcacaagacagacctggagcgggtgctggaggccaatgatggcagcggcatgctggatgaagatgaggaggacctgcagagggccctggccctgagccggcaggagattgacatggaggatgaggaggccgacctgcggcgggccatccagctgtccatgcagggcagcagcaggaacatcagccaggacatgacccagaccagcggcaccaacctgaccagcgaggagctgaggaagaggcgggaggcctactttgagaagatctacttcacctttgagtgcttccggcagcagcagaagcagcagcagcagcagcagcagcagcagcagggcgacctgagcggccagagcagccacccctgtgagaggcctgccaccagcagcggggccctgggcagtgacctgggagatgccatgtctgaggaggacatgctgcaggccgctgtgaccatgagcctggagaccgtgagaaatgacctgaagacagagggcaagaagtag

SEQ ID NO: 18406 - DNA, 1134 bp, synthetic construct
  misc_feature 1..1134: note = Description of Artificial Sequence: Synthetic coding sequence
  source 1..1134: mol_type = other DNA
atggagagcatcttccacgagaagcaggagggcagcctgtgtgcccagcactgcctgaacaacctgctgcagggcgagtacttcagccctgtggagctgagcagcatcgcccaccagctggatgaggaggagaggatgaggatggccgagggcggcgtgaccagcgaggactaccgcaccttcctgcagcagcccagcggcaacatggatgacagcggcttcttcagcatccaggtgatcagcaatgccctgaaggtgtggggcctggagctgatcctcttcaacagccctgagtaccagaggctgagaattgaccccatcaatgaaagaagcttcatctgcaactacaaggagcactggttcaccgtgaggaagctgggcaagcagtggttcaacctgaacagcctgctgaccggccctgagctgatcagtgacacctacctggccctcttcctggcccagctgcagcaggagggctacagcatctttgtggtgaagggggacctgcctgactgtgaggccgaccagctgctgcagatgatccgggtgcagcagatgcaccggcccaagctgattggagaggagctggcccagctgaaggagcagagggtgcacaagacagacctggagcgggtgctggaggccaatgatggcagcggcatgctggatgaagatgaggaggacctgcagagggccctggccctgagccggcaggagattgacatggaggatgaggaggccgacctgcggcgggccatccagctgtccatgcagggcagcagcaggaacatcagccaggacatgacccagaccagcggcaccaacctgaccagcgaggagctgaggaagaggcgggaggcctactttgagaaggtgttcttcaagaacctgcagcagaaccagcacttccacatcctgaagcagcagcagaagcagcagcagcagcagcagcagcagcagcagggcgacctgagcggccagagcagccacccctgtgagaggcctgccaccagcagcggggccctgggcagtgacctgggagatgccatgtctgaggaggacatgctgcaggccgctgtgaccatgagcctggagaccgtgagaaatgacctgaagacagagggcaagaagtag

SEQ ID NO: 18407 - DNA, 549 bp, synthetic construct
  misc_feature 1..549: note = Description of Artificial Sequence: Synthetic coding sequence
  source 1..549: mol_type = other DNA
atgatccgggtgcagcagatgcaccggcccaagctgattggagaggagctggcccagctgaaggagcagagggtgcacaagacagacctggagcgggtgctggaggccaatgatggcagcggcatgctggatgaagatgaggaggacctgcagagggccctggccctgagccggcaggagattgacatggaggatgaggaggccgacctgcggcgggccatccagctgtccatgcagggcagcagcaggaacatcagccaggacatgacccagaccagcggcaccaacctgaccagcgaggagctgaggaagagaagagaggcctactttgagaagcagcagcagaagcagcagcagcagcagcagcagcagcagcagggcgacctgagcggccagagcagccacccctgtgagaggcctgccaccagcagcggggccctgggcagtgacctgggagatgccatgtctgaggaggacatgctgcaggccgctgtgaccatgagcctggagaccgtgagaaatgacctgaagacagagggcaagaagtag

SEQ ID NO: 18408 - DNA, 3306 bp, synthetic construct
  misc_feature 1..3306: note = Description of Artificial Sequence: Synthetic coding sequence
  source 1..3306: mol_type = other DNA
atgtctgccaaggccatcagcgagcagacaggcaaggagctgctgtacaagttcatctgcaccaccagcgccatccagaaccgcttcaagtatgcccgggtgaccccagacacagactgggcccggctgctgcaggaccacccctggctgctgagccagaacctggtggtgaagccagaccagctgatcaagagaagaggcaagctgggcctggtgggcgtgaacctgaccctggatggagtgaagtcctggctgaagccccggctgggccaggaggccaccgtgggcaaggccaccggcttcctgaagaacttcctgattgagccctttgtgccccacagccaggccgaggagttctacgtgtgcatctatgccacccgggagggggactatgtgctcttccaccacgagggcggcgtggatgtgggagatgtggatgccaaggcccagaagctgctggtgggcgtggatgagaagctgaaccctgaggacatcaagaagcacctgctggtgcacgcccctgaggacaagaaggagatcctggccagcttcatcagcggcctcttcaacttctatgaagatctctacttcacctacctggagatcaaccccctggtggtgaccaaggatggagtgtatgtgctggacctggccgccaaggtggatgccacagctgactacatctgcaaggtgaagtggggagacatcgagttccccccacccttcggccgggaggcctacccagaggaggcctacatcgctgacctggatgccaagagcggggccagcctgaagctgaccctgctgaaccccaagggccgcatctggaccatggtggccggcggcggggcctctgtggtgtacagcgacaccatctgtgacctgggcggcgtgaatgagctggccaactacggggagtacagcggggcccccagcgagcagcagacctatgactatgccaagaccatcctgagcctgatgacccgggagaagcacccagatggcaagatcctgatcatcggcggcagcatcgccaacttcaccaacgtggccgccaccttcaagggcatcgtgcgggccatccgggactaccagggccccctgaaggagcacgaggtgaccatctttgtgcggcggggcggccccaactaccaggagggcctgcgggtgatgggagaggtgggcaagaccaccggcatccccatccacgtgtttggaacagagacccacatgacagccatcgtgggcatggccctgggccaccggcccatccccaaccagcccccaacagctgcccacacagccaacttcctgctgaatgccagcggcagcaccagcaccccagcccccagcaggacagccagcttcagcgagagcagagcagatgaggtggccccagccaagaaggccaagccagccatgccccaggacagcgtgcccagccccaggagcctgcagggcaagagcaccaccctcttcagccgccacaccaaggccatcgtgtggggcatgcagaccagggctgtgcagggcatgctggactttgattatgtgtgcagcagagatgagcccagcgtggccgccatggtgtaccccttcaccggggaccacaagcagaagttctactggggccacaaggagatcctgatccctgtgttcaagaacatggctgatgccatgaggaagcaccctgaggtggatgtgctgatcaactttgccagcctgcggagcgcctatgacagcaccatggagaccatgaactatgcccagatccgcaccatcgccatcatcgccgagggcatccctgaggccctgaccaggaagctgatcaagaaggctgaccagaagggcgtgaccatcatcggccctgccaccgtgggcggcatcaagccaggctgcttcaagattggcaacacaggaggcatgctggacaacatcctggccagcaagctgtaccggcccggctctgtggcctacgtgagccgcagcggcggcatgagcaatgagctgaacaacatcatcagcaggaccacagatggagtgtatgagggcgtggccatcggcggggaccgctacccaggcagcaccttcatggaccacgtgctgcgctaccaggacaccccaggagtgaagatgattgtggtgctgggggagattggaggaacagaggagtacaagatctgccggggcatcaaggagggccgcctgaccaagcccatcgtgtgctggtgcatcggcacctgtgccaccatgttcagcagcgaggtgcagtttggacatgctggggcctgtgccaaccaggccagcgagacagctgtggccaagaaccaggccctgaaggaggccggcgtgtttgtgcccaggagctttgatgagctgggggagatcatccagagcgtgtatgaggacctggtggccaatggagtcatcgtgcctgcccaggaggtgcccccacccaccgtgcccatggactacagctgggcccgggagctgggcctcatcaggaagccagccagcttcatgaccagcatctgtgatgagcggggccaggagctgatctatgccggcatgcccatcacagaggtgttcaaggaggagatgggcattggaggagtgctgggcctgctgtggttccagaagaggctgcccaagtacagctgccagttcatcgagatgtgcctgatggtgacagctgaccacggccctgctgtgtctggggcccacaacaccatcatctgtgcccgggccggcaaggacctggtgagcagcctgaccagcggcctgctgaccatcggggacagatttggaggagccctggatgctgctgccaagatgttcagcaaggcctttgacagcggcatcatccccatggagtttgtgaacaagatgaagaaggagggcaagctgatcatgggcatcggccaccgggtgaagagcatcaacaacccagacatgagggtgcagatcctgaaggactatgtgcggcagcacttccctgccacccccctgctggactatgccctggaggtggagaagatcaccaccagcaagaagcccaacctgatcctgaatgtggatggcctgattggagtggcctttgtggacatgctgaggaactgtggcagcttcacccgggaggaggctgatgagtacatcgacatcggggccctgaatggcatctttgtgctgggccgctccatgggcttcatcggccactacctggaccagaagaggctgaagcagggcctgtaccgccacccctgggatgacatctcctatgtgctgcctgagcacatgtccatgtag

SEQ ID NO: 18409 - DNA, 3276 bp, synthetic construct
  misc_feature 1..3276: note = Description of Artificial Sequence: Synthetic coding sequence
  source 1..3276: mol_type = other DNA
atgtctgccaaggccatcagcgagcagacaggcaaggagctgctgtacaagttcatctgcaccaccagcgccatccagaaccgcttcaagtatgcccgggtgaccccagacacagactgggcccggctgctgcaggaccacccctggctgctgagccagaacctggtggtgaagccagaccagctgatcaagagaagaggcaagctgggcctggtgggcgtgaacctgaccctggatggagtgaagtcctggctgaagccccggctgggccaggaggccaccgtgggcaaggccaccggcttcctgaagaacttcctgattgagccctttgtgccccacagccaggccgaggagttctacgtgtgcatctatgccacccgggagggggactatgtgctcttccaccacgagggcggcgtggatgtgggagatgtggatgccaaggcccagaagctgctggtgggcgtggatgagaagctgaaccctgaggacatcaagaagcacctgctggtgcacgcccctgaggacaagaaggagatcctggccagcttcatcagcggcctcttcaacttctatgaagatctctacttcacctacctggagatcaaccccctggtggtgaccaaggatggagtgtatgtgctggacctggccgccaaggtggatgccacagctgactacatctgcaaggtgaagtggggagacatcgagttccccccacccttcggccgggaggcctacccagaggaggcctacatcgctgacctggatgccaagagcggggccagcctgaagctgaccctgctgaaccccaagggccgcatctggaccatggtggccggcggcggggcctctgtggtgtacagcgacaccatctgtgacctgggcggcgtgaatgagctggccaactacggggagtacagcggggcccccagcgagcagcagacctatgactatgccaagaccatcctgagcctgatgacccgggagaagcacccagatggcaagatcctgatcatcggcggcagcatcgccaacttcaccaacgtggccgccaccttcaagggcatcgtgcgggccatccgggactaccagggccccctgaaggagcacgaggtgaccatctttgtgcggcggggcggccccaactaccaggagggcctgcgggtgatgggagaggtgggcaagaccaccggcatccccatccacgtgtttggaacagagacccacatgacagccatcgtgggcatggccctgggccaccggcccatccccaaccagcccccaacagctgcccacacagccaacttcctgctgaatgccagcggcagcaccagcaccccagcccccagcaggacagccagcttcagcgagagcagagcagatgaggtggccccagccaagaaggccaagccagccatgccccagggcaagagcaccaccctcttcagccgccacaccaaggccatcgtgtggggcatgcagaccagggctgtgcagggcatgctggactttgattatgtgtgcagcagagatgagcccagcgtggccgccatggtgtaccccttcaccggggaccacaagcagaagttctactggggccacaaggagatcctgatccctgtgttcaagaacatggctgatgccatgaggaagcaccctgaggtggatgtgctgatcaactttgccagcctgcggagcgcctatgacagcaccatggagaccatgaactatgcccagatccgcaccatcgccatcatcgccgagggcatccctgaggccctgaccaggaagctgatcaagaaggctgaccagaagggcgtgaccatcatcggccctgccaccgtgggcggcatcaagccaggctgcttcaagattggcaacacaggaggcatgctggacaacatcctggccagcaagctgtaccggcccggctctgtggcctacgtgagccgcagcggcggcatgagcaatgagctgaacaacatcatcagcaggaccacagatggagtgtatgagggcgtggccatcggcggggaccgctacccaggcagcaccttcatggaccacgtgctgcgctaccaggacaccccaggagtgaagatgattgtggtgctgggggagattggaggaacagaggagtacaagatctgccggggcatcaaggagggccgcctgaccaagcccatcgtgtgctggtgcatcggcacctgtgccaccatgttcagcagcgaggtgcagtttggacatgctggggcctgtgccaaccaggccagcgagacagctgtggccaagaaccaggccctgaaggaggccggcgtgtttgtgcccaggagctttgatgagctgggggagatcatccagagcgtgtatgaggacctggtggccaatggagtcatcgtgcctgcccaggaggtgcccccacccaccgtgcccatggactacagctgggcccgggagctgggcctcatcaggaagccagccagcttcatgaccagcatctgtgatgagcggggccaggagctgatctatgccggcatgcccatcacagaggtgttcaaggaggagatgggcattggaggagtgctgggcctgctgtggttccagaagaggctgcccaagtacagctgccagttcatcgagatgtgcctgatggtgacagctgaccacggccctgctgtgtctggggcccacaacaccatcatctgtgcccgggccggcaaggacctggtgagcagcctgaccagcggcctgctgaccatcggggacagatttggaggagccctggatgctgctgccaagatgttcagcaaggcctttgacagcggcatcatccccatggagtttgtgaacaagatgaagaaggagggcaagctgatcatgggcatcggccaccgggtgaagagcatcaacaacccagacatgagggtgcagatcctgaaggactatgtgcggcagcacttccctgccacccccctgctggactatgccctggaggtggagaagatcaccaccagcaagaagcccaacctgatcctgaatgtggatggcctgattggagtggcctttgtggacatgctgaggaactgtggcagcttcacccgggaggaggctgatgagtacatcgacatcggggccctgaatggcatctttgtgctgggccgctccatgggcttcatcggccactacctggaccagaagaggctgaagcagggcctgtaccgccacccctgggatgacatctcctatgtgctgcctgagcacatgtccatgtag

SEQ ID NO: 18410 - DNA, 3276 bp, synthetic construct; identical to SEQ ID NO: 18409
  misc_feature 1..3276: note = Description of Artificial Sequence: Synthetic coding sequence
  source 1..3276: mol_type = other DNA

SEQ ID NO: 18411 - DNA, 3468 bp, synthetic construct
  misc_feature 1..3468: note = Description of Artificial Sequence: Synthetic coding sequence
  source 1..3468: mol_type = other DNA
atgggcgccggcaagagccctgctggccctggccagaagccagaccccgggaagctgcctgctgctggggtgctgcgcatcctgcggggcagcagcggcctgtggaagaagaggcgggcccggaccagcgctgagaccggccgggccggcctgtctgctgccatgtctgccaaggccatcagcgagcagacaggcaaggagctgctgtacaagttcatctgcaccaccagcgccatccagaaccgcttcaagtatgcccgggtgaccccagacacagactgggcccggctgctgcaggaccacccctggctgctgagccagaacctggtggtgaagccagaccagctgatcaagagaagaggcaagctgggcctggtgggcgtgaacctgaccctggatggagtgaagtcctggctgaagccccggctgggccaggaggccaccgtgggcaaggccaccggcttcctgaagaacttcctgattgagccctttgtgccccacagccaggccgaggagttctacgtgtgcatctatgccacccgggagggggactatgtgctcttccaccacgagggcggcgtggatgtgggagatgtggatgccaaggcccagaagctgctggtgggcgtggatgagaagctgaaccctgaggacatcaagaagcacctgctggtgcacgcccctgaggacaagaaggagatcctggccagcttcatcagcggcctcttcaacttctatgaagatctctacttcacctacctggagatcaaccccctggtggtgaccaaggatggagtgtatgtgctggacctggccgccaaggtggatgccacagctgactacatctgcaaggtgaagtggggagacatcgagttccccccacccttcggccgggaggcctacccagaggaggcctacatcgctgacctggatgccaagagcggggccagcctgaagctgaccctgctgaaccccaagggccgcatctggaccatggtggccggcggcggggcctctgtggtgtacagcgacaccatctgtgacctgggcggcgtgaatgagctggccaactacggggagtacagcggggcccccagcgagcagcagacctatgactatgccaagaccatcctgagcctgatgacccgggagaagcacccagatggcaagatcctgatcatcggcggcagcatcgccaacttcaccaacgtggccgccaccttcaagggcatcgtgcgggccatccgggactaccagggccccctgaaggagcacgaggtgaccatctttgtgcggcggggcggccccaactaccaggagggcctgcgggtgatgggagaggtgggcaagaccaccggcatccccatccacgtgtttggaacagagacccacatgacagccatcgtgggcatggccctgggccaccggcccatccccaaccagcccccaacagctgcccacacagccaacttcctgctgaatgccagcggcagcaccagcaccccagcccccagcaggacagccagcttcagcgagagcagagcagatgaggtggccccagccaagaaggccaagccagccatgccccaggacagcgtgcccagccccaggagcctgcagggcaagagcaccaccctcttcagccgccacaccaaggccatcgtgtggggcatgcagaccagggctgtgcagggcatgctggactttgattatgtgtgcagcagagatgagcccagcgtggccgccatggtgtaccccttcaccggggaccacaagcagaagttctactggggccacaaggagatcctgatccctgtgttcaagaacatggctgatgccatgaggaagcaccctgaggtggatgtgctgatcaactttgccagcctgcggagcgcctatgacagcaccatggagaccatgaactatgcccagatccgcaccatcgccatcatcgccgagggcatccctgaggccctgaccaggaagctgatcaagaaggctgaccagaagggcgtgaccatcatcggccctgccaccgtgggcggcatcaagccaggctgcttcaagattggcaacacaggaggcatgctggacaacatcctggccagcaagctgtaccggcccggctctgtggcctacgtgagccgcagcggcggcatgagcaatgagctgaacaacatcatcagcaggaccacagatggagtgtatgagggcgtggccatcggcggggaccgctacccaggcagcaccttcatggaccacgtgctgcgctaccaggacaccccaggagtgaagatgattgtggtgctgggggagattggaggaacagaggagtacaagatctgccggggcatcaaggagggccgcctgaccaagcccatcgtgtgctggtgcatcggcacctgtgccaccatgttcagcagcgaggtgcagtttggacatgctggggcctgtgccaaccaggccagcgagacagctgtggccaagaaccaggccctgaaggaggccggcgtgtttgtgcccaggagctttgatgagctgggggagatcatccagagcgtgtatgaggacctggtggccaatggagtcatcgtgcctgcccaggaggtgcccccacccaccgtgcccatggactacagctgggcccgggagctgggcctcatcaggaagccagccagcttcatgaccagcatctgtgatgagcggggccaggagctgatctatgccggcatgcccatcacagaggtgttcaaggaggagatgggcattggaggagtgctgggcctgctgtggttccagaagaggctgcccaagtacagctgccagttcatcgagatgtgcctgatggtgacagctgaccacggccctgctgtgtctggggcccacaacaccatcatctgtgcccgggccggcaaggacctggtgagcagcctgaccagcggcctgctgaccatcggggacagatttggaggagccctggatgctgctgccaagatgttcagcaaggcctttgacagcggcatcatccccatggagtttgtgaacaagatgaagaaggagggcaagctgatcatgggcatcggccaccgggtgaagagcatcaacaacccagacatgagggtgcagatcctgaaggactatgtgcggcagcacttccctgccacccccctgctggactatgccctggaggtggagaagatcaccaccagcaagaagcccaacctgatcctgaatgtggatggcctgattggagtggcctttgtggacatgctgaggaactgtggcagcttcacccgggaggaggctgatgagtacatcgacatcggggccctgaatggcatctttgtgctgggccgctccatgggcttcatcggccactacctggaccagaagaggctgaagcagggcctgtaccgccacccctgggatgacatctcctatgtgctgcctgagcacatgtccatgtag

SEQ ID NO: 18412 - DNA, 2493 bp, synthetic construct
  misc_feature 1..2493: note = Description of Artificial Sequence: Synthetic coding sequence
  source 1..2493: mol_type = other DNA
atgtctgccaaggccatcagcgagcagacaggcaaggagctgctgtacaagttcatctgcaccaccagcgccatccagaaccgcttcaagtatgcccgggtgaccccagacacagactgggcccggctgctgcaggaccacccctggctgctgagccagaacctggtggtgaagccagaccagctgatcaagagaagaggcaagctgggcctggtgggcgtgaacctgaccctggatggagtgaagtcctggctgaagccccggctgggccaggaggccaccggcatcgtgcgggccatccgggactaccagggccccctgaaggagcacgaggtgaccatctttgtgagaagaggaggccccaactaccaggagggcctgcgggtgatgggagaggtgggcaagaccaccggcatccccatccacgtgtttggaacagagacccacatgacagccatcgtgggcatggccctgggccaccggcccatccccaaccagcccccaacagctgcccacacagccaacttcctgctgaatgccagcggcagcaccagcaccccagcccccagcaggacagccagcttcagcgagagcagagcagatgaggtggccccagccaagaaggccaagccagccatgccccagggcaagagcaccaccctcttcagccgccacaccaaggccatcgtgtggggcatgcagaccagggctgtgcagggcatgctggactttgattatgtgtgcagcagagatgagcccagcgtggccgccatggtgtaccccttcaccggggaccacaagcagaagttctactggggccacaaggagatcctgatccctgtgttcaagaacatggctgatgccatgaggaagcaccctgaggtggatgtgctgatcaactttgccagcctgcggagcgcctatgacagcaccatggagaccatgaactatgcccagatccgcaccatcgccatcatcgccgagggcatccctgaggccctgaccaggaagctgatcaagaaggctgaccagaagggcgtgaccatcatcggccctgccaccgtgggcggcatcaagccaggctgcttcaagattggcaacacaggaggcatgctggacaacatcctggccagcaagctgtacagacctggctctgtggcctacgtgagccgcagcggcggcatgagcaatgagctgaacaacatcatcagcaggaccacagatggagtgtatgaaggagtggccatcggcggggaccgctacccaggcagcaccttcatggaccacgtgctgcgctaccaggacaccccaggagtgaagatgattgtggtgctgggggagatcggcggcacagaggagtacaagatctgccggggcatcaaggagggccgcctgaccaagcccatcgtgtgctggtgcatcggcacctgtgccaccatgttcagcagcgaggtgcagtttggacatgctggggcctgtgccaaccaggccagcgagacagctgtggccaagaaccaggccctgaaggaggccggcgtgtttgtgcccaggagctttgatgagctgggggagatcatccagagcgtgtatgaggacctggtggccaacggggtgattgtgcctgcccaggaggtgcccccacccaccgtgcccatggactacagctgggcccgggagctgggcctcatcaggaagccagccagcttcatgaccagcatctgtgatgagcggggccaggagctgatctatgccggcatgcccatcacagaggtgttcaaggaggagatgggcatcggcggcgtgctgggcctgctgtggttccagaagaggctgcccaagtacagctgccagttcatcgagatgtgcctgatggtgacagctgaccacggccctgctgtgtctggggcccacaacaccatcatctgtgcccgggccggcaaggacctggtgagcagcctgaccagcggcctgctgaccatcggggacagatttggaggagccctggatgctgctgccaagatgttcagcaaggcctttgattctggcatcatccccatggagtttgtgaacaagatgaagaaggagggcaagctgatcatgggcatcggccaccgggtgaagagcatcaacaacccagacatgagggtgcagatcctgaaggactatgtgcggcagcacttccctgccacccccctgctggactatgccctggaggtggagaagatcaccaccagcaagaagcccaacctgatcctgaatgtggatggcctcatcggcgtggcctttgtggacatgctgaggaactgtggcagcttcacccgggaggaggctgatgagtacattgatattggagccctgaatggcatctttgtgctgggccgctccatgggcttcatcggccactacctggaccagaagaggctgaagcagggcctgtaccgccacccctgggatgacatctcctatgtgctgcctgagcacatgtccatgtag

SEQ ID NO: 18413 - DNA, 1512 bp, synthetic construct
  misc_feature 1..1512: note = Description of Artificial Sequence: Synthetic coding sequence
  source 1..1512: mol_type = other DNA
atgagcagcatcctggaggagcgcatcctgggcgctgacacctctgtggacctggaggagaccggccgggtgctgagcattggagatggcatcgcccgggtgcacggcctgagaaatgtgcaggccgaggagatggtggagttcagcagcggcctgaagggcatgagcctgaacctggagccagacaacgtgggcgtggtggtgtttggaaatgacaagctgatcaaggagggggacatcgtgaagaggactggagccatcgtggatgtgcctgtgggggaggagctgctgggccgggtggtggatgccctgggcaatgccattgatggcaagggccccatcggcagcaagacccggcggcgggtgggcctgaaggcccctggcatcatcccccgcatctctgtgcgggagcccatgcagacaggcatcaaggctgtggacagcctggtgcccatcggccggggccagcgggagctgatcattggagaccggcagacaggcaagaccagcatcgccatcgacaccatcatcaaccagaagcgcttcaatgatggcagtgatgagaagaagaagctgtactgcatctacgtggccatcggccagaagaggagcacagtggcccagctggtgaagaggctgacagatgctgatgccatgaagtacaccatcgtggtgtctgccacagccagtgatgctgcccccctgcagtacctggccccctacagcggctgcagcatgggagagtacttccgggacaatggcaagcacgccctgatcatctatgatgacctgagcaagcaggccgtggcctaccggcagatgagcctgctgctgcggcggcccccaggccgggaggcctacccaggagatgtgttctacctgcacagccggctgctggagcgggccgccaagatgaatgatgcctttggaggcggcagcctgacagccctgcccgtcatcgagacccaggccggagatgtgtctgcctacatccccaccaacgtcatcagcatcacagatggccagatcttcctggagacagagctgttctacaagggcatccggcctgccatcaacgtgggcctgtctgtgtcccgggtgggcagcgctgcccagacccgggccatgaagcaggtggccggcaccatgaagctggagctggcccagtaccgggaggtggccgcctttgcccagtttggaagtgacctggatgctgccacccagcagctgctgagccggggcgtgcggctgacagagctgctgaagcagggccagtacagccccatggccatcgaggagcaggtggccgtcatctatgctggggtgcggggctacctggacaagctggagcccagcaagatcaccaagtttgaaaatgccttcctgagccacgtggtgtcccagcaccaggccctgctgggcaccatccgggcagatggcaagatcagcgagcagagtgatgccaagctgaaggagatcgtgaccaacttcctggccggctttgaggcctag

SEQ ID NO: 18414 - DNA, 177 bp, synthetic construct
  misc_feature 1..177: note = Description of Artificial Sequence: Synthetic coding sequence
  source 1..177: mol_type = other DNA
atgctgtctgtgcgggtggccgctgctgtggtgcgggccctgccccggcgggccggcctggtgtccagaaatgccctgggcagcagcttcatcgccgccaggaacttccacgccagcaacacccacctgcagaagacaggcaagctgctcttcctgagcctgcggaggacctactag

SEQ ID NO: 18415 - DNA, 1596 bp, synthetic construct
  misc_feature 1..1596: note = Description of Artificial Sequence: Synthetic coding sequence
  source 1..1596: mol_type = other DNA
atgctgtctgtgcgggtggccgctgctgtggtgcgggccctgccccggcgggccggcctggtgtccagaaatgccctgggcagcagcttcatcgccgccaggaacttccacgccagcaacacccacctgcagaagacaggaacagctgagatgagcagcatcctggaggagcgcatcctgggcgctgacacctctgtggacctggaggagaccggccgggtgctgagcattggagatggcatcgcccgggtgcacggcctgagaaatgtgcaggccgaggagatggtggagttcagcagcggcctgaagggcatgagcctgaacctggagccagacaacgtgggcgtggtggtgtttggaaatgacaagctgatcaaggagggggacatcgtgaagaggactggagccatcgtggatggccccatcggcagcaagacccggcggcgggtgggcctgaaggcccctggcatcatcccccgcatctctgtgcgggagcccatgcagacaggcatcaaggctgtggacagcctggtgcccatcggccggggccagcgggagctgatcattggagaccggcagacaggcaagaccagcatcgccatcgacaccatcatcaaccagaagcgcttcaatgatggcagtgatgagaagaagaagctgtactgcatctacgtggccatcggccagaagaggagcacagtggcccagctggtgaagaggctgacagatgctgatgccatgaagtacaccatcgtggtgtctgccacagccagtgatgctgcccccctgcagtacctggccccctacagcggctgcagcatgggagagtacttccgggacaatggcaagcacgccctgatcatctatgatgacctgagcaagcaggccgtggcctaccggcagatgagcctgctgctgcggcggcccccaggccgggaggcctacccaggagatgtgttctacctgcacagccggctgctggagcgggccgccaagatgaatgatgcctttggaggcggcagcctgacagccctgcccgtcatcgagacccaggccggagatgtgtctgcctacatccccaccaacgtcatcagcatcacagatggccagatcttcctggagacagagctgttctacaagggcatccggcctgccatcaacgtgggcctgtctgtgtcccgggtgggcagcgctgcccagacccgggccatgaagcaggtggccggcaccatgaagctggagctggcccagtaccgggaggtggccgcctttgcccagtttggaagtgacctggatgctgccacccagcagctgctgagccggggcgtgcggctgacagagctgctgaagcagggccagtacagccccatggccatcgaggagcaggtggccgtcatctatgctggggtgcggggctacctggacaagctggagcccagcaagatcaccaagtttgaaaatgccttcctgagccacgtggtgtcccagcaccaggccctgctgggcaccatccgggcagatggcaagatcagcgagcagagtgatgccaagctgaaggagatcgtgaccaacttcctggccggctttgaggcctag

SEQ ID NO: 18416 - DNA, 1662 bp, synthetic construct
  misc_feature 1..1662: note = Description of Artificial Sequence: Synthetic coding sequence
  source 1..1662: mol_type = other DNA
atgctgtctgtgcgggtggccgctgctgtggtgcgggccctgccccggcgggccggcctggtgtccagaaatgccctgggcagcagcttcatcgccgccaggaacttccacgccagcaacacccacctgcagaagacaggaacagctgagatgagcagcatcctggaggagcgcatcctgggcgctgacacctctgtggacctggaggagaccggccgggtgctgagcattggagatggcatcgcccgggtgcacggcctgagaaatgtgcaggccgaggagatggtggagttcagcagcggcctgaagggcatgagcctgaacctggagccagacaacgtgggcgtggtggtgtttggaaatgacaagctgatcaaggagggggacatcgtgaagaggactggagccatcgtggatgtgcctgtgggggaggagctgctgggccgggtggtggatgccctgggcaatgccattgatggcaagggccccatcggcagcaagacccggcggcgggtgggcctgaaggcccctggcatcatcccccgcatctctgtgcgggagcccatgcagacaggcatcaaggctgtggacagcctggtgcccatcggccggggccagcgggagctgatcattggagaccggcagacaggcaagaccagcatcgccatcgacaccatcatcaaccagaagcgcttcaatgatggcagtgatgagaagaagaagctgtactgcatctacgtggccatcggccagaagaggagcacagtggcccagctggtgaagaggctgacagatgctgatgccatgaagtacaccatcgtggtgtctgccacagccagtgatgctgcccccctgcagtacctggccccctacagcggctgcagcatgggagagtacttccgggacaatggcaagcacgccctgatcatctatgatgacctgagcaagcaggccgtggcctaccggcagatgagcctgctgctgcggcggcccccaggccgggaggcctacccaggagatgtgttctacctgcacagccggctgctggagcgggccgccaagatgaatgatgcctttggaggcggcagcctgacagccctgcccgtcatcgagacccaggccggagatgtgtctgcctacatccccaccaacgtcatcagcatcacagatggccagatcttcctggagacagagctgttctacaagggcatccggcctgccatcaacgtgggcctgtctgtgtcccgggtgggcagcgctgcccagacccgggccatgaagcaggtggccggcaccatgaagctggagctggcccagtaccgggaggtggccgcctttgcccagtttggaagtgacctggatgctgccacccagcagctgctgagccggggcgtgcggctgacagagctgctgaagcagggccagtacagccccatggccatcgaggagcaggtggccgtcatctatgctggggtgcggggctacctggacaagctggagcccagcaagatcaccaagtttgaaaatgccttcctgagccacgtggtgtcccagcaccaggccctgctgggcaccatccgggcagatggcaagatcagcgagcagagtgatgccaagctgaaggagatcgtgaccaacttcctggccggctttgaggcctag

SEQ ID NO: 18417 - DNA, 1662 bp, synthetic construct; identical to SEQ ID NO: 18416
  misc_feature 1..1662: note = Description of Artificial Sequence: Synthetic coding sequence
  source 1..1662: mol_type = other DNA

SEQ ID NO: 18418 - DNA, 1512 bp, synthetic construct; identical to SEQ ID NO: 18413
  misc_feature 1..1512: note = Description of Artificial Sequence: Synthetic coding sequence
  source 1..1512: mol_type = other DNA

SEQ ID NO: 18419 - DNA, 3843 bp, synthetic construct
  misc_feature 1..3843: note = Description of Artificial Sequence: Synthetic coding sequence
  source 1..3843: mol_type = other DNA
atggacctggagggggacagaaatggaggagccaagaagaagaacttcttcaagctgaacaacaagtctgagaaggacaagaaggagaagaagcccaccgtgtctgtgttctccatgttccgctacagcaactggctggacaagctgtacatggtggtgggcaccctggccgccatcatccatggagctggcctgcccctgatgatgctggtgtttggagagatgacagacatctttgccaatgccggcaacctggaggacctgatgagcaacatcaccaacagaagtgacatcaatgacaccggcttcttcatgaacctggaggaggacatgaccaggtatgcctactactacagcggcattggagctggggtgctggtggccgcctacatccaggtgtccttctggtgcctggccgccggccggcagatccacaagatcaggaagcagttcttccacgccatcatgaggcaggagatcggctggtttgatgtgcatgatgtgggggagctgaacacccggctgacagatgatgtgtccaagatcaatgaaggcatcggggacaagattggcatgttcttccagagcatggccaccttcttcaccggcttcatcgtgggcttcacccggggctggaagctgaccctggtgatcctggccatcagccctgtgctgggcctgtctgctgctgtgtgggccaagatcctgagcagcttcacagacaaggagctgctggcctatgccaaggccggggctgtggccgaggaggtgctggccgccatcagaacagtgattgcctttggaggccagaagaaggagctggagcgctacaacaagaacctggaggaggccaagagaattggcatcaagaaggccatcacagccaacatcagcattggagctgccttcctgctgatctatgccagctatgccctggccttctggtacggcaccaccctggtgctgtctggagagtacagcatcggccaggtgctgactgtgttcttctctgtgctgattggagccttctctgtgggccaggccagccccagcattgaggcctttgccaatgcccggggagctgcctatgagatcttcaagatcatcgacaacaagcccagcattgacagctacagcaagagcggccacaagccagacaacatcaagggcaacctggagttcagaaatgtgcacttctcctaccccagcaggaaggaggtgaagatcctgaagggcctgaacctgaaggtgcagagcggccagacagtggccctggtgggcaacagcggctgcggcaagagcaccaccgtgcagctgatgcagaggctgtatgaccccacagagggcatggtgtctgtggatggccaggacatccgcaccatcaacgtgcgcttcctgcgggagatcatcggcgtggtgtcccaggagcctgtgctgtttgccaccaccatcgccgagaacatccgctatggaagagaaaatgtgaccatggatgaaattgagaaggctgtgaaggaggccaatgcctatgacttcatcatgaagctgccccacaagtttgacaccctggtgggggagcggggggcccagctgagcggcggccagaagcagagaattgccatcgcccgggccctggtgaggaaccccaagatcctgctgctggatgaggccaccagcgccctggacacagaaagtgaagctgtggtgcaggtggccctggacaaggccaggaagggccgcaccaccatcgtgattgcccaccggctgagcacagtgagaaatgctgatgtgattgctggctttgatgatggagtcatcgtggagaagggcaaccatgatgagctgatgaaggagaagggcatctacttcaagctggtgaccatgcagacagctggaaatgaggtggagctggagaatgctgctgatgagagcaagtcagaaattgatgccctggagatgagcagcaatgacagccgcagcagcctcatcaggaagaggagcaccaggagatctgtgcggggcagccaggcccaggacaggaagctgagcaccaaggaggccctggatgagagcatcccccctgtgtccttctggaggatcatgaagctgaacctgacagagtggccctactttgtggtgggcgtcttctgtgccatcatcaatggaggcctgcagcctgcctttgccatcatcttcagcaagatcatcggggtcttcaccagaattgatgatcctgagaccaagaggcagaacagcaacctcttcagcctgctcttcctggccctgggcatcatctccttcatcaccttcttcctgcagggcttcaccttcggcaaggccggggagatcctgaccaagaggctgcgctacatggtgttccgctccatgctgcggcaggatgtgtcctggtttgatgaccccaagaacaccactggagccctgaccacccggctggccaatgatgctgcccaggtgaagggggccatcggcagccggctggccgtcatcacccagaacatcgccaacctgggcaccggcatcatcatctccttcatctacggctggcagctgaccctgctgctgctggccatcgtgcccatcatcgccatcgccggcgtggtggagatgaagatgctgagcggccaggccctgaaggacaagaaggagctggagggcagcggcaagatcgccacagaggccatcgagaacttcagaacagtggtgtccctgacccaggagcagaagtttgagcacatgtatgcccagagcctgcaggtgccctacagaaacagcctgaggaaggcccacatcttcggcatcaccttctccttcacccaggccatgatgtacttctcctatgccggctgcttccgctttggagcctacctggtggcccacaagctgatgagctttgaagatgtgctgctggtgttttctgctgtggtgtttggagccatggctgtgggccaggtgtcctcctttgccccagactatgccaaggccaagatctctgctgcccacatcatcatgatcatcgagaagacccccctgattgacagctacagcacagagggcctgatgcccaacaccctggagggcaatgtgacctttggagaggtggtgttcaactaccccaccaggccagacatccctgtgctgcagggcctgagcctggaggtgaagaagggccagaccctggccctggtgggcagcagcggctgtgggaagagcacagtggtgcagctgctggagcgcttctatgaccccctggccggcaaggtgctgctggatggcaaggagatcaagaggctgaatgtgcagtggctgcgggcccacctgggcatcgtgtcccaggagcccatcctgtttgactgcagcattgctgaaaatattgcctatggagacaacagccgggtggtgtcccaggaggagatcgtgcgggccgccaaggaggccaacatccacgccttcatcgagagcctgcccaacaagtacagcaccaaggtgggggacaagggcacccagctgagcggcggccagaagcagagaattgccatcgcccgggccctggtgcggcagccccacatcctgctgctggatgaggccaccagcgccctggacacagagagcgagaaggtggtgcaggaggccctggacaaggcccgggagggccgcacctgcatcgtcatcgcccaccggctgagcaccatccagaatgctgacctgattgtggtgttccagaatggccgggtgaaggagcacggcacccaccagcagctgctggcccagaagggcatctacttctccatggtgtctgtgcaggccggcaccaagaggcagtag

SEQ ID NO: 18420 - DNA, 69 bp, synthetic construct
  misc_feature 1..69: note = Description of Artificial Sequence: Synthetic coding sequence
  source 1..69: mol_type = other DNA
atggacctggagggggacagaaatggaggagccaagaagaagaacttcttcaagctgaacaacaagtag

SEQ ID NO: 18421 - DNA, 147 bp, synthetic construct
  misc_feature 1..147: note = Description of Artificial Sequence: Synthetic coding sequence
  source 1..147: mol_type = other DNA
atggacctggagggggacagaaatggaggagccaagaagaagaacttcttcaagctgaacaacaagtctgagaaggacaagaaggagaagaagcccaccgtgtctgtgttctccatgttccgctacagcaactggctggacaagtag

SEQ ID NO: 18422 - DNA, 3186 bp, synthetic construct
  misc_feature 1..3186: note = Description of Artificial Sequence: Synthetic coding sequence
  source 1..3186: mol_type = other DNA
gccctgagccctgtgatgggcgtgtctgctggctactggcccaagatcctgagcagcttcacagacaaggagctgctggcctatgccaaggccggggctgtggccgaggaggtgctggccgccatccgcaccgtcatcgccttcggcggccagaagaaggagctggagcgctacaacaagaacctggaggaggccaagagaattggcatcaagaaggccatcacagccaacatcagcatcggggccgccttcctgctgatctatgccagctatgccctggccttctggtacggcaccaccctggtgctgagcggggagtacagcatcggccaggtgctgaccgtcttcttctctgtgctgattggagccttctctgtgggccaggccagccccagcattgaggcctttgccaatgcccggggggccgcctatgagatcttcaagatcatcgacaacaagcccagcattgacagctacagcaagagcggccacaagccagacaacatcaagggcaacctggagttcagaaatgtgcacttctcctaccccagcaggaaggaggtgaagatcctgaagggcctgaacctgaaggtgcagagcggccagacagtggccctggtgggcaacagcggctgtgggaagagcaccaccgtgcagctgatgcagaggctgtatgaccccacagagggcatggtgtctgtggatggccaggacatccgcaccatcaacgtgcgcttcctgcgggagatcattggagtggtgtcccaggagcctgtgctgtttgccaccaccatcgccgagaacatccgctatggccgggagaatgtgaccatggatgaaattgagaaggctgtgaaggaggccaatgcctatgacttcatcatgaagctgccccacaagtttgacaccctggtgggggagcggggggcccagctgagcggcggccagaagcagagaattgccatcgcccgggccctggtgaggaaccccaagatcctgctgctggatgaggccaccagcgccctggacacagagagcgaggccgtggtgcaggtggccctggacaaggccaggaaaggaagaaccaccatcgtcatcgcccaccggctgagcacagtgagaaatgctgatgtgattgctggctttgatgatggagtgattgtggagaagggcaaccatgatgagctgatgaaggagaagggcatctacttcaagctggtgaccatgcagacagctggaaatgaggtggagctggagaatgctgctgatgagagcaagtcagaaattgatgccctggagatgagcagcaatgacagccgcagcagcctcatcaggaagaggagcacccggcgctctgtgcggggcagccaggcccaggacaggaagctgagcaccaaggaggccctggatgagagcatcccccctgtgtccttctggaggatcatgaagctgaacctgacagagtggccctactttgtggtgggcgtcttctgtgccatcatcaatggaggcctgcagcctgcctttgccatcatcttcagcaagatcattggagtcttcaccagaattgatgatcctgagaccaagaggcagaacagcaacctcttcagcctgctcttcctggccctgggcatcatctccttcatcaccttcttcctgcagggcttcaccttcggcaaggccggggagatcctgaccaagaggctgcgctacatggtgttccgctccatgctgcggcaggatgtgtcctggtttgatgaccccaagaacaccaccggggccctgaccacccggctggccaatgatgctgcccaggtgaagggggccatcggcagccggctggccgtcatcacccagaacatcgccaacctgggcaccggcatcatcatctccttcatctacggctggcagctgaccctgctgctgctggccatcgtgcccatcatcgccatcgccggcgtggtggagatgaagatgctgagcggccaggccctgaaggacaagaaggagctggagggcagcggcaagatcgccacagaggccatcgagaacttcagaacagtggtgtccctgacccaggagcagaagtttgagcacatgtatgcccagagcctgcaggtgccctacagaaacagcctgaggaaggcccacatcttcggcatcaccttctccttcacccaggccatgatgtacttctcctatgccggctgcttccgctttggagcctacctggtggcccacaagctgatgagctttgaagatgtgctgctggtgttttctgctgtggtgtttggagccatggctgtgggccaggtgagcagctttgccccagactatgccaaggccaagatctctgctgcccacatcatcatgatcatcgagaagacccccctgattgacagctacagcacagagggcctgatgcccaacaccctggagggcaatgtgaccttcggggaggtggtgttcaactaccccaccaggccagacatccctgtgctgcagggcctgagcctggaggtgaagaagggccagaccctggccctggtgggcagcagcggctgcggcaagagcacagtggtgcagctgctggagcgcttctatgaccccctggccggcaaggtgctgctggatggcaaggagatcaagaggctgaatgtgcagtggctgcgggcccacctgggcatcgtgtcccaggagcccatcctgtttgactgcagcattgctgagaacatcgcctacggggacaacagccgggtggtgtcccaggaggagatcgtgcgggccgccaaggaggccaacatccacgccttcatcgagagcctgcccaacaagtacagcaccaaggtgggggacaagggcacccagctgagcggcggccagaagcagagaattgccatcgcccgggccctggtgcggcagccccacatcctgctgctggatgaggccaccagcgccctggacacagaaagtgagaaggtggtgcaggaggccctggacaaggcccgggagggccgcacctgcatcgtgattgcccaccggctgagcaccatccagaatgctgacctgattgtggtgttccagaatggccgggtgaaggagcacggcacccaccagcagctgctggcccagaagggcatctacttctccatggtgtctgtgcaggccggcaccaagaggcagtag

SEQ ID NO: 18423 - DNA, 3651 bp, synthetic construct
  misc_feature 1..3651: note = Description of Artificial Sequence: Synthetic coding sequence
  source 1..3651: mol_type = other DNA
atggacctggagggggacagaaatggaggagccaagaagaagaacttcttcaagctgaacaacaagtctgagaaggacaagaaggagaagaagcccaccgtgtctgtgttctccatgttccgctacagcaactggctggacaagctgtacatggtggtgggcaccctggccgccatcatccatggagctggcctgcccctgatgatgctggtgtttggagagatgacagacatctttgccaatgccggcaacctggaggacctgatgagcaacatcaccaacagaagtgacatcaatgacaccggcttcttcatgaacctggaggaggacatgaccagtgatgtgtccaagatcaatgaaggcatcggggacaagattggcatgttcttccagagcatggccaccttcttcaccggcttcatcgtgggcttcacccggggctggaagctgaccctggtgatcctggccatcagccctgtgctgggcctgtctgctgctgtgtgggccaagatcctgagcagcttcacagacaaggagctgctggcctatgccaaggccggggctgtggccgaggaggtgctggccgccatcagaacagtgattgcctttggaggccagaagaaggagctggagcgctacaacaagaacctggaggaggccaagagaattggcatcaagaaggccatcacagccaacatcagcattggagctgccttcctgctgatctatgccagctatgccctggccttctggtacggcaccaccctggtgctgtctggagagtacagcatcggccaggtgctgactgtgttcttctctgtgctgattggagccttctctgtgggccaggccagccccagcattgaggcctttgccaatgcccggggagctgcctatgagatcttcaagatcatcgacaacaagcccagcattgacagctacagcaagagcggccacaagccagacaacatcaagggcaacctggagttcagaaatgtgcacttctcctaccccagcaggaaggaggtgaagatcctgaagggcctgaacctgaaggtgcagagcggccagacagtggccctggtgggcaacagcggctgcggcaagagcaccaccgtgcagctgatgcagaggctgtatgaccccacagagggcatggtgtctgtggatggccaggacatccgcaccatcaacgtgcgcttcctgcgggagatcatcggcgtggtgtcccaggagcctgtgctgtttgccaccaccatcgccgagaacatccgctatggaagagaaaatgtgaccatggatgaaattgagaaggctgtgaaggaggccaatgcctatgacttcatcatgaagctgccccacaagtttgacaccctggtgggggagcggggggcccagctgagcggcggccagaagcagagaattgccatcgcccgggccctggtgaggaaccccaagatcctgctgctggatgaggccaccagcgccctggacacagaaagtgaagctgtggtgcaggtggccctggacaaggccaggaagggccgcaccaccatcgtgattgcccaccggctgagcacagtgagaaatgctgatgtgattgctggctttgatgatggagtcatcgtggagaagggcaaccatgatgagctgatgaaggagaagggcatctacttcaagctggtgaccatgcagacagctggaaatgaggtggagctggagaatgctgctgatgagagcaagtcagaaattgatgccctggagatgagcagcaatgacagccgcagcagcctcatcaggaagaggagcaccaggagatctgtgcggggcagccaggcccaggacaggaagctgagcaccaaggaggccctggatgagagcatcccccctgtgtccttctggaggatcatgaagctgaacctgacagagtggccctactttgtggtgggcgtcttctgtgccatcatcaatggaggcctgcagcctgcctttgccatcatcttcagcaagatcatcggggtcttcaccagaattgatgatcctgagaccaagaggcagaacagcaacctcttcagcctgctcttcctggccctgggcatcatctccttcatcaccttcttcctgcagggcttcaccttcggcaaggccggggagatcctgaccaagaggctgcgctacatggtgttccgctccatgctgcggcaggatgtgtcctggtttgatgaccccaagaacaccactggagccctgaccacccggctggccaatgatgctgcccaggtgaagggggccatcggcagccggctggccgtcatcacccagaacatcgccaacctgggcaccggcatcatcatctccttcatctacggctggcagctgaccctgctgctgctggccatcgtgcccatcatcgccatcgccggcgtggtggagatgaagatgctgagcggccaggccctgaaggacaagaaggagctggagggcagcggcaagatcgccacagaggccatcgagaacttcagaacagtggtgtccctgacccaggagcagaagtttgagcacatgtatgcccagagcctgcaggtgccctacagaaacagcctgaggaaggcccacatcttcggcatcaccttctccttcacccaggccatgatgtacttctcctatgccggctgcttccgctttggagcctacctggtggcccacaagctgatgagctttgaagatgtgctgctggtgttttctgctgtggtgtttggagccatggctgtgggccaggtgtcctcctttgccccagactatgccaaggccaagatctctgctgcccacatcatcatgatcatcgagaagacccccctgattgacagctacagcacagagggcctgatgcccaacaccctggagggcaatgtgacctttggagaggtggtgttcaactaccccaccaggccagacatccctgtgctgcagggcctgagcctggaggtgaagaagggccagaccctggccctggtgggcagcagcggctgtgggaagagcacagtggtgcagctgctggagcgcttctatgaccccctggccggcaaggtgctgctggatggcaaggagatcaagaggctgaatgtgcagtggctgcgggcccacctgggcatcgtgtcccaggagcccatcctgtttgactgcagcattgctgaaaatattgcctatggagacaacagccgggtggtgtcccaggaggagatcgtgcgggccgccaaggaggccaacatccacgccttcatcgagagcctgcccaacaagtacagcaccaaggtgggggacaagggcacccagctgagcggcggccagaagcagagaattgccatcgcccgggccctggtgcggcagccccacatcctgctgctggatgaggccaccagcgccctggacacagagagcgagaaggtggtgcaggaggccctggacaaggcccgggagggccgcacctgcatcgtcatcgcccaccggctgagcaccatccagaatgctgacctgattgtggtgttccagaatggccgggtgaaggagcacggcacccaccagcagctgctggcccagaagggcatctacttctccatggtgtctgtgcaggccggcaccaagaggcagtag

SEQ ID NO: 18424 - DNA, 4401 bp, synthetic construct
  misc_feature 1..4401: note = Description of Artificial Sequence: Synthetic coding sequence
  source 1..4401: mol_type = other DNA
atggccctgcggggcttctgcagcgcagatggcagtgaccccctgtgggactggaatgtgacctggaacaccagcaacccagacttcaccaagtgcttccagaacacagtgctggtgtgggtgccctgcttctacctgtgggcctgcttccccttctacttcctgtacctgagcagacatgaccggggctacatccagatgacccccctgaacaagaccaagacagccctgggcttcctgctgtggatcgtgtgctgggccgacctcttctacagcttctgggagaggagccggggcatcttcctggcccctgtgttcctggtgagccccaccctgctgggcatcaccatgctgctggccaccttcctgatccagctggagaggaggaagggcgtgcagagcagcggcatcatgctgaccttctggctggtggccctggtgtgtgccctggccatcctgcggagcaagatcatgacagccctgaaggaggatgcccaggtggacctcttccgggacatcaccttctacgtgtacttcagcctgctgctgatccagctggtgctgagctgcttcagtgacaggagccccctcttcagcgagaccatccatgaccccaacccctgcccagagagcagcgccagcttcctgagccgcatcaccttctggtggatcaccggcctcatcgtgcggggctaccggcagcccctggagggcagtgacctgtggagcctgaacaaggaggacaccagcgagcaggtggtgcctgtgctggtgaagaactggaagaaggaatgtgccaagaccaggaagcagcctgtgaaggtggtgtacagcagcaaggaccctgcccagcccaaggagagcagcaaggtggatgccaatgaggaggtggaggccctgattgtgaagagcccccagaaggagtggaaccccagcctcttcaaggtgctgtacaagaccttcggcccctacttcctgatgtccttcttcttcaaggccatccatgacctgatgatgttttctggcccccagatcctgaagctgctgatcaagtttgtgaatgacaccaaggccccagactggcagggctacttctacacagtgctgctgtttgtgacagcctgcctgcagaccctggtgctgcaccagtacttccacatctgctttgtgtctggcatgaggatcaagacagctgtgattggagctgtgtacaggaaggccctggtgatcaccaacagcgccaggaagagcagcacagtgggggagatcgtgaacctgatgtctgtggatgcccagcgcttcatggacctggccacctacatcaacatgatctggagcgcccccctgcaggtgatcctggccctgtacctgctgtggctgaacctgggccccagcgtgctggccggcgtggccgtgatggtgctgatggtgcctgtgaatgctgtgatggccatgaagaccaagacctaccaggtggcccacatgaagagcaaggacaaccgcatcaagctgatgaatgagatcctgaatggcatcaaggtgctgaagctgtatgcctgggagctggccttcaaggacaaggtgctggccatccggcaggaggagctgaaggtgctgaagaagagcgcctacctgtctgctgtgggcaccttcacctgggtgtgcacccccttcctggtggccctgtgcacctttgctgtgtatgtgaccattgatgagaacaacatcctggatgcccagacagcctttgtgtccctggccctcttcaacatcctgcgcttccccctgaacatcctgcccatggtgatcagcagcatcgtgcaggcctctgtgtccctgaagaggctgcgcatcttcctgagccatgaggagctggagccagacagcattgaaagaagacctgtgaaggatggcggcggcaccaacagcatcaccgtgagaaatgccaccttcacctgggcccggagtgacccccccaccctgaatggcatcaccttcagcatccctgagggcgccctggtggccgtggtgggccaggtgggctgtgggaagagcagcctgctgagcgccctgctggccgagatggacaaggtggagggccacgtggccatcaagggctctgtggcctacgtgccccagcaggcctggatccagaatgacagcctgcgggagaacatcctgtttggctgccagctggaggagccctactacagaagtgtcatccaggcctgtgccctgctgcctgacctggagatcctgcccagcggggacagaacagaaattggagagaagggcgtgaacctgagcggcggccagaagcagagggtgtccctggcccgggctgtgtacagcaatgctgacatctacctgtttgatgaccccctgtctgctgtggatgcccacgtgggcaagcacatctttgaaaatgtgattggccccaagggcatgctgaagaacaagacccgcatcctggtgacccacagcatgagctacctgccccaggtggatgtgatcatcgtgatgtctgggggcaagatcagcgagatgggcagctaccaggagctgctggccagagatggagcctttgctgagttcctgcggacctacgccagcacagagcaggagcaggatgctgaggagaatggagtgactggagtgtctggccctgggaaggaggccaagcagatggagaatggcatgctggtgacagattctgctgggaagcagctgcagaggcagctgagcagcagcagcagctacagcggggacatcagccgccaccacaacagcacagctgagctgcagaaggccgaggccaagaaggaggagacctggaagctgatggaggccgacaaggcccagacaggccaggtgaagctgtctgtgtactgggactacatgaaggccatcggcctcttcatctccttcctgagcatcttcctgttcatgtgcaaccacgtgtctgccctggccagcaactactggctgagcctgtggacagatgaccccatcgtgaatggcacccaggagcacaccaaggtgcggctgtctgtgtatggagccctgggcatcagccagggcattgctgtgtttggctacagcatggctgtgtccattggaggcatcctggccagccgctgcctgcacgtggacctgctgcacagcatcctgcggagccccatgtccttctttgagaggaccccatctggcaacctggtgaaccgcttcagcaaggagctggacacagtggacagcatgatccctgaggtgatcaagatgttcatgggcagcctcttcaacgtcatcggggcctgcatcgtcatcctgctggccacccccatcgccgccatcatcatcccccccctgggcctcatctacttctttgtgcagcgcttctacgtggccagcagccggcagctgaagaggctggagagcgtgagccgcagccctgtgtacagccacttcaatgagaccctgctgggcgtgtctgtcatccgggcctttgaggagcaggagcgcttcatccaccagagcgacctgaaggtggatgagaaccagaaggcctactaccccagcatcgtggccaaccgctggctggccgtgcggctggagtgtgtgggcaactgcatcgtgctgtttgctgccctgtttgctgtgatcagccgccacagcctgtctgctggcctggtgggcctgtctgtgtcctacagcctgcaggtgaccacctacctgaactggctggtgaggatgagcagcgagatggagaccaacatcgtggccgtggagcggctgaaggagtacagcgagacagagaaggaggccccctggcagatccaggagacagccccacccagctcctggccccaggtgggccgggtggagttcaggaactactgcctgcgctaccgggaggacctggactttgtgctgcggcacatcaacgtgaccatcaatggaggagagaaggtgggcatcgtgggccgcactggagctgggaagagcagcctgaccctgggcctcttccgcatcaatgaatctgctgagggggagatcatcattgatggcatcaacatcgccaagattggcctgcatgacctgcgcttcaagatcaccatcatcccccaggaccctgtgctcttcagcggcagcctgaggatgaacctggaccccttcagccagtacagtgatgaggaggtgtggaccagcctggagctggcccacctgaaggactttgtgtctgccctgcctgacaagctggaccatgaatgtgccgagggcggggagaacctgcgggtgattgtgctggacaagggggagatccaggagtatggagcccccagcgacctgctgcagcagaggggcctcttctacagcatggccaaggatgctggcctggtgtag

SEQ ID NO: 18425 - DNA, 4428 bp, synthetic construct
  misc_feature 1..4428: note = Description of Artificial Sequence: Synthetic coding sequence
  source 1..4428: mol_type = other DNA
atggccctgcggggcttctgcagcgcagatggcagtgaccccctgtgggactggaatgtgacctggaacaccagcaacccagacttcaccaagtgcttccagaacacagtgctggtgtgggtgccctgcttctacctgtgggcctgcttccccttctacttcctgtacctgagcagacatgaccggggctacatccagatgacccccctgaacaagaccaagacagccctgggcttcctgctgtggatcgtgtgctgggccgacctcttctacagcttctgggagaggagccggggcatcttcctggcccctgtgttcctggtgagccccaccctgctgggcatcaccatgctgctggccaccttcctgatccagctggagaggaggaagggcgtgcagagcagcggcatcatgctgaccttctggctggtggccctggtgtgtgccctggccatcctgcggagcaagatcatgacagccctgaaggaggatgcccaggtggacctcttccgggacatcaccttctacgtgtacttcagcctgctgctgatccagctggtgctgagctgcttcagtgacaggagccccctcttcagcgagaccatccatgaccccaacccctgcccagagagcagcgccagcttcctgagccgcatcaccttctggtggatcaccggcctcatcgtgcggggctaccggcagcccctggagggcagtgacctgtggagcctgaacaaggaggacaccagcgagcaggtggtgcctgtgctggtgaagaactggaagaaggaatgtgccaagaccaggaagcagcctgtgaaggtggtgtacagcagcaaggaccctgcccagcccaaggagagcagcaaggtggatgccaatgaggaggtggaggccctgattgtgaagagcccccagaaggagtggaaccccagcctcttcaaggtgctgtacaagaccttcggcccctacttcctgatgtccttcttcttcaaggccatccatgacctgatgatgttttctggcccccagatcctgaagctgctgatcaagtttgtgaatgacaccaaggccccagactggcagggctacttctacacagtgctgctgtttgtgacagcctgcctgcagaccctggtgctgcaccagtacttccacatctgctttgtgtctggcatgaggatcaagacagctgtgattggagctgtgtacaggaaggccctggtgatcaccaacagcgccaggaagagcagcacagtgggggagatcgtgaacctgatgtctgtggatgcccagcgcttcatggacctggccacctacatcaacatgatctggagcgcccccctgcaggtgatcctggccctgtacctgctgtggctgaacctgggccccagcgtgctggccggcgtggccgtgatggtgctgatggtgcctgtgaatgctgtgatggccatgaagaccaagacctaccaggtggcccacatgaagagcaaggacaaccgcatcaagctgatgaatgagatcctgaatggcatcaaggtgctgaagctgtatgcctgggagctggccttcaaggacaaggtgctggccatccggcaggaggagctgaaggtgctgaagaagagcgcctacctgtctgctgtgggcaccttcacctgggtgtgcacccccttcctggtggccctgtgcacctttgctgtgtatgtgaccattgatgagaacaacatcctggatgcccagacagcctttgtgtccctggccctcttcaacatcctgcgcttccccctgaacatcctgcccatggtgatcagcagcatcgtgcaggcctctgtgtccctgaagaggctgcgcatcttcctgagccatgaggagctggagccagacagcattgaaagaagacctgtgaaggatggcggcggcaccaacagcatcaccgtgagaaatgccaccttcacctgggcccggagtgacccccccaccctgaatggcatcaccttcagcatccctgagggcgccctggtggccgtggtgggccaggtgggctgtgggaagagcagcctgctgagcgccctgctggccgagatggacaaggtggagggccacgtggccatcaagggctctgtggcctacgtgccccagcaggcctggatccagaatgacagcctgcgggagaacatcctgtttggctgccagctggaggagccctactacagaagtgtcatccaggcctgtgccctgctgcctgacctggagatcctgcccagcggggacagaacagaaattggagagaagacccgcatcctggtgacccacagcatgagctacctgccccaggtggatgtgatcatcgtgatgtctgggggcaagatcagcgagatgggcagctaccaggagctgctggccagagatggagcctttgctgagttcctgcggacctacgccagcacagagcaggagcaggatgctgaggagaatggagtgactggagtgtctggccctgggaaggaggccaagcagatggagaatggcatgctggtgacagattctgctgggaagcagctgcagaggcagctgagcagcagcagcagctacagcggggacatcagccgccaccacaacagcacagctgagctgcagaaggccgaggccaagaaggaggagacctggaagctgatggaggccgacaaggcccagacaggccaggtgaagctgtctgtgtactgggactacatgaaggccatcggcctcttcatctccttcctgagcatcttcctgttcatgtgcaaccacgtgtctgccctggccagcaactactggctgagcctgtggacagatgaccccatcgtgaatggcacccaggagcacaccaaggtgcggctgtctgtgtatggagccctgggcatcagccagggcattgctgtgtttggctacagcatggctgtgtccattggaggcatcctggccagccgctgcctgcacgtggacctgctgcacagcatcctgcggagccccatgtccttctttgagaggaccccatctggcaacctggtgaaccgcttcagcaaggagctggacacagtggacagcatgatccctgaggtgatcaagatgttcatgggcagcctcttcaacgtcatcggggcctgcatcgtcatcctgctggccacccccatcgccgccatcatcatcccccccctgggcctcatctacttctttgtgcagcgcttctacgtggccagcagccggcagctgaagaggctggagagcgtgagccgcagccctgtgtacagccacttcaatgagaccctgctgggcgtgtctgtcatccgggcctttgaggagcaggagcgcttcatccaccagagcgacctgaaggtggatgagaaccagaaggcctactaccccagcatcgtggccaaccgctggctggccgtgcggctggagtgtgtgggcaactgcatcgtgctgtttgctgccctgtttgctgtgatcagccgccacagcctgtctgctggcctggtgggcctgtctgtgtcctacagcctgcaggtgaccacctacctgaactggctggtgaggatgagcagcgagatggagaccaacatcgtggccgtggagcggctgaaggagtacagcgagacagagaaggaggccccctggcagatccaggagacagccccacccagctcctggccccaggtgggccgggtggagttcaggaactactgcctgcgctaccgggaggacctggactttgtgctgcggcacatcaacgtgaccatcaatggaggagagaaggtgggcatcgtgggccgcactggagctgggaagagcagcctgaccctgggcctcttccgcatcaatgaatctgctgagggggagatcatcattgatggcatcaacatcgccaagattggcctgcatgacctgcgcttcaagatcaccatcatcccccaggaccctgtgctcttcagcggcagcctgaggatgaacctggaccccttcagccagtacagtgatgaggaggtgtggaccagcctggagctggcccacctgaaggactttgtgtctgccctgcctgacaagctggaccatgaatgtgccgagggcggggagaacctgtctgtgggccagaggcagctggtgtgcctggcccgggccctgctgaggaagaccaagatcctggtgctggatgaggccacagctgctgtggacctggagacagatgacctgatccagagcaccatccgcacccagtttgaggactgcaccgtgctgaccatcgcccaccggctgaacaccatcatggactacaccagggtcatcgtgctggacaagggggagatccaggagtatggagcccccagcgacctgctgcagcagaggggcctcttctacagcatggccaaggatgctggcctggtgtag

SEQ ID NO: 18426 - DNA, 4251 bp, synthetic construct
  misc_feature 1..4251: note = Description of Artificial Sequence: Synthetic coding sequence
  source 1..4251: mol_type = other DNA
atggccctgcggggcttctgcagcgcagatggcagtgaccccctgtgggactggaatgtgacctggaacaccagcaacccagacttcaccaagtgcttccagaacacagtgctggtgtgggtgccctgcttctacctgtgggcctgcttccccttctacttcctgtacctgagcagacatgaccggggctacatccagatgacccccctgaacaagaccaagacagccctgggcttcctgctgtggatcgtgtgctgggccgacctcttctacagcttctgggagaggagccggggcatcttcctggcccctgtgttcctggtgagccccaccctgctgggcatcaccatgctgctggccaccttcctgatccagctggagaggaggaagggcgtgcagagcagcggcatcatgctgaccttctggctggtggccctggtgtgtgccctggccatcctgcggagcaagatcatgacagccctgaaggaggatgcccaggtggacctcttccgggacatcaccttctacgtgtacttcagcctgctgctgatccagctggtgctgagctgcttcagtgacaggagccccctcttcagcgagaccatccatgaccccaacccctgcccagagagcagcgccagcttcctgagccgcatcaccttctggtggatcaccggcctcatcgtgcggggctaccggcagcccctggagggcagtgacctgtggagcctgaacaaggaggacaccagcgagcaggtggtgcctgtgctggtgaagaactggaagaaggaatgtgccaagaccaggaagcagcctgtgaaggtggtgtacagcagcaaggaccctgcccagcccaaggagagcagcaaggtggatgccaatgaggaggtggaggccctgattgtgaagagcccccagaaggagtggaaccccagcctcttcaaggtgctgtacaagaccttcggcccctacttcctgatgtccttcttcttcaaggccatccatgacctgatgatgttttctggcccccagatcctgaagctgctgatcaagtttgtgaatgacaccaaggccccagactggcagggctacttctacacagtgctgctgtttgtgacagcctgcctgcagaccctggtgctgcaccagtacttccacatctgctttgtgtctggcatgaggatcaagacagctgtgattggagctgtgtacaggaaggccctggtgatcaccaacagcgccaggaagagcagcacagtgggggagatcgtgaacctgatgtctgtggatgcccagcgcttcatggacctggccacctacatcaacatgatctggagcgcccccctgcaggtgatcctggccctgtacctgctgtggctgaacctgggccccagcgtgctggccggcgtggccgtgatggtgctgatggtgcctgtgaatgctgtgatggccatgaagaccaagacctaccaggtggcccacatgaagagcaaggacaaccgcatcaagctgatgaatgagatcctgaatggcatcaaggtgctgaagctgtatgcctgggagctggccttcaaggacaaggtgctggccatccggcaggaggagctgaaggtgctgaagaagagcgcctacctgtctgctgtgggcaccttcacctgggtgtgcacccccttcctggtggccctgtgcacctttgctgtgtatgtgaccattgatgagaacaacatcctggatgcccagacagcctttgtgtccctggccctcttcaacatcctgcgcttccccctgaacatcctgcccatggtgatcagcagcatcgtgcaggcctctgtgtccctgaagaggctgcgcatcttcctgagccatgaggagctggagccagacagcattgaaagaagacctgtgaaggatggcggcggcaccaacagcatcaccgtgagaaatgccaccttcacctgggcccggagtgacccccccaccctgaatggcatcaccttcagcatccctgagggcgccctggtggccgtggtgggccaggtgggctgtgggaagagcagcctgctgagcgccctgctggccgagatggacaaggtggagggccacgtggccatcaagacccgcatcctggtgacccacagcatgagctacctgccccaggtggatgtgatcatcgtgatgtctgggggcaagatcagcgagatgggcagctaccaggagctgctggccagagatggagcctttgctgagttcctgcggacctacgccagcacagagcaggagcaggatgctgaagaaaatggagtgactggagtgtctggccctgggaaggaggccaagcagatggagaatggcatgctggtgacagacagcgctgggaagcagctgcagaggcagctgagcagcagcagcagctacagcggggacatcagccgccaccacaacagcacagctgagctgcagaaggccgaggccaagaaggaggagacctggaagctgatggaggccgacaaggcccagacaggccaggtgaagctgtctgtgtactgggactacatgaaggccatcggcctcttcatctccttcctgagcatcttcctgttcatgtgcaaccacgtgtctgccctggccagcaactactggctgagcctgtggacagatgaccccatcgtgaatggcacccaggagcacaccaaggtgcggctgtctgtgtatggagccctgggcatcagccagggcattgctgtgtttggctacagcatggctgtgtccatcggcggcatcctggccagccgctgcctgcacgtggacctgctgcacagcatcctgcggagccccatgtccttctttgagaggacccccagcggcaacctggtgaaccgcttcagcaaggagctggacacagtggacagcatgatccctgaggtgatcaagatgttcatgggcagcctcttcaacgtgattggagcctgcatcgtcatcctgctggccacccccatcgccgccatcatcatcccccccctgggcctcatctacttctttgtgcagcgcttctacgtggccagcagccggcagctgaagaggctggagagcgtgagccgcagccctgtgtacagccacttcaatgagaccctgctgggcgtgtctgtcatccgggcctttgaggagcaggagcgcttcatccaccagagcgacctgaaggtggatgagaaccagaaggcctactaccccagcatcgtggccaaccgctggctggccgtgcggctggagtgtgtgggcaactgcatcgtgctgtttgctgccctgtttgctgtgatcagccgccacagcctgtctgctggcctggtgggcctgtctgtgtcctacagcctgcaggtgaccacctacctgaactggctggtgaggatgagcagcgagatggagaccaacatcgtggccgtggagcggctgaaggagtacagcgagacagagaaggaggccccctggcagatccaggagacagccccacccagctcctggccccaggtgggccgggtggagttcaggaactactgcctgcgctaccgggaggacctggactttgtgctgcggcacatcaacgtgaccatcaatggaggagagaaggtgggcatcgtgggccgcactggagctgggaagagcagcctgaccctgggcctcttccgcatcaatgaatctgctgagggggagatcatcattgatggcatcaacatcgccaagattggcctgcatgacctgcgcttcaagatcaccatcatcccccaggaccctgtgctcttcagcggcagcctgaggatgaacctggaccccttcagccagtacagtgatgaggaggtgtggaccagcctggagctggcccacctgaaggactttgtgtctgccctgcctgacaagctggaccatgaatgtgccgagggcggggagaacctgtctgtgggccagaggcagctggtgtgcctggcccgggccctgctgaggaagaccaagatcctggtgctggatgaggccacagctgctgtggacctggagacagatgacctgatccagagcaccatccgcacccagtttgaggactgcaccgtgctgaccatcgcccaccggctgaacaccatcatggactacaccagggtgattgtgctggacaagggggagatccaggagtatggagcccccagcgacctgctgcagcagaggggcctcttctacagcatggccaaggatgctggcctggtgtag

SEQ ID NO: 18427 - DNA, 4419 bp, synthetic construct
  misc_feature 1..4419: note = Description of Artificial Sequence: Synthetic coding sequence
  source 1..4419: mol_type = other DNA
atggccctgcggggcttctgcagcgcagatggcagtgaccccctgtgggactggaatgtgacctggaacaccagcaacccagacttcaccaagtgcttccagaacacagtgctggtgtgggtgccctgcttctacctgtgggcctgcttccccttctacttcctgtacctgagcagacatgaccggggctacatccagatgacccccctgaacaagaccaagacagccctgggcttcctgctgtggatcgtgtgctgggccgacctcttctacagcttctgggagaggagccggggcatcttcctggcccctgtgttcctggtgagccccaccctgctgggcatcaccatgctgctggccaccttcctgatccagctggagaggaggaagggcgtgcagagcagcggcatcatgctgaccttctggctggtggccctggtgtgtgccctggccatcctgcggagcaagatcatgacagccctgaaggaggatgcccaggtggacctcttccgggacatcaccttctacgtgtacttcagcctgctgctgatccagctggtgctgagctgcttcagtgacaggagccccctcttcagcgagaccatccatgaccccaacccctgcccagagagcagcgccagcttcctgagccgcatcaccttctggtggatcaccggcctcatcgtgcggggctaccggcagcccctggagggcagtgacctgtggagcctgaacaaggaggacaccagcgagcaggtggtgcctgtgctggtgaagaactggaagaaggaatgtgccaagaccaggaagcagcctgtgaaggtggtgtacagcagcaaggaccctgcccagcccaaggagagcagcaaggtggatgccaatgaggaggtggaggccctgattgtgaagagcccccagaaggagtggaaccccagcctcttcaaggtgctgtacaagaccttcggcccctacttcctgatgtccttcttcttcaaggccatccatgacctgatgatgttttctggcccccagatcctgaagctgctgatcaagtttgtgaatgacaccaaggccccagactggcagggctacttctacacagtgctgctgtttgtgacagcctgcctgcagaccctggtgctgcaccagtacttccacatctgctttgtgtctggcatgaggatcaagacagctgtgattggagctgtgtacaggaaggccctggtgatcaccaacagcgccaggaagagcagcacagtgggggagatcgtgaacctgatgtctgtggatgcccagcgcttcatggacctggccacctacatcaacatgatctggagcgcccccctgcaggtgatcctggccctgtacctgctgtggctgaacctgggccccagcgtgctggccggcgtggccgtgatggtgctgatggtgcctgtgaatgctgtgatggccatgaagaccaagacctaccaggtggcccacatgaagagcaaggacaaccgcatcaagctgatgaatgagatcctgaatggcatcaaggtgctgaagctgtatgcctgggagctggccttcaaggacaaggtgctggccatccggcaggaggagctgaaggtgctgaagaagagcgcctacctgtctgctgtgggcaccttcacctgggtgtgcacccccttcctggtggccctgtgcacctttgctgtgtatgtgaccattgatgagaacaacatcctggatgcccagacagcctttgtgtccctggccctcttcaacatcctgcgcttccccctgaacatcctgcccatggtgatcagcagcatcgtgcaggcctctgtgtccctgaagaggctgcgcatcttcctgagccatgaggagctggagccagacagcattgaaagaagacctgtgaaggatggcggcggcaccaacagcatcaccgtgagaaatgccaccttcacctgggcccggagtgacccccccaccctgaatggcatcaccttcagcatccctgagggcgccctggtggccgtggtgggccaggtgggctgtgggaagagcagcctgctgagcgccctgctggccgagatggacaaggtggagggccacgtggccatcaagggcgtgaacctgagcggcggccagaagcagagggtgtccctggcccgggctgtgtacagcaatgctgacatctacctgtttgatgaccccctgtctgctgtggatgcccacgtgggcaagcacatctttgaaaatgtcatcggccccaagggcatgctgaagaacaagacccgcatcctggtgacccacagcatgagctacctgccccaggtggatgtgatcatcgtgatgtctgggggcaagatcagcgagatgggcagctaccaggagctgctggccagagatggagcctttgctgagttcctgcggacctacgccagcacagagcaggagcaggatgctgaagaaaatggagtgactggagtgtctggccctgggaaggaggccaagcagatggagaatggcatgctggtgacagacagcgctgggaagcagctgcagaggcagctgagcagcagcagcagctacagcggggacatcagccgccaccacaacagcacagctgagctgcagaaggccgaggccaagaaggaggagacctggaagctgatggaggccgacaaggcccagacaggccaggtgaagctgtctgtgtactgggactacatgaaggccatcggcctcttcatctccttcctgagcatcttcctgttcatgtgcaaccacgtgtctgccctggccagcaactactggctgagcctgtggacagatgaccccatcgtgaatggcacccaggagcacaccaaggtgcggctgtctgtgtatggagccctgggcatcagccagggcattgctgtgtttggctacagcatggctgtgtccatcggcggcatcctggccagccgctgcctgcacgtggacctgctgcacagcatcctgcggagccccatgtccttctttgagaggacccccagcggcaacctggtgaaccgcttcagcaaggagctggacacagtggacagcatgatccctgaggtgatcaagatgttcatgggcagcctcttcaacgtgattggagcctgcatcgtcatcctgctggccacccccatcgccgccatcatcatcccccccctgggcctcatctacttctttgtgcagcgcttctacgtggccagcagccggcagctgaagaggctggagagcgtgagccgcagccctgtgtacagccacttcaatgagaccctgctgggcgtgtctgtcatccgggcctttgaggagcaggagcgcttcatccaccagagcgacctgaaggtggatgagaaccagaaggcctactaccccagcatcgtggccaaccgctggctggccgtgcggctggagtgtgtgggcaactgcatcgtgctgtttgctgccctgtttgctgtgatcagccgccacagcctgtctgctggcctggtgggcctgtctgtgtcctacagcctgcaggtgaccacctacctgaactggctggtgaggatgagcagcgagatggagaccaacatcgtggccgtggagcggctgaaggagtacagcgagacagagaaggaggccccctggcagatccaggagacagccccacccagctcctggccccaggtgggccgggtggagttcaggaactactgcctgcgctaccgggaggacctggactttgtgctgcggcacatcaacgtgaccatcaatggaggagagaaggtgggcatcgtgggccgcactggagctgggaagagcagcctgaccctgggcctcttccgcatcaatgaatctgctgagggggagatcatcattgatggcatcaacatcgccaagattggcctgcatgacctgcgcttcaagatcaccatcatcccccaggaccctgtgctcttcagcggcagcctgaggatgaacctggaccccttcagccagtacagtgatgaggaggtgtggaccagcctggagctggcccacctgaaggactttgtgtctgccctgcctgacaagctggaccatgaatgtgccgagggcggggagaacctgtctgtgggccagaggcagctggtgtgcctggcccgggccctgctgaggaagaccaagatcctggtgctggatgaggccacagctgctgtggacctggagacagatgacctgatccagagcaccatccgcacccagtttgaggactgcaccgtgctgaccatcgcccaccggctgaacaccatcatggactacaccagggtgattgtgctggacaagggggagatccaggagtatggagcccccagcgacctgctgcagcagaggggcctcttctacagcatggccaaggatgctggcctggtgtag

SEQ ID NO: 18428 - DNA, 4626 bp, synthetic construct
  misc_feature 1..4626: note = Description of Artificial Sequence: Synthetic coding sequence
  source 1..4626: mol_type = other DNA
atggccctgcggggcttctgcagcgcagatggcagtgaccccctgtgggactggaatgtgacctggaacaccagcaacccagacttcaccaagtgcttccagaacacagtgctggtgtgggtgccctgcttctacctgtgggcctgcttccccttctacttcctgtacctgagcagacatgaccggggctacatccagatgacccccctgaacaagaccaagacagccctgggcttcctgctgtggatcgtgtgctgggccgacctcttctacagcttctgggagaggagccggggcatcttcctggcccctgtgttcctggtgagccccaccctgctgggcatcaccatgctgctggccaccttcctgatccagctggagaggaggaagggcgtgcagagcagcggcatcatgctgaccttctggctggtggccctggtgtgtgccctggccatcctgcggagcaagatcatgacagccctgaaggaggatgcccaggtggacctcttccgggacatcaccttctacgtgtacttcagcctgctgctgatccagctggtgctgagctgcttcagtgacaggagccccctcttcagcgagaccatccatgaccccaacccctgcccagagagcagcgccagcttcctgagccgcatcaccttctggtggatcaccggcctcatcgtgcggggctaccggcagcccctggagggcagtgacctgtggagcctgaacaaggaggacaccagcgagcaggtggtgcctgtgctggtgaagaactggaagaaggaatgtgccaagaccaggaagcagcctgtgaaggtggtgtacagcagcaaggaccctgcccagcccaaggagagcagcaaggtggatgccaatgaggaggtggaggccctgattgtgaagagcccccagaaggagtggaaccccagcctcttcaaggtgctgtacaagaccttcggcccctacttcctgatgtccttcttcttcaaggccatccatgacctgatgatgttttctggcccccagatcctgaagctgctgatcaagtttgtgaatgacaccaaggccccagactggcagggctacttctacacagtgctgctgtttgtgacagcctgcctgcagaccctggtgctgcaccagtacttccacatctgctttgtgtctggcatgaggatcaagacagctgtgattggagctgtgtacaggaaggccctggtgatcaccaacagcgccaggaagagcagcacagtgggggagatcgtgaacctgatgtctgtggatgcccagcgcttcatggacctggccacctacatcaacatgatctggagcgcccccctgcaggtgatcctggccctgtacctgctgtggctgaacctgggccccagcgtgctggccggcgtggccgtgatggtgctgatggtgcctgtgaatgctgtgatggccatgaagaccaagacctaccaggtggcccacatgaagagcaaggacaaccgcatcaagctgatgaatgagatcctgaatggcatcaaggtgctgaagctgtatgcctgggagctggccttcaaggacaaggtgctggccatccggcaggaggagctgaaggtgctgaagaagagcgcctacctgtctgctgtgggcaccttcacctgggtgtgcacccccttcctggtggccctgtgcacctttgctgtgtatgtgaccattgatgagaacaacatcctggatgcccagacagcctttgtgtccctggccctcttcaacatcctgcgcttccccctgaacatcctgcccatggtgatcagcagcatcgtgcaggcctctgtgtccctgaagaggctgcgcatcttcctgagccatgaggagctggagccagacagcattgaaagaagacctgtgaaggatggcggcggcaccaacagcatcaccgtgagaaatgccaccttcacctgggcccggagtgacccccccaccctgaatggcatcaccttcagcatccctgagggcgccctggtggccgtggtgggccaggtgggctgtgggaagagcagcctgctgagcgccctgctggccgagatggacaaggtggagggccacgtggccatcaagggctctgtggcctacgtgccccagcaggcctggatccagaatgacagcctgcgggagaacatcctgtttggctgccagctggaggagccctactacagaagtgtcatccaggcctgtgccctgctgcctgacctggagatcctgcccagcggggacagaacagaaattggagagaagggcgtgaacctgagcggcggccagaagcagagggtgtccctggcccgggctgtgtacagcaatgctgacatctacctgtttgatgaccccctgtctgctgtggatgcccacgtgggcaagcacatctttgaaaatgtgattggccccaagggcatgctgaagaacaagacccgcatcctggtgacccacagcatgagctacctgccccaggtggatgtgatcatcgtgatgtctgggggcaagatcagcgagatgggcagctaccaggagctgctggccagagatggagcctttgctgagttcctgcggacctacgccagcacagagcaggagcaggatgctgaggagaatggcagcacagtgatggatgaggaggaggccggcgtgactggagtgtctggccctgggaaggaggccaagcagatggagaatggcatgctggtgacagattctgctgggaagcagctgcagaggcagctgagcagcagcagcagctacagcggggacatcagccgccaccacaacagcacagctgagctgcagaaggccgaggccaagaaggaggagacctggaagctgatggaggccgacaaggcccagacaggccaggtgaagctgtctgtgtactgggactacatgaaggccatcggcctcttcatctccttcctgagcatcttcctgttcatgtgcaaccacgtgtctgccctggccagcaactactggctgagcctgtggacagatgaccccatcgtgaatggcacccaggagcacaccaaggtgcggctgtctgtgtatggagccctgggcatcagccagggcattgctgtgtttggctacagcatggctgtgtccattggaggcatcctggccagccgctgcctgcacgtggacctgctgcacagcatcctgcggagccccatgtccttctttgagaggaccccatctggcaacctggtgaaccgcttcagcaaggagctggacacagtggacagcatgatccctgaggtgatcaagatgttcatgggcagcctcttcaacgtcatcggggcctgcatcgtcatcctgctggccacccccatcgccgccatcatcatcccccccctgggcctcatctacttctttgtgcagcgcttctacgtggccagcagccggcagctgaagaggctggagagcgtgagccgcagccctgtgtacagccacttcaatgagaccctgctgggcgtgtctgtcatccgggcctttgaggagcaggagcgcttcatccaccagagcgacctgaaggtggatgagaaccagaaggcctactaccccagcatcgtggccaaccgctggctggccgtgcggctggagtgtgtgggcaactgcatcgtgctgtttgctgccctgtttgctgtgatcagccgccacagcctgtctgctggcctggtgggcctgtctgtgtcctacagcctgcaggtgaccacctacctgaactggctggtgaggatgagcagcgagatggagaccaacatcgtggccgtggagcggctgaaggagtacagcgagacagagaaggaggccccctggcagatccaggagacagccccacccagctcctggccccaggtgggccgggtggagttcaggaactactgcctgcgctaccgggaggacctggactttgtgctgcggcacatcaacgtgaccatcaatggaggagagaaggtgggcatcgtgggccgcactggagctgggaagagcagcctgaccctgggcctcttccgcatcaatgaatctgctgagggggagatcatcattgatggcatcaacatcgccaagattggcctgcatgacctgcgcttcaagatcaccatcatcccccaggaccctgtgctcttcagcggcagcctgaggatgaacctggaccccttcagccagtacagtgatgaggaggtgtggaccagcctggagctggcccacctgaaggactttgtgtctgccctgcctgacaagctggaccatgaatgtgccgagggcggggagaacctgtctgtgggccagaggcagctggtgtgcctggcccgggccctgctgaggaagaccaagatcctggtgctggatgaggccacagctgctgtggacctggagacagatgacctgatccagagcaccatccgcacccagtttgaggactgcaccgtgctgaccatcgcccaccggctgaacaccatcatggactacaccagggtcatcgtgctggacaagggggagatccaggagtatggagcccccagcgacctgctgcagcagaggggcctcttctacagcatggccaaggatgctggcctggtgtag

SEQ ID NO: 18429 - DNA, 4596 bp, synthetic construct
  misc_feature 1..4596: note = Description of Artificial Sequence: Synthetic coding sequence
  source 1..4596: mol_type = other DNA
atggccctgcggggcttctgcagcgcagatggcagtgaccccctgtgggactggaatgtgacctggaacaccagcaacccagacttcaccaagtgcttccagaacacagtgctggtgtgggtgccctgcttctacctgtgggcctgcttccccttctacttcctgtacctgagcagacatgaccggggctacatccagatgacccccctgaacaagaccaagacagccctgggcttcctgctgtggatcgtgtgctgggccgacctcttctacagcttctgggagaggagccggggcatcttcctggcccctgtgttcctggtgagccccaccctgctgggcatcaccatgctgctggccaccttcctgatccagctggagaggaggaagggcgtgcagagcagcggcatcatgctgaccttctggctggtggccctggtgtgtgccctggccatcctgcggagcaagatcatgacagccctgaaggaggatgcccaggtggacctcttccgggacatcaccttctacgtgtacttcagcctgctgctgatccagctggtgctgagctgcttcagtgacaggagccccctcttcagcgagaccatccatgaccccaacccctgcccagagagcagcgccagcttcctgagccgcatcaccttctggtggatcaccggcctcatcgtgcggggctaccggcagcccctggagggcagtgacctgtggagcctgaacaaggaggacaccagcgagcaggtggtgcctgtgctggtgaagaactggaagaaggaatgtgccaagaccaggaagcagcctgtgaaggtggtgtacagcagcaaggaccctgcccagcccaaggagagcagcaaggtggatgccaatgaggaggtggaggccctgattgtgaagagcccccagaaggagtggaaccccagcctcttcaaggtgctgtacaagaccttcggcccctacttcctgatgtccttcttcttcaaggccatccatgacctgatgatgttttctggcccccagatcctgaagctgctgatcaagtttgtgaatgacaccaaggccccagactggcagggctacttctacacagtgctgctgtttgtgacagcctgcctgcagaccctggtgctgcaccagtacttccacatctgctttgtgtctggcatgaggatcaagacagctgtgattggagctgtgtacaggaaggccctggtgatcaccaacagcgccaggaagagcagcacagtgggggagatcgtgaacctgatgtctgtggatgcccagcgcttcatggacctggccacctacatcaacatgatctggagcgcccccctgcaggtgatcctggccctgtacctgctgtggctgaacctgggccccagcgtgctggccggcgtggccgtgatggtgctgatggtgcctgtgaatgctgtgatggccatgaagaccaagacctaccaggtggcccacatgaagagcaaggacaaccgcatcaagctgatgaatgagatcctgaatggcatcaaggtgctgaagctgtatgcctgggagctggccttcaaggacaaggtgctggccatccggcaggaggagctgaaggtgctgaagaagagcgcctacctgtctgctgtgggcaccttcacctgggtgtgcacccccttcctggtggccctgtgcacctttgctgtgtatgtgaccattgatgagaacaacatcctggatgcccagacagcctttgtgtccctggccctcttcaacatcctgcgcttccccctgaacatcctgcccatggtgatcagcagcatcgtgcaggcctctgtgtccctgaagaggctgcgcatcttcctgagccatgaggagctggagccagacagcattgaaagaagacctgtgaaggatggcggcggcaccaacagcatcaccgtgagaaatgccaccttcacctgggcccggagtgacccccccaccctgaatggcatcaccttcagcatccctgagggcgccctggtggccgtggtgggccaggtgggctgtgggaagagcagcctgctgagcgccctgctggccgagatggacaaggtggagggccacgtggccatcaagggctctgtggcctacgtgccccagcaggcctggatccagaatgacagcctgcgggagaacatcctgtttggctgccagctggaggagccctactacagaagtgtcatccaggcctgtgccctgctgcctgacctggagatcctgcccagcggggacagaacagaaattggagagaagggcgtgaacctgagcggcggccagaagcagagggtgtccctggcccgggctgtgtacagcaatgctgacatctacctgtttgatgaccccctgtctgctgtggatgcccacgtgggcaagcacatctttgaaaatgtgattggccccaagggcatgctgaagaacaagacccgcatcctggtgacccacagcatgagctacctgccccaggtggatgtgatcatcgtgatgtctgggggcaagatcagcgagatgggcagctaccaggagctgctggccagagatggagcctttgctgagttcctgcggacctacgccagcacagagcaggagcaggatgctgaggagaatggagtgactggagtgtctggccctgggaaggaggccaagcagatggagaatggcatgctggtgacagattctgctgggaagcagctgcagaggcagctgagcagcagcagcagctacagcggggacatcagccgccaccacaacagcacagctgagctgcagaaggccgaggccaagaaggaggagacctggaagctgatggaggccgacaaggcccagacaggccaggtgaagctgtctgtgtactgggactacatgaaggccatcggcctcttcatctccttcctgagcatcttcctgttcatgtgcaaccacgtgtctgccctggccagcaactactggctgagcctgtggacagatgaccccatcgtgaatggcacccaggagcacaccaaggtgcggctgtctgtgtatggagccctgggcatcagccagggcattgctgtgtttggctacagcatggctgtgtccattggaggcatcctggccagccgctgcctgcacgtggacctgctgcacagcatcctgcggagccccatgtccttctttgagaggaccccatctggcaacctggtgaaccgcttcagcaaggagctggacacagtggacagcatgatccctgaggtgatcaagatgttcatgggcagcctcttcaacgtcatcggggcctgcatcgtcatcctgctggccacccccatcgccgccatcatcatcccccccctgggcctcatctacttctttgtgcagcgcttctacgtggccagcagccggcagctgaagaggctggagagcgtgagccgcagccctgtgtacagccacttcaatgagaccctgctgggcgtgtctgtcatccgggcctttgaggagcaggagcgcttcatccaccagagcgacctgaaggtggatgagaaccagaaggcctactaccccagcatcgtggccaaccgctggctggccgtgcggctggagtgtgtgggcaactgcatcgtgctgtttgctgccctgtttgctgtgatcagccgccacagcctgtctgctggcctggtgggcctgtctgtgtcctacagcctgcaggtgaccacctacctgaactggctggtgaggatgagcagcgagatggagaccaacatcgtggccgtggagcggctgaaggagtacagcgagacagagaaggaggccccctggcagatccaggagacagccccacccagctcctggccccaggtgggccgggtggagttcaggaactactgcctgcgctaccgggaggacctggactttgtgctgcggcacatcaacgtgaccatcaatggaggagagaaggtgggcatcgtgggccgcactggagctgggaagagcagcctgaccctgggcctcttccgcatcaatgaatctgctgagggggagatcatcattgatggcatcaacatcgccaagattggcctgcatgacctgcgcttcaagatcaccatcatcccccaggaccctgtgctcttcagcggcagcctgaggatgaacctggaccccttcagccagtacagtgatgaggaggtgtggaccagcctggagctggcccacctgaaggactttgtgtctgccctgcctgacaagctggaccatgaatgtgccgagggcggggagaacctgtctgtgggccagaggcagctggtgtgcctggcccgggccctgctgaggaagaccaagatcctggtgctggatgaggccacagctgctgtggacctggagacagatgacctgatccagagcaccatccgcacccagtttgaggactgcaccgtgctgaccatcgcccaccggctgaacaccatcatggactacaccagggtcatcgtgctggacaagggggagatccaggagtatggagcccccagcgacctgctgcagcagaggggcctcttctacagcatggccaaggatgctggcctggtgtag

SEQ ID NO: 18430 - DNA, 3648 bp, synthetic construct
  misc_feature 1..3648: note = Description of Artificial Sequence: Synthetic coding sequence
  source 1..3648: mol_type = other DNA
atgtccttcttcttcaaggccatccatgacctgatgatgttttctggcccccagatcctgaagctgctgatcaagtttgtgaatgacaccaaggccccagactggcagggctacttctacacagtgctgctgtttgtgacagcctgcctgcagaccctggtgctgcaccagtacttccacatctgctttgtgtctggcatgaggatcaagacagctgtgattggagctgtgtacaggaaggccctggtgatcaccaacagcgccaggaagagcagcacagtgggggagatcgtgaacctgatgtctgtggatgcccagcgcttcatggacctggccacctacatcaacatgatctggagcgcccccctgcaggtgatcctggccctgtacctgctgtggctgaacctgggccccagcgtgctggccggcgtggccgtgatggtgctgatggtgcctgtgaatgctgtgatggccatgaagaccaagacctaccaggtggcccacatgaagagcaaggacaaccgcatcaagctgatgaatgagatcctgaatggcatcaaggtgctgaagctgtatgcctgggagctggccttcaaggacaaggtgctggccatccggcaggaggagctgaaggtgctgaagaagagcgcctacctgtctgctgtgggcaccttcacctgggtgtgcacccccttcctggtggccctgtgcacctttgctgtgtatgtgaccattgatgagaacaacatcctggatgcccagacagcctttgtgtccctggccctcttcaacatcctgcgcttccccctgaacatcctgcccatggtgatcagcagcatcgtgcaggcctctgtgtccctgaagaggctgcgcatcttcctgagccatgaggagctggagccagacagcattgaaagaagacctgtgaaggatggcggcggcaccaacagcatcaccgtgagaaatgccaccttcacctgggcccggagtgacccccccaccctgaatggcatcaccttcagcatccctgagggcgccctggtggccgtggtgggccaggtgggctgtgggaagagcagcctgctgagcgccctgctggccgagatggacaaggtggagggccacgtggccatcaagggctctgtggcctacgtgccccagcaggcctggatccagaatgacagcctgcgggagaacatcctgtttggctgccagctggaggagccctactacagaagtgtcatccaggcctgtgccctgctgcctgacctggagatcctgcccagcggggacagaacagaaattggagagaagggcgtgaacctgagcggcggccagaagcagagggtgtccctggcccgggctgtgtacagcaatgctgacatctacctgtttgatgaccccctgtctgctgtggatgcccacgtgggcaagcacatctttgaaaatgtgattggccccaagggcatgctgaagaacaagacccgcatcctggtgacccacagcatgagctacctgccccaggtggatgtgatcatcgtgatgtctgggggcaagatcagcgagatgggcagctaccaggagctgctggccagagatggagcctttgctgagttcctgcggacctacgccagcacagagcaggagcaggatgctgaggagaatggcagcacagtgatggatgaggaggaggccggcgtgactggagtgtctggccctgggaaggaggccaagcagatggagaatggcatgctggtgacagattctgctgggaagcagctgcagaggcagctgagcagcagcagcagctacagcggggacatcagccgccaccacaacagcacagctgagctgcagaaggccgaggccaagaaggaggagacctggaagctgatggaggccgacaaggcccagacaggccaggtgaagctgtctgtgtactgggactacatgaaggccatcggcctcttcatctccttcctgagcatcttcctgttcatgtgcaaccacgtgtctgccctggccagcaactactggctgagcctgtggacagatgaccccatcgtgaatggcacccaggagcacaccaaggtgcggctgtctgtgtatggagccctgggcatcagccagggcattgctgtgtttggctacagcatggctgtgtccattggaggcatcctggccagccgctgcctgcacgtggacctgctgcacagcatcctgcggagccccatgtccttctttgagaggaccccatctggcaacctggtgaaccgcttcagcaaggagctggacacagtggacagcatgatccctgaggtgatcaagatgttcatgggcagcctcttcaacgtcatcggggcctgcatcgtcatcctgctggccacccccatcgccgccatcatcatcccccccctgggcctcatctacttctttgtgcagcgcttctacgtggccagcagccggcagctgaagaggctggagagcgtgagccgcagccctgtgtacagccacttcaatgagaccctgctgggcgtgtctgtcatccgggcctttgaggagcaggagcgcttcatccaccagagcgacctgaaggtggatgagaaccagaaggcctactaccccagcatcgtggccaaccgctggctggccgtgcggctggagtgtgtgggcaactgcatcgtgctgtttgctgccctgtttgctgtgatcagccgccacagcctgtctgctggcctggtgggcctgtctgtgtcctacagcctgcaggtgaccacctacctgaactggctggtgaggatgagcagcgagatggagaccaacatcgtggccgtggagcggctgaaggagtacagcgagacagagaaggaggccccctggcagatccaggagacagccccacccagctcctggccccaggtgggccgggtggagttcaggaactactgcctgcgctaccgggaggacctggactttgtgctgcggcacatcaacgtgaccatcaatggaggagagaaggtgggcatcgtgggccgcactggagctgggaagagcagcctgaccctgggcctcttccgcatcaatgaatctgctgagggggagatcatcattgatggcatcaacatcgccaagattggcctgcatgacctgcgcttcaagatcaccatcatcccccaggaccctgtgctcttcagcggcagcctgaggatgaacctggaccccttcagccagtacagtgatgaggaggtgtggaccagcctggagctggcccacctgaaggactttgtgtctgccctgcctgacaagctggaccatgaatgtgccgagggcggggagaacctgtctgtgggccagaggcagctggtgtgcctggcccgggccctgctgaggaagaccaagatcctggtgctggatgaggccacagctgctgtggacctggagacagatgacctgatccagagcaccatccgcacccagtttgaggactgcaccgtgctgaccatcgcccaccggctgaacaccatcatggactacaccagggtcatcgtgctggacaagggggagatccaggagtatggagcccccagcgacctgctgcagcagaggggcctcttctacagcatggccaaggatgctggcctggtgtag

SEQ ID NO: 18431 - DNA, 1968 bp, synthetic construct
  misc_feature 1..1968: note = Description of Artificial Sequence: Synthetic coding sequence
  source 1..1968: mol_type = other DNA
atgagcagcagcaatgtggaggtgttcatccctgtgtcccagggcaacaccaacggcttccctgccacagccagcaatgacctgaaggccttcacagagggcgctgtgctgtccttccacaacatctgctacagagtgaagctgaagagcggcttcctgccctgcaggaagcctgtggagaaggagatcctgagcaacatcaatggcatcatgaagccaggcctgaatgccatcctgggccccaccggcggcggcaagagcagcctgctggatgtgctggccgccaggaaggaccccagcggcctgtctggagatgtgctgatcaatggagcccccaggcctgccaacttcaagtgcaacagcggctacgtggtgcaggatgatgtggtgatgggcaccctgactgtgcgggagaacctgcagttctctgctgccctgcggctggccaccaccatgaccaaccacgagaagaatgaaagaatcaacagagtcatccaggagctgggcctggacaaggtggccgacagcaaggtgggcacccagttcatccggggcgtgtctggaggagagaggaagaggaccagcatcggcatggagctgatcacagaccccagcatcctcttcctggatgagcccaccaccggcctggacagcagcacagccaatgctgtgctgctgctgctgaagaggatgagcaagcagggccgcaccatcatcttcagcatccaccagccccgctacagcatcttcaagctgtttgacagcctgaccctgctggccagcggccgcctgatgtttcatggccctgcccaggaggccctgggctactttgaatctgctggctaccactgtgaggcctacaacaacccagctgacttcttcctggacatcatcaatggagacagcacagctgtggccctgaaccgggaggaggacttcaaggccacagagatcatcgagcccagcaagcaggacaagcccctgattgagaagctggccgagatctacgtgaacagcagcttctacaaggagaccaaggccgagctgcaccagctgtctggaggagagaagaagaagaagatcaccgtcttcaaggagatctcctacaccaccagcttctgccaccagctgcgctgggtgtccaagaggagcttcaagaacctgctgggcaacccccaggccagcatcgcccagatcatcgtgacagtggtgctgggcctggtgattggagccatctacttcggcctgaagaatgacagcacaggcatccagaacagagctggggtgctcttcttcctgaccaccaaccagtgcttcagctctgtgtctgctgtggagctgtttgtggtggagaagaagctgttcatccacgagtacatcagcggctactacagagtgagcagctacttcctgggcaagctgctgagtgacctgctgcccatgaggatgctgcccagcatcatcttcacctgcatcgtgtacttcatgctgggcctgaagcccaaggcagatgccttctttgtgatgatgttcaccctgatgatggtggcctacagcgccagctccatggccctggccatcgctgctggccagagcgtggtgtctgtggccaccctgctgatgaccatctgctttgtgttcatgatgatcttcagcggcctgctggtgaacctgaccaccatcgcctcctggctgtcctggctgcagtacttcagcatccccaggtatggcttcaccgccctgcagcacaatgagttcctgggccagaacttctgccccggcctgaatgccaccggcaacaacccctgcaactatgccacctgcacaggagaggagtacctggtgaagcagggcatcgacctgagcccctggggcctgtggaagaaccacgtggccctggcctgcatgatcgtcatcttcctgaccatcgcctacctgaagctgctcttcctgaagaagtacagctag

SEQ ID NO: 18432 - DNA, 1836 bp, synthetic construct
  misc_feature 1..1836: note = Description of Artificial Sequence: Synthetic coding sequence
  source 1..1836: mol_type = other DNA
atgagcagcagcaatgtggaggtgttcatccctgtgtcccagggcaacaccaacggcttccctgccacagccagcaatgacctgaaggccttcacagagggcgctgtgctgtccttccacaacatctgctacagagtgaagctgaagagcggcttcctgccctgcaggaagcctgtggagaaggagatcctgagcaacatcaatggcatcatgaagccaggcctgaatgccatcctgggccccaccggcggcggcaagagcagcctgctggatgtgctggccgccaggaaggaccccagcggcctgtctggagatgtgctgatcaatggagcccccaggcctgccaacttcaagtgcaacagcggctacgtggtgcaggatgatgtggtgatgggcaccctgactgtgcgggagaacctgcagttctctgctgccctgcggctggccaccaccatgaccaaccacgagaagaatgaaagaatcaacagagtcatccaggagctgggcctggacaaggtggccgacagcaaggtgggcacccagttcatccggggcgtgtctggaggagagaggaagaggaccagcatcggcatggagctgatcacagaccccagcatcctcttcctggatgagcccaccaccggcctggacagcagcacagccaatgctgtgctgctgctgctgaagaggatgagcaagcagggccgcaccatcatcttcagcatccaccagccccgctacagcatcttcaagctgtttgacagcctgaccctgctggccagcggccgcctgatgtttcatggccctgcccaggaggccctgggctactttgaatctgctggctaccactgtgaggcctacaacaacccagctgacttcttcctggacatcatcaatggagacagcacagctgtggccctgaaccgggaggaggacttcaaggccacagagatcatcgagcccagcaagcaggacaagcccctgattgagaagctggccgagatctacgtgaacagcagcttctacaaggagaccaaggccgagctgcaccagctgtctggaggagagaagaagaagaagatcaccgtcttcaaggagatctcctacaccaccagcttctgccaccagctgcgctgggtgtccaagaggagcttcaagaacctgctgggcaacccccaggccagcatcgcccagatcatcgtgacagtggtgctgggcctggtgattggagccatctacttcggcctgaagaatgacagcacaggcatccagaacagagctggggtgctcttcttcctgaccaccaaccagtgcttcagctctgtgtctgctgtggagctgtttgtggtggagaagaagctgttcatccacgagtacatcagcggctactacagagtgagcagctacttcctgggcaagctgctgagtgacctgctgcccatgaggatgctgcccagcatcatcttcacctgcatcgtgtacttcatgctgggcctgaagcccaaggcagatgccttctttgtgatgatgttcaccctgatgatggtggcctacagcgccagctccatggccctggccatcgctgctggccagagcgtggtgtctgtggccaccctgctgatgaccatctgctttgtgttcatgatggtgtgctggagcatcagccagcccctgcacctgggctgccacggcttcagcaccagcgccttccatgacatggacctgcggctgtgcagcatcatgaacttctgggacaagaccagcgcccaggacagcatgcagcaggagaccatcctggtgaccatgcagcacgtgctggccaagaacatctggtag

SEQ ID NO: 18433 - DNA, 1212 bp, synthetic construct
  misc_feature 1..1212: note = Description of Artificial Sequence: Synthetic coding sequence
  source 1..1212: mol_type = other DNA
atggacaggagcaaggagaactgcatcagcggccctgtgaaggccacagcccctgtgggcggccccaagagggtgctggtgacccagcagttcccctgccagaaccccctgcctgtgaacagcggccaggcccagagggtgctgtgccccagcaacagcagccagaggatccccctgcaggcccagaagctggtgagcagccacaagcctgtgcagaaccagaagcagaagcagctgcaggccacctctgtgccccaccctgtgtcccggcccctgaacaacacccagaagagcaagcagcccctgcccagcgcccctgagaacaaccctgaggaggagctggccagcaagcagaagaatgaggagagcaagaagaggcagtgggccctggaggactttgaaattggccggcccctgggcaagggcaagtttggaaatgtgtacctggcccgggagaagcagagcaagttcatcctggccctgaaggtgctcttcaaggcccagctggagaaggccggcgtggagcaccagctgcggcgggaggtggagatccagagccacctgcggcaccccaacatcctgcggctgtatggctacttccatgatgccaccagggtgtacctgatcctggagtatgcccccctgggcaccgtgtaccgggagctgcagaagctgagcaagtttgatgagcagaggacagccacctacatcacagagctggccaatgccctgagctactgccacagcaagagggtcatccaccgggacatcaagccagagaacctgctgctgggcagcgctggggagctgaagattgctgactttggctggagcgtgcacgcccccagcagcaggaggaccaccctgtgtggcaccctggactacctgcccccagagatgattgagggccgcatgcatgatgagaaggtggacctgtggagcctgggcgtgctgtgctatgagttcctggtgggcaagcccccatttgaggccaacacctaccaggagacctacaagaggatcagccgggtggagttcaccttcccagactttgtgacagaaggagcccgggacctgatcagccggctgctgaagcacaaccccagccagaggcccatgctgcgggaggtgctggagcacccctggatcacagccaacagcagcaagcccagcaactgccagaacaaggagagcgccagcaagcagagctag

SEQ ID NO: 18434 - DNA, 1212 bp, synthetic construct; identical to SEQ ID NO: 18433
  misc_feature 1..1212: note = Description of Artificial Sequence: Synthetic coding sequence
  source 1..1212: mol_type = other DNA

SEQ ID NO: 18435 - DNA, 1212 bp, synthetic construct; identical to SEQ ID NO: 18433
  misc_feature 1..1212: note = Description of Artificial Sequence: Synthetic coding sequence
  source 1..1212: mol_type = other DNA

SEQ ID NO: 18436 - DNA, 1044 bp, synthetic construct
  misc_feature 1..1044: note = Description of Artificial Sequence: Synthetic coding sequence
  source 1..1044: mol_type = other DNA
atggacaggagcaaggagaactgcatcagcggccctgtgaaggccacagcccctgtgggcggccccaagagggtgctggtgacccagcagttcccctgccagaaccccctgcctgtgaacagcggccaggcccagagggtgctgtgccccagcaacagcagccagaggatccccctgcaggcccagaagctggtgagcagccacaagcctgtgcagaaccagaagcagaagcagctgcaggccacctctgtgccccaccctgtgtcccggcccctgaacaacacccagaagagcaagcagcccctgcccagcgcccctgagaacaaccctgaggaggagctggccagcaagcagaagaatgaggagagcaagaagaggcagtgggccctggaggactttgaaattggccggcccctgggcaagggcaagtttggaaatgtgtacctggcccgggagaagcagagcaagttcatcctggccctgaaggtgctcttcaaggcccagctggagaaggccggcgtggagcaccagctgcggcgggaggtggagatccagagccacctgcggcaccccaacatcctgcggctgtatggctacttccatgatgccaccagggtgtacctgatcctggagtatgcccccctgggcaccgtgtaccgggagctgcagaagctgagcaagtttgatgagcagaggacagccacctacatcacagagctggccaatgccctgagctactgccacagcaagagggtcatccaccgggacatcaagccagagaacctgctgctgggcagcgctggggagctgaagattgctgactttggctggagcgtgcacgcccccagcagcaggaggaccaccctgtgtggcaccctggactacctgcccccagagatgattgagggccgcatgcatgatgagaaggtggacctgtggagcctgggcgtgctgtgctatgagttcctggtgggcaagcccccatttgaggccaacacctaccaggagacctacaagaggatcagccgggtgagaagaaattag

SEQ ID NO: 18437 - DNA, 1212 bp, synthetic construct; identical to SEQ ID NO: 18433
  misc_feature 1..1212: note = Description of Artificial Sequence: Synthetic coding sequence
  source 1..1212: mol_type = other DNA

SEQ ID NO: 18438 - DNA, 1212 bp, synthetic construct; identical to SEQ ID NO: 18433
  misc_feature 1..1212: note = Description of Artificial Sequence: Synthetic coding sequence
  source 1..1212: mol_type = other DNA

SEQ ID NO: 18439 - DNA, 1212 bp, synthetic construct; identical to SEQ ID NO: 18433
  misc_feature 1..1212: note = Description of Artificial Sequence: Synthetic coding sequence
  source 1..1212: mol_type = other DNA

SEQ ID NO: 18440 - DNA, 1212 bp, synthetic construct; identical to SEQ ID NO: 18433
  misc_feature 1..1212: note = Description of Artificial Sequence: Synthetic coding sequence
  source 1..1212: mol_type = other DNA

SEQ ID NO: 18441 - DNA, 1212 bp, synthetic construct; identical to SEQ ID NO: 18433
  misc_feature 1..1212: note = Description of Artificial Sequence: Synthetic coding sequence
  source 1..1212: mol_type = other DNA

SEQ ID NO: 18442 - DNA, 570 bp, synthetic construct
  misc_feature 1..570: note = Description of Artificial Sequence: Synthetic coding sequence
  source 1..570: mol_type = other DNA
atggacaggagcaaggagaactgcatcagcggccctgtgaaggccacagcccctgtgggcggccccaagagggtgctggtgacccagcagttcccctgccagaaccccctgcctgtgaacagcggccaggcccagagggtgctgtgccccagcaacagcagccagaggatccccctgcaggcccagaagctggtgagcagccacaagcctgtgcagaaccagaagcagaagcagctgcaggccacctctgtgccccaccctgtgtcccggcccctgaacaacacccagaagagcaagcagcccctgcccagcgcccctgagaacaaccctgaggaggagctggccagcaagcagaagaatgaggagagcaagaagaggcagtgggccctggaggactttgaaattggccggcccctgggcaagggcaagtttggaaatgtgtacctggcccgggagaagcagagcaagttcatcctggccctgaaggtgctcttcaaggcccagctggagaaggccggcgtggagcaccagctgcggcgggaggtggagatccagagccacctgaggtag

SEQ ID NO: 18443 - DNA, 444 bp, synthetic construct
  misc_feature 1..444: note = Description of Artificial Sequence: Synthetic coding sequence
  source 1..444: mol_type = other DNA
atggacaggagcaaggagaactgcatcagcggccctgtgaaggccacagcccctgtgggcggccccaagagggtgctggtgacccagcagttcccctgccagaaccccctgcctgtgaacagcggccaggcccagagggtgctgtgccccagcaacagcagccagaggatccccctgcaggcccagaagctggtgagcagccacaagcctgtgcagaaccagaagcagaagcagctgcaggccacctctgtgccccaccctgtgtcccggcccctgaacaacacccagaagagcaagcagcccctgcccagcgcccctgagaacaaccctgaggaggagctggccagcaagcagaagaatgaggagagcaagaagaggcagtgggccctggaggactttgaaattggccggcccctgggcaagggcaagtttggaaatgtgtag

SEQ ID NO: 18444 - DNA, 816 bp, synthetic construct
  misc_feature 1..816: note = Description of Artificial Sequence: Synthetic coding sequence
  source 1..816: mol_type = other DNA
atggacaggagcaaggagaactgcatcagcggccctgtgaaggccacagcccctgtgggcggccccaagagggtgctggtgacccagcagttcccctgccagaaccccctgcctgtgaacagcggccaggcccagagggtgctgtgccccagcaacagcagccagaggatccccctgcaggcccagaagctggtgagcagccacaagcctgtgcagaaccagaagcagaagcagctgcaggccacctctgtgccccaccctgtgtcccggcccctgaacaacacccagaagagcaagcagcccctgcccagcgcccctgagaacaaccctgaggaggagctggccagcaagcagaagaatgaggagagcaagaagaggcagtgggccctggaggactttgaaattggccggcccctgggcaagggcaagtttggaaatgtgtacctggcccgggagaagcagagcaagttcatcctggccctgaaggtgctcttcaaggcccagctggagaaggccggcgtggagcaccagctgcggcgggaggtggagatccagagccacctgcggcaccccaacatcctgcggctgtatggctacttccatgatgccaccagggtgtacctgatcctggagtatgcccccctgggcaccgtgtaccgggagctgcagaagctgagcaagtttgatgagcagaggacagccacctacatcacagagctggccaatgccctgagctactgccacagcaagagggtcatccaccgggacatcaagccagagaacctgctgctgggcagcgctggggagctgaagtag

SEQ ID NO: 18445 - DNA, 240 bp, synthetic construct
  misc_feature 1..240: note = Description of Artificial Sequence: Synthetic coding sequence
  source 1..240: mol_type = other DNA
atggacaggagcaaggagaactgcatcagcggccctgtgaaggccacagcccctgtgggcggccccaagagggtgctggtgacccagcagttcccctgccagaaccccctgcctgtgaacagcggccaggcccagagggtgctgtgccccagcaacagcagccagaggatccccctgcaggcccagaagctggtgagcagccacaagcctgtgcagaaccagaagcagaagcagctgtag

SEQ ID NO: 18446 - DNA, 321 bp, synthetic construct
  misc_feature 1..321: note = Description of Artificial Sequence: Synthetic coding sequence
  source 1..321: mol_type = other DNA
atggacaggagcaaggagaactgcatcagcggccctgtgaaggccacagcccctgtgggcggccccaagagggtgctggtgacccagcagttcccctgccagaaccccctgcctgtgaacagcggccaggcccagagggtgctgtgccccagcaacagcagccagaggatccccctgcaggcccagaagctggtgagcagccacaagcctgtgcagaaccagaagcagaagcagctgcaggccacctctgtgccccaccctgtgtcccggcccctgaacaacacccagaagagcaagcagcccctgcccagcgccccctag

SEQ ID NO: 18447 - DNA, 1035 bp, synthetic construct
  misc_feature 1..1035: note = Description of Artificial Sequence: Synthetic coding sequence
  source 1..1035: mol_type = other DNA
atggcccagaaggaaaattcctacccctggccctacggccggcagacagcccccagcggcctgagcaccctgccccagagggtgctgaggaaggagcctgtgaccccatctgccctggtgctgatgagccgcagcaatgtgcagcccacagctgcccctggccagaaggtgatggagaacagcagcggcaccccagacatcctgaccaggcacttcaccattgatgactttgaaattggccggcccctgggcaagggcaagtttggaaatgtgtacctggcccgggagaagaagagccacttcatcgtggccctgaaggtgctcttcaagagccagatcgagaaggagggcgtggagcaccagctgcggcgggagattgagatccaggcccacctgcaccaccccaacatcctgcggctgtacaactacttctatgacagaagacgcatctacctgatcctggagtatgcccccagaggagagctgtacaaggagctgcagaagagctgcacctttgatgagcagaggacagccaccatcatggaggagctggctgatgccctgatgtactgccacggcaagaaggtgatccaccgggacatcaagccagagaacctgctgctgggcctgaagggggagctgaagattgctgactttggctggagcgtgcacgcccccagcctgcggaggaagaccatgtgtggcaccctggactacctgcccccagagatgattgagggccgcatgcacaatgagaaggtggacctgtggtgcattggagtgctgtgctatgagctgctggtgggcaaccccccatttgaaagtgccagccacaatgagacctacagaagaattgtgaaggtggacctgaagtttcctgcctctgtgcccatgggcgcccaggacctgatcagcaagctgctgcggcacaaccccagcgagcggctgcccctggcccaggtgtctgcccacccctgggtgcgggccaacagccggcgggtgctgccccccagcgccctgcagagcgtggcctag

SEQ ID NO: 18448 - DNA, 912 bp, synthetic construct
  misc_feature 1..912: note = Description of Artificial Sequence: Synthetic coding sequence
  source 1..912: mol_type = other DNA
atgagccgcagcaatgtgcagcccacagctgcccctggccagaaggtgatggagaacagcagcggcaccccagacatcctgaccaggcacttcaccattgatgactttgagatcggccggcccctgggcaagggcaagtttggaaatgtgtacctggcccgggagaagaagagccacttcatcgtggccctgaaggtgctcttcaagagccagatcgagaaggagggcgtggagcaccagctgcggcgggagattgagatccaggcccacctgcaccaccccaacatcctgcggctgtacaactacttctatgacagaagacgcatctacctgatcctggagtatgcccccagaggagagctgtacaaggagctgcagaagagctgcacctttgatgagcagaggacagccaccatcatggaggagctggctgatgccctgatgtactgccacggcaagaaggtgatccaccgggacatcaagccagagaacctgctgctgggcctgaagggggagctgaagattgctgactttggctggagcgtgcacgcccccagcctgcggaggaagaccatgtgtggcaccctggactacctgcccccagagatgattgagggccgcatgcacaatgagaaggtggacctgtggtgcatcggcgtgctgtgctatgagctgctggtgggcaaccccccatttgagagcgccagccacaatgagacctaccgccgcatcgtgaaggtggacctgaagtttcctgcctctgtgcccatgggcgcccaggacctgatcagcaagctgctgcggcacaaccccagcgagcggctgcccctggcccaggtgtctgcccacccctgggtgcgggccaacagcagaagagtgctgcccccatctgccctgcagagcgtggcctag

SEQ ID NO: 18449 - DNA, 1035 bp, synthetic construct; identical to SEQ ID NO: 18447
  misc_feature 1..1035: note = Description of Artificial Sequence: Synthetic coding sequence
  source 1..1035: mol_type = other DNA

SEQ ID NO: 18450 - DNA, 930 bp, synthetic construct
  misc_feature 1..930: note = Description of Artificial Sequence: Synthetic coding sequence
  source 1..930: mol_type = other DNA
atgagcagccccagggctgtggtgcagctgggcaaggcccagcctgctggggaggagctggccacagccaaccagacagcccagcagcccagcagccctgccatgaggcggctgactgtggatgactttgaaattggccggcccctgggcaagggcaagtttggaaatgtgtacctggcccggctgaaggagagccacttcatcgtggccctgaaggtgctcttcaagagccagatcgagaaggagggcctggagcaccagctgcggcgggagattgagatccaggcccacctgcagcaccccaacatcctgcggctgtacaactacttccatgatgcccggcgggtgtacctgatcctggagtatgcccccagaggagagctgtacaaggagctgcagaagtctgagaagctggatgagcagaggacagccaccatcatcgaggagctggctgatgccctgacctactgccacgacaagaaggtgatccaccgggacatcaagccagagaacctgctgctgggcttccggggggaggtgaagattgctgactttggctggagcgtgcacacccccagcctgcggaggaagaccatgtgtggcaccctggactacctgcccccagagatgattgagggccgcacctatgatgagaaggtggacctgtggtgcattggagtgctgtgctatgagctgctggtgggctaccccccatttgaaagtgccagccacagcgagacctaccgccgcatcctgaaggtggatgtgcgcttccccctgtccatgcccctgggcgcccgggacctgatcagccggctgctgcgctaccagcccctggagcggctgcccctggcccagatcctgaagcacccctgggtgcaggcccacagccggcgggtgctgcccccctgtgcccagatggccagctag

SEQ ID NO: 18451 - DNA, 873 bp, synthetic construct
  misc_feature 1..873: note = Description of Artificial Sequence: Synthetic coding sequence
  source 1..873: mol_type = other DNA
atggccacagccaaccagacagcccagcagcccagcagccctgccatgaggcggctgactgtggatgactttgagatcggccggcccctgggcaagggcaagtttggaaatgtgtacctggcccggctgaaggagagccacttcatcgtggccctgaaggtgctcttcaagagccagatcgagaaggagggcctggagcaccagctgcggcgggagattgagatccaggcccacctgcagcaccccaacatcctgcggctgtacaactacttccatgatgccaggagagtgtacctgatcctggagtatgcccccagaggagagctgtacaaggagctgcagaagtctgagaagctggatgagcagaggacagccaccatcatcgaggagctggctgatgccctgacctactgccacgacaagaaggtgatccaccgggacatcaagccagagaacctgctgctgggcttccggggggaggtgaagattgctgactttggctggagcgtgcacacccccagcctgcggaggaagaccatgtgtggcaccctggactacctgcccccagagatgattgagggccgcacctatgatgagaaggtggacctgtggtgcatcggcgtgctgtgctatgagctgctggtgggctaccccccatttgagagcgccagccacagcgagacctaccgccgcatcctgaaggtggatgtgcgcttccccctgtccatgcccctgggcgcccgggacctgatcagccggctgctgcgctaccagcccctggagcggctgcccctggcccagatcctgaagcacccctgggtgcaggcccacagcagaagagtgctgcccccctgtgcccagatggccagctag

SEQ ID NO: 18452 - DNA, 828 bp, synthetic construct
  misc_feature 1..828: note = Description of Artificial Sequence: Synthetic coding sequence
  source 1..828: mol_type = other DNA
atgaggcggctgactgtggatgactttgaaattggccggcccctgggcaagggcaagtttggaaatgtgtacctggcccggctgaaggagagccacttcatcgtggccctgaaggtgctcttcaagagccagatcgagaaggagggcctggagcaccagctgcggcgggagattgagatccaggcccacctgcagcaccccaacatcctgcggctgtacaactacttccatgatgcccggcgggtgtacctgatcctggagtatgcccccagaggagagctgtacaaggagctgcagaagtctgagaagctggatgagcagaggacagccaccatcatcgaggagctggctgatgccctgacctactgccacgacaagaaggtgatccaccgggacatcaagccagagaacctgctgctgggcttccggggggaggtgaagattgctgactttggctggagcgtgcacacccccagcctgcggaggaagaccatgtgtggcaccctggactacctgcccccagagatgattgagggccgcacctatgatgagaaggtggacctgtggtgcattggagtgctgtgctatgagctgctggtgggctaccccccatttgaaagtgccagccacagcgagacctaccgccgcatcctgaaggtggatgtgcgcttccccctgtccatgcccctgggcgcccgggacctgatcagccggctgctgcgctaccagcccctggagcggctgcccctggcccagatcctgaagcacccctgggtgcaggcccacagccggcgggtgctgcccccctgtgcccagatggccagctag

SEQ ID NO: 18453 - DNA, 2589 bp, synthetic construct
  misc_feature 1..2589: note = Description of Artificial Sequence: Synthetic coding sequence
  source 1..2589: mol_type = other DNA
atgaacatccaggagcagggcttccccctggacctgggcgccagcttcacagaagatgcccccaggcctcctgtgcctggagaggagggggagctggtgtccacagaccccaggcctgccagctacagcttctgcagcggcaagggcgtgggcatcaagggggagaccagcacagccaccccccggcggagtgacctggacctgggctatgagcctgagggcagcgccagccccaccccaccctacctgaagtgggccgagagcctgcacagcctgctggatgaccaggacggcatcagcctcttccgcaccttcctgaagcaggagggctgtgccgacctgctggacttctggtttgcctgcaccggcttcaggaagctggagccctgtgacagcaatgaggagaagaggctgaagctggcccgggccatctacaggaagtacatcctggacaacaatggaattgtgtcccggcagaccaagccagccaccaagagcttcatcaagggctgcatcatgaagcagctgattgatcctgccatgtttgaccaggcccagacagagatccaggccaccatggaggagaacacctaccccagcttcctgaagagtgacatctacctggagtacaccaggactggaagtgagagccccaaggtgtgcagcgaccagagcagcggcagcggcaccgggaagggcatcagcggctacctgcccaccctgaatgaagatgaggagtggaagtgtgaccaggacatggatgaagatgatggaagagatgctgcccctcctggccgcctgccccagaagctgctgctggagacagctgccccccgggtgagcagcagccgccgctacagcgagggccgggagttccgctatggctcctggagggagcctgtgaacccctactacgtgaatgccggctacgccctggccccagccaccagcgccaatgattctgagcagcagagcctgagcagtgatgctgacaccctgagcctgacagacagctctgtggatggcatccccccctaccgcatcaggaagcagcacagaagagagatgcaggagagcgtgcaggtgaatggccgggtgcccctgccccacatccccaggacctacagagtgcccaaggaggtgcgggtggagccccagaagtttgctgaggagctgatccaccggctggaggccgtgcagaggacccgggaggccgaggagaagctggaggagcggctgaagagggtgaggatggaggaggagggagaagatggagaccccagcagcggccccccaggcccctgccacaagctgcccccagccccagcctggcaccacttccccccaagatgtgtggacatgggctgtgccggcctgagagatgcccatgaagaaaatcctgagagcatcctggatgagcacgtgcagagggtgctgcggaccccaggccggcagagccctggccctggccacaggagcccagacagcggccacgtggccaagatgcctgtggccctgggcggggccgccagcggccacggcaagcacgtgcccaagagcggggccaagctggatgctgctggcctgcaccaccaccgccacgtgcaccaccacgtgcaccacagcacagcccggcccaaggagcaggtggaggccgaggccacccggcgggcccagagcagctttgcctggggcctggagccccacagccatggagcccggagccggggctacagcgagagcgtgggcgccgccccaaatgccagtgatggcctggcccacagcggcaaggtgggcgtggcctgcaagagaaatgccaagaaggccgagagcggcaagagcgccagcacagaggtgcctggggcctctgaagatgctgagaagaaccagaagatcatgcagtggatcattgaaggagagaaggagatcagccgccacagaagaactggacatggcagcagcggcaccaggaagccccagccccatgagaacagccggcccctgagcctggagcacccctgggccggcccccagctgcggacctctgtgcagcccagccacctgttcatccaggaccccaccatgccaccccacccagcccccaaccccctgacccagctggaggaggcccggcggcggctggaggaggaggagaagagggccagccgggcccccagcaagcagcgctacgtgcaggaggtgatgaggcggggccgggcctgtgtgcggcctgcctgtgcccctgtgctgcacgtggtgcctgctgtgtctgacatggagctgtctgaaacagagaccaggagccagaggaaggtgggcggcggcagcgcccagccctgtgacagcatcgtggtggcctactacttctgtggggagcccatcccctaccgcaccctggtgcggggccgggctgtgaccctgggccagttcaaggagctgctgaccaagaagggcagctaccgctactacttcaagaaggtgtctgatgaatttgactgtggggtggtgtttgaggaggtgcgggaggatgaagctgtgctgcctgtgtttgaggagaagatcatcggcaaggtggagaaggtggactag

SEQ ID NO: 18454 - DNA, 2481 bp, synthetic construct
  misc_feature 1..2481: note = Description of Artificial Sequence: Synthetic coding sequence
  source 1..2481: mol_type = other DNA
atgaacatccaggagcagggcttccccctggacctgggcgccagcttcacagaagatgcccccaggcctcctgtgcctggagaggagggggagctggtgtccacagaccccaggcctgccagctacagcttctgcagcggcaagggcgtgggcatcaagggggagaccagcacagccaccccccggcggagtgacctggacctgggctatgagcctgagggcagcgccagccccaccccaccctacctgaagtgggccgagagcctgcacagcctgctggatgaccaggacggcatcagcctcttccgcaccttcctgaagcaggagggctgtgccgacctgctggacttctggtttgcctgcaccggcttcaggaagctggagccctgtgacagcaatgaggagaagaggctgaagctggcccgggccatctacaggaagtacatcctggacaacaatggaattgtgtcccggcagaccaagccagccaccaagagcttcatcaagggctgcatcatgaagcagctgattgatcctgccatgtttgaccaggcccagacagagatccaggccaccatggaggagaacacctaccccagcttcctgaagagtgacatctacctggagtacaccaggactggaagtgagagccccaaggtgtgcagcgaccagagcagcggcagcggcaccgggaagggcatcagcggctacctgcccaccctgaatgaagatgaggagtggaagtgtgaccaggacatggatgaagatgatggaagagatgctgcccctcctggccgcctgccccagaagctgctgctggagacagctgccccccgggtgagcagcagccgccgctacagcgagggccgggagttccgctatggctcctggagggagcctgtgaacccctactacgtgaatgccggctacgccctggccccagccaccagcgccaatgattctgagcagcagagcctgagcagtgatgctgacaccctgagcctgacagacagctctgtggatggcatccccccctaccgcatcaggaagcagcacagaagagagatgcaggagagcgtgcaggtgaatggccgggtgcccctgccccacatccccaggacctacagagtgcccaaggaggtgcgggtggagccccagaagtttgctgaggagctgatccaccggctggaggccgtgcagaggacccgggaggccgaggagaagctggaggagcggctgaagagggtgaggatggaggaggagggagaagatggagaccccagcagcggccccccaggcccctgccacaagctgcccccagccccagcctggcaccacttccccccaagatgtgtggacatgggctgtgccggcctgagagatgcccatgaagaaaatcctgagagcatcctggatgagcacgtgcagagggtgctgcggaccccaggccggcagagccctggccctggccacaggagcccagacagcggccacgtggccaagatgcctgtggccctgggcggggccgccagcggccacggcaagcacgtgcccaagagcggggccaagctggatgctgctggcctgcaccaccaccgccacgtgcaccaccacgtgcaccacagcacagcccggcccaaggagcaggtggaggccgaggccacccggcgggcccagagcagctttgcctggggcctggagccccacagccatggagcccggagccggggctacagcgagagcgtgggcgccgccccaaatgccagtgatggcctggcccacagcggcaaggtgggcgtggcctgcaagagaaatgccaagaaggccgagagcggcaagagcgccagcacagaggtgcctggggcctctgaagatgctgagaagaaccagaagatcatgcagtggatcattgaaggagagaaggagatcagccgccacagaagaactggacatggcagcagcggcaccaggaagccccagccccatgagaacagccggcccctgagcctggagcacccctgggccggcccccagctgcggacctctgtgcagcccagccacctgttcatccaggaccccaccatgccaccccacccagcccccaaccccctgacccagctggaggaggcccggcggcggctggaggaggaggagaagagggccagccgggcccccagcaagcagaggaccaggagccagaggaaggtgggcggcggcagcgcccagccctgtgacagcatcgtggtggcctactacttctgtggggagcccatcccctaccgcaccctggtgcggggccgggctgtgaccctgggccagttcaaggagctgctgaccaagaagggcagctaccgctactacttcaagaaggtgtctgatgaatttgactgtggggtggtgtttgaggaggtgcgggaggatgaagctgtgctgcctgtgtttgaggagaagatcatcggcaaggtggagaaggtggactag

SEQ ID NO: 18455 - DNA, 309 bp, synthetic construct
  misc_feature 1..309: note = Description of Artificial Sequence: Synthetic coding sequence
  source 1..309: mol_type = other DNA
tgactggaggaggaggagaagagggccagccgggcccccagcaagcagaggaccaggagccagaggaaggtgggcggcggcagcgcccagccctgtgacagcatcgtggtggcctactacttctgtggggagcccatcccctaccgcaccctggtgcggggccgggctgtgaccctgggccagttcaaggagctgctgaccaagaagggcagctaccggccccccagccacctgcgctgctgcctgctgacagccctgctgacctctgtgctgcagatcctgctgcaggagagcgagcggcgggtgtag

SEQ ID NO: 18456 - DNA, 1824 bp, synthetic construct
  misc_feature 1..1824: note = Description of Artificial Sequence: Synthetic coding sequence
  source 1..1824: mol_type = other DNA
atggtgtgcaccaggaagaccaagaccctggtgtccacctgtgtgatcctgagcggcatgaccaacatcatctgcctgctgtatgtgggctgggtgaccaactacatcgcctctgtgtatgtgcggggccaggagcccgccccagacaagaagctggaggaggacaagggggacaccctgaagatcatcgagcggctggaccacctggagaatgtcatcaagcagcacatccaggaggccccagccaagccagaggaggccgaggccgagcccttcacagacagcagcctgtttgcccactggggccaggagctgagccctgagggccggcgggtggccctgaagcagttccagtactacggctacaatgcctacctgagtgaccggctgcccctggaccggcccctgcctgacctgcggcccagcggctgcaggaacctgtccttcccagacagcctgcctgaggtgtccatcgtgttcatctttgtgaatgaggccctgtctgtgctgctgcggagcatccacagcgccatggagaggaccccaccccacctgctgaaggagatcatcctggtggatgacaacagcagcaatgaggagctgaaggagaagctgacagaatatgtggacaaggtgaacagccagaagccaggcttcatcaaggtggtgcgccacagcaagcaggagggcctcatccgcagccgggtgtctggctggagggctgccacagcccctgtggtggccctgtttgatgcccacgtggagttcaacgtgggctgggccgagcctgtgctgacccgcatcaaggagaacaggaagaggatcatcagccccagctttgacaacatcaagtatgacaactttgaaattgaggagtaccccctggccgcccagggctttgactgggagctgtggtgccgctacctgaacccccccaaggcctggtggaagctggagaacagcacagcccccatccgcagccctgccctgattggctgcttcatcgtggaccggcagtacttccaggagatcggcctgctggatgagggcatggaggtgtatggaggagaaaatgtggagctgggcatccgggtgtggcagtgtggcggctctgtggaggtgctgccctgcagccgcatcgcccacatcgagcgggcccacaagccctacacagaggacctgacagcccacgtgagaagaaatgccctgcgggtggccgaggtgtggatggatgagttcaagagccacgtgtacatggcctggaacatcccccaggaggacagcggcatcgacatcggggacatcacagccaggaaggccctgaggaagcagctgcagtgcaagaccttccgctggtacctggtgtctgtgtacccagagatgaggatgtacagcgacatcatcgcctacggcgtgctgcagaacagcctgaagacagacctgtgcctggaccagggccctgacacagaaaatgtgcccatcatgtacatctgccacggcatgaccccccagaatgtgtactacaccagcagccagcagatccacgtgggcatcctgagccccaccgtggatgatgatgacaaccgctgcctggtggatgtgaacagccggccccggctgattgagtgcagctatgccaaggccaagaggatgaagctgcactggcagttcagccagggcggccccatccagaacaggaagagcaagcgctgcctggagctgcaggagaacagcgacctggagtttggcttccagctggtgctgcagaagtgcagcggccagcactggagcatcaccaacgtgctgcggagcctggccagctag

SEQ ID NO: 18457 - DNA, 1710 bp, synthetic construct
  misc_feature 1..1710: note = Description of Artificial Sequence: Synthetic coding sequence
  source 1..1710: mol_type = other DNA
atgagcacctacagcaccttccctgctggggtgcctgtgtctgagaggagcctggcccgggccggcttctactacacaggagtgaatgacaaggtgaagtgcttctgctgcggcctgatgctggacaactggaagctgggggacagccccatccagaagcacaagcagctgtaccccagctgcagcttcatccagaacctggtgtctgccagcctgggcagcaccagcaagaacaccagccccatgagaaattcctttgcccacagcctgagccccaccctggagcacagcagcctcttcagcggcagctacagcagcctgagccccaaccccctgaacagcagagctgtggaggacatcagcagcagcaggaccaacccctacagctatgccatgagcacagaggaggcccgcttcctgacctaccacatgtggcccctgaccttcctgagccccagcgagctggcccgggccggcttctactacatcggccctggggacagagtggcctgctttgcctgtggcggcaagctgagcaactgggagcccaaggatgatgccatgtctgagcaccggcggcacttccccaactgccccttcctggagaacagcctggagaccctgcgcttcagcatcagcaacctgtccatgcagacccatgctgccaggatgaggaccttcatgtactggcccagctctgtgcctgtgcagcctgagcagctggccagcgctggcttctactacgtgggcagaaatgatgatgtgaagtgcttctgctgtgatggcggcctgcgctgctgggagagcggagatgacccctgggtggagcacgccaagtggttcccccgctgtgagttcctgatccgcatgaagggccaggagtttgtggatgagatccagggccgctacccccacctgctggagcagctgctgagcaccagtgacaccactggagaggagaatgctgacccccccatcatccactttggacctggagagagcagcagtgaagatgctgtgatgatgaacacccctgtggtgaagagcgccctggagatgggcttcaacagagacctggtgaagcagacagtgcagagcaagatcctgaccactggagagaactacaagacagtgaatgacatcgtgtctgccctgctgaatgcagaagatgagaagcgggaggaggagaaggagaagcaggccgaggagatggccagtgatgacctgagcctcatcaggaagaacaggatggccctcttccagcagctgacctgtgtgctgcccatcctggacaacctgctgaaggccaacgtcatcaacaagcaggagcatgacatcatcaagcagaagacccagatccccctgcaggcccgggagctgattgacaccatcctggtgaagggaaatgctgctgccaacatcttcaagaactgcctgaaggagattgacagcaccctgtacaagaacctgtttgtggacaagaacatgaagtacatccccacagaagatgtgtctggcctgagcctggaggagcagctgcggcggctgcaggaggagaggacctgcaaggtgtgcatggacaaggaggtgtctgtggtgttcatcccctgtggccacctggtggtgtgccaggagtgtgcccccagcctgaggaagtgccccatctgccggggcatcatcaagggcaccgtgaggaccttcctgtcctag

SEQ ID NO: 18458 - DNA, 1794 bp, synthetic construct
  misc_feature 1..1794: note = Description of Artificial Sequence: Synthetic coding sequence
  source 1..1794: mol_type = other DNA
atggaggacagcaccatcctgagtgactggaccaacagcaacaagcagaagatgaagtatgacttcagctgtgagctgtacaggatgagcacctacagcaccttccctgctggggtgcctgtgtctgagaggagcctggcccgggccggcttctactacacaggagtgaatgacaaggtgaagtgcttctgctgcggcctgatgctggacaactggaagctgggggacagccccatccagaagcacaagcagctgtaccccagctgcagcttcatccagaacctggtgtctgccagcctgggcagcaccagcaagaacaccagccccatgagaaattcctttgcccacagcctgagccccaccctggagcacagcagcctcttcagcggcagctacagcagcctgagccccaaccccctgaacagcagagctgtggaggacatcagcagcagcaggaccaacccctacagctatgccatgagcacagaggaggcccgcttcctgacctaccacatgtggcccctgaccttcctgagccccagcgagctggcccgggccggcttctactacatcggccctggggacagagtggcctgctttgcctgtggcggcaagctgagcaactgggagcccaaggatgatgccatgtctgagcaccggcggcacttccccaactgccccttcctggagaacagcctggagaccctgcgcttcagcatcagcaacctgtccatgcagacccatgctgccaggatgaggaccttcatgtactggcccagctctgtgcctgtgcagcctgagcagctggccagcgctggcttctactacgtgggcagaaatgatgatgtgaagtgcttctgctgtgatggcggcctgcgctgctgggagagcggagatgacccctgggtggagcacgccaagtggttcccccgctgtgagttcctgatccgcatgaagggccaggagtttgtggatgagatccagggccgctacccccacctgctggagcagctgctgagcaccagtgacaccactggagaggagaatgctgacccccccatcatccactttggacctggagagagcagcagtgaagatgctgtgatgatgaacacccctgtggtgaagagcgccctggagatgggcttcaacagagacctggtgaagcagacagtgcagagcaagatcctgaccactggagagaactacaagacagtgaatgacatcgtgtctgccctgctgaatgcagaagatgagaagcgggaggaggagaaggagaagcaggccgaggagatggccagtgatgacctgagcctcatcaggaagaacaggatggccctcttccagcagctgacctgtgtgctgcccatcctggacaacctgctgaaggccaacgtcatcaacaagcaggagcatgacatcatcaagcagaagacccagatccccctgcaggcccgggagctgattgacaccatcctggtgaagggaaatgctgctgccaacatcttcaagaactgcctgaaggagattgacagcaccctgtacaagaacctgtttgtggacaagaacatgaagtacatccccacagaagatgtgtctggcctgagcctggaggagcagctgcggcggctgcaggaggagaggacctgcaaggtgtgcatggacaaggaggtgtctgtggtgttcatcccctgtggccacctggtggtgtgccaggagtgtgcccccagcctgaggaagtgccccatctgccggggcatcatcaagggcaccgtgaggaccttcctgtcctag

SEQ ID NO: 18459 - DNA, 1605 bp, synthetic construct
  misc_feature 1..1605: note = Description of Artificial Sequence: Synthetic coding sequence
  source 1..1605: mol_type = other DNA
atgcacaagacagccagccagaggctcttccctggccccagctaccagaacatcaagagcatcatggaggacagcaccatcctgagtgactggaccaacagcaacaagcagaagatgaagtatgacttcagctgtgagctgtacaggatgagcacctacagcaccttccctgctggggtgcctgtgtctgagaggagcctggcccgggccggcttctactacacaggagtgaatgacaaggtgaagtgcttctgctgcggcctgatgctggacaactggaagctgggggacagccccatccagaagcacaagcagctgtaccccagctgcagcttcatccagaacctggtgtctgccagcctgggcagcaccagcaagaacaccagccccatgaggaacagctttgcccacagcctgagccccaccctggagcacagcagcctcttcagcggcagctacagcagcctgagccccaaccccctgaacagcagagctgtggaggacatcagcagcagcaggaccaacccctacagctatgccatgagcacagaggaggcccgcttcctgacctaccacatgtggcccctgaccttcctgagccccagcgagctggcccgggccggcttctactacatcggccctggggacagagtggcctgctttgcctgtggcggcaagctgagcaactgggagcccaaggatgatgccatgtctgagcacagaagacacttccccaactgccccttcctggagaacagcctggagaccctgcgcttcagcatcagcaacctgtccatgcagacccacgccgccaggatgaggaccttcatgtactggcccagctctgtgcctgtgcagcctgagcagctggccagcgctggcttctactacgtgggcagaaatgatgatgtgaagtgcttctgctgtgatggcggcctgcgctgctgggagagcggagatgacccctgggtggagcacgccaagtggttcccccgctgtgagttcctgatccgcatgaagggccaggagtttgtggatgagatccagggccgctacccccacctgctggagcagctgctgagcaccagtgacaccaccggggaggagaatgctgacccccccatcatccacttcggccctggagagagcagcagtgaagatgctgtgatgatgaacacccctgtggtgaagagcgccctggagatgggcttcaacagagacctggtgaagcagacagtgcagagcaagatcctgaccaccggggagaactacaagacagtgaatgacatcgtgtctgccctgctgaatgcagaagatgagaagcgggaggaggagaaggagaagcaggccgaggagatggccagtgatgacctgagcctcatcaggaagaacaggatggccctcttccagcagctgacctgtgtgctgcccatcctggacaacctgctgaaggccaacgtcatcaacaagcaggagcatgacatcatcaagcagaagacccagatccccctgcaggcccgggagctgattgacaccatcctggtgaagggaaatgctgctgccaacatcttcaagaactgcctgaaggtgaagcagcgcttctag

SEQ ID NO: 18460 - DNA, 1815 bp, synthetic construct
  misc_feature 1..1815: note = Description of Artificial Sequence: Synthetic coding sequence
  source 1..1815: mol_type = other DNA
atgaacatcgtggagaacagcatcttcctgagcaacctgatgaagagcgccaacacctttgagctgaagtatgacctgagctgtgagctgtacaggatgagcacctacagcaccttccctgctggggtgcctgtgtctgagaggagcctggcccgggccggcttctactacacaggagtgaatgacaaggtgaagtgcttctgctgcggcctgatgctggacaactggaagagaggagacagccccacagagaagcacaagaagctgtaccccagctgccgctttgtgcagagcctgaacagcgtgaacaacctggaggccaccagccagcccaccttccccagctctgtgaccaacagcacccacagcctgctgcccggcacagaaaattctggctacttccggggcagctacagcaacagccccagcaaccctgtgaacagccgggccaaccaggacttcagcgccctgatgaggagcagctaccactgtgccatgaacaatgaaaatgcccggctgctgaccttccagacctggcccctgaccttcctgagccccacagacctggccaaggccggcttctactacatcggccctggggacagagtggcctgctttgcctgtggcggcaagctgagcaactgggagcccaaggacaatgccatgtctgagcacctgcggcacttccccaagtgccccttcatcgagaaccagctgcaggacaccagccgctacacagtgagcaacctgtccatgcagacccacgccgcccgcttcaagaccttcttcaactggcccagctctgtgctggtgaaccctgagcagctggccagcgctggcttctactacgtgggcaacagtgatgatgtgaagtgcttctgctgtgatggcggcctgcgctgctgggagagcggagatgacccctgggtgcagcacgccaagtggttcccccgctgtgagtacctgatccgcatcaagggccaggagttcatccggcaggtgcaggccagctacccccacctgctggagcagctgctgagcaccagtgacagccctggagatgaaaatgctgagagcagcatcatccactttgagcccggggaggaccacagtgaagatgccatcatgatgaacacccctgtgatcaatgctgctgtggagatgggcttcagccgcagcctggtgaagcagacagtgcagaggaagatcctggccaccggggagaactaccgcctggtgaatgacctggtgctggacctgctgaatgcagaagatgagatccgggaggaggagcgggagcgggccacagaggagaaggagagcaatgacctgctgctgatcaggaagaacaggatggccctcttccagcacctgacctgtgtgatccccatcctggacagcctgctgacagctggcatcatcaatgagcaggagcatgatgtgatcaagcagaagacccagaccagcctgcaggcccgggagctgattgacaccatcctggtgaagggcaacattgctgccaccgtcttcaggaacagcctgcaggaggccgaggccgtgctgtatgagcacctgtttgtgcagcaggacatcaagtacatccccacagaagatgtgtctgacctgcctgtggaggagcagctgcggcggctgcaggaggagaggacctgcaaggtgtgcatggacaaggaggtgtccatcgtgttcatcccctgtggccacctggtggtgtgcaaggactgtgcccccagcctgaggaaatgtcccatctgccgcagcaccatcaagggcaccgtgaggaccttcctgtcctag

SEQ ID NO: 18461 - DNA, 1815 bp, synthetic construct; identical to SEQ ID NO: 18460
  misc_feature 1..1815: note = Description of Artificial Sequence: Synthetic coding sequence
  source 1..1815: mol_type = other DNA

SEQ ID NO: 18462 - DNA, 498 bp, synthetic construct
  misc_feature 1..498: note = Description of Artificial Sequence: Synthetic coding sequence
  source 1..498: mol_type = other DNA
atgggcgcccccaccctgcccccagcctggcagcccttcctgaaggaccaccgcatcagcaccttcaagaactggcccttcctggagggctgtgcctgcaccccagagaggatggccgaggccggcttcatccactgccccacagaaaatgaaccagacctggcccagtgcttcttctgcttcaaggagctggagggctgggagccagatgatgaccccatcggccctggcaccgtggcctatgcctgcaacaccagcaccctgggcggccggggcggccgcatcacccgggaggagcacaagaagcacagcagcggctgtgccttcctgtctgtgaagaagcagtttgaggagctgaccctgggggagttcctgaagctggaccgggagcgggccaagaacaagatcgccaaggagaccaacaacaagaagaaggagtttgaggagacagctgagaaggtgagaagagccatcgagcagctggccgccatggactag

SEQ ID NO: 18463 - DNA, 429 bp, synthetic construct
  misc_feature 1..429: note = Description of Artificial Sequence: Synthetic coding sequence
  source 1..429: mol_type = other DNA
atgggcgcccccaccctgcccccagcctggcagcccttcctgaaggaccaccgcatcagcaccttcaagaactggcccttcctggagggctgtgcctgcaccccagagaggatggccgaggccggcttcatccactgccccacagaaaatgaaccagacctggcccagtgcttcttctgcttcaaggagctggagggctgggagccagatgatgaccccatcgaggagcacaagaagcacagcagcggctgtgccttcctgtctgtgaagaagcagtttgaggagctgaccctgggggagttcctgaagctggaccgggagcgggccaagaacaagatcgccaaggagaccaacaacaagaagaaggagtttgaggagacagctgagaaggtgcggcgggccatcgagcagctggccgccatggactag

SEQ ID NO: 18464 - DNA, 414 bp, synthetic construct
  misc_feature 1..414: note = Description of Artificial Sequence: Synthetic coding sequence
  source 1..414: mol_type = other DNA
atgggcgcccccaccctgcccccagcctggcagcccttcctgaaggaccaccgcatcagcaccttcaagaactggcccttcctggagggctgtgcctgcaccccagagaggatggccgaggccggcttcatccactgccccacagaaaatgaaccagacctggcccagtgcttcttctgcttcaaggagctggagggctgggagccagatgatgaccccatgcagaggaagcccaccatccggaggaagaacctgaggaagctgcggaggaaatgtgctgtgcccagcagctcctggctgccctggattgaggccagcggccgcagctgcctggtgcctgagtggctgcaccacttccagggcctcttccctggggccaccagcctgcctgtgggccccctggccatgtcctag

SEQ ID NO: 18465 - DNA, 432 bp, synthetic construct
  misc_feature 1..432: note = Description of Artificial Sequence: Synthetic coding sequence
  source 1..432: mol_type = other DNA
atgggcgcccccaccctgcccccagcctggcagcccttcctgaaggaccaccgcatcagcaccttcaagaactggcccttcctggagggctgtgcctgcaccccagagaggatggccgaggccggcttcatccactgccccacagaaaatgaaccagacctggcccagtgcttcttctgcttcaaggagctggagggctgggagccagatgatgaccccatcggccctggcaccgtggcctatgcctgcaacaccagcaccctgggcggccggggcggccgcatcacccgggaggagcacaagaagcacagcagcggctgtgccttcctgtctgtgaagaagcagtttgaggagctgaccctgggggagttcctgaagctggaccgggagcgggccaagaacaagattgaaagagccctgctggccgagtag

SEQ ID NO: 18466 - DNA, 14574 bp, synthetic construct
  misc_feature 1..14574: note = Description of Artificial Sequence: Synthetic coding sequence
  source 1..14574: mol_type = other DNA
atggtgactggaggaggagctgcccctcctggcaccgtgacagagcccctgcccagcgtgattgtgctgtctgctggcaggaagatggctgctgctgctgctgctgccagcggccctggctgcagcagcgctgctggagctggagctgctggggtgtctgagtggctggtgctgagagatggctgcatgcactgtgatgctgatggcctgcacagcctgagctaccacccagccctgaatgccatcctggccgtgaccagccggggcaccatcaaggtgattgatggcaccagcggggccaccctgcaggccagcgccctgagcgccaagccaggcggccaggtgaagtgccagtacatctctgctgtggacaaggtgatctttgtggatgattatgctgtgggctgcaggaaggacctgaatggcatcctgctgctggacacagccctgcagacccctgtgtccaagcaggatgatgtggtgcagctggagctgcctgtgacagaggcccagcagctgctgagcgcctgcctggagaaggtggacatcagcagcacagagggctatgacctcttcatcacccagctgaaggatggcctgaagaacaccagccatgaaacagctgccaaccacaaggtggccaagtgggccaccgtgaccttccacctgccccaccacgtgctgaagagcatcgccagcgccatcgtgaatgagctgaagaagatcaaccagaatgtggccgccctgcctgtggccagctctgtgatggaccggctgagctacctgctgcccagcgcccggcctgagctgggcgtgggccctggccgctctgtggacaggagcctgatgtacagcgaggccaacagaagagagaccttcacctcctggccccacgtgggctaccgctgggcccagcctgaccccatggcccaggccggcttctaccaccagcctgccagcagtggagatgaccgggccatgtgcttcacctgcagcgtgtgcctggtgtgctgggagcccacagatgagccctggagcgagcacgagcggcacagccccaactgcccctttgtgaagggggagcacacccagaatgtgcccctgtctgtgaccctggccaccagccctgcccagttcccctgcacagatggaacagaccgcatcagctgctttggaagtggcagctgcccccacttcctggccgccgccaccaagaggggcaagatctgcatctgggatgtgtccaagctgatgaaggtgcacctgaagtttgagatcaatgcctatgaccctgccatcgtgcagcagctgatcctgagcggggaccccagcagtggagtggacagccggcggcccaccctggcctggctggaggacagcagcagctgcagcgacatccccaagctggagggggacagtgatgacctgctggaggacagcgacagcgaggagcacagcagaagtgacagcgtgacaggccacaccagccagaaggaggccatggaggtgtccctggacatcacagccctgagcatcctgcagcagcctgagaagctgcagtgggagatcgtggccaacgtgctggaggacacagtgaaggacctggaggagctgggcgccaacccctgcctgaccaacagcaagtctgagaagaccaaggagaagcaccaggagcagcacaacatccccttcccctgcctgctggccggcggcctgctgacctacaagagccctgccaccagccccatcagcagcaacagccacaggagcctggatggcctgagcaggacccagggcgagagcatcagcgagcagggcagcacagacaatgaaagctgcaccaacagcgagctgaacagccccctggtgcggaggaccctgcctgtgctgctgctgtacagcatcaaggagagtgatgagaaggccggcaagatcttcagccagatgaacaacatcatgagcaagagcctgcatgatgatggcttcaccgtgccccagatcatcgagatggagctggacagccaggagcagctgctgctgcaggacccccctgtgacctacatccagcagtttgctgatgctgctgccaacctgaccagcccagattctgagaagtggaacagcgtcttccccaagccaggcaccctggtgcagtgcctgcggctgcccaagtttgctgaggaggagaacctgtgcatcgacagcatcaccccctgtgctgatggcatccacctgctggtgggcctgcggacctgccctgtggagagcctgagcgccatcaaccaggtggaggccctgaacaacctgaacaagctgaacagcgccctgtgcaacagaagaaaaggagagctggagagcaacctggccgtggtgaatggagccaacatcagcgtcatccagcacgagagccctgcagatgtgcagacccccctcatcatccagcctgagcagagaaatgtgtctgggggctacctggtgctgtacaagatgaactatgccacccgcatcgtgaccctggaggaggagcccatcaagatccagcacatcaaggacccccaggacaccatcaccagcctcatcctgctgcccccagacatcctggacaacagagaagatgactgtgaggagcccatcgaggacatgcagctgaccagcaagaatggatttgagcgggagaagaccagtgacatcagcaccctgggccacctggtgatcaccacccagggcggctacgtgaagatcctggacctgagcaactttgagatcctggccaaggtggagccccccaagaaggagggcacagaggagcaggacacctttgtgtctgtcatctactgcagcggcacagaccggctgtgtgcctgcaccaagggcggggagctgcacttcctgcagatcggcggcacctgtgatgacattgatgaggccgacatcctggtggatggcagcctgagcaagggcatcgagcccagcagcgagggcagcaagcccctgagcaaccccagcagccctggcatctctggagtggacctgctggtggaccagcccttcaccctggagatcctgaccagcctggtggagctgaccaggtttgagaccctgaccccccgcttcagcgccaccgtgcccccctgctgggtggaggtgcagcaggagcagcagcagaggaggcacccccagcacctgcaccagcagcaccacggagatgctgcccagcacaccaggacctggaagctgcagacagacagcaacagctgggatgaacatgtgtttgagctggtgctgcccaaggcctgcatggtgggccacgtggacttcaagtttgtgctgaacagcaacatcaccaacatcccccagatccaggtgaccctgctgaagaacaaggcccctggcctgggcaaggtgaatgccctgaacatcgaggtggagcagaatggcaagcccagcctggtggacctgaatgaggagatgcagcacatggatgtggaggagagccagtgcctgcggctgtgccccttcctggaggaccacaaggaggacatcctgtgtggccctgtgtggctggccagcggcctggacctgagcggccacgccggcatgctgaccctgaccagccccaagctggtgaagggcatggccggcggcaagtaccgctccttcctgattcatgtgaaggctgtgaatgaaagaggaacagaggagatctgcaatggaggcatgaggcctgtggtgcggctgcccagcctgaagcaccagagcaacaagggctacagcctggccagcctgctggccaaggtggccgccggcaaggagaagagcagcaatgtgaagaatgaaaacaccagcggcaccaggaagtctgagaacctgcggggctgtgacctgctgcaggaggtgtctgtgaccatccgccgcttcaagaagaccagcatcagcaaggagcgggtgcagagatgtgccatgctgcagttcagcgagttccacgagaagctggtgaacaccctgtgcaggaagacagatgatggccagatcacagaacatgcccagagcctggtgctggacaccctgtgctggctggccggcgtgcacagcaatggacctggcagcagcaaggagggcaatgaaaacctgctgagcaagaccaggaagttcctgagtgacatcgtgcgggtgtgcttctttgaggccggccgcagcatcgcccacaagtgtgcccgcttcctggccctgtgcatcagcaatggaaaatgtgacccctgccagcctgccttcggccctgtgctgctgaaggccctgctggacaacatgtccttcctgcctgctgccaccaccggcggctctgtgtactggtactttgtgctgctgaactacgtgaaggatgaggacctggccggctgcagcacagcctgtgccagcctgctgacagctgtgtcccggcagctgcaggaccggctgacccccatggaggccctgctgcagaccaggtatggcctgtacagcagcccctttgatcctgtgctgtttgacctggagatgagcggcagcagctgcaagaatgtgtacaacagcagcattggagtgcagagtgatgaaattgacctgagtgatgtgctgtctggaaatggcaaggtgagcagctgcacagctgctgagggcagcttcaccagcctgaccggcctgctggaggtggagcccctgcacttcacctgtgtgtccaccagtgatggcaccagaattgaaagagatgatgccatgagcagctttggagtgaccccagctgtgggcggcctgagcagcggcaccgtgggggaggccagcacagccctgagcagcgctgcccaggtggccctgcagagcctgagccacgccatggccagcgctgagcagcagctgcaggtgctgcaggagaagcagcagcagctgctgaagctgcagcagcagaaggccaagctggaggccaagctgcaccagaccacagctgctgctgctgctgctgccagcgctgtgggccctgtgcacaacagcgtgcccagcaaccctgtggccgcccctggcttcttcatccaccccagtgatgtgattcctcccacccccaagaccacccccctcttcatgaccccacccctgaccccaccaaatgaagctgtgtctgtggtgatcaatgctgagctggcccagctgtttcctggctctgtgattgatcctcctgctgtgaacctggccgcccacaacaagaacagcaacaagagcaggatgaaccccctgggcagcggcctggccctggccatcagccacgccagccacttcctgcagcccccaccccaccagagcatcatcatcgagaggatgcacagcggggccaggagatttgtgaccctggactttggccggcccatcctgctgacagatgtgctgatccccacctgtggggacctggccagcctgagcattgacatctggaccctgggggaggaggtggatggaagaaggctggtggtggccacagacatcagcacccacagcctcatcctgcatgacctgatccccccacctgtgtgccgcttcatgaagatcaccgtgattggccgctatggcagcaccaatgcccgggccaagatccccctgggcttctactacggccacacctacatcctgccctgggagagcgagctgaagctgatgcatgaccccctgaagggggagggggagagcgccaaccagcctgagattgaccagcacctggccatgatggtggccctgcaggaggacatccagtgccgctacaacctggcctgccaccggctggagaccctgctgcagagcattgacctgccccccctgaacagcgccaacaatgcccagtacttcctgaggaagccagacaaggctgtggaggaggacagcagggtcttcagcgcctaccaggactgcatccagctgcagctgcagctgaacctggcccacaatgctgtgcagaggctgaaggtggccctgggcgccagcaggaagatgctgtctgagaccagcaaccctgaggacctgatccagaccagcagcacagagcagctgcggaccatcatccgctacctgctggacaccctgctgagcctgctgcacgccagcaatggccacagcgtgcctgctgtgctgcagagcaccttccacgcccaggcctgtgaggagctgttcaagcacctgtgcatcagcggcacccccaagatccggctgcacacaggcctgctgctggtgcagctgtgtggcggggagcgctggtggggccagttcctgagcaatgtgctgcaggagctgtacaacagcgagcagctgctgatcttcccccaggacagagtcttcatgctgctgagctgcatcggccagaggagcctgagcaacagcggcgtgctggagagcctgctgaacctgctggacaacctgctgagccccctgcagccccagctgcccatgcacagaagaacagaaggagtgctggacatccccatgatctcctgggtggtgatgctggtgtcccggctgctggactatgtggccaccgtggaggatgaagctgctgctgccaagaagcccctgaatggaaaccagtggagcttcatcaacaacaacctgcacacccagagcctgaacagaagcagcaagggcagcagcagcctggaccggctgtacagcaggaagatcaggaagcagctggtgcaccacaagcagcagctgaacctgctgaaggccaagcagaaggccctggtggagcagatggagaaggagaagatccagagcaacaagggcagcagctacaagctgctggtggagcaggccaagctgaagcaggccaccagcaagcacttcaaggacctgatccggctgcggaggacagctgagtggagccgcagcaacctggacacagaggtgaccacagccaaggagagccctgagattgagcccctgcccttcaccctggcccacgagcgctgcatctctgtggtgcagaagctggtgctcttcctgctgtccatggacttcacctgccacgccgacctgctgctgtttgtgtgcaaggtgctggccagaattgccaatgccacccggcccaccatccacctgtgtgagatcgtgaatgagccccagctggagcggctgctgctgctgctggtgggcacagacttcaacagaggagacatctcctggggcggggcctgggcccagtacagcctgacctgcatgctgcaggacatcctggccggggagctgctggcccctgtggccgctgaggccatggaggagggcaccgtgggagatgatgtgggcgccacagctggggacagtgatgacagcctgcagcagagctctgtgcagctgctggagaccattgatgagcccctgacccatgacatcactggagccccacccctgagcagcctggagaaggacaaggagattgacctggagctgctgcaggacctgatggaggtggacatcgaccccctggacatcgacctggagaaggaccccctggccgccaaggtgttcaagcccatcagcagcacctggtatgactactggggcgctgactatggcacctacaactacaacccctacatcggcggcctgggcatccctgtggccaagcccccagccaacacagagaagaatggcagccagacagtgtctgtgtctgtgtcccaggccctggatgcccggctggaggtgggcctggagcagcaggccgagctgatgctgaagatgatgagcaccctggaggccgacagcatcctgcaggccctgaccaacaccagccccaccctgagccagagccccaccggcacagatgacagcctgctgggcggcctgcaggccgccaaccagaccagccagctgatcatccagctgagctctgtgcccatgctgaatgtgtgcttcaacaagctgttctccatgctgcaggtgcaccacgtgcagctggagagcctgctgcagctgtggctgaccctgagcctgaacagcagcagcacaggcaacaaggaaaatggagctgacatcttcctgtacaatgccaaccgcatccctgtgatcagcctgaaccaggccagcatcaccagcttcctgactgtgctggcctggtaccccaacaccctgctgcggacctggtgcctggtgctgcacagcctgaccctgatgaccaacatgcagctgaacagcggcagcagcagcgccatcggcacccaggagagcacagcccacctgctggtgtctgaccccaacctgatccacgtgctggtgaagttcctgagcggcaccagcccccacggcaccaaccagcacagcccccaggtgggccccacagccacccaggccatgcaggagttcctgacccggctgcaggtgcacctgagcagcacctgcccccagatcttcagcgagttcctgctgaagctgatccacatcctgagcacagagcggggggccttccagacaggccagggccccctggatgcccaggtgaagctgctggagttcaccctggagcagaactttgaggtggtgtctgtgtccaccatctctgctgtgattgagagcgtgaccttcctggtgcaccactacatcacctgcagcgacaaggtgatgagccgcagcggcagtgacagctctgtgggcgcccgggcctgctttggaggcctgtttgccaacctgatccggcctggagatgccaaggctgtgtgtggggagatgacccgggaccagctgatgtttgacctgctgaagctggtgaacatcctggtgcagctgcccctgagcggcaaccgggagtacagcgcccgggtgtctgtgaccaccaacaccacagattctgtgtctgatgaggagaaggtgtctgggggcaaggatggaaatggcagcagcacctctgtgcagggcagccctgcctacgtggccgacctggtgctggccaaccagcagatcatgagccagatcctgagcgccctgggcctgtgcaacagcagcgccatggccatgatcatcggggccagcggcctgcacctgaccaagcatgagaacttccacggcggcctggatgccatctctgtgggagatggcctcttcaccatcctgaccaccctgagcaagaaggccagcacagtgcacatgatgctgcagcccatcctgacctacatggcctgtggctacatgggccggcagggcagcctggccacctgccagctgtctgagcccctgctgtggttcatcctgcgggtgctggacaccagtgatgccctgaaggccttccatgacatgggcggcgtgcagctgatctgcaacaacatggtgaccagcacccgggccatcgtgaacacagcccgctccatggtgtccaccatcatgaagttcctggacagcggccccaacaaggctgtggacagcaccctgaagacccgcatcctggccagcgagccagacaatgctgagggcatccacaactttgcccccctgggcaccatcaccagcagcagccccacagcccagcctgctgaggtgctgctgcaggccaccccaccccaccggcgggcccggtctgctgcctggagctacatcttcctgcctgaggaggcctggtgtgacctgaccatccacctgcctgctgctgtgctgctgaaggagatccacatccagccccacctggccagcctggccacctgccccagctctgtgtctgtggaggtgtctgcagatggagtgaacatgctgcccctgagcacccctgtggtgaccagcggcctgacctacatcaagatccagctggtgaaggccgaggtggccagcgctgtgtgcctgcggctgcaccggcccagagatgccagcaccctgggcctgagccagatcaagctgctgggcctgacagccttcggcaccaccagcagcgccaccgtgaacaaccccttcctgcccagcgaggaccaggtgtccaagaccagcatcggctggctgcggctgctgcaccactgcctgacccacatcagtgacctggagggcatgatggccagcgctgctgcccccacagccaacctgctgcagacctgtgccgccctgctgatgagcccctactgcggcatgcacagccccaacatcgaggtggtgctggtgaagattggcctgcagagcacccgcatcggcctgaagctgattgacatcctgctgaggaactgtgccgccagcggcagtgaccccacagacctgaacagccccctgctgtttggccgcctgaatggcctgagcagtgacagcaccatcgacatcctgtaccagctgggcaccacccaggaccccggcaccaaggaccgcatccaggccctgctgaagtgggtgtctgacagcgcccgggtggccgccatgaagaggagcggccgcatgaactacatgtgccccaacagcagcacagtggagtatggcctgctgatgcccagccccagccacctgcactgtgtggccgccatcctgtggcacagctatgagctgctggtggagtatgacctgcctgccctgctggaccaggagctgtttgagctgctcttcaactggagcatgagcctgccctgcaacatggtgctgaagaaggctgtggacagcctgctgtgcagcatgtgccacgtgcaccccaactacttcagcctgctgatgggctggatgggcatcaccccacctcctgtgcagtgccaccaccggctgtccatgacagatgacagcaagaagcaggacctgagcagcagcctgacagatgacagcaagaatgcccaggcccccctggccctgacagagagccacctggccaccctggccagcagcagccagagccctgaggccatcaagcagctgctggacagcggcctgcccagcctgctggtgcgcagcctggccagcttctgcttcagccacatcagcagcagcgagagcatcgcccagagcattgacatcagccaggacaagctgcggcggcaccacgtgccccagcagtgcaacaagatgcccatcacagctgacctggtggcccccatcctgcgcttcctgacagaggtgggcaacagccacatcatgaaggactggctgggcggcagcgaggtgaaccccctgtggacagccctgctcttcctgctgtgccacagcggcagcaccagcggcagccacaacctgggcgcccagcagaccagcgcccggagcgccagcctgagcagcgctgccaccaccggcctgaccacccagcagaggacagccattgaaaatgccaccgtggccttcttcctgcagtgcatcagctgccaccccaacaaccagaagctgatggcccaggtgctgtgtgagctgttccagaccagcccccagaggggcaacctgcccaccagcggcaacatcagcggcttcatcagaagactcttcctgcagctgatgctggaggatgagaaggtgaccatgttcctgcagagcccctgccccctgtacaagggccgcatcaatgccaccagccacgtgatccagcaccccatgtatggagctggccacaagttccgcaccctgcacctgcctgtgtccaccaccctgagtgatgtgctggacagagtgtctgacacccccagcatcacagccaagctgatcagcgagcagaaggatgacaaggagaagaagaaccacgaggagaaggagaaggtgaaggcagaaaatggcttccaggacaactacagcgtggtggtggccagcggcctgaagagccagagcaagagagctgtgtctgccaccccacccaggcctcccagccggcggggccgcaccatcccagacaagattggcagcaccagcggggctgaggccgccaacaagatcatcaccgtgcctgtgttccacctgttccacaagctgctggccggccagcccctgcctgctgagatgaccctggcccagctgctgaccctgctgtatgacaggaagctgccccagggctaccgcagcattgacctgactgtgaagctgggcagcagggtcatcacagaccccagcctgagcaagacagacagctacaagaggctgcaccctgagaaggaccatggagacctgctggccagctgcccagaagatgaggccctgaccccaggagatgagtgcatggatggcatcctggatgagagcctgctggagacctgccccatccagagccccctgcaggtgtttgctggcatgggcggcctggccctgattgctgagcggctgcccatgctgtacccagaggtgatccagcaggtgtctgcccctgtggtgaccagcaccacccaggagaagcccaaggacagcgaccagtttgagtgggtgaccatcgagcagagcggggagctggtgtatgaggcccctgagaccgtggccgctgagcccccacccatcaagtctgctgtgcagaccatgagccccatcccagcccacagcctggccgccttcggcctcttcctgcggctgcccggctatgcagaggtgctgctgaaggagaggaagcacgcccagtgcctgctgcggctggtgctgggcgtgacagatgatggagagggcagccacatcctgcagagccccagcgccaacgtgctgcccaccctgcccttccacgtgctgcggagcctcttcagcaccacccccctgaccacagatgatggagtgctgctgcggaggatggccctggagattggagccctgcacctgatcctggtgtgcctgagcgccctgagccaccacagcccccgggtgcccaacagctctgtgaaccagacagagccccaggtgagcagcagccacaaccccaccagcacagaggagcagcagctgtactgggccaagggcactggatttggaacaggcagcacagccagcggctgggatgtggagcaggccctgaccaagcagaggctggaggaggagcacgtgacctgcctgctgcaggtgctggccagctacatcaaccctgtgagcagcgctgtgaatggagaggcccagagcagccatgagacccggggccagaacagcaatgccctgcccagcgtgctgctggagctgctgagccagagctgcctgatcccagccatgagcagctacctgagaaatgattctgtgctggacatggcccggcacgtgcccctgtaccgggccctgctggagctgctgcgggccatcgccagctgtgccgccatggtgcccctgctgctgcccctgagcacagaaaatggagaggaggaggaggagcagagcgagtgccagacctctgtgggcaccctgctggccaagatgaagacctgtgtggacacctacaccaaccggctgcggagcaagcgggagaatgtgaagacaggagtgaagccagatgccagtgaccaggagcctgagggcctgaccctgctggtgcctgacatccagaagacagctgagatcgtgtatgctgccaccaccagcctgcggcaggccaaccaggagaagaagctgggggagtacagcaagaaggccgccatgaagcccaagcccctgtctgtgctgaagagcctggaggagaagtatgtggccgtgatgaagaagctgcagtttgacacctttgagatggtgtctgaagatgaagatggcaagctgggcttcaaggtgaactaccactacatgagccaggtgaagaatgccaatgatgccaacagcgctgcccgggcccggcggctggcccaggaggccgtgaccctgagcaccagcctgcccctgagcagcagcagctctgtgtttgtgcgctgtgatgaggagcggctggacatcatgaaggtgctgatcaccggccctgctgacaccccctatgccaacggctgctttgaatttgatgtgtacttcccccaggactaccccagcagcccccccctggtgaacctggagaccaccggcggccacagcgtgcgcttcaaccccaacctgtacaatgatggcaaggtgtgcctgagcatcctgaacacctggcacggccggcctgaggagaagtggaacccccagaccagcagcttcctgcaggtgctggtgtctgtgcagagcctcatcctggtggccgagccctacttcaatgaacctggctatgaaagaagccggggcaccccatctggcacccagagcagccgggagtatgatggcaacatccggcaggccaccgtgaagtgggccatgctggagcagatccggaaccccagcccctgcttcaaggaggtgatccacaagcacttctacctgaagagggtggagatcatggcccagtgtgaggagtggattgctgacatccagcagtacagcagtgacaagagggtgggccgcaccatgagccaccacgccgccgccctgaagaggcacacagcccagctgcgggaggagctgctgaagctgccctgcccagagggcctggaccctgacacagatgatgcccctgaggtgtgccgggccaccaccggggctgaggagaccctgatgcatgaccaggtgaagcccagcagcagcaaggagctgcccagcgacttccagctgtag

SEQ ID NO: 18467 - DNA, 1566 bp, synthetic construct
  misc_feature 1..1566: note = Description of Artificial Sequence: Synthetic coding sequence
  source 1..1566: mol_type = other DNA
atgagcctgagccgctctgaggagatgcaccggctgacagaaaatgtgtacaagaccatcatggagcagttcaaccccagcctgaggaacttcatcgccatgggcaagaactatgagaaggccctggccggcgtgacctacgccgccaagggctactttgatgccctggtgaagatgggagagctggccagcgagagccagggcagcaaggagctgggagatgtgctcttccagatggccgaggtgcaccggcagatccagaaccagctggaggagatgctgaagagcttccacaatgagctgctgacccagctggagcagaaggtggagctggacagccgctacctgtctgctgccctgaagaagtaccagacagagcagaggagcaaaggagatgccctggacaagtgccaggccgagctgaagaagctgaggaagaagagccagggcagcaagaacccccagaagtacagcgacaaggagctgcagtacattgatgccatcagcaacaagcagggcgagctggagaactacgtgtctgatggctacaagacagccctgacagaggagcggcggcgcttctgcttcctggtggagaagcagtgtgctgtggccaagaacagcgctgcctaccacagcaagggcaaggagctgctggcccagaagctgcccctgtggcagcaggcctgtgccgaccccagcaagatccctgagagagctgtgcagctgatgcagcaggtggccagcaatggagccaccctgcccagcgccctgagcgccagcaagagcaacctggtgatcagtgaccccatccctggggccaagcccctgcctgtgcccccagagctggccccctttgtgggccgcatgtctgcccaggagagcacccccatcatgaatggagtgactggaccagatggagaggactacagcccctgggccgacaggaaggccgcccagcccaagagcctgagccccccccagagccagagcaagctgagtgacagctacagcaacaccctgcctgtgaggaagtctgtgacccccaagaacagctatgccaccacagagaacaagaccctgcccaggagcagctccatggctgctggcctggagagaaatggccgcatgagggtgaaggccatcttcagccacgccgccggggacaacagcaccctgctgtccttcaaggagggggacctgatcaccctgctggtgcctgaggccagagatggctggcactatggagagagcgagaagaccaagatgaggggctggttccccttctcctacaccagggtgctggacagtgatggcagtgaccggctgcacatgagcctgcagcagggcaagagcagcagcactggaaacctgctggacaaggatgacctggccatccccccaccagactatggagctgccagccgggccttccctgcccagacagccagcggcttcaagcagaggccctacagcgtggccgtgcctgccttcagccagggcctggatgattatggagcccgctccatgagcagcggcagcggcaccctggtgtccacagtgtag

SEQ ID NO: 18468 - DNA, 1659 bp, synthetic construct
  misc_feature 1..1659: note = Description of Artificial Sequence: Synthetic coding sequence
  source 1..1659: mol_type = other DNA
atgagcctgagccgctctgaggagatgcaccggctgacagaaaatgtgtacaagaccatcatggagcagttcaaccccagcctgaggaacttcatcgccatgggcaagaactatgagaaggccctggccggcgtgacctacgccgccaagggctactttgatgccctggtgaagatgggagagctggccagcgagagccagggcagcaaggagctgggagatgtgctcttccagatggccgaggtgcaccggcagatccagaaccagctggaggagatgctgaagagcttccacaatgagctgctgacccagctggagcagaaggtggagctggacagccgctacctgtctgctgccctgaagaagtaccagacagagcagaggagcaaaggagatgccctggacaagtgccaggccgagctgaagaagctgaggaagaagagccagggcagcaagaacccccagaagtacagcgacaaggagctgcagtacattgatgccatcagcaacaagcagggcgagctggagaactacgtgtctgatggctacaagacagccctgacagaggagcggcggcgcttctgcttcctggtggagaagcagtgtgctgtggccaagaacagcgctgcctaccacagcaagggcaaggagctgctggcccagaagctgcccctgtggcagcaggcctgtgccgaccccagcaagatccctgagagagctgtgcagctgatgcagcaggtggccagcaatggagccaccctgcccagcgccctgagcgccagcaagagcaacctggtgatcagtgaccccatccctggggccaagcccctgcctgtgcccccagagctggccccctttgtgggccgcatgtctgcccaggagagcacccccatcatgaatggagtgactggaccagatggagaggactacagcccctgggccgacaggaaggccgcccagcccaagagcctgagccccccccagagccagagcaagctgagtgacagctacagcaacaccctgcctgtgaggaagtctgtgacccccaagaacagctatgccaccacagagaacaagaccctgcccaggagcagctccatggctgctggcctggagagaaatggccgcatgagggtgaaggccatcttcagccacgccgccggggacaacagcaccctgctgtccttcaaggagggggacctgatcaccctgctggtgcctgaggccagagatggctggcactatggagagagcgagaagaccaagatgaggggctggttccccttctcctacaccagggtgctggacagtgatggcagtgaccggctgcacatgagcctgcagcagggcaagagcagcagcactggaaacctgctggacaaggatgacctggccatccccccaccagactatggagctgccagccgggccttccctgcccagacagccagcggcttcaagcagaggccctacagcgtggccgtgcctgccttcagccagggcctggatgattatggagcccgctccatgagcaggaacccctttgcccacgtgcagctgaagcccaccgtgaccaatgacagatgtgacctgagcgcccagggccctgagggccgggagcacggagatggcagcgcccggaccctggccggccgctag

SEQ ID NO: 18469 - DNA, 1371 bp, synthetic construct
  misc_feature 1..1371: note = Description of Artificial Sequence: Synthetic coding sequence
  source 1..1371: mol_type = other DNA
atggccgaggtgcaccggcagatccagaaccagctggaggagatgctgaagagcttccacaatgagctgctgacccagctggagcagaaggtggagctggacagccgctacctgtctgctgccctgaagaagtaccagacagagcagaggagcaaaggagatgccctggacaagtgccaggccgagctgaagaagctgaggaagaagagccagggcagcaagaacccccagaagtacagcgacaaggagctgcagtacattgatgccatcagcaacaagcagggcgagctggagaactacgtgtctgatggctacaagacagccctgacagaggagcggcggcgcttctgcttcctggtggagaagcagtgtgctgtggccaagaacagcgctgcctaccacagcaagggcaaggagctgctggcccagaagctgcccctgtggcagcaggcctgtgccgaccccagcaagatccctgagagagctgtgcagctgatgcagcaggtggccagcaatggagccaccctgcccagcgccctgagcgccagcaagagcaacctggtgatcagtgaccccatccctggggccaagcccctgcctgtgcccccagagctggccccctttgtgggccgcatgtctgcccaggagagcacccccatcatgaatggagtgactggaccagatggagaggactacagcccctgggccgacaggaaggccgcccagcccaagagcctgagccccccccagagccagagcaagctgagtgacagctacagcaacaccctgcctgtgaggaagtctgtgacccccaagaacagctatgccaccacagagaacaagaccctgcccaggagcagctccatggctgctggcctggagagaaatggccgcatgagggtgaaggccatcttcagccacgccgccggggacaacagcaccctgctgtccttcaaggagggggacctgatcaccctgctggtgcctgaggccagagatggctggcactatggagagagcgagaagaccaagatgaggggctggttccccttctcctacaccagggtgctggacagtgatggcagtgaccggctgcacatgagcctgcagcagggcaagagcagcagcactggaaacctgctggacaaggatgacctggccatccccccaccagactatggagctgccagccgggccttccctgcccagacagccagcggcttcaagcagaggccctacagcgtggccgtgcctgccttcagccagggcctggatgattatggagcccgctccatgagcaggaacccctttgcccacgtgcagctgaagcccaccgtgaccaatgacagaagtgcccccctgctgtcctag

SEQ ID NO: 18470 - DNA, 1128 bp, synthetic construct
  misc_feature 1..1128: note = Description of Artificial Sequence: Synthetic coding sequence
  source 1..1128: mol_type = other DNA
atgctgctgcctgagggccagaggcagagggccctgggcttcggcaccgtgaccagcacctacagccctgtgggccagtacattgatgccatcagcaacaagcagggcgagctggagaactacgtgtctgatggctacaagacagccctgacagaggagcggcggcgcttctgcttcctggtggagaagcagtgtgctgtggccaagaacagcgctgcctaccacagcaagggcaaggagctgctggcccagaagctgcccctgtggcagcaggcctgtgccgaccccagcaagatccctgagagagctgtgcagctgatgcagcaggtggccagcaatggagccaccctgcccagcgccctgagcgccagcaagagcaacctggtgatcagtgaccccatccctggggccaagcccctgcctgtgcccccagagctggccccctttgtgggccgcatgtctgcccaggagagcacccccatcatgaatggagtgacaggcccagatggagaggactacagcccctgggccgacaggaaggccgcccagcccaagagcctgagccccccccagagccagagcaagctgagtgacagctacagcaacaccctgcctgtgaggaagtctgtgacccccaagaacagctatgccaccacagagaacaagaccctgcccaggagcagctccatggccgccggcctggagagaaatggaaggatgagggtgaaggccatcttcagccatgctgctggggacaacagcaccctgctgtccttcaaggagggggacctgatcaccctgctggtgcctgaggccagagatggctggcactacggggagagcgagaagaccaagatgaggggctggttccccttctcctacaccagggtgctggacagtgatggcagtgaccggctgcacatgagcctgcagcagggcaagagcagcagcacaggcaacctgctggacaaggatgacctggccatccccccaccagactatggagctgccagccgggccttccctgcccagacagccagcggcttcaagcagaggccctacagcgtggccgtgcctgccttcagccagggcctggatgattatggagcccgctccatgagcaggtag

SEQ ID NO: 18471 - DNA, 1605 bp, synthetic construct
  misc_feature 1..1605: note = Description of Artificial Sequence: Synthetic coding sequence
  source 1..1605: mol_type = other DNA
atgagcctgagccgctctgaggagatgcaccggctgacagaaaatgtgtacaagaccatcatggagcagttcaaccccagcctgaggaacttcatcgccatgggcaagaactatgagaaggccctggccggcgtgacctacgccgccaagggctactttgatgccctggtgaagatgggagagctggccagcgagagccagggcagcaaggagctgggagatgtgctcttccagatggccgaggtgcaccggcagatccagaaccagctggaggagatgctgaagagcttccacaatgagctgctgacccagctggagcagaaggtggagctggacagccgctacctgtctgctgccctgaagaagtaccagacagagcagaggagcaaaggagatgccctggacaagtgccaggccgagctgaagaagctgaggaagaagagccagggcagcaagaacccccagaagtacagcgacaaggagctgcagtacattgatgccatcagcaacaagcagggcgagctggagaactacgtgtctgatggctacaagacagccctgacagaggagcggcggcgcttctgcttcctggtggagaagcagtgtgctgtggccaagaacagcgctgcctaccacagcaagggcaaggagctgctggcccagaagctgcccctgtggcagcaggcctgtgccgaccccagcaagatccctgagagagctgtgcagctgatgcagcaggtggccagcaatggagccaccctgcccagcgccctgagcgccagcaagagcaacctggtgatcagtgaccccatccctggggccaagcccctgcctgtgcccccagagctggccccctttgtgggccgcatgtctgcccaggagagcacccccatcatgaatggagtgactggaccagatggagaggactacagcccctgggccgacaggaaggccgcccagcccaagagcctgagccccccccagagccagagcaagctgagtgacagctacagcaacaccctgcctgtgaggaagtctgtgacccccaagaacagctatgccaccacagagaacaagaccctgcccaggagcagctccatggctgctggcctggagagaaatggccgcatgagggtgaaggccatcttcagccacgccgccggggacaacagcaccctgctgtccttcaaggagggggacctgatcaccctgctggtgcctgaggccagagatggctggcactatggagagagcgagaagaccaagatgaggggctggttccccttctcctacaccagggtgctggacagtgatggcagtgaccggctgcacatgagcctgcagcagggcaagagcagcagcactggaaacctgctggacaaggatgacctggccatccccccaccagactatggagctgccagccgggccttccctgcccagacagccagcggcttcaagcagaggccctacagcgtggccgtgcctgccttcagccagggcctggatgattatggagcccgctccatgagcaggaacccctttgcccacgtgcagctgaagcccaccgtgaccaatgacagaagtgcccccctgctgtcctag

SEQ ID NO: 18472 - DNA, 1563 bp, synthetic construct
  misc_feature 1..1563: note = Description of Artificial Sequence: Synthetic coding sequence
  source 1..1563: mol_type = other DNA
atgagcctgagccgctctgaggagatgcaccggctgacagaaaatgtgtacaagaccatcatggagcagttcaaccccagcctgaggaacttcatcgccatgggcaagaactatgagaaggccctggccggcgtgacctacgccgccaagggctactttgatgccctggtgaagatgggagagctggccagcgagagccagggcagcaaggagctgggagatgtgctcttccagatggccgaggtgcaccggcagatccagaaccagctggaggagatgctgaagagcttccacaatgagctgctgacccagctggagcagaaggtggagctggacagccgctacctgtctgctgccctgaagaagtaccagacagagcagaggagcaaaggagatgccctggacaagtgccaggccgagctgaagaagctgaggaagaagagccagggcagcaagaacccccagaagtacagcgacaaggagctgcagtacattgatgccatcagcaacaagcagggcgagctggagaactacgtgtctgatggctacaagacagccctgacagaggagcggcggcgcttctgcttcctggtggagaagcagtgtgctgtggccaagaacagcgctgcctaccacagcaagggcaaggagctgctggcccagaagctgcccctgtggcagcaggcctgtgccgaccccagcaagatccctgagagagctgtgcagctgatgcagcaggtggccagcaatggagccaccctgcccagcgccctgagcgccagcaagagcaacctggtgatcagtgaccccatccctggggccaagcccctgcctgtgcccccagagctggccccctttgtgggccgcatgtctgcccaggagagcacccccatcatgaatggagtgactggaccagatggagaggactacagcccctgggccgacaggaaggccgcccagcccaagagcctgagccccccccagagccagagcaagctgagtgacagctacagcaacaccctgcctgtgaggaagtctgtgacccccaagaacagctatgccaccacagagaacaagaccctgcccaggagcagctccatggctgctggcctggagagaaatggccgcatgagggtgaaggccatcttcagccacgccgccggggacaacagcaccctgctgtccttcaaggagggggacctgatcaccctgctggtgcctgaggccagagatggctggcactatggagagagcgagaagaccaagatgaggggctggttccccttctcctacaccagggtgctggacagtgatggcagtgaccggctgcacatgagcctgcagcagggcaagagcagcagcactggaaacctgctggacaaggatgacctggccatccccccaccagactatggagctgccagccgggccttccctgcccagacagccagcggcttcaagcagaggccctacagcgtggccgtgcctgccttcagccagggcctggatgattatggagcccgctccatgagcagcgcagatgtggaggtggcccgcttctag

SEQ ID NO: 18473 - DNA, 720 bp, synthetic construct
  misc_feature 1..720: note = Description of Artificial Sequence: Synthetic coding sequence
  source 1..720: mol_type = other DNA
atggcccacgccggccgcacaggctatgacaaccgggagatcgtgatgaagtacatccactacaagctgagccagaggggctatgagtgggatgctggagatgtgggcgccgcccctcctggggccgccccagcccctggcatcttcagcagccagcccggccacaccccccaccctgctgccagccgggaccctgtggcccggaccagccccctgcagaccccagctgcccctggagctgctgctggccctgccctgagccctgtgccccctgtggtgcacctgaccctgcggcaggccggagatgacttcagccgccgctacagaagagactttgctgagatgagcagccagctgcacctgacccccttcaccgcccggggccgctttgccaccgtggtggaggagctgttcagagatggagtgaactggggcagaattgtggccttctttgaatttggaggagtgatgtgtgtggagagcgtgaaccgggagatgagccccctggtggacaacatcgccctgtggatgacagagtacctgaacagacacctgcacacctggatccaggacaatggaggctgggatgcctttgtggagctgtatggccccagcatgaggcccctgtttgacttctcctggctgagcctgaagaccctgctgagcctggccctggtgggcgcctgcatcaccctgggcgcctacctgggccacaagtag

SEQ ID NO: 18474 - DNA, 720 bp, synthetic construct; identical to SEQ ID NO: 18473
  misc_feature 1..720: note = Description of Artificial Sequence: Synthetic coding sequence
  source 1..720: mol_type = other DNA

SEQ ID NO: 18475 - DNA, 618 bp, synthetic construct
  misc_feature 1..618: note = Description of Artificial Sequence: Synthetic coding sequence
  source 1..618: mol_type = other DNA
atggcccacgccggccgcacaggctatgacaaccgggagatcgtgatgaagtacatccactacaagctgagccagaggggctatgagtgggatgctggagatgtgggcgccgcccctcctggggccgccccagcccctggcatcttcagcagccagcccggccacaccccccaccctgctgccagccgggaccctgtggcccggaccagccccctgcagaccccagctgcccctggagctgctgctggccctgccctgagccctgtgccccctgtggtgcacctgaccctgcggcaggccggagatgacttcagccgccgctacagaagagactttgctgagatgagcagccagctgcacctgacccccttcaccgcccggggccgctttgccaccgtggtggaggagctgttcagagatggagtgaactggggcagaattgtggccttctttgaatttggaggagtgatgtgtgtggagagcgtgaaccgggagatgagccccctggtggacaacatcgccctgtggatgacagagtacctgaacagacacctgcacacctggatccaggacaatggaggctgggtgggcgccctgggagatgtgtccctgggctag

SEQ ID NO: 18476 - DNA, 1578 bp, synthetic construct
  misc_feature 1..1578: note = Description of Artificial Sequence: Synthetic coding sequence
  source 1..1578: mol_type = other DNA
atgaaggccctgattgctgccctgctgctgatcaccctgcagtacagctgtgctgtgagccccacagactgcagcgctgtggagcctgaggccgagaaggccctggacctgatcaacaagagaagaagagatggctacctgttccagctgctgagaattgctgatgcccacctggacagagtggagaacaccaccgtgtactacctggtgctggatgtgcaggagagtgactgcagcgtgctgagcaggaagtactggaatgactgtgagcccccagacagcagaagacccagcgagatcgtcatcggccagtgcaaggtgattgccaccaggcacagccatgagagccaggacctgcgggtcatcgacttcaactgcaccaccagctctgtgtcctctgccctggccaacaccaaggacagccctgtgctgattgacttctttgaggacacagagcgctacaggaagcaggccaacaaggccctggagaagtacaaggaggagaatgatgactttgccagcttccgggtggaccgcatcgagcgggtggcccgggtgcggggcggggagggcaccggctactttgtggacttctctgtgaggaactgccccaggcaccacttccccaggcaccccaacgtgtttggcttctgcagagctgacctcttctatgatgtggaggccctggacctggagagccccaagaacctggtgatcaactgtgaggtgtttgacccccaggagcacgagaacatcaatggagtgcccccccacctgggccaccccttccactggggcggccacgagaggagcagcaccaccaagccacccttcaagccccacggcagccgggaccaccaccacccccacaagccccatgaacatggccccccacctcctccagatgagcgggaccacagccacggcccccccctgccccagggccccccacccctgctgcccatgagctgcagcagctgccagcacgccaccttcggcaccaatggagcccagaggcacagccacaacaacaacagcagtgacctgcacccccacaagcaccacagccatgagcagcacccccacggccaccacccccacgcccaccacccccatgaacatgacacccaccggcagcacccccacggccaccacccccacggccaccacccccacggccaccacccccacggccaccacccccacggccaccacccccactgccacgacttccaggactatggcccctgtgaccccccaccccacaaccagggccactgctgccacggccacggccccccacctggccacctgcggcggcggggccctgggaagggcccccggcccttccactgccggcagatcggctctgtgtaccgcctgccccccctgaggaagggggaggtgctgcccctgcctgaggccaacttccccagcttccccctgccccaccacaagcaccccctgaagccagacaaccagcccttcccccagagcgtgtctgagagctgccctgggaagttcaagagcggcttcccccaggtgtccatgttcttcacccacaccttccccaagtag

SEQ ID NO: 18477 - DNA, 2121 bp, synthetic construct
  misc_feature 1..2121: note = Description of Artificial Sequence: Synthetic coding sequence
  source 1..2121: mol_type = other DNA
atggccagccctgctgacagctgcatccagttcaccaggcatgccagtgatgtgctgctgaacctgaaccggctgcggagccgggacatcctgacagatgtggtgattgtggtgtcccgggagcagttccgggcccacaagacagtgctgatggcctgcagcggcctcttctacagcatcttcacagaccagctgaagtgcaacctgagcgtcatcaacctggaccctgagatcaaccctgagggcttctgcatcctgctggacttcatgtacaccagccggctgaacctgcgggagggcaacatcatggctgtgatggccacagccatgtacctgcagatggagcacgtggtggacacctgcaggaagttcatcaaggccagcgaggccgagatggtgtctgccatcaagccaccccgggaggagttcctgaacagcaggatgctgatgccccaggacatcatggcctaccggggccgggaggtggtggagaacaacctgcccctgcggagcgcccctggctgtgagagccgggcctttgcccccagcctgtacagcggcctgagcaccccaccagccagctacagcatgtacagccacctgcctgtgagcagcctgctcttcagtgatgaggagttcagagatgtgaggatgcctgtggccaaccccttccccaaggagcgggccctgccctgtgacagcgcccggcctgtgcctggagagtacagccggcccaccctggaggtgagccccaacgtgtgccacagcaacatctacagccccaaggagaccatccctgaggaggcccggagtgacatgcactacagcgtggccgagggcctgaagccagctgcccccagcgccagaaatgccccctacttcccctgtgacaaggccagcaaggaggaggagcggcccagcagtgaagatgagatcgccctgcactttgagcccccaaatgcccccctgaacaggaagggcctggtgagcccccagagcccccagaagagtgactgccagcccaacagccccacagagagctgcagcagcaagaatgcctgcatcctgcaggccagcggcagccccccagccaagagccccacagaccccaaggcctgcaactggaagaagtacaagttcatcgtgctgaacagcctgaaccagaatgccaagccagagggccctgagcaggccgagctgggccgcctgagcccccgggcctacacagcccccccagcctgccagccccccatggagcctgagaacctggacctgcagagccccaccaagctgagcgccagcggggaggacagcaccatcccccaggccagccggctgaacaacatcgtgaacagatccatgacaggcagccccaggagcagcagcgagagccacagccccctgtacatgcacccccccaagtgcaccagctgtggcagccagagcccccagcacgccgagatgtgcctgcacacagctggccccaccttccctgaggagatgggagagacccagagcgagtacagcgacagcagctgtgaaaatggagccttcttctgcaatgaatgtgactgccgcttcagcgaggaggccagcctgaagaggcacaccctgcagacccacagcgacaagccctacaagtgtgaccgctgccaggccagcttccgctacaagggcaacctggccagccacaagacagtgcacactggagagaagccctaccgctgcaacatctgtggggcccagttcaacagacctgccaacctgaagacccacacccgcatccacagcggggagaagccctacaagtgtgagacctgtggggccaggtttgtgcaggtggcccacctgcgggcccacgtgctgatccacactggagagaagccctacccctgtgagatctgtggcacccgcttccgccacctgcagaccctgaagagccacctgcgcatccacactggagagaagccctaccactgtgagaagtgcaacctgcacttccgccacaagagccagctgcggctgcacctgcggcagaagcatggagccatcaccaacaccaaggtgcagtacagagtgtctgccacagacctgcccccagagctgcccaaggcctgctag

SEQ ID NO: 18478 - DNA, 369 bp, synthetic construct
  misc_feature 1..369: note = Description of Artificial Sequence: Synthetic coding sequence
  source 1..369: mol_type = other DNA
atggccagccctgctgacagctgcatccagttcaccaggcatgccagtgatgtgctgctgaacctgaaccggctgcggagccgggacatcctgacagatgtggtgattgtggtgtcccgggagcagttccgggcccacaagacagtgctgatggcctgcagcggcctcttctacagcatcttcacagaccagctgaagtgcaacctgagcgtcatcaacctggaccctgagatcaaccctgagggcttctgcatcctgctggacttcatgtacaccagccggctgaacctgcgggagggcaacatcatggctgtgatggccacagccatgtacctgcagatggagcacgtggtggacacctgcaggtag

SEQ ID NO: 18479 - DNA, 315 bp, synthetic construct
  misc_feature 1..315: note = Description of Artificial Sequence: Synthetic coding sequence
  source 1..315: mol_type = other DNA
atggccagccctgctgacagctgcatccagttcaccaggcatgccagtgatgtgctgctgaacctgaaccggctgcggagccgggacatcctgacagatgtggtgattgtggtgtcccgggagcagttccgggcccacaagacagtgctgatggcctgcagcggcctcttctacagcatcttcacagaccagctgaagtgcaacctgagcgtcatcaacctggaccctgagatcaaccctgagggcttctgcatcctgctggacttcatgtacaccagccggctgaacctgcgggagggcaacatcatggcctag

SEQ ID NO: 18480 - DNA, 1953 bp, synthetic construct
  misc_feature 1..1953: note = Description of Artificial Sequence: Synthetic coding sequence
  source 1..1953: mol_type = other DNA
atggccagccctgctgacagctgcatccagttcaccaggcatgccagtgatgtgctgctgaacctgaaccggctgcggagccgggacatcctgacagatgtggtgattgtggtgtcccgggagcagttccgggcccacaagacagtgctgatggcctgcagcggcctcttctacagcatcttcacagaccagctgaagtgcaacctgagcgtcatcaacctggaccctgagatcaaccctgagggcttctgcatcctgctggacttcatgtacaccagccggctgaacctgcgggagggcaacatcatggctgtgatggccacagccatgtacctgcagatggagcacgtggtggacacctgcaggaagttcatcaaggccagcgaggccgagatggtgtctgccatcaagccaccccgggaggagttcctgaacagcaggatgctgatgccccaggacatcatggcctaccggggccgggaggtggtggagaacaacctgcccctgcggagcgcccctggctgtgagagccgggcctttgcccccagcctgtacagcggcctgagcaccccaccagccagctacagcatgtacagccacctgcctgtgagcagcctgctcttcagtgatgaggagttcagagatgtgaggatgcctgtggccaaccccttccccaaggagcgggccctgccctgtgacagcgcccggcctgtgcctggagagtacagccggcccaccctggaggtgagccccaacgtgtgccacagcaacatctacagccccaaggagaccatccctgaggaggcccggagtgacatgcactacagcgtggccgagggcctgaagccagctgcccccagcgccagaaatgccccctacttcccctgtgacaaggccagcaaggaggaggagcggcccagcagtgaagatgagatcgccctgcactttgagcccccaaatgcccccctgaacaggaagggcctggtgagcccccagagcccccagaagagtgactgccagcccaacagccccacagagagctgcagcagcaagaatgcctgcatcctgcaggccagcggcagccccccagccaagagccccacagaccccaaggcctgcaactggaagaagtacaagttcatcgtgctgaacagcctgaaccagaatgccaagccagagggccctgagcaggccgagctgggccgcctgagcccccgggcctacacagcccccccagcctgccagccccccatggagcctgagaacctggacctgcagagccccaccaagctgagcgccagcggggaggacagcaccatcccccaggccagccggctgaacaacatcgtgaacagatccatgacaggcagccccaggagcagcagcgagagccacagccccctgtacatgcacccccccaagtgcaccagctgtggcagccagagcccccagcacgccgagatgtgcctgcacacagctggccccaccttccctgaggagatgggagagacccagagcgagtacagcgacagcagctgtggggagaagccctaccgctgcaacatctgtggggcccagttcaacagacctgccaacctgaagacccacacccgcatccacagcggggagaagccctacaagtgtgagacctgtggggccaggtttgtgcaggtggcccacctgcgggcccacgtgctgatccacactggagagaagccctacccctgtgagatctgtggcacccgcttccgccacctgcagaccctgaagagccacctgcgcatccacactggagagaagccctaccactgtgagaagtgcaacctgcacttccgccacaagagccagctgcggctgcacctgcggcagaagcatggagccatcaccaacaccaaggtgcagtacagagtgtctgccacagacctgcccccagagctgcccaaggcctgctag

SEQ ID NO: 18481 - DNA, 306 bp, synthetic construct
  misc_feature 1..306: note = Description of Artificial Sequence: Synthetic coding sequence
  source 1..306: mol_type = other DNA
atgaagtttggcatgggcagcgcccaggcctgcccctgccaggtgccccgggccgccagcaccacctgggtgccctgccagatctgtgagaccagaggagctgctgctgccccacccctgaccctggagggccctgtgcagagccaccacggcaccccagccctgacccagggcccccagagccccagagatggagcccagctgggcgcctgcaccaggcctgtggatgtgcgggacagcggcggccggcccctgcccccaccagacaccctggccagcgctggggacttcctgtgcaccatgtag

SEQ ID NO: 18482 - DNA, 396 bp, synthetic construct
  misc_feature 1..396: note = Description of Artificial Sequence: Synthetic coding sequence
  source 1..396: mol_type = other DNA
atgaagtttggcatgggcagcgcccaggcctgcccctgccaggtgccccgggccgccagcaccacctgggtgccctgccagatctgtggcccccagcccagcctgagcctggccgagcagcacctggagagccctgtgcccagcgcccctggggccctggccggcggccccacccaggccgcccctggggtgcggggggaggaggagcagtgggcccgggagattggagcccagctgcggaggatggctgatgacctgaatgcccagtatgaaagaagacggcaggaggagcagcagaggcaccggcccagcccctggagggtgctgtacaacctgatcatgggcctgctgcccctgccccggggccaccgggcccctgagatggagcccaactag

SEQ ID NO: 18483 - DNA, 582 bp, synthetic construct
  misc_feature 1..582: note = Description of Artificial Sequence: Synthetic coding sequence
  source 1..582: mol_type = other DNA
atggcccgggcccggcaggagggcagcagccctgagcctgtggagggcctggccagagatggcccccggcccttccccctgggccgcctggtgcccagcgctgtgtcctgtggcctgtgtgagcccggcctggccgccgccccagctgcccccaccctgctgcctgctgcctacctgtgtgcccccacagcccctcctgctgtgacagctgccctgggcggcagccgctggccaggcggccccaggagccggccccggggccccaggccagatggcccccagcccagcctgagcctggccgagcagcacctggagagccctgtgcccagcgcccctggggccctggccggcggccccacccaggccgcccctggggtgcggggggaggaggagcagtgggcccgggagattggagcccagctgcggaggatggctgatgacctgaatgcccagtatgaaagaagacggcaggaggagcagcagaggcaccggcccagcccctggagggtgctgtacaacctgatcatgggcctgctgcccctgccccggggccaccgggcccctgagatggagcccaactag

SEQ ID NO: 18484 - DNA, 786 bp, synthetic construct
  misc_feature 1..786: note = Description of Artificial Sequence: Synthetic coding sequence
  source 1..786: mol_type = other DNA
atgaagtttggcatgggcagcgcccaggcctgcccctgccaggtgccccgggccgccagcaccacctgggtgccctgccagatctgtggcccccgggagagacatggccccaggacccctgggggccagctgcccggggcccggcggggccctggcccccggcggcctgcccccctgcctgcccggcccccaggggccctgggctctgtgctgcggcccctgcgggcccggcccggctgccggccccggcggccccaccctgctgcccgctgcctgcccctgcggccccaccggcccaccaggaggcaccggcggcctgggggcttccccctggcctggggcagcccccagcctgcccccaggcctgcccctggccgcagcagcgccctggccctggccggcggggccgcccctggggtggcccgggcccagaggcctgggggcagcggcggccgcagccaccctgggggccctggcagcccccggggcggcggcaccgtgggccctggggaccggggccctgctgctgctgatggcggccggccccagaggacagtgcgggctgctgagaccagaggagctgctgctgccccacccctgaccctggagggccctgtgcagagccaccacggcaccccagccctgacccagggcccccagagccccagagatggagcccagctgggcgcctgcaccaggcctgtggatgtgcgggacagcggcggccggcccctgcccccaccagacaccctggccagcgctggggacttcctgtgcaccatgtag

SEQ ID NO: 18485 - DNA, 1308 bp, synthetic construct
  misc_feature 1..1308: note = Description of Artificial Sequence: Synthetic coding sequence
  source 1..1308: mol_type = other DNA
atgctgtgtggcttccaggaggatgccaccccacctcctccaccccggccccggcggctgcaccggcggctgcccaggcctgaggaggtgggcatgctgagcctgcccccaggcctgctgactgtgtctggcagcgctgctgctgctgatgctgtgcccctgcggcctggggactgggccggcgtgtccacagctgacagaggagagcgggcccccctgggccctgccttctgtgacctggccgtgagccccaccagccctgcctggagaggagaagaagatgagggcgccaaggccagcagcggggacatcggcagcctggactaccaggagtttgtggtggacatcgagagccggctgaggatggagggcgtggagctgaaggaggagtggcaggatgaggacttccccatccccctgcctgaagatgacagcattgaggccgacatcctggccatcaccggccctgaggaccagcccggcagcctggaggtgaatggaaacaaggtgaggaagaagctgatggccccagacatcagcctgaccctggaccccagtgatggctctgtgctgagtgatgacctggatgagagcggggagattgacctggatggcctggacacccccagcgagaacagcaatgaatttgagtgggaggatgacctgcccaagcccaagaccacagaggtgatcaggaagggcagcatcacagagtacacagctgctgaggagaaggaggatggaagacgctggaggatgttccgcatcggggagcaggaccaccgggtggacatgaaggccatcgagccctacaagaaggtgatcagccatggaggctactatggagatggcctgaatgccatcgtggtgtttgctgtgtgcttcatgcctgagagcagccagcccaactaccgctacctgatggacaacctcttcaagtatgtgattggcaccctggagctgctggtggccgagaactacatgattgtgtacctgaatggagccaccaccaggaggaagatgcccagcctgggctggctgaggaagtgctaccagcagattgaccggcggctgaggaagaacctgaagagcctcatcatcgtgcaccccagctggttcatccgcaccctgctggccgtgacccggcccttcatcagcagcaagttcagccagaagatccgctacgtgttcaacctggccgagctggccgagctggtgcccatggagtatgtgggcatccctgagtgcatcaagcaggtggaccaggagctgaatggcaagcaggatgagcccaagaatgagcagtag

SEQ ID NO: 18486 - DNA, 1131 bp, synthetic construct
  misc_feature 1..1131: note = Description of Artificial Sequence: Synthetic coding sequence
  source 1..1131: mol_type = other DNA
atggagccctgccccagcagcgcccccccacccttctacccaggagtgggggaggtggccggcctgcgctggttcagcatctatgaccagaggcccagctggtaccgcaccaagaagctgggcctgctggacatcggcagcctggactaccaggagtttgtggtggacatcgagagccggctgaggatggagggcgtggagctgaaggaggagtggcaggatgaggacttccccatccccctgcctgaagatgacagcattgaagctgacatcctggccatcactggacctgaggaccagcccggcagcctggaggtgaatggaaacaaggtgaggaagaagctgatggccccagacatcagcctgaccctggaccccagtgatggctctgtgctgagtgatgacctggatgaaagtggagaaattgacctggatggcctggacaccccatctgagaacagcaatgaatttgagtgggaggatgacctgcccaagcccaagaccacagaggtgatcaggaagggcagcatcacagagtacacagctgctgaggagaaggaggatggccgccgctggaggatgttcagaattggagagcaggaccaccgggtggacatgaaggccatcgagccctacaagaaggtgatcagccacggcggctactatggagatggcctgaatgccatcgtggtgtttgctgtgtgcttcatgcctgagagcagccagcccaactaccgctacctgatggacaacctcttcaagtatgtgattggcaccctggagctgctggtggccgagaactacatgattgtgtacctgaatggagccaccaccaggaggaagatgcccagcctgggctggctgaggaagtgctaccagcagattgaccggcggctgaggaagaacctgaagagcctcatcatcgtgcaccccagctggttcatccgcaccctgctggccgtgacccggcccttcatcagcagcaagttcagccagaagatccgctacgtgttcaacctggccgagctggccgagctggtgcccatggagtatgtgggcatccctgagtgcatcaagcaggtggaccaggagctgaatggcaagcaggatgagcccaagaatgagcagtag

SEQ ID NO: 18487 - DNA, 939 bp, synthetic construct
  misc_feature 1..939: note = Description of Artificial Sequence: Synthetic coding sequence
  source 1..939: mol_type = other DNA
atggccaaggtgttctccttcatcctggtgaccacagccctgaccatgggccgggagatcagcgccctggaggactgtgcccaggagcagatgaggctgcgggcccaggtgcggctgctggagaccagggtgaagcagcagcaggtgaagatcaagcagctgctgcaggagaatgaggtgcagttcctggacaagggagatgagaacacagtcatcgacctgggcagcaagaggcagtatgctgactgcagcgagatcttcaatgatggctacaagctgagcggcttctacaagatcaagcccctgcagagccctgctgagttctctgtgtactgtgacatgtctgatggcggcggctggacagtcatccagaggagaagtgatggcagcgagaacttcaacagaggctggaaggactatgaaaatggcttcggcaactttgtgcagaagcatggagagtactggctgggcaacaagaacctgcacttcctgaccacccaggaggactacaccctgaagattgacctggccgactttgagaagaacagccgctatgcccagtacaagaacttcaaggtgggagatgagaagaacttctatgagctgaacatcggggagtacagcggcacagctggggacagcctggccggcaacttccaccctgaggtgcagtggtgggccagccaccagaggatgaagttcagcacctgggaccgggaccatgacaactatgagggcaactgtgccgaggaggaccagagcggctggtggttcaaccgctgccacagcgccaacctgaatggagtgtactacagcggcccctacacagccaagacagacaatggaattgtgtggtacacctggcacggctggtggtacagcctgaagtctgtggtgatgaagatccggcccaatgacttcatccccaacgtcatctag

SEQ ID NO: 18488 - DNA, 660 bp, synthetic construct
  misc_feature 1..660: note = Description of Artificial Sequence: Synthetic coding sequence
  source 1..660: mol_type = other DNA
atgagcagccacctggtggagcccccaccacccctgcacaacaacaacaacaactgtgaagaaaatgagcagagcctgcccccacctgctggcctgaacagctcctgggtggagctgcccatgaacagcagcaatggaaatgacaatggaaatggcaagaatggaggcctggagcacgtgcccagcagcagcagcatccacaacggggacatggagaagatcctgctggatgcccagcacgagagcggccagagcagcagccggggcagcagccactgtgacagccccagcccccaggaggatggccagatcatgtttgatgtggagatgcacaccagccgggaccacagcagccagagcgaggaggaggtggtggagggggagaaggaggtggaggccctgaagaagtctgctgactgggtgtctgactggagcagcaggcctgagaacatcccccccaaggagttccacttccgccaccccaagaggtctgtgtccctgtccatgaggaagagcggggccatgaagaagggcggcatcttctctgctgagttcctgaaggtgttcatccccagcctcttcctgagccacgtgctggccctgggcctgggcatctacatcggcaagaggctgagcaccccatctgccagcacctactag

SEQ ID NO: 18489 - DNA, 540 bp, synthetic construct
  misc_feature 1..540: note = Description of Artificial Sequence: Synthetic coding sequence
  source 1..540: mol_type = other DNA
atgaacagcagcaatggaaatgacaatggaaatggcaagaatggaggcctggagcacgtgcccagcagcagcagcatccacaacggggacatggagaagatcctgctggatgcccagcacgagagcggccagagcagcagccggggcagcagccactgtgacagccccagcccccaggaggatggccagatcatgtttgatgtggagatgcacaccagccgggaccacagcagccagagcgaggaggaggtggtggagggggagaaggaggtggaggccctgaagaagtctgctgactgggtgtctgactggagcagcaggcctgagaacatcccccccaaggagttccacttccgccaccccaagaggtctgtgtccctgtccatgaggaagagcggggccatgaagaagggcggcatcttctctgctgagttcctgaaggtgttcatccccagcctcttcctgagccacgtgctggccctgggcctgggcatctacatcggcaagaggctgagcaccccatctgccagcacctactag

SEQ ID NO: 18490 - DNA, 540 bp, synthetic construct; identical to SEQ ID NO: 18489
  misc_feature 1..540: note = Description of Artificial Sequence: Synthetic coding sequence
  source 1..540: mol_type = other DNA

SEQ ID NO: 18491 - DNA, 540 bp, synthetic construct; identical to SEQ ID NO: 18489
  misc_feature 1..540: note = Description of Artificial Sequence: Synthetic coding sequence
  source 1..540: mol_type = other DNA

SEQ ID NO: 18492 - DNA, 636 bp, synthetic construct
  misc_feature 1..636: note = Description of Artificial Sequence: Synthetic coding sequence
  source 1..636: mol_type = other DNA
atggccagcggccagggccctggccccccccggcaggagtgtggggagcccgccctgcccagcgccagcgaggagcaggtggcccaggacacagaggaggtgttccgctcctatgtgttctaccgccaccagcaggagcaggaggccgagggcgtggccgccccagctgaccctgagatggtgaccctgcccctgcagcccagcagcaccatgggccaggtgggccggcagctggccatcattggagatgacatcaacagaagatatgattctgagttccagaccatgctgcagcacctgcagcccacagcagaaaatgcctatgagtacttcaccaagatcgccaccagcctgtttgaaagtggcatcaactggggccgggtggtggccctgctgggcttcggctaccgcctggccctgcacgtgtaccagcacggcctgaccggcttcctgggccaggtgaccaggtttgtggtggacttcatgctgcaccactgcatcgcccgctggatcgcccagagaggaggctgggtggccgccctgaacctgggcaatggccccatcctgaatgtgctggtggtgctgggcgtggtgctgctgggccagtttgtggtgcggcgcttcttcaagagctag

SEQ ID NO: 18493 - DNA, 576 bp, synthetic construct
  misc_feature 1..576: note = Description of Artificial Sequence: Synthetic coding sequence
  source 1..576: mol_type = other DNA
atggccagcggccagggccctggccccccccggcaggagtgtggggagcccgccctgcccagcgccagcgaggagcaggtggcccaggacacagaggaggtgttccgctcctatgtgttctaccgccaccagcagcagcccagcagcaccatgggccaggtgggccggcagctggccatcattggagatgacatcaacagaagatatgattctgagttccagaccatgctgcagcacctgcagcccacagcagaaaatgcctatgagtacttcaccaagatcgccaccagcctgtttgaaagtggcatcaactggggccgggtggtggccctgctgggcttcggctaccgcctggccctgcacgtgtaccagcacggcctgaccggcttcctgggccaggtgaccaggtttgtggtggacttcatgctgcaccactgcatcgcccgctggatcgcccagagaggaggctgggtggccgccctgaacctgggcaatggccccatcctgaatgtgctggtggtgctgggcgtggtgctgctgggccagtttgtggtgcggcgcttcttcaagagctag

SEQ ID NO: 18494 - DNA, 636 bp, synthetic construct; identical to SEQ ID NO: 18492
  misc_feature 1..636: note = Description of Artificial Sequence: Synthetic coding sequence
  source 1..636: mol_type = other DNA

SEQ ID NO: 18495 - DNA, 462 bp, synthetic construct
  misc_feature 1..462: note = Description of Artificial Sequence: Synthetic coding sequence
  source 1..462: mol_type = other DNA
atggccagcggccagggccctggccccccccggcaggagtgtggggagcccgccctgcccagcgccagcgaggagcaggtggcccaggacacagaggaggtgttccgctcctatgtgttctaccgccaccagcaggagcaggaggccgagggcgtggccgccccagctgaccctgagatggtgaccctgcccctgcagcccagcagcaccatgggccaggtgggccggcagctggccatcattggagatgacatcaacagaagatatgattctgagttccagaccatgctgcagcacctgcagcccacagcagaaaatgcctatgagtacttcaccaagatcgccaccaggcctgctgccacccccacagcctgcctgcgggtggccagcattggagctgtgtggtggctgttctgggccagcgccaccgtgtggccctacaccagcacctccatggcctag

SEQ ID NO: 18496 - DNA, 507 bp, synthetic construct
  misc_feature 1..507: note = Description of Artificial Sequence: Synthetic coding sequence
  source 1..507: mol_type = other DNA
atgttccagatccctgagtttgagcccagcgagcaggaggacagcagcagcgctgagcggggcctgggccccagccctgctggagatggccccagcggcagcggcaagcaccaccggcaggcccctggcctgctgtgggatgccagccaccagcaggagcagcccaccagcagcagccaccacggcggggccggggctgtggagatccgcagccgccacagcagctacccagctggaacagaagatgatgagggcatgggagaggagcccagccccttccggggccgcagccgcagcgccccacccaacctgtgggccgcccagagatatggccgggagctgcggaggatgtctgatgaatttgtggacagcttcaagaagggcctgccccggcccaagtctgctggaacagccacccagatgaggcagagcagctcctggaccagggtcttccagagctggtgggacaggaacctgggccggggcagcagcgcccccagccagtag

SEQ ID NO: 18497 - DNA, 507 bp, synthetic construct; identical to SEQ ID NO: 18496
  misc_feature 1..507: note = Description of Artificial Sequence: Synthetic coding sequence
  source 1..507: mol_type = other DNA

SEQ ID NO: 18498 - DNA, 450 bp, synthetic construct
  misc_feature 1..450: note = Description of Artificial Sequence: Synthetic coding sequence
  source 1..450: mol_type = other DNA
atgttccagatccctgagtttgagcccagcgagcaggaggacagcagcagcgctgagcggggcctgggccccagccctgctggagatggccccagcggcagcggcaagcaccaccggcaggcccctggcctgctgtgggatgccagccaccagcaggagcagcccaccagcagcagccaccacggcggggccggggctgtggagatccgcagccgccacagcagctacccagctggaacagaagatgatgagggcatgggagaggagcccagccccttccggggccgcagccgcagcgccccacccaacctgtgggccgcccagagatatggccgggagctgcggaggatgtctgatgaatttgtggacagcttcaagaagggcctgccccggcccaagtctgctggaacagccacccagatgaggcagagcagccggcggctgaggtag

SEQ ID NO: 18499 - DNA, 591 bp, synthetic construct
  misc_feature 1..591: note = Description of Artificial Sequence: Synthetic coding sequence
  source 1..591: mol_type = other DNA
atgaacagaagccaggaggtgaccagagatgaggagagcaccaggtctgaggaggtgacccgggaggagatggctgctgctggcctgactgtgacagtgacccacagcaatgagaagcatgacctgcacgtgaccagccagcagggcagcagcgagcctgtggtgcaggacctggcccaggtggtggaggaggtgattggagtgccccagagcttccagaagctgatcttcaagggcaagagcctgaaggagatggagacccccctgagcgccctgggcatccaggacggctgccgggtgatgctgattggcaagaagaacagcccccaggaggaggtggagctgaagaagctgaagcacctggagaagtctgtggagaagattgctgaccagctggaggagctgaacaaggagctgaccggcatccagcagggcttcctgcccaaggacctgcaggccgaggccctgtgcaagctggacagaagagtgaaggccaccatcgagcagttcatgaagatcctggaggagattgacaccctcatcctgcctgagaacttccccaccctgaccctggtgctgaatgagaagtag

SEQ ID NO: 18500 - DNA, 693 bp, synthetic construct
  misc_feature 1..693: note = Description of Artificial Sequence: Synthetic coding sequence
  source 1..693: mol_type = other DNA
atgaacagaagccaggaggtgaccagagatgaggagagcaccaggtctgaggaggtgacccgggaggagatggctgctgctggcctgactgtgacagtgacccacagcaatgagaagcatgacctgcacgtgaccagccagcagggcagcagcgagcctgtggtgcaggacctggcccaggtggtggaggaggtgattggagtgccccagagcttccagaagctgatcttcaagggcaagagcctgaaggagatggagacccccctgagcgccctgggcatccaggacggctgccgggtgatgctgattggcaagaagaacagcccccaggaggaggtggagctgaagaagctgaagcacctggagaagtctgtggagaagattgctgaccagctggaggagctgaacaaggagctgaccggcatccagcagggcttcctgcccaaggacctgcaggccgaggccctgtgcaagctggacagaagagtgaaggccaccatcgagcagttcatgaagatcctggaggagattgacaccctcatcctgcctgagaacttcaaggacagccggctgaagaggaagggcctggtgaagaaggtgcaggccttcctggccgagtgtgacacagtggagcagaacatctgccaggagacagagcggctgcagagcaccaactttgccctggccgagtag

SEQ ID NO: 18501 - DNA, 1038 bp, synthetic construct
  misc_feature 1..1038: note = Description of Artificial Sequence: Synthetic coding sequence
  source 1..1038: mol_type = other DNA
ctggcccagagaggaggagcccggcggcccaggggggaccgggagcggctgggcagccggctgcgggccctgcggcccggccgggagccccggcagagcgagcccccagcccagaggggccccccacccagcggccggcccccagcccggagcacagccagcggccatgaccggcccaccagaggagctgctgctggggcccggcggcccaggatgaagaagaagacccggcggcgcagcaccaggtctgaggagctgaccaggtctgaggagctgaccctgtctgaggaggccacctggagcgaggaggccacccagagcgaggaggccacccagggcgaggagatgaacagaagccaggaggtgaccagagatgaggagagcaccaggtctgaggaggtgacccgggaggagatggctgctgctggcctgactgtgacagtgacccacagcaatgagaagcatgacctgcacgtgaccagccagcagggcagcagcgagcctgtggtgcaggacctggcccaggtggtggaggaggtgattggagtgccccagagcttccagaagctgatcttcaagggcaagagcctgaaggagatggagacccccctgagcgccctgggcatccaggacggctgccgggtgatgctgattggcaagaagaacagcccccaggaggaggtggagctgaagaagctgaagcacctggagaagtctgtggagaagattgctgaccagctggaggagctgaacaaggagctgaccggcatccagcagggcttcctgcccaaggacctgcaggccgaggccctgtgcaagctggaccggcgggtgaaggccaccatcgagcagttcatgaagatcctggaggagattgacaccctcatcctgcctgagaacttcaaggacagccggctgaagaggaagggcctggtgaagaaggtgcaggccttcctggctgaatgtgacacagtggagcagaacatctgccaggagacagagcggctgcagagcaccaactttgccctggccgagtag

SEQ ID NO: 18502 - DNA, 1728 bp, synthetic construct
  misc_feature 1..1728: note = Description of Artificial Sequence: Synthetic coding sequence
  source 1..1728: mol_type = other DNA
atgtctgctgccacccacagccccatgatgcaggtggccagcggaaatggagaccgggaccccctgcccccaggctgggagatcaagattgacccccagacaggctggcccttctttgtggaccacaacagcaggaccaccacctggaatgacccccgggtgcccagcgagggccccaaggagacccccagcagcgccaacggccccagccgggagggcagccggctgcccccagcccgggagggccaccctgtgtacccccagctgcggcccggctacatccccatccctgtgctgcacgagggcgctgagaaccggcaggtgcaccccttccacgtgtacccccagcccggcatgcagcgcttcagaacagaggccgctgctgctgccccccagaggagccagagccccctgcggggcatgcctgagaccacccagcctgacaagcagtgtggccaggtggccgctgctgctgctgcccagcccccagccagccacggccctgagaggagccagagccctgctgccagtgactgcagcagcagcagcagcagcgccagcctgcccagcagcggccgcagcagcctgggcagccaccagctgccccggggctacatcagcatccctgtgatccacgagcagaatgtgaccaggcctgctgcccagcccagcttccaccaggcccagaagacccactacccagcccagcagggcgagtaccagacccaccagcctgtgtaccacaagatccagggagatgactgggagccccggcccctgcgggccgccagccccttccgcagctctgtgcagggcgccagcagccgggagggcagccctgcccggagcagcacccccctgcacagccccagccccatccgggtgcacacagtggtggaccggccccagcagcccatgacccaccgggagacagcccctgtgtcccagcctgagaacaagccagagagcaagccaggccctgtgggccctgagctgcccccaggccacatccccatccaggtgatcaggaaggaggtggacagcaagcctgtgtcccagaagcccccacctccttctgagaaggtggaggtgaaggtgcccccagcccctgtgccctgccccccacccagccctggccccagcgctgtgcccagcagccccaagtctgtggccacagaggagcgggccgcccccagcacagccccagctgaggccaccccacccaagccaggagaggccgaggccccacccaagcaccctggggtgctgaaggtggaggccatcctggagaaggtgcagggcctggagcaggccgtggacaactttgagggcaagaagacagacaagaagtacctgatgattgaggagtacctgaccaaggagctgctggccctggacagcgtggaccctgagggccgggcagatgtgcggcaggccaggagagatggagtgaggaaggtgcagaccatcctggagaagctggagcagaaggccattgatgtgcccggccaggtgcaggtgtatgagctgcagcccagcaacctggaggccgaccagcccctgcaggccatcatggagatgggcgctgtggccgctgacaagggcaagaagaatgctggaaatgctgaggacccccacacagagacccagcagcctgaggccacagctgctgccaccagcaaccccagctccatgacagacaccccaggcaacccagctgccccctag

SEQ ID NO: 18503 - DNA, 978 bp, synthetic construct
  misc_feature 1..978: note = Description of Artificial Sequence: Synthetic coding sequence
  source 1..978: mol_type = other DNA
atgcaggagacccccagcagcgccaacggccccagccgggagggcagccggctgcccccagcccgggagggccaccctgtgtacccccagctgcggcccggctacatccccatccctgtgctgcacgagggcgctgagaaccggcaggtgcaccccttccacgtgtacccccagcccggcatgcagcgcttcagaacagaggccgctgctgctgccccccagaggagccagagccccctgcggggcatgcctgagaccacccagcctgacaagcagtgtggccaggtggccgctgctgctgctgcccagcccccagccagccacggccctgagaggagccagagccctgctgccagtgactgcagcagcagcagcagcagcgccagcctgcccagcagcggccgcagcagcctgggcagccaccagctgccccggggctacatcagcatccctgtgatccacgagcagaatgtgaccaggcctgctgcccagcccagcttccaccaggcccagaagacccactacccagcccagcagggcgagtaccagacccaccagcctgtgtaccacaagatccagggagatgactgggagccccggcccctgcgggccgccagccccttccgcagctctgtgcagggcgccagcagccgggagggcagccctgcccggagcagcacccccctgcacagccccagccccatccgggtgcacacagtggtggaccggccccagcccatgacccaccgggagacagcccctgtgtcccagcctgagaacaagccagagagcaagccaggccctgtgggccctgagctgcccccaggccacatccccatccaggtgatcaggaaggaggtggacagcaagcctgtgtcccagaagcccccaccacccagcgagaaggtggaggtgaaggtgcccccagcccctgtgccctgccccccacccagccctggccccagcgctgtgccctag

SEQ ID NO: 18504 - DNA, 657 bp, synthetic construct
  misc_feature 1..657: note = Description of Artificial Sequence: Synthetic coding sequence
  source 1..657: mol_type = other DNA
atggatggcagcggggagcagccccggggcggcggccccaccagcagcgagcagatcatgaagacaggagccctgctgctgcagggcttcatccaggacagagctggccgcatgggcggggaggcccctgagctggccctggaccctgtgccccaggatgccagcaccaagaagctgtctgaatgtctgaagagaattggagatgagctggacagcaacatggagctgcagaggatgattgctgctgtggacacagacagcccccgggaggtgttcttccgggtggccgctgacatgttcagtgatggcaacttcaactggggccgggtggtggccctcttctactttgccagcaagctggtgctgaaggccctgtgcaccaaggtgcctgagctgatccgcaccatcatgggctggaccctggacttcctgcgggagcggctgctgggctggatccaggaccagggcggctgggtgcggctgctgaagccaccccacccccaccaccgggccctgaccacagccccagccccacccagcctgcccccagccacccccctgggcccctgggccttctggagccgcagccagtggtgccccctgcccatcttccgcagcagtgatgtggtgtacaatgccttcagcctgcgggtgtag

SEQ ID NO: 18505 - DNA, 579 bp, synthetic construct
  misc_feature 1..579: note = Description of Artificial Sequence: Synthetic coding sequence
  source 1..579: mol_type = other DNA
atggatggcagcggggagcagccccggggcggcggccccaccagcagcgagcagatcatgaagacaggagccctgctgctgcagggcttcatccaggacagagctggccgcatgggcggggaggcccctgagctggccctggaccctgtgccccaggatgccagcaccaagaagctgtctgaatgtctgaagagaattggagatgagctggacagcaacatggagctgcagaggatgattgctgctgtggacacagacagcccccgggaggtgttcttccgggtggccgctgacatgttcagtgatggcaacttcaactggggccgggtggtggccctcttctactttgccagcaagctggtgctgaaggccctgtgcaccaaggtgcctgagctgatccgcaccatcatgggctggaccctggacttcctgcgggagcggctgctgggctggatccaggaccagggcggctgggatggcctgctgagctacttcggcacccccacctggcagacagtgaccatctttgtggccggcgtgctgacagccagcctgaccatctggaagaagatgggctag

SEQ ID NO: 18506 - DNA, 432 bp, synthetic construct
  misc_feature 1..432: note = Description of Artificial Sequence: Synthetic coding sequence
  source 1..432: mol_type = other DNA
atggatggcagcggggagcagccccggggcggcggccccaccagcagcgagcagatcatgaagacaggagccctgctgctgcagggcatgattgctgctgtggacacagacagcccccgggaggtgttcttccgggtggccgctgacatgttcagtgatggcaacttcaactggggccgggtggtggccctcttctactttgccagcaagctggtgctgaaggccctgtgcaccaaggtgcctgagctgatccgcaccatcatgggctggaccctggacttcctgcgggagcggctgctgggctggatccaggaccagggcggctgggatggcctgctgagctacttcggcacccccacctggcagacagtgaccatctttgtggccggcgtgctgacagccagcctgaccatctggaagaagatgggctag

SEQ ID NO: 18507 - DNA, 126 bp, synthetic construct
  misc_feature 1..126: note = Description of Artificial Sequence: Synthetic coding sequence
  source 1..126: mol_type = other DNA
atggatggcagcggggagcagccccggggcggcgtgagcagccgcatcgagcagggcgagtggggcggccgccaccccagctggccctggacccgctgcctgaggatgaggcctcccaggagctag

SEQ ID NO: 18508 - DNA, 540 bp, synthetic construct
  misc_feature 1..540: note = Description of Artificial Sequence: Synthetic coding sequence
  source 1..540: mol_type = other DNA
atggatggcagcggggagcagccccggggcggcggccccaccagcagcgagcagatcatgaagacaggagccctgctgctgcagggcttcatccaggacagagctggccgcatgggcggggaggcccctgagctggccctggaccctgtgccccaggatgccagcaccaagaagctgtctgaatgtctgaagagaattggagatgagctggacagcaacatggagctgcagaggatgattgctgctgtggacacagacagcccccgggaggtgttcttccgggtggccgctgacatgttcagtgatggcaacttcaactggggccgggtggtggccctcttctactttgccagcaagctggtgctgaaggccctgtgcaccaaggtgcctgagctgatccgcaccatcatgggctggaccctggacttcctgcgggagcggctgctgggctggatccaggaccagggcggctggacagtgaccatctttgtggccggcgtgctgacagccagcctgaccatctggaagaagatgggctag

SEQ ID NO: 18509 - DNA, 495 bp, synthetic construct
  misc_feature 1..495: note = Description of Artificial Sequence: Synthetic coding sequence
  source 1..495: mol_type = other DNA
atggatggcagcggggagcagccccggggcggcggccccaccagcagcgagcagatcatgaagacaggagccctgctgctgcagggcttcatccaggacagagctggccgcatgggcggggaggcccctgagctggccctggaccctgtgccccaggatgccagcaccaagaagctgtctgaatgtctgaagagaattggagatgagctggacagcaacatggagctgcagaggatgattgctgctgtggacacagacagcccccgggaggtgttcttccgggtggccgctgacatgttcagtgatggcaacttcaactggggccgggtggtggccctcttctactttgccagcaagctggtgctgaaggccggcgtgaagtggagggacctgggcagcctgcagcccctgcccccaggcttcaagcgcttcacctgcctgagcatccccaggtcctgggactaccggccctgtgccccccgctgcagaaattag

SEQ ID NO: 18510 - DNA, 1806 bp, synthetic construct
  misc_feature 1..1806: note = Description of Artificial Sequence: Synthetic coding sequence
  source 1..1806: mol_type = other DNA
atggcctatgatgacagcgtgaagaaggaggactgctttgatggagaccacacctttgaggacatcggcctggccgccggccgcagccagcgggagaagaagaggagctacaaggacttcctgcgggaggaggaggagattgctgcccaggtgaggaacagcagcaagaagaagctgaaggacagcgagctgtacttcctgggcacagacacccacaagaagaagaggaagcacagcagtgatgactactactatggagacatcagcagcctggagagcagccagaagaagaagaagaagagcagcccccagagcacagacacagccatggacctgctgaaggccatcaccagccccctggccgccggcagcaagcccagcaagaagacaggagagaagagcagcggcagcagcagccacagcgagagcaagaaggagcaccacaggaagaaggtgtctggcagcagcggggagctgcccctggaggatggcggcagccacaagagcaagaagatgaagcccctgtatgtgaacacagagaccctgaccctgcgggagccagatggcctgaagatgaagctgatcctgagccccaaggagaagggcagcagctctgtggatgaggagagcttccagtaccccagccagcaggccaccgtgaagaagagcagcaagaagagcgccagagatgagcagggcgccctgctgctgggccacgagctgcagagcttcctgaagacagccaggaagaagcacaagagcagcagtgatgcccacagcagccctggccctgagggctgcggcagtgatgccagccagtttgctgagagccacagcgccaacctggacctgagcggcctggagcccatcctggtggagagtgacagcagcagcggcggggagctggaggccggggagctggtgattgatgacagctaccgggagatcaagaagaagaagaagagcaagaagagcaagaagaagaaggacaaggagaagcacaaggagaagaggcacagcaagagcaagaggagcctgggcctgtctgctgtgcctgtgggggaggtgacagtgaccagcggccccccacccagcatcccctatgctggggccgccgccccacccctgcccctgcccggcctgcacacagatggccacagcgagaagaagaagaagaaggaggagaaggacaaggagcgggagcggggggagaagcccaagaagaagaacatgtctgcctaccaggtgttctgcaaggagtacagagtgaccatcgtggccgaccaccctggcatcgactttggagagctgagcaagaagctggccgaggtgtggaagcagctgcctgagaaggacaagctgatctggaagcagaaggcccagtacctgcagcacaagcagaacaaggccgaggccaccaccgtgaagaggaaggccagcagcagcgagggctccatgaaggtgaaggccagctctgtgggcgtgctgagcccccagaagaagagcccccccaccaccatgctgctgcctgccagccctgccaaggcccctgagacagagcccattgatgtggccgcccacctgcagctgctgggggagagcctgagcctcatcggccaccggctgcaggagacagagggcatggtggccgtgtctggcagcctgtctgtgctgctggacagcatcatctgtgccctgggccccctggcctgcctgaccacccagctgcctgagctgaatggctgccccaagcaggtgctgagcaacaccctggacaacatcgcctacatcatgcctggcctgtag

SEQ ID NO: 18511 - DNA, 702 bp, synthetic construct
  misc_feature 1..702: note = Description of Artificial Sequence: Synthetic coding sequence
  source 1..702: mol_type = other DNA
atgagccagagcaaccgggagctggtggtggacttcctgagctacaagctgagccagaagggctacagctggagccagttcagtgatgtggaggagaacagaacagaggcccctgagggcacagaaagtgagatggagaccccatctgccatcaatggaaaccccagctggcacctggccgacagccctgctgtgaatggagccaccggccacagcagcagcctggatgcccgggaggtgatccccatggctgctgtgaagcaggccctgcgggaggccggagatgaatttgagctgcgctaccgccgggccttcagtgacctgaccagccagctgcacatcaccccaggcacagcctaccagagctttgagcaggtggtgaatgagctgttcagagatggagtgaactggggccgcatcgtggccttcttctcctttggaggagccctgtgtgtggagagcgtggacaaggagatgcaggtgctggtgtccagaattgctgcctggatggccacctacctgaatgaccacctggagccctggatccaggagaatggaggctgggacacctttgtggagctgtatggcaacaatgctgctgctgagagcaggaagggccaggagcgcttcaaccgctggttcctgaccggcatgacagtggccggcgtggtgctgctgggcagcctcttcagcaggaagtag

SEQ ID NO: 18512 - DNA, 513 bp, synthetic construct
  misc_feature 1..513: note = Description of Artificial Sequence: Synthetic coding sequence
  source 1..513: mol_type = other DNA
atgagccagagcaaccgggagctggtggtggacttcctgagctacaagctgagccagaagggctacagctggagccagttcagtgatgtggaggagaacagaacagaggcccctgagggcacagaaagtgagatggagaccccatctgccatcaatggaaaccccagctggcacctggccgacagccctgctgtgaatggagccaccggccacagcagcagcctggatgcccgggaggtgatccccatggctgctgtgaagcaggccctgcgggaggccggagatgaatttgagctgcgctaccgccgggccttcagtgacctgaccagccagctgcacatcaccccaggcacagcctaccagagctttgagcaggacacctttgtggagctgtatggcaacaatgctgctgctgagagcaggaagggccaggagcgcttcaaccgctggttcctgaccggcatgacagtggccggcgtggtgctgctgggcagcctcttcagcaggaagtag

SEQ ID NO: 18513 - DNA, 702 bp, synthetic construct; identical to SEQ ID NO: 18511
  misc_feature 1..702: note = Description of Artificial Sequence: Synthetic coding sequence
  source 1..702: mol_type = other DNA

SEQ ID NO: 18514 - DNA, 567 bp, synthetic construct
  misc_feature 1..567: note = Description of Artificial Sequence: Synthetic coding sequence
  source 1..567: mol_type = other DNA
atgagccagagcaaccgggagctggtggtggacttcctgagctacaagctgagccagaagggctacagctggagccagttcagtgatgtggaggagaacagaacagaggcccctgagggcacagaaagtgagatggagaccccatctgccatcaatggaaaccccagctggcacctggccgacagccctgctgtgaatggagccaccggccacagcagcagcctggatgcccgggaggtgatccccatggctgctgtgaagcaggccctgcgggaggccggagatgaatttgagctgcgctaccgccgggccttcagtgacctgaccagccagctgcacatcaccccaggcacagcctaccagagctttgagcaggtggtgaatgagctgttcagagatggagtgaactggggccgcatcgtggccttcttctcctttggaggagccctgtgtgtggagagcgtggacaaggagatgcaggtgctggtgtccagaattgctgcctggatggccacctacctgaatgaccacctggagccctggatccaggagaatggaggctggtag

SEQ ID NO: 18515 - DNA, 702 bp, synthetic construct; identical to SEQ ID NO: 18511
  misc_feature 1..702: note = Description of Artificial Sequence: Synthetic coding sequence
  source 1..702: mol_type = other DNA

SEQ ID NO: 18516 - DNA, 567 bp, synthetic construct; identical to SEQ ID NO: 18514
  misc_feature 1..567: note = Description of Artificial Sequence: Synthetic coding sequence
  source 1..567: mol_type = other DNA

SEQ ID NO: 18517 - DNA, 147 bp, synthetic construct
  misc_feature 1..147: note = Description of Artificial Sequence: Synthetic coding sequence
  source 1..147: mol_type = other DNA
atgagccagagcaaccgggagctggtggtggacttcctgagctacaagctgagccagaagggctacagctggagccagttcagtgatgtggaggagaacagaacagaggcccctgagggcacagaaagtgagatggagaccccctag

SEQ ID NO: 18518 - DNA, 546 bp, synthetic construct
  misc_feature 1..546: note = Description of Artificial Sequence: Synthetic coding sequence
  source 1..546: mol_type = other DNA
atgagccagagcaaccgggagctggtggtggacttcctgagctacaagctgagccagaagggctacagctggagccagttcagtgatgtggaggagaacagaacagaggcccctgagggcacagaaagtgagatggagaccccatctgccatcaatggaaaccccagctggcacctggccgacagccctgctgtgaatggagccaccggccacagcagcagcctggatgcccgggaggtgatccccatggctgctgtgaagcaggccctgcgggaggccggagatgaatttgagctgcgctaccgccgggccttcagtgacctgaccagccagctgcacatcaccccaggcacagcctaccagagctttgagcaggtggtgaatgagctgttcagagatggagtgaactggggccgcatcgtggccttcttctcctttggaggagccctgtgtgtggagagcgtggacaaggagatgcaggtgctggtgtccagaattgctgcctggatggccacctacctgaatgaccacctggagccctggtag

SEQ ID NO: 18519 - DNA, 618 bp, synthetic construct
  misc_feature 1..618: note = Description of Artificial Sequence: Synthetic coding sequence
  source 1..618: mol_type = other DNA
atgagccagagcaaccgggagctggtggtggacttcctgagctacaagctgagccagaagggctacagctggagccagttcagtgatgtggaggagaacagaacagaggcccctgagggcacagaaagtgagatggagaccccatctgccatcaatggaaaccccagctggcacctggccgacagccctgctgtgaatggagccaccggccacagcagcagcctggatgcccgggaggtgatccccatggctgctgtgaagcaggccctgcgggaggccggagatgaatttgagctgcgctaccgccgggccttcagtgacctgaccagccagctgcacatcaccccaggcacagcctaccagagctttgagcaggtggtgaatgagctgttcagagatggagtgaactggggccgcatcgtggccttcttctcctttggaggagccctgtgtgtggagagcgtggacaaggagatgcaggtgctggtgtccagaattgctgcctggatggccacctacctgaatgaccacctggagccctggatccaggagaatggaggctgggacacctttgtggagctgtatggcaacaatgctgctgctgagagcaggaagtag

SEQ ID NO: 18520 - DNA, 567 bp, synthetic construct; identical to SEQ ID NO: 18514
  misc_feature 1..567: note = Description of Artificial Sequence: Synthetic coding sequence
  source 1..567: mol_type = other DNA

SEQ ID NO: 18521 - DNA, 615 bp, synthetic construct
  misc_feature 1..615: note = Description of Artificial Sequence: Synthetic coding sequence
  source 1..615: mol_type = other DNA
atggtggaccagctgcgggagaggaccaccatggctgaccccctgcgggagaggacagagctgctgctggccgactacctgggctactgtgcccgggagcccggcaccccagagcccgcccccagcaccccagaggccgctgtgctgcggtctgctgctgcccggctgcggcagatccacaggagcttcttcagcgcctacctgggctacccaggcaacagatttgagctggtggccctgatggctgacagcgtgctgagtgacagccctggccccacctggggccgggtggtgaccctggtgacctttgctggcaccctgctggagcggggccccctggtgacagcccgctggaagaagtggggcttccagccccggctgaaggagcaggagggagatgtggcccgggactgccagaggctggtggccctgctgagcagccggctgatgggccagcaccgggcctggctgcaggcccagggcggctgggatggcttctgccacttcttccgcacccccttccccctggccttctggaggaagcagctggtgcaggccttcctgagctgcctgctgaccacagccttcatctacctgtggacccggctgctgtag

SEQ ID NO: 18522 - DNA, 417 bp, synthetic construct
  misc_feature 1..417: note = Description of Artificial Sequence: Synthetic coding sequence
  source 1..417: mol_type = other DNA
atggccaagcagcccagtgatgtgtccagtgaatgtgaccgggagggccggcagctgcagcctgctgagaggcctccccagctgcggcctggggcccccaccagcctgcagacagagccccaggacaggagccctgcccccatgagctgtgacaagagcacccagacccccagccccccctgccaggccttcaaccactacctgagcgccatggcctccatgaggcaggccgagcctgctgacatgaggcctgagatctggatcgcccaggagctgcggagaattggagatgagttcaatgcctactatgcccggcgggtcttcctgaacaactaccaggccgctgaggaccaccccaggatggtgatcctgcggctgctgcgctacatcgtgcggctggtgtggaggatgcactag

SEQ ID NO: 18523 - DNA, 339 bp, synthetic construct
  misc_feature 1..339: note = Description of Artificial Sequence: Synthetic coding sequence
  source 1..339: mol_type = other DNA
atggccaagcagcccagtgatgtgtccagtgaatgtgaccgggagggccggcagctgcagcctgctgagaggcctccccagctgcggcctggggcccccaccagcctgcagacagagccccaggacaggagccctgcccccatgagctgtgacaagagcacccagacccccagccccccctgccaggccttcaaccactacctgagcgccatggtggtgatcctggaggacatcggggacctgagcctgtgcttcggcttcatcttcaccggcctggacctgtatggccaccaccacagccaggacacagagcagctgaaccacaaggacttctcctag

SEQ ID NO: 18524 - DNA, 519 bp, synthetic construct
  misc_feature 1..519: note = Description of Artificial Sequence: Synthetic coding sequence
  source 1..519: mol_type = other DNA
atggccaagcagcccagtgatgtgtccagtgaatgtgaccgggagggccggcagctgcagcctgctgagaggcctccccagctgcggcctggggcccccaccagcctgcagacagagccccagggcaaccctgagggcaaccacggcggggagggggacagctgcccccacggcagcccccagggccccctggcccccccagccagccctggcccctttgccaccaggagccccctcttcatcttcatgaggaggagcagcctgctgagccgcagcagcagcggctacttctcctttgacacagacaggagccctgcccccatgagctgtgacaagagcacccagacccccagccccccctgccaggccttcaaccactacctgagcgccatggcctccatgaggcaggccgagcctgctgacatgaggcctgagatctggatcgcccaggagctgcggagaattggagatgagttcaatgcctactatgcccggaggatgcccctgcccccagactag

SEQ ID NO: 18525 - DNA, 219 bp, synthetic construct
  misc_feature 1..219: note = Description of Artificial Sequence: Synthetic coding sequence
  source 1..219: mol_type = other DNA
atggccaagcagcccagtgatgtgtccagtgaatgtgaccgggagggccggcagctgcagcctgctgagaggcctccccagctgcggcctggggcccccaccagcctgcagacagagccccagggcaaccctgagggcaaccacggcggggagggggacagctgcccccacggcagcccccagggccccctggcccccccagccagccctggcccctag

SEQ ID NO: 18526 - DNA, 258 bp, synthetic construct
  misc_feature 1..258: note = Description of Artificial Sequence: Synthetic coding sequence
  source 1..258: mol_type = other DNA
atggccaagcagcccagtgatgtgtccagtgaatgtgaccgggagggccggcagctgcagcctgctgagaggcctccccagctgcggcctggggcccccaccagcctgcagacagagccccaggcctccatgaggcaggccgagcctgctgacatgaggcctgagatctggatcgcccaggagctgcggagaattggagatgagttcaatgcctactatgcccggcggctggccaagctgctggccagcagcacctag

SEQ ID NO: 18527 - DNA, 597 bp, synthetic construct
  misc_feature 1..597: note = Description of Artificial Sequence: Synthetic coding sequence
  source 1..597: mol_type = other DNA
atggccaagcagcccagtgatgtgtccagtgaatgtgaccgggagggccggcagctgcagcctgctgagaggcctccccagctgcggcctggggcccccaccagcctgcagacagagccccagggcaaccctgagggcaaccacggcggggagggggacagctgcccccacggcagcccccagggccccctggcccccccagccagccctggcccctttgccaccaggagccccctcttcatcttcatgaggaggagcagcctgctgagccgcagcagcagcggctacttctcctttgacacagacaggagccctgcccccatgagctgtgacaagagcacccagacccccagccccccctgccaggccttcaaccactacctgagcgccatggcctccatgaggcaggccgagcctgctgacatgaggcctgagatctggatcgcccaggagctgcggagaattggagatgagttcaatgcctactatgcccggcgggtcttcctgaacaactaccaggccgctgaggaccaccccaggatggtgatcctgcggctgctgcgctacatcgtgcggctggtgtggaggatgcactag

SEQ ID NO: 18528 - DNA, 369 bp, synthetic construct
  misc_feature 1..369: note = Description of Artificial Sequence: Synthetic coding sequence
  source 1..369: mol_type = other DNA
atggccaagcagcccagtgatgtgtccagtgaatgtgaccgggagggccggcagctgcagcctgctgagaggcctccccagctgcggcctggggcccccaccagcctgcagacagagccccagggcaaccctgagggcaaccacggcggggagggggacagctgcccccacggcagcccccagggccccctggcccccccagccagccctggcccctttgccaccaggagccccctcttcatcttcatgaggaggagcagcctgctgagccgcagcagcagcggctacttctcctttgacacagacaggagccctgcccccatgagctgtgacaagagcacccagacccccagccccccctgccagtag

SEQ ID NO: 18529 - DNA, 222 bp, synthetic construct
  misc_feature 1..222: note = Description of Artificial Sequence: Synthetic coding sequence
  source 1..222: mol_type = other DNA
atgaggcaggccgagcctgctgacatgaggcctgagatctggatcgcccaggagctgcggagaattggagatgagttcaatgcctactatgcccggcgggtgatgatgttcagcctgcctgccttcctgctgacccccagccccagcaccctgtacttcttcaagaagacagtgaccagctgcaactacatgctgatcctggagatgatcaccgtggcctag

SEQ ID NO: 18530 - DNA, 243 bp, synthetic construct
  misc_feature 1..243: note = Description of Artificial Sequence: Synthetic coding sequence
  source 1..243: mol_type = other DNA
atggccaagcagcccagtgatgtgtccagtgaatgtgaccgggagggccggcagctgcagcctgctgagaggcctccccagctgcggcctggggcccccaccagcctgcagacagagccccaggacaggagccctgcccccatgagctgtgacaagagcacccagacccccagccccccctgccaggccttcaaccactacctgagcgccatggtgcgggagattgaggaggtggtggtgtag

SEQ ID NO: 18531 - DNA, 408 bp, synthetic construct
  misc_feature 1..408: note = Description of Artificial Sequence: Synthetic coding sequence
  source 1..408: mol_type = other DNA
atggccaagcagcccagtgatgtgtccagtgaatgtgaccgggagggccggcagctgcagcctgctgagaggcctccccagctgcggcctggggcccccaccagcctgcagacagagccccagggcaaccctgagggcaaccacggcggggagggggacagctgcccccacggcagcccccagggccccctggcccccccagccagccctggcccctttgccaccaggagccccctcttcatcttcatgaggaggagcagcctgctgagccgcagcagcagcggctacttctcctttgacacagacaggagccctgcccccatgagctgtgacaagagcacccagacccccagccccccctgccaggccttcaaccactacctgagcgccatggccaactgggactag

SEQ ID NO: 18532 - DNA, 423 bp, synthetic construct
  misc_feature 1..423: note = Description of Artificial Sequence: Synthetic coding sequence
  source 1..423: mol_type = other DNA
atggccaagcagcccagtgatgtgtccagtgaatgtgaccgggagggccggcagctgcagcctgctgagaggcctccccagctgcggcctggggcccccaccagcctgcagacagagccccagggcaaccctgagggcaaccacggcggggagggggacagctgcccccacggcagcccccagggccccctggcccccccagccagccctggcccctttgccaccaggagccccctcttcatcttcatgaggaggagcagcctgctgagccgcagcagcagcggctacttctcctttgacacagacaggagccctgcccccatgagctgtgacaagagcacccagacccccagccccccctgccaggccttcaaccactacctgagcgccatggtgcgggagattgaggaggtggtggtgtag

SEQ ID NO: 18533 - DNA, 291 bp, synthetic construct
  misc_feature 1..291: note = Description of Artificial Sequence: Synthetic coding sequence
  source 1..291: mol_type = other DNA
aagcagcccagtgatgtgtccagtgaatgtgaccgggagggccggcagctgcagcctgctgagaggcctccccagctgcggcctggggcccccaccagcctgcagacagagccccaggacaggagccctgcccccatgagctgtgacaagagcacccagacccccagccccccctgccaggccttcaaccactacctgagcgccatggatgacagcgctggcagcagcctgagaattgccctgcaccgggaggtgcagtggcccctgaagtggctggccaagagcagctag

SEQ ID NO: 18534 - DNA, 249 bp, synthetic construct
  misc_feature 1..249: note = Description of Artificial Sequence: Synthetic coding sequence
  source 1..249: mol_type = other DNA
atggccaagcagcccagtgatgtgtccagtgaatgtgaccgggagggccggcagctgcagcctgctgagaggcctccccagctgcggcctggggcccccaccagcctgcagacagagccccaggcctccatgaggcaggccgagcctgctgacatgaggcctgagatctggatcgcccaggagctgcggagaattggagatgagttcaatgcctactatgcccggaggatgcccctgcccccagactag

SEQ ID NO: 18535 - DNA, 582 bp, synthetic construct
  misc_feature 1..582: note = Description of Artificial Sequence: Synthetic coding sequence
  source 1..582: mol_type = other DNA
atggccaccccagccagcgccccagacacccgggccctggtggccgactttgtgggctacaagctgcggcagaagggctacgtgtgtggggccggccctggagagggccctgctgctgaccccctgcaccaggccatgagagctgctggagatgaatttgagacccgcttccggaggaccttcagtgacctggccgcccagctgcacgtgaccccaggcagcgcccagcagcgcttcacccaggtgtctgatgagctgttccagggcggccccaactggggccgcctggtggccttctttgtgtttggagctgccctgtgtgccgagagcgtgaacaaggagatggagcccctggtgggccaggtgcaggagtggatggtggcctacctggagacccagctggccgactggatccacagcagcggcggctgggccgagttcaccgccctgtatggagatggagccctggaggaggcccggcggctgcgggagggcaactgggcctctgtgaggacagtgctgactggagctgtggccctgggcgccctggtgacagtgggcgccttctttgccagcaagtag

SEQ ID NO: 18536 - DNA, 156 bp, synthetic construct
  misc_feature 1..156: note = Description of Artificial Sequence: Synthetic coding sequence
  source 1..156: mol_type = other DNA
atggccaccccagccagcgccccagacacccgggccctggtggccgactttgtgggctacaagctgcggcagaagggctacgtgtgtggggccggccctggagagggccctgctgctgaccccctgcaccaggccatgagagctgctggggactag

SEQ ID NO: 18537 - DNA, 219 bp, synthetic construct
  misc_feature 1..219: note = Description of Artificial Sequence: Synthetic coding sequence
  source 1..219: mol_type = other DNA
atggccaccccagccagcgccccagacacccgggccctggtggccgactttgtgggctacaagctgcggcagaagggctacgtgtgtggggccggccctggagagggccctgctgctgaccccctgcaccaggccatgagagctgctggagatgaatttgagacccgcttccggaggaccttcagtgacctggccgcccagctgcacgtgaccccctag

SEQ ID NO: 18538 - DNA, 450 bp, synthetic construct
  misc_feature 1..450: note = Description of Artificial Sequence: Synthetic coding sequence
  source 1..450: mol_type = other DNA
atggccaccccagccagcgccccagacacccgggccctggtggccgactttgtgggctacaagctgcggcagaagggctacgtgtgtggggccggccctggagagggccctgctgctgaccccctgcaccaggccatgagagctgctggagatgaatttgagacccgcttccggaggaccttcagtgacctggccgcccagctgcacgtgaccccaggcagcgcccagcagcgcttcacccaggtgtctgatgagctgttccagggcggccccaactggggccgcctggtggccttctttgtgtttggagctgccctgtgtgccgagagcgtgaacaaggagatggagcccctggtgggccaggtgcaggagtggatggtggcctacctggagacccagctggccgactggatccacagcagcggcggctgggccgagttcaccgcctag

SEQ ID NO: 18539 - DNA, 435 bp, synthetic construct
  misc_feature 1..435: note = Description of Artificial Sequence: Synthetic coding sequence
  source 1..435: mol_type = other DNA
atggccaccccagccagcgccccagacacccgggccctggtggccgactttgtgggctacaagctgcggcagaagggctacgtgtgtggggccggccctggagagggccctgctgctgaccccctgcaccaggccatgagagctgctggagatgaatttgagacccgcttccggaggaccttcagtgacctggccgcccagctgcacgtgaccccaggcagcgcccagcagcgcttcacccaggtgtctgatgagctgttccagggcggccccaactggggccgcctggtggccttctttgtgtttggagctgccctgtgtgccgagagcgtgaacaaggagatggagcccctggtgggccaggtgcaggagtggatggtggcctacctggagacccagctggccgactggatccacagcagcggcggctggtag

SEQ ID NO: 18540 - DNA, 528 bp, synthetic construct
  misc_feature 1..528: note = Description of Artificial Sequence: Synthetic coding sequence
  source 1..528: mol_type = other DNA
atgacagactgtgaatttggctacatctaccgcctggcccaggactacctgcagtgtgtgctgcagatcccccagcccggcagcggccccagcaagaccagccgggtgctgcagaatgtggccttctctgtgcagaaggaggtggagaagaacctgaagagctgcctggacaacgtgaatgtggtgtctgtggacacagcccggaccctcttcaaccaggtgatggagaaggagtttgaagatggcatcatcaactggggcagaattgtgaccatctttgcctttgagggcatcctgatcaagaagctgctgcggcagcagatcgccccagatgtggacacctacaaggagatctcctactttgtggccgagttcatcatgaacaacacaggagagtggatccggcagaatggaggctgggagaatggatttgtgaagaagtttgagcccaagagcggctggatgaccttcctggaggtgacaggcaagatctgtgagatgctgagcctgctgaagcagtactgctag

SEQ ID NO: 18541 - DNA, 492 bp, synthetic construct
  misc_feature 1..492: note = Description of Artificial Sequence: Synthetic coding sequence
  source 1..492: mol_type = other DNA
atgacagactgtgaatttggctacatctaccgcctggcccaggactacctgcagtgtgtgctgcagatcccccagcccggcagcggccccagcaagaccagccgggtgctgcagaatgtggccttctctgtgcagaaggaggtggagaagaacctgaagagctgcctggacaacgtgaatgtggtgtctgtggacacagcccggaccctcttcaaccaggtgatggagaaggagtttgaagatggcatcatcaactggggcagaattgtgaccatctttgcctttgagggcatcctgatcaagaagctgctgcggcagcagatcgccccagatgtggacacctacaaggagatctcctactttgtggccgagttcatcatgaacaacacaggagagtggatccggcagaatggaggctggggcaagtggcacaaccacacccccatgctggtggagagcgtggcccacaagaagaggaagatggccctgtag

SEQ ID NO: 18542 - DNA, 726 bp, synthetic construct
  misc_feature 1..726: note = Description of Artificial Sequence: Synthetic coding sequence
  source 1..726: mol_type = other DNA
atgtgcagcggggccggcgtgatgatggcccgctgggccgcccggggccgggccggctggaggagcacagtgcgcatcctgagccccctgggccactgtgagcccggggtgagccgcagctgcagagctgcccaggccatggactgtgaggtgaacaacggcagcagcctgagagatgagtgcatcaccaacctgctggtgtttggcttcctgcagagctgcagcgacaacagcttccggcgggagctggatgccctgggccacgagctgcctgtgctggccccccagtgggagggctatgatgagctgcagacagatggcaacagaagcagccacagccggctgggccgcatcgaggccgacagcgagagccaggaggacatcatccggaacatcgcccggcacctggcccaggtgggggacagcatggacaggagcatccccccaggcctggtgaatggcctggccctgcagctgaggaacaccagccgctcagaagaagatagaaacagagacctggccacagccctggagcagctgctgcaggcctacccccgggacatggagaaggagaagaccatgctggtgctggccctgctgctggccaagaaggtggccagccacacccccagcctgctgagagatgtgttccacaccaccgtgaacttcatcaaccagaacctgcggacctacgtgcgcagcctggccagaaatggcatggactag

SEQ ID NO: 18543 - DNA, 414 bp, synthetic construct
  misc_feature 1..414: note = Description of Artificial Sequence: Synthetic coding sequence
  source 1..414: mol_type = other DNA
atggactgtgaggtgaacaacggcagcagcctgagagatgagtgcatcaccaacctgctggtgtttggcttcctgcagagctgcagcgacaacagcttccggcgggagctggatgccctgggccacgagctgcctgtgctggccccccagtgggagggctatgatgagctgcagacagatggcaacagaagcagccacagccggctgggccgcatcgaggccggggccagtgacaacaacacagccagcgctgaggaggagacagaggccgccggctctgtggccgtggagcggggcctgcatggagctgccaccgtcatcctgaaggtgaagaagaccagcagcggcatcctgcccggcaccagccccaggtctggaacagcctggacagtggccagcctgcgggcctggtag

SEQ ID NO: 18544 - DNA, 300 bp, synthetic construct
  misc_feature 1..300: note = Description of Artificial Sequence: Synthetic coding sequence
  source 1..300: mol_type = other DNA
atggacaggagcatccccccaggcctggtgaatggcctggccctgcagctgaggaacaccagccgctcagaagaagatagaaacagagacctggccacagccctggagcagctgctgcaggcctacccccgggacatggagaaggagaagaccatgctggtgctggccctgctgctggccaagaaggtggccagccacacccccagcctgctgagagatgtgttccacaccaccgtgaacttcatcaaccagaacctgcggacctacgtgcgcagcctggccagaaatggcatggactag

SEQ ID NO: 18545 - DNA, 300 bp, synthetic construct; identical to SEQ ID NO: 18544
  misc_feature 1..300: note = Description of Artificial Sequence: Synthetic coding sequence
  source 1..300: mol_type = other DNA

SEQ ID NO: 18546 - DNA, 588 bp, synthetic construct
  misc_feature 1..588: note = Description of Artificial Sequence: Synthetic coding sequence
  source 1..588: mol_type = other DNA
atggactgtgaggtgaacaacggcagcagcctgagagatgagtgcatcaccaacctgctggtgtttggcttcctgcagagctgcagcgacaacagcttccggcgggagctggatgccctgggccacgagctgcctgtgctggccccccagtgggagggctatgatgagctgcagacagatggcaacagaagcagccacagccggctgggccgcatcgaggccgacagcgagagccaggaggacatcatccggaacatcgcccggcacctggcccaggtgggggacagcatggacaggagcatccccccaggcctggtgaatggcctggccctgcagctgaggaacaccagccgctcagaagaagatagaaacagagacctggccacagccctggagcagctgctgcaggcctacccccgggacatggagaaggagaagaccatgctggtgctggccctgctgctggccaagaaggtggccagccacacccccagcctgctgagagatgtgttccacaccaccgtgaacttcatcaaccagaacctgcggacctacgtgcgcagcctggccagaaatggcatggactag

SEQ ID NO: 18547 - DNA, 588 bp, synthetic construct; identical to SEQ ID NO: 18546
  misc_feature 1..588: note = Description of Artificial Sequence: Synthetic coding sequence
  source 1..588: mol_type = other DNA

SEQ ID NO: 18548 - DNA, 1353 bp, synthetic construct
  misc_feature 1..1353: note = Description of Artificial Sequence: Synthetic coding sequence
  source 1..1353: mol_type = other DNA
atggaggagccccagaagagctatgtgaacaccatggacctggagagagatgagcccctgaagagcacaggcccccagatctctgtgtctgagttcagctgccactgctgctatgacatcctggtgaaccccaccaccctgaactgtggccacagcttctgccgccactgcctggccctgtggtgggccagcagcaagaagacagaatgtcctgagtgccgggagaagtgggagggcttccccaaggtgtccatcctgctgagagatgccatcgagaagctgttcccagatgccatccggctgcgctttgaggacatccagcagaacaatgacatcgtgcagagcctggccgccttccagaagtatggaaatgaccagatccccctggcccccaacacaggccgggccaaccagcagatgggcggcggcttcttcagcggcgtgctgacagccctgactggagtggccgtggtgctgctggtgtaccactggagcagccgggagagcgagcatgacctgctggtgcacaaggctgtggccaagtggacagctgaggaggtggtgctgtggctggagcagctgggcccctgggccagcctgtaccgggagcgcttcctgtctgagcgggtgaatggccgcctgctgctgaccctgacagaggaggagttcagcaagaccccctacaccatcgagaacagcagccaccggcgggccatcctgatggagctggagcgggtgaaggccctgggcgtgaagccaccccagaacctgtgggagtacaaggctgtgaaccctggccgcagcctcttcctgctgtatgccctgaagagcagcccccggctgagcctgctgtacctgtacctgtttgactacacagacaccttcctgcccttcatccacaccatctgccccctgcaggaggacagcagcggggaggacatcgtgaccaagctgctggacctgaaggagcccacctggaagcagtggagggagttcctggtgaagtacagcttcctgccctaccagctgattgctgagtttgcctgggactggctggaggtgcactactggaccagccgcttcctgatcatcaatgccatgctgctgtctgtgctggagctgttctccttctggaggatctggagccgctctgagctgaagacagtgccccagaggatgtggagccacttctggaaggtgtccacccagggcctgtttgtggccatgttctggcccctcatcccccagtttgtgtgcaactgcctcttctactgggccctgtacttcaaccccatcatcaacatcgacctggtggtgaaggagctgcggcggctggagacccaggtgctgtag

SEQ ID NO: 18549 - DNA, 969 bp, synthetic construct
  misc_feature 1..969: note = Description of Artificial Sequence: Synthetic coding sequence
  source 1..969: mol_type = other DNA
atggtgggcatcttcaaggaaaataggatgagcaggatgcagaggaagatgggccgcttcccccagagccagtacagcccccaggtggtgctgctggtgtaccactggagcagccgggagagcgagcatgacctgctggtgcacaaggctgtggccaagtggacagctgaggaggtggtgctgtggctggagcagctgggcccctgggccagcctgtaccgggagcgcttcctgtctgagcgggtgaatggccgcctgctgctgaccctgacagaggaggagttcagcaagaccccctacaccatcgagaacagcagccaccggcgggccatcctgatggagctggagcgggtgaaggccctgggcgtgaagccaccccagaacctgtgggagtacaaggctgtgaaccctggccgcagcctcttcctgctgtatgccctgaagagcagcccccggctgagcctgctgtacctgtacctgtttgactacacagacaccttcctgcccttcatccacaccatctgccccctgcaggaggacagcagcggggaggacatcgtgaccaagctgctggacctgaaggagcccacctggaagcagtggagggagttcctggtgaagtacagcttcctgccctaccagctgattgctgagtttgcctgggactggctggaggtgcactactggaccagccgcttcctgatcatcaatgccatgctgctgtctgtgctggagctgttctccttctggaggatctggagccgctctgagctgaagacagtgccccagaggatgtggagccacttctggaaggtgtccacccagggcctgtttgtggccatgttctggcccctcatcccccagtttgtgtgcaactgcctcttctactgggccctgtacttcaaccccatcatcaacatcgacctggtggtgaaggagctgcggcggctggagacccaggtgctgtag

SEQ ID NO: 18550 - DNA, 4254 bp, synthetic construct
  misc_feature 1..4254: note = Description of Artificial Sequence: Synthetic coding sequence
  source 1..4254: mol_type = other DNA
atggctgctgtgccccagaacaacctgcaggagcagctggagcggcacagcgcccggaccctgaacaacaagctgagcctgagcaagcccaagttcagcggcttcaccttcaagaagaagaccagcagtgacaacaacgtgtctgtgaccaacgtgtctgtggccaagacccctgtgctgaggaacaaggatgtgaatgtgacagaggacttctccttcagcgagcccctgcccaacaccaccaaccagcagagggtgaaggacttcttcaagaatgccccagctggccaggagacccagaggggcggcagcaagagcctgctgcctgacttcctgcagacccccaaggaggtggtgtgcaccacccagaacacccccaccgtgaagaagagccgggacacagccctgaagaagctggagttcagcagcagcccagacagcctgagcaccatcaatgactgggatgacatggatgactttgacaccagcgagaccagcaagagctttgtgaccccaccccagagccactttgtgcgggtgtccacagcccagaagagcaagaagggcaagaggaacttcttcaaggcccagctgtacaccaccaacacagtgaagacagacctgcccccacccagcagcgagagcgagcagattgacctgacagaggagcagaaggatgacagcgagtggctgagcagtgatgtgatctgcattgatgatggccccatcgccgaggtgcacatcaatgaagatgcccaggagagtgacagcctgaagacccacctggaggatgagcgggacaacagcgagaagaagaagaacctggaggaggccgagctgcacagcacagagaaggtgccctgcattgaatttgatgatgatgattatgacacagactttgtgccccccagccctgaggagatcatcagcgccagcagcagcagcagcaagtgcctgagcaccctgaaggacctggacaccagtgacaggaaggaggatgtgctgagcaccagcaaggacctgctgagcaagccagagaagatgtccatgcaggagctgaaccctgagaccagcacagactgtgatgcccggcagatcagcctgcagcagcagctgatccacgtgatggagcacatctgcaagctgattgacaccatcccagatgacaagctgaagctgctggactgtggaaatgagctgctgcagcagaggaacatccggaggaagctgctgacagaggtggacttcaacaagagtgatgccagcctgctgggcagcctgtggagatacagaccagacagcctggatggccccatggagggggacagctgccccaccggcaacagcatgaaggagctgaacttcagccacctgcccagcaacagcgtgtcccctggggactgcctgctgaccaccaccctgggcaagacaggcttcagcgccaccaggaagaacctgtttgagcggcccctcttcaacacccacctgcagaagagctttgtgagcagcaactgggccgagaccccccggctgggcaagaagaatgaaagcagctacttccctggaaatgtgctgaccagcacagctgtgaaggaccagaacaagcacacagccagcatcaatgacctggagcgggagacccagcccagctatgacatcgacaactttgatattgatgactttgatgatgatgatgactgggaggacatcatgcacaacctggccgccagcaagagcagcacagctgcctaccagcccatcaaggagggccggcccatcaagtctgtgtctgagcggctgagcagcgccaagacagactgcctgcctgtgagcagcacagcccagaacatcaacttcagcgagagcatccagaactacacagacaagagcgcccagaacctggccagcaggaacctgaagcatgagcgcttccagagcctgtccttcccccacaccaaggagatgatgaagatcttccacaagaagtttggcctgcacaacttccgcaccaaccagctggaggccatcaatgctgccctgctgggggaggactgcttcatcctgatgcccactggaggcggcaagagcctgtgctaccagctgcctgcctgtgtgtccccaggagtgacagtggtgatcagccccctgcggagcctcatcgtggaccaggtgcagaagctgaccagcctggacatcccagccacctacctgaccggggacaagacagacagcgaggccaccaacatctacctgcagctgagcaagaaggaccccatcatcaagctgctgtatgtgaccccagagaagatctgtgccagcaacagactcatcagcaccctggagaacctgtatgaaaggaagctgctggccaggtttgtgattgatgaggcccactgtgtgtcccagtggggccatgacttccggcaggactacaagaggatgaacatgctgcggcagaagttccccagcgtgcctgtgatggccctgacagccacagccaacccccgggtgcagaaggacatcctgacccagctgaagatcctgcggccccaggtgttctccatgtccttcaacagacacaacctgaagtactacgtgctgcccaagaagcccaagaaggtggcctttgactgcctggagtggatcaggaagcaccacccctatgacagcggcatcatctactgcctgagccggcgggagtgtgacaccatggctgacaccctgcagagagatggcctggccgccctggcctaccacgccggcctgagtgacagcgccagagatgaggtgcagcagaagtggatcaaccaggacggctgccaggtgatctgtgccaccatcgccttcggcatgggcatcgacaagccagatgtgcgcttcgtcatccacgccagcctgcccaagtctgtggagggctactaccaggagagcggccgggccggcagagatggagagatcagccactgcctgctcttctacacctaccatgatgtgacccggctgaagaggctcatcatgatggagaaggatggcaaccaccacacccgggagacccacttcaacaacctgtacagcatggtgcactactgtgagaacatcacagaatgtcgccgcatccagctgctggcctactttggagaaaatggcttcaacccagacttctgcaagaagcacccagatgtgtcctgtgacaactgctgcaagaccaaggactacaagaccagagatgtgacagatgatgtgaagagcatcgtgcgctttgtgcaggagcacagcagcagccagggcatgaggaacatcaagcacgtgggccccagcggccgcttcaccatgaacatgctggtggacatcttcctgggcagcaagagcgccaagatccagagcggcatctttggaaaaggaagtgcctacagccgccacaatgctgagcggctcttcaagaagctgatcctggacaagatcctggatgaagatctctacatcaatgccaatgaccaggccatcgcctacgtgatgctgggcaacaaggcccagacagtgctgaatggaaacctgaaggtggacttcatggagacagagaacagcagctctgtgaagaagcagaaggccctggtggccaaggtgtcccagcgggaggagatggtgaagaagtgcctgggggagctgacagaggtgtgcaagagcctgggcaaggtgtttggagtgcactacttcaacatcttcaacacagtgaccctgaagaagctggccgagagcctgagcagtgaccctgaggtgctgctgcagattgatggagtgacagaggacaagctggagaagtacggggctgaggtgatctctgtgctgcagaagtacagcgagtggaccagccctgctgaggacagcagccctggcatcagcctgagcagcagccggggccctggccgctctgctgctgaggagctggatgaggagatccctgtgagcagccactactttgccagcaagaccagaaatgaaaggaagaggaagaagatgcctgccagccagaggagcaagaggaggaagacagccagcagcggcagcaaggccaagggcggcagcgccacctgcaggaagatcagcagcaagaccaagagcagcagcatcatcggcagcagcagcgccagccacaccagccaggccaccagcggggccaacagcaagctgggcatcatggccccacccaagcccatcaaccggcccttcctgaagcccagctatgccttctcctag

SEQ ID NO: 18551 - DNA, 3144 bp, synthetic construct
  misc_feature 1..3144: note = Description of Artificial Sequence: Synthetic coding sequence
  source 1..3144: mol_type = other DNA
atgtccatgcaggagctgaaccctgagaccagcacagactgtgatgcccggcagatcagcctgcagcagcagctgattcatgtgatggagcacatctgcaagctgattgacaccatcccagatgacaagctgaagctgctggactgtggaaatgagctgctgcagcagaggaacatccggaggaagctgctgacagaggtggacttcaacaagagtgatgccagcctgctgggcagcctgtggagatacagaccagacagcctggatggccccatggagggggacagctgccccactggaaacagcatgaaggagctgaacttcagccacctgcccagcaacagcgtgtcccctggggactgcctgctgaccaccaccctgggcaagacaggcttcagcgccaccaggaagaacctgtttgagcggcccctcttcaacacccacctgcagaagagctttgtgagcagcaactgggccgagaccccccggctgggcaagaagaatgaaagcagctacttccctggaaatgtgctgaccagcacagctgtgaaggaccagaacaagcacacagccagcatcaatgacctggagcgggagacccagcccagctatgacatcgacaactttgatattgatgactttgatgatgatgatgactgggaggacatcatgcacaacctggccgccagcaagagcagcacagctgcctaccagcccatcaaggagggccggcccatcaagtctgtgtctgagcggctgagcagcgccaagacagactgcctgcctgtgagcagcacagcccagaacatcaacttcagcgagagcatccagaactacacagacaagagcgcccagaacctggccagcaggaacctgaagcatgagcgcttccagagcctgtccttcccccacaccaaggagatgatgaagatcttccacaagaagtttggcctgcacaacttccgcaccaaccagctggaggccatcaatgctgccctgctgggggaggactgcttcatcctgatgcccaccggcggcggcaagagcctgtgctaccagctgcctgcctgtgtgtcccctggggtgacagtggtgatcagccccctgcggagcctgattgtggaccaggtgcagaagctgaccagcctggacatcccagccacctacctgactggagacaagacagattctgaggccaccaacatctacctgcagctgagcaagaaggaccccatcatcaagctgctgtatgtgaccccagagaagatctgtgccagcaacagactcatcagcaccctggagaacctgtatgaaaggaagctgctggccaggtttgtgattgatgaggcccactgtgtgtcccagtggggccatgacttccggcaggactacaagaggatgaacatgctgcggcagaagttccccagcgtgcctgtgatggccctgacagccacagccaacccccgggtgcagaaggacatcctgacccagctgaagatcctgcggccccaggtgttctccatgtccttcaacagacacaacctgaagtactacgtgctgcccaagaagcccaagaaggtggcctttgactgcctggagtggatcaggaagcaccacccctatgattctggcatcatctactgcctgagcagaagagaatgtgacaccatggctgacaccctgcagaagtggatcaaccaggacggctgccaggtgatctgtgccaccatcgccttcggcatgggcatcgacaagccagatgtgcgcttcgtcatccacgccagcctgcccaagtctgtggagggctactaccaggagagcggccgggccggcagagatggagagatcagccactgcctgctcttctacacctaccatgatgtgacccggctgaagaggctcatcatgatggagaaggatggcaaccaccacacccgggagacccacttcaacaacctgtacagcatggtgcactactgtgagaacatcacagaatgtcgccgcatccagctgctggcctactttggagaaaatggcttcaacccagacttctgcaagaagcacccagatgtgtcctgtgacaactgctgcaagaccaaggactacaagaccagagatgtgacagatgatgtgaagagcatcgtgcgctttgtgcaggagcacagcagcagccagggcatgaggaacatcaagcacgtgggccccagcggccgcttcaccatgaacatgctggtggacatcttcctgggcagcaagagcgccaagatccagagcggcatctttggaaaaggaagtgcctacagccgccacaatgctgagcggctcttcaagaagctgatcctggacaagatcctggatgaagatctctacatcaatgccaatgaccaggccatcgcctacgtgatgctgggcaacaaggcccagacagtgctgaatggaaacctgaaggtggacttcatggagacagagaacagcagctctgtgaagaagcagaaggccctggtggccaaggtgtcccagcgggaggagatggtgaagaagtgcctgggggagctgacagaggtgtgcaagagcctgggcaaggtgtttggagtgcactacttcaacatcttcaacacagtgaccctgaagaagctggccgagagcctgagcagtgaccctgaggtgctgctgcagattgatggagtgacagaggacaagctggagaagtacggggctgaggtgatctctgtgctgcagaagtacagcgagtggaccagccctgctgaggacagcagccctggcatcagcctgagcagcagccggggccctggccgctctgctgctgaggagctggatgaggagatccctgtgagcagccactactttgccagcaagaccagaaatgaaaggaagaggaagaagatgcctgccagccagaggagcaagaggaggaagacagccagcagcggcagcaaggccaagggcggcagcgccacctgcaggaagatcagcagcaagaccaagagcagcagcatcatcggcagcagcagcgccagccacaccagccaggccaccagcggggccaacagcaagctgggcatcatggccccacccaagcccatcaaccggcccttcctgaagcccagctatgccttctcctag

SEQ ID NO: 18552 - DNA, 1560 bp, synthetic construct
  misc_feature 1..1560: note = Description of Artificial Sequence: Synthetic coding sequence
  source 1..1560: mol_type = other DNA
atgaacatgctgcggcagaagttccccagcgtgcctgtgatggccctgacagccacagccaacccccgggtgcagaaggacatcctgacccagctgaagatcctgcggccccaggtgttctccatgtccttcaacagacacaacctgaagtactacgtgctgcccaagaagcccaagaaggtggcctttgactgcctggagtggatcaggaagcaccacccctatgattctggcatcatctactgcctgagcagaagagaatgtgacaccatggctgacaccctgcagagagatggcctggccgccctggcctaccacgccggcctgagtgacagcgccagagatgaggtgcagcagaagtggatcaaccaggacggctgccaggtgatctgtgccaccatcgccttcggcatgggcatcgacaagccagatgtgcgctttgtgatccacgccagcctgcccaagtctgtggagggctactaccaggagagcggccgggccggcagagatggagagatcagccactgcctgctcttctacacctaccatgatgtgacccggctgaagaggctcatcatgatggagaaggatggcaaccaccacacccgggagacccacttcaacaacctgtacagcatggtgcactactgtgagaacatcacagagtgccgccgcatccagctgctggcctactttggagaaaatggcttcaacccagacttctgcaagaagcacccagatgtgtcctgtgacaactgctgcaagaccaaggactacaagaccagagatgtgacagatgatgtgaagagcatcgtgcgctttgtgcaggagcacagcagcagccagggcatgaggaacatcaagcacgtgggccccagcggccgcttcaccatgaacatgctggtggacatcttcctgggcagcaagagcgccaagatccagagcggcatctttgggaagggcagcgcctacagccgccacaatgctgagcggctcttcaagaagctgatcctggacaagatcctggatgaggacctgtacatcaatgccaatgaccaggccatcgcctacgtgatgctgggcaacaaggcccagacagtgctgaatggaaacctgaaggtggacttcatggagacagagaacagcagctctgtgaagaagcagaaggccctggtggccaaggtgtcccagcgggaggagatggtgaagaagtgcctgggggagctgacagaggtgtgcaagagcctgggcaaggtgtttggagtgcactacttcaacatcttcaacacagtgaccctgaagaagctggccgagagcctgagcagtgaccctgaggtgctgctgcagattgatggagtgacagaggacaagctggagaagtatggagctgaggtgatctctgtgctgcagaagtacagcgagtggaccagccctgctgaggacagcagccctggcatcagcctgagcagcagccggggccctggccgctctgctgctgaggagctggatgaggagatccctgtgagcagccactactttgccagcaagaccaggaactag

SEQ ID NO: 18553 - DNA, 981 bp, synthetic construct
  misc_feature 1..981: note = Description of Artificial Sequence: Synthetic coding sequence
  source 1..981: mol_type = other DNA
atgcacaggaccacccgcatcaagatcacagagctgaacccccacctgatgtgtgtgctgtgtggcggctacttcattgatgccaccaccatcattgaatgtctgcacagcttctgcaagacctgcatcgtgcgctacctggagaccagcaagtactgccccatctgtgatgtgcaggtgcacaagacccggcccctgctgaacatccgcagtgacaagaccctgcaggacatcgtgtacaagctggtgcccggcctcttcaagaatgagatgaagagaagaagagacttctatgctgcccaccccagcgcagatgctgccaacggcagcaatgaagatagaggagaggtggctgatgaggacaagaggatcatcacagatgatgagatcatcagcctgagcattgagttctttgaccagaaccggctggacaggaaggtgaacaaggacaaggagaagagcaaggaggaggtgaatgacaagcgctacctgcgctgcccagctgccatgacagtgatgcacctgaggaagttcctgcggagcaagatggacatccccaacaccttccagattgatgtgatgtatgaggaggagcccctgaaggactactacaccctgatggacatcgcctacatctacacctggaggagaaatggccccctgcccctgaagtacagagtgcggcccacctgcaagaggatgaagatcagccaccagagagatggcctgaccaatgctggggagctggagagtgacagcggcagtgacaaggccaacagccctgctgggggcatccccagcaccagcagctgcctgcccagccccagcacccctgtgcagagcccccacccccagttcccccacatcagcagcaccatgaatggcaccagcaacagccccagcggcaaccaccagagcagctttgccaaccggcccaggaagagctctgtgaatggcagcagcgccaccagcagtggatag

SEQ ID NO: 18554 - DNA, 717 bp, synthetic construct
  misc_feature 1..717: note = Description of Artificial Sequence: Synthetic coding sequence
  source 1..717: mol_type = other DNA
atgtgtgtgctgtgtggcggctacttcattgatgccaccaccatcattgaatgtctgcacagcttctgcaagacctgcatcgtgcgctacctggagaccagcaagtactgccccatctgtgatgtgcaggtgcacaagacccggcccctgctgaacatccggctggacaggaaggtgaacaaggacaaggagaagagcaaggaggaggtgaatgacaagcgctacctgcgctgcccagctgccatgacagtgatgcacctgaggaagttcctgcggagcaagatggacatccccaacaccttccagattgatgtgatgtatgaggaggagcccctgaaggactactacaccctgatggacatcgcctacatctacacctggaggagaaatggccccctgcccctgaagtacagagtgcggcccacctgcaagaggatgaagatcagccaccagagagatggcctgaccaatgctggggagctggagagtgacagcggcagtgacaaggccaacagccctgctgggggcatccccagcaccagcagctgcctgcccagccccagcacccctgtgcagagcccccacccccagttcccccacatcagcagcaccatgaatggcaccagcaacagccccagcggcaaccaccagagcagctttgccaaccggcccaggaagagctctgtgaatggcagcagcgccaccagcagtggatag

SEQ ID NO: 18555 - DNA, 318 bp, synthetic construct
  misc_feature 1..318: note = Description of Artificial Sequence: Synthetic coding sequence
  source 1..318: mol_type = other DNA
atgcacaggaccacccgcatcaagatcacagagctgaacccccacctgatgtgtgtgctgtgtggcggctacttcattgatgccaccaccatcattgaatgtctgcacagcttctgcaagacctgcatcgtgcgctacctggagaccagcaagtactgccccatctgtgatgtgcaggtgcacaagacccggcccctgctgaacatccgcagtgacaagaccctgcaggacatcgtgtacaagctggtgcccggcctcttcaagaatgagatgaagagaagaagagacttctatgctgcccaccccagcgctgactag

SEQ ID NO: 18556 - DNA, 624 bp, synthetic construct
  misc_feature 1..624: note = Description of Artificial Sequence: Synthetic coding sequence
  source 1..624: mol_type = other DNA
atgcacaggaccacccgcatcaagatcacagagctgaacccccacctgatgtgtgtgctgtgtggcggctacttcattgatgccaccaccatcattgaatgtctgcacagcttctgcaagacctgcatcgtgcgctacctggagaccagcaagtactgccccatctgtgatgtgcaggtgcacaagacccggcccctgctgaacatccgcagtgacaagaccctgcaggacatcgtgtacaagctggtgcccggcctcttcaagaatgagatgaagagaagaagagacttctatgctgcccaccccagcgcagatgctgccaacggcagcaatgaagatagaggagaggtggctgatgaggacaagaggatcatcacagatgatgagatcatcagcctgagcattgagttctttgaccagaaccggctggacaggaaggtgaacaaggacaaggagaagagcaaggaggaggtgaatgacaagcgctacctgcgctgcccagctgccatgacagtgatgcacctgaggaagttcctgcggagcaagatggacatccccaacaccttccagattgatgtgatgtatgaggaggagcccctgaaggactactacaccctgatgtag

SEQ ID NO: 18557 - DNA, 453 bp, synthetic construct
  misc_feature 1..453: note = Description of Artificial Sequence: Synthetic coding sequence
  source 1..453: mol_type = other DNA
atgcacaggaccacccgcatcaagatcacagagctgaacccccacctgatgtgtgtgctgtgtggcggctacttcattgatgccaccaccatcattgaatgtctgcacagcttctgcaagacctgcatcgtgcgctacctggagaccagcaagtactgccccatctgtgatgtgcaggtgcacaagacccggcccctgctgaacatccgcagtgacaagaccctgcaggacatcgtgtacaagctggtgcccggcctcttcaagaatgagatgaagagaagaagagacttctatgctgcccaccccagcgcagatgctgccaacggcagcaatgaagatagaggagaggtggctgatgaggacaagaggatcatcacagatgatgagatcatcagcctgagcattgagttctttgaccagaaccggctggacaggaaggtgaacaaggactag

SEQ ID NO: 18558 - DNA, 555 bp, synthetic construct
  misc_feature 1..555: note = Description of Artificial Sequence: Synthetic coding sequence
  source 1..555: mol_type = other DNA
tacttcattgatgccaccaccatcatcgagtgcctgcacagcttctgcaagacctgcatcgtgcgctacctggagaccagcaagtactgccccatctgtgatgtgcaggtgcacaagacccggcccctgctgaacatccggctggacaggaaggtgaacaaggacaaggagaagagcaaggaggaggtgaatgacaagcgctacctgcgctgcccagctgccatgacagtgatgcacctgaggaagttcctgcggagcaagatggacatccccaacaccttccagattgatgtgatgtatgaggaggagcccctgaaggactactacaccctgatggacatcgcctacatctacacctggaggagaaatggccccctgcccctgaagtacagagtgcggcccacctgcaagaggatgaagatcagccaccagagagatggcctgaccaatgctggggagctggagagtgacagcggcagtgacaaggccaacagccctgctgggggcatccccagcaccagcagctgcctgcccagccccagcacccctgtgtag

SEQ ID NO: 18559 - DNA, 279 bp, synthetic construct
  misc_feature 1..279: note = Description of Artificial Sequence: Synthetic coding sequence
  source 1..279: mol_type = other DNA
atgcacaggaccacccgcatcaagatcacagagctgaacccccacctgatgtgtgtgctgtgtggcggctacttcattgatgccaccaccatcattgaatgtctgcacagcttctgcaagacctgcatcgtgcgctacctggagaccagcaagtactgccccatctgtgatgtgcaggtgcacaagacccggcccctgctgaacatccgcagtgacaagaccctgcaggacatcgtgtacaagctggtgcccggcctcttcaccgccaacggcagctag

SEQ ID NO: 18560 - DNA, 2193 bp, synthetic construct
  misc_feature 1..2193: note = Description of Artificial Sequence: Synthetic coding sequence
  source 1..2193: mol_type = other DNA
atgcctggggtggcccggctgcccctgctgctgggcctgctgctgctgcccaggcctggccggcccctggacctggccgactacacctatgacctggccgaggaggatgacagcgagcccctgaactacaaggacccctgcaaggccgccgccttcctgggggacatcgccctggatgaggaggacctgcgggccttccaggtgcagcaggccgtggacctgcggcggcacacagccaggaagagcagcatcaaggctgctgtgcccggcaacaccagcacccccagctgccagagcaccaacggccagccccagagaggagcctgtggccgctggaggggccgcagccgcagcagaagagctgccaccagcaggcctgagcgggtgtggccagatggagtcatcccctttgtgattggaggcaacttcaccggcagccagagagctgtgttccggcaggccatgaggcactgggagaagcacacctgtgtgaccttcctggagaggacagatgaggacagctacatcgtgttcacctaccggccctgtggctgctgcagctatgtgggcagaagaggaggcggcccccaggccatcagcatcggcaagaactgtgacaagtttggcatcgtggtgcatgagctgggccacgtggtgggcttctggcatgagcacaccaggccagaccgggacagacatgtgtccatcgtgcgggagaacatccagcccggccaggagtacaacttcctgaagatggagccccaggaggtggagagcctgggggagacctatgactttgacagcatcatgcactacgccaggaacaccttcagccggggcatcttcctggacaccatcgtgcccaagtatgaggtgaatggagtgaagccacccatcggccagaggacccggctgagcaaaggagacatcgcccaggccaggaagctgtacaagtgcccagcctgtggggagaccctgcaggacagcacaggcaacttcagcagccctgagtaccccaacggctacagcgcccacatgcactgtgtgtggaggatctctgtgaccccaggagagaagatcatcctgaacttcaccagcctggacctgtaccgcagccggctgtgctggtatgactatgtggaggtgagagatggcttctggaggaaggcccccctgcggggccgcttctgtggcagcaagctgcctgagcccatcgtgtccacagacagccggctgtgggtggagttccgcagcagcagcaactgggtgggcaagggcttctttgctgtgtatgaggccatctgtggaggagatgtgaagaaggactatggccacatccagagccccaactacccagatgactaccggcccagcaaggtgtgcatctggaggatccaggtgtctgagggcttccacgtgggcctgaccttccagagctttgaaattgaaagacatgacagctgtgcctatgactacctggaggtgagagatggccacagcgagagcagcaccctcatcggccgctactgcggctatgagaagccagatgacatcaagagcaccagcagccggctgtggctgaagtttgtgtctgatggcagcatcaacaaggccggctttgctgtgaacttcttcaaggaggtggatgagtgcagccggcccaacagaggaggctgtgagcagcgctgcctgaacaccctgggcagctacaagtgcagctgtgaccccggctatgagctggccccagacaagagaagatgtgaggccgcctgtggcggcttcctgaccaagctgaatggcagcatcaccagccctggctggcccaaggagtacccacccaacaagaactgcatctggcagctggtggcccccacccagtaccgcatcagcctgcagtttgacttctttgaaacagagggcaatgatgtgtgcaagtatgactttgtggaggtgcgcagcggcctgacagctgacagcaagctgcacggcaagttctgtggcagcgagaagccagaggtgatcaccagccagtacaacaacatgagggtggagttcaagagtgacaacacagtgtccaagaagggcttcaaggcccacttcttcagcgagaagaggcctgccctgcagcccccccggggccggccccaccagctgaagttccgggtgcagaagaggaacagaacaccccagtag

SEQ ID NO: 18561 - DNA, 2961 bp, synthetic construct
  misc_feature 1..2961: note = Description of Artificial Sequence: Synthetic coding sequence
  source 1..2961: mol_type = other DNA
atgcctggggtggcccggctgcccctgctgctgggcctgctgctgctgcccaggcctggccggcccctggacctggccgactacacctatgacctggccgaggaggatgacagcgagcccctgaactacaaggacccctgcaaggccgccgccttcctgggggacatcgccctggatgaggaggacctgcgggccttccaggtgcagcaggccgtggacctgcggcggcacacagccaggaagagcagcatcaaggctgctgtgcccggcaacaccagcacccccagctgccagagcaccaacggccagccccagagaggagcctgtggccgctggaggggccgcagccgcagcagaagagctgccaccagcaggcctgagcgggtgtggccagatggagtcatcccctttgtgattggaggcaacttcaccggcagccagagagctgtgttccggcaggccatgaggcactgggagaagcacacctgtgtgaccttcctggagaggacagatgaggacagctacatcgtgttcacctaccggccctgtggctgctgcagctatgtgggcagaagaggaggcggcccccaggccatcagcatcggcaagaactgtgacaagtttggcatcgtggtgcatgagctgggccacgtggtgggcttctggcatgagcacaccaggccagaccgggacagacatgtgtccatcgtgcgggagaacatccagcccggccaggagtacaacttcctgaagatggagccccaggaggtggagagcctgggggagacctatgactttgacagcatcatgcactacgccaggaacaccttcagccggggcatcttcctggacaccatcgtgcccaagtatgaggtgaatggagtgaagccacccatcggccagaggacccggctgagcaaaggagacatcgcccaggccaggaagctgtacaagtgcccagcctgtggggagaccctgcaggacagcacaggcaacttcagcagccctgagtaccccaacggctacagcgcccacatgcactgtgtgtggaggatctctgtgaccccaggagagaagatcatcctgaacttcaccagcctggacctgtaccgcagccggctgtgctggtatgactatgtggaggtgagagatggcttctggaggaaggcccccctgcggggccgcttctgtggcagcaagctgcctgagcccatcgtgtccacagacagccggctgtgggtggagttccgcagcagcagcaactgggtgggcaagggcttctttgctgtgtatgaggccatctgtggaggagatgtgaagaaggactatggccacatccagagccccaactacccagatgactaccggcccagcaaggtgtgcatctggaggatccaggtgtctgagggcttccacgtgggcctgaccttccagagctttgaaattgaaagacatgacagctgtgcctatgactacctggaggtgagagatggccacagcgagagcagcaccctcatcggccgctactgcggctatgagaagccagatgacatcaagagcaccagcagccggctgtggctgaagtttgtgtctgatggcagcatcaacaaggccggctttgctgtgaacttcttcaaggaggtggatgagtgcagccggcccaacagaggaggctgtgagcagcgctgcctgaacaccctgggcagctacaagtgcagctgtgaccccggctatgagctggccccagacaagagaagatgtgaggccgcctgtggcggcttcctgaccaagctgaatggcagcatcaccagccctggctggcccaaggagtacccacccaacaagaactgcatctggcagctggtggcccccacccagtaccgcatcagcctgcagtttgacttctttgaaacagagggcaatgatgtgtgcaagtatgactttgtggaggtgcgcagcggcctgacagctgacagcaagctgcacggcaagttctgtggcagcgagaagccagaggtgatcaccagccagtacaacaacatgagggtggagttcaagagtgacaacacagtgtccaagaagggcttcaaggcccacttcttcagtgacaaggatgagtgcagcaaggacaatggaggctgccagcaggactgtgtgaacaccttcggcagctatgagtgccagtgccgcagcggctttgtgctgcatgacaacaagcatgactgcaaggaggccggctgtgaccacaaggtgaccagcaccagcggcaccatcaccagccccaactggccagacaagtaccccagcaagaaggagtgcacctgggccatcagcagcaccccaggccaccgggtgaagctgaccttcatggagatggacatcgagagccagccagaatgtgcctatgaccacctggaggtgtttgatggaagagatgccaaggcccctgtgctgggccgcttctgtggcagcaagaagccagagcctgtgctggccaccggcagcaggatgttcctgcgcttctacagcgacaacagcgtgcagaggaagggcttccaggccagccacgccacagaatgtggcggccaggtgcgggcagatgtgaagaccaaggacctgtacagccacgcccagtttggagacaacaactacccaggaggagtggactgtgagtgggtgattgtggccgaggagggctacggcgtggagctggtgttccagacctttgaggtggaggaggagacagactgtggctatgactacatggagctgtttgatggctatgacagcacagccccccggctgggccgctactgcggcagcggccccccagaggaggtgtacagcgctggggacagcgtgctggtgaagttccacagtgatgacaccatcaccaagaagggcttccacctgcgctacaccagcaccaagttccaggacaccctgcacagcaggaagtag

SEQ ID NO: 18562 - DNA, 909 bp, synthetic construct
  misc_feature 1..909: note = Description of Artificial Sequence: Synthetic coding sequence
  source 1..909: mol_type = other DNA
atgcctggggtggcccggctgcccctgctgctgggcctgctgctgctgcccaggcctggccggcccctggacctggccgactacacctatgacctggccgaggaggatgacagcgagcccctgaactacaaggacccctgcaaggccgccgccttcctgggggacatcgccctggatgaggaggacctgcgggccttccaggtgcagcaggccgtggacctgcggcggcacacagccaggaagagcagcatcaaggctgctgtgcccggcaacaccagcacccccagctgccagagcaccaacggccagccccagagaggagcctgtggccgctggaggggccgcagccgcagcagaagagctgccaccagcaggcctgagcgggtgtggccagatggagtcatcccctttgtgattggaggcaacttcaccggcagccagagagctgtgttccggcaggccatgaggcactgggagaagcacacctgtgtgaccttcctggagaggacagatgaggacagctacatcgtgttcacctaccggccctgtggctgctgcagctatgtgggcagaagaggaggcggcccccaggccatcagcatcggcaagaactgtgacaagtttggcatcgtggtgcatgagctgggccacgtggtgggcttctggcatgagcacaccaggccagaccgggacagacatgtgtccatcgtgcgggagaacatccagcccggggtgctgcacagcagcctgctgctgctgagctgtggcagcagaaatggagccagcttcccctgcagcctggagagcagcatccaccaggccctgtgctggacaggcctcttcctgcggcccagccccttcccccggctgcccctggccgcccccaggaccctgcgggccggcgtgtag

SEQ ID NO: 18563 - DNA, 1869 bp, synthetic construct
  misc_feature 1..1869: note = Description of Artificial Sequence: Synthetic coding sequence
  source 1..1869: mol_type = other DNA
atgcctggggtggcccggctgcccctgctgctgggcctgctgctgctgcccaggcctggccggcccctggacctggccgactacacctatgacctggccgaggaggatgacagcgagcccctgaactacaaggacccctgcaaggccgccgccttcctgggggacatcgccctggatgaggaggacctgcgggccttccaggtgcagcaggccgtggacctgcggcggcacacagccaggaagagcagcatcaaggctgctgtgcccggcaacaccagcacccccagctgccagagcaccaacggccagccccagagaggagcctgtggccgctggaggggccgcagccgcagcagaagagctgccaccagcaggcctgagcgggtgtggccagatggagtcatcccctttgtgattggaggcaacttcaccggcagccagagagctgtgttccggcaggccatgaggcactgggagaagcacacctgtgtgaccttcctggagaggacagatgaggacagctacatcgtgttcacctaccggccctgtggctgctgcagctatgtgggcagaagaggaggcggcccccaggccatcagcatcggcaagaactgtgacaagtttggcatcgtggtgcatgagctgggccacgtggtgggcttctggcatgagcacaccaggccagaccgggacagacatgtgtccatcgtgcgggagaacatccagcccggccaggagtacaacttcctgaagatggagccccaggaggtggagagcctgggggagacctatgactttgacagcatcatgcactacgccaggaacaccttcagccggggcatcttcctggacaccatcgtgcccaagtatgaggtgaatggagtgaagccacccatcggccagaggacccggctgagcaaaggagacatcgcccaggccaggaagctgtacaagtgcccagcctgtggggagaccctgcaggacagcacaggcaacttcagcagccctgagtaccccaacggctacagcgcccacatgcactgtgtgtggaggatctctgtgaccccaggagagaagatcatcctgaacttcaccagcctggacctgtaccgcagccggctgtgctggtatgactatgtggaggtgagagatggcttctggaggaaggcccccctgcggggccgcttctgtggcagcaagctgcctgagcccatcgtgtccacagacagccggctgtgggtggagttccgcagcagcagcaactgggtgggcaagggcttctttgctgtgtatgaggccatctgtggaggagatgtgaagaaggactatggccacatccagagccccaactacccagatgactaccggcccagcaaggtgtgcatctggaggatccaggtgtctgagggcttccacgtgggcctgaccttccagagctttgaaattgaaagacatgacagctgtgcctatgactacctggaggtgagagatggccacagcgagagcagcaccctcatcggccgctactgcggctatgagaagccagatgacatcaagagcaccagcagccggctgtggctgaagtttgtgtctgatggcagcatcaacaaggccggctttgctgtgaacttcttcaaggaggtggatgagtgcagccggcccaacagaggaggctgtgagcagcgctgcctgaacaccctgggcagctacaagtgcagctgtgaccccggctatgagctggccccagacaagagaagatgtgagggctgctatgacctgcaggtgggcaagcccctgctgtgggacagacactgcttccggctgagcacccacggccctgagatgctgggcacagccctgcggggctag

SEQ ID NO: 18564 - DNA, 2472 bp, synthetic construct
  misc_feature 1..2472: note = Description of Artificial Sequence: Synthetic coding sequence
  source 1..2472: mol_type = other DNA
atgcctggggtggcccggctgcccctgctgctgggcctgctgctgctgcccaggcctggccggcccctggacctggccgactacacctatgacctggccgaggaggatgacagcgagcccctgaactacaaggacccctgcaaggccgccgccttcctgggggacatcgccctggatgaggaggacctgcgggccttccaggtgcagcaggccgtggacctgcggcggcacacagccaggaagagcagcatcaaggctgctgtgcccggcaacaccagcacccccagctgccagagcaccaacggccagccccagagaggagcctgtggccgctggaggggccgcagccgcagcagaagagctgccaccagcaggcctgagcgggtgtggccagatggagtcatcccctttgtgattggaggcaacttcaccggcagccagagagctgtgttccggcaggccatgaggcactgggagaagcacacctgtgtgaccttcctggagaggacagatgaggacagctacatcgtgttcacctaccggccctgtggctgctgcagctatgtgggcagaagaggaggcggcccccaggccatcagcatcggcaagaactgtgacaagtttggcatcgtggtgcatgagctgggccacgtggtgggcttctggcatgagcacaccaggccagaccgggacagacatgtgtccatcgtgcgggagaacatccagcccggccaggagtacaacttcctgaagatggagccccaggaggtggagagcctgggggagacctatgactttgacagcatcatgcactacgccaggaacaccttcagccggggcatcttcctggacaccatcgtgcccaagtatgaggtgaatggagtgaagccacccatcggccagaggacccggctgagcaaaggagacatcgcccaggccaggaagctgtacaagtgcccagcctgtggggagaccctgcaggacagcacaggcaacttcagcagccctgagtaccccaacggctacagcgcccacatgcactgtgtgtggaggatctctgtgaccccaggagagaagatcatcctgaacttcaccagcctggacctgtaccgcagccggctgtgctggtatgactatgtggaggtgagagatggcttctggaggaaggcccccctgcggggccgcttctgtggcagcaagctgcctgagcccatcgtgtccacagacagccggctgtgggtggagttccgcagcagcagcaactgggtgggcaagggcttctttgctgtgtatgaggccatctgtggaggagatgtgaagaaggactatggccacatccagagccccaactacccagatgactaccggcccagcaaggtgtgcatctggaggatccaggtgtctgagggcttccacgtgggcctgaccttccagagctttgaaattgaaagacatgacagctgtgcctatgactacctggaggtgagagatggccacagcgagagcagcaccctcatcggccgctactgcggctatgagaagccagatgacatcaagagcaccagcagccggctgtggctgaagtttgtgtctgatggcagcatcaacaaggccggctttgctgtgaacttcttcaaggaggtggatgagtgcagccggcccaacagaggaggctgtgagcagcgctgcctgaacaccctgggcagctacaagtgcagctgtgaccccggctatgagctggccccagacaagagaagatgtgaggccgcctgtggcggcttcctgaccaagctgaatggcagcatcaccagccctggctggcccaaggagtacccacccaacaagaactgcatctggcagctggtggcccccacccagtaccgcatcagcctgcagtttgacttctttgaaacagagggcaatgatgtgtgcaagtatgactttgtggaggtgcgcagcggcctgacagctgacagcaagctgcacggcaagttctgtggcagcgagaagccagaggtgatcaccagccagtacaacaacatgagggtggagttcaagagtgacaacacagtgtccaagaagggcttcaaggcccacttcttctctgtgctggagggcgctggggacagacacagccacctgagcggcctggagctgctgctgtgcccccacgccctggtggacacagtgcctgcccctccttctgccctgcacggggacacccacgcccacacccacacccacgtgcacacccactgccccatcgcccaggagacctgccggggcccccccctgggcgccagccggctgagcccccagggccctggccacctgaccctggccccccaggagggcagctacctggacttctgggacacccacagaggagaccccaagcccaggagaagaaggaagagcctgaagaccttcagcctgaccccagccaccttccggggcatctgggccctgtag

SEQ ID NO: 18565 - DNA, 2193 bp, synthetic construct; identical to SEQ ID NO: 18560
  misc_feature 1..2193: note = Description of Artificial Sequence: Synthetic coding sequence
  source 1..2193: mol_type = other DNA

SEQ ID NO: 18566 - DNA, 1509 bp, synthetic construct
  misc_feature 1..1509: note = Description of Artificial Sequence: Synthetic coding sequence
  source 1..1509: mol_type = other DNA
atgctgctgcggtctgctgggaagctgaatgtgggcaccaagaaggaggatggagagagcacagcccccaccccccggcccaaggtgctgcgctgcaagtgccaccaccactgcccagaggacagcgtgaacaacatctgcagcacagatggctactgcttcaccatgattgaagaagatgacagcggcctgcctgtggtgaccagcggctgcctgggcctggagggcagtgacttccagtgccgggacacccccatcccccaccagaggaggagcattgagtgctgcacagaaagaaatgaatgcaacaaggacctgcaccccaccctgccccccctgaagaacagagactttgtggatggccccatccaccaccgggccctgctgatctctgtgacagtgtgcagcctgctgctggtgctgatcatcctcttctgctacttccgctacaagaggcaggagacccggccccgctacagcatcggcctggagcaggatgagacctacatccccccaggagagagcctgcgggacctgattgagcagagccagagcagcggcagcggcagcggcctgcccctgctggtgcagaggaccatcgccaagcagatccagatggtgaagcagatcggcaagggccgctatggagaggtgtggatgggcaagtggagaggagagaaggtggccgtgaaggtgttcttcaccacagaggaggcctcctggttccgggagacagagatctaccagacagtgctgatgagacatgagaacatcctgggcttcatcgctgctgacatcaagggcaccggctcctggacccagctgtacctgatcacagactaccatgaaaatggcagcctgtatgactacctgaagagcaccaccctggatgccaagtccatgctgaagctggcctacagctctgtgtctggcctgtgccacctgcacacagagatcttcagcacccagggcaagccagccatcgcccaccgggacctgaagagcaagaacatcctggtgaagaagaatggcacctgctgcatcgctgacctgggcctggccgtgaagttcatcagtgacaccaatgaggtggacatcccccccaacaccagggtgggcaccaagcgctacatgcctcctgaggtgctggatgagagcctgaacagaaaccacttccagagctacatcatggctgacatgtacagctttggcctcatcctgtgggaggtggcccggcgctgtgtgtctgggggcatcgtggaggagtaccagctgccctaccatgacctggtgcccagcgaccccagctatgaggacatgagagaaattgtgtgcatcaagaagctgcggcccagcttccccaaccgctggagcagtgatgaatgtctgcggcagatgggcaagctgatgacagagtgctgggcccacaacccagccagccggctgacagccctgcgggtgaagaagaccctggccaagatgtctgagagccaggacatcaagctgtag

SEQ ID NO: 18567 - DNA, 1509 bp, synthetic construct; identical to SEQ ID NO: 18566
  misc_feature 1..1509: note = Description of Artificial Sequence: Synthetic coding sequence
  source 1..1509: mol_type = other DNA

SEQ ID NO: 18568 - DNA, 1599 bp, synthetic construct
  misc_feature 1..1599: note = Description of Artificial Sequence: Synthetic coding sequence
  source 1..1599: mol_type = other DNA
atgggctggctggaggagctgaactggcagctgcacatcttcctgctgatcctgctgtccatgcacacccgggccaacttcctggacaacatgctgctgcggtctgctgggaagctgaatgtgggcaccaagaaggaggatggagagagcacagcccccaccccccggcccaaggtgctgcgctgcaagtgccaccaccactgcccagaggacagcgtgaacaacatctgcagcacagatggctactgcttcaccatgattgaagaagatgacagcggcctgcctgtggtgaccagcggctgcctgggcctggagggcagtgacttccagtgccgggacacccccatcccccaccagaggaggagcattgagtgctgcacagaaagaaatgaatgcaacaaggacctgcaccccaccctgccccccctgaagaacagagactttgtggatggccccatccaccaccgggccctgctgatctctgtgacagtgtgcagcctgctgctggtgctgatcatcctcttctgctacttccgctacaagaggcaggagacccggccccgctacagcatcggcctggagcaggatgagacctacatccccccaggagagagcctgcgggacctgattgagcagagccagagcagcggcagcggcagcggcctgcccctgctggtgcagaggaccatcgccaagcagatccagatggtgaagcagatcggcaagggccgctatggagaggtgtggatgggcaagtggagaggagagaaggtggccgtgaaggtgttcttcaccacagaggaggcctcctggttccgggagacagagatctaccagacagtgctgatgagacatgagaacatcctgggcttcatcgctgctgacatcaagggcaccggctcctggacccagctgtacctgatcacagactaccatgaaaatggcagcctgtatgactacctgaagagcaccaccctggatgccaagtccatgctgaagctggcctacagctctgtgtctggcctgtgccacctgcacacagagatcttcagcacccagggcaagccagccatcgcccaccgggacctgaagagcaagaacatcctggtgaagaagaatggcacctgctgcatcgctgacctgggcctggccgtgaagttcatcagtgacaccaatgaggtggacatcccccccaacaccagggtgggcaccaagcgctacatgcctcctgaggtgctggatgagagcctgaacagaaaccacttccagagctacatcatggctgacatgtacagctttggcctcatcctgtgggaggtggcccggcgctgtgtgtctgggggcatcgtggaggagtaccagctgccctaccatgacctggtgcccagcgaccccagctatgaggacatgagagaaattgtgtgcatcaagaagctgcggcccagcttccccaaccgctggagcagtgatgaatgtctgcggcagatgggcaagctgatgacagagtgctgggcccacaacccagccagccggctgacagccctgcgggtgaagaagaccctggccaagatgtctgagagccaggacatcaagctgtag

SEQ ID NO: 18569 - DNA, 345 bp, synthetic construct
  misc_feature 1..345: note = Description of Artificial Sequence: Synthetic coding sequence
  source 1..345: mol_type = other DNA
atgctgctgcggtctgctgggaagctgaatgtgggcaccaagaaggaggatggagagagcacagcccccaccccccggcccaaggtgctgcgctgcaagtgccaccaccactgcccagaggacagcgtgaacaacatctgcagcacagatggctactgcttcaccatgattgaagaagatgacagcggcctgcctgtggtgaccagcggctgcctgggcctggagggcagtgacttccagtgccgggtgaggaccctgcccttcctgatcaaggaggaccagctgaatgctgcccagaagggcaccaacgtcatcaagacctacaccctgcactgcctgcactag

SEQ ID NO: 18570 - DNA, 378 bp, synthetic construct
  misc_feature 1..378: note = Description of Artificial Sequence: Synthetic coding sequence
  source 1..378: mol_type = other DNA
atgctgctgcggtctgctgggaagctgaatgtgggcaccaagaaggaggatggagagagcacagcccccaccccccggcccaaggtgctgcgctgcaagtgccaccaccactgcccagaggacagcgtgaacaacatctgcagcacagatggctactgcttcaccatgattgaagaagatgacagcggcctgcctgtggtgaccagcggctgcctgggcctggagggcagtgacttccagtgccgggacacccccatcccccaccagaggaggagcattgagtgctgcacagaaagaaatgaatgcaacaaggacctgcaccccaccctgccccccctgaagaacagagactttgtggatggccccatccaccactag

SEQ ID NO: 18571 - DNA, 1509 bp, synthetic construct; identical to SEQ ID NO: 18566
  misc_feature 1..1509: note = Description of Artificial Sequence: Synthetic coding sequence
  source 1..1509: mol_type = other DNA

SEQ ID NO: 18572 - DNA, 1509 bp, synthetic construct; identical to SEQ ID NO: 18566
  misc_feature 1..1509: note = Description of Artificial Sequence: Synthetic coding sequence
  source 1..1509: mol_type = other DNA

SEQ ID NO: 18573 - DNA, 1509 bp, synthetic construct; identical to SEQ ID NO: 18566
  misc_feature 1..1509: note = Description of Artificial Sequence: Synthetic coding sequence
  source 1..1509: mol_type = other DNA

SEQ ID NO: 18574 - DNA, 4755 bp, synthetic construct
  misc_feature 1..4755: note = Description of Artificial Sequence: Synthetic coding sequence
  source 1..4755: mol_type = other DNA
atgaggggccaggccgccgcccctggccctgtgtggatcctggcccccctgctgctgctgctgctgctgctgggccggcgggcccgggctgctgctggagcagatgctggccctggccctgagccctgtgccaccctggtgcagggcaagttcttcggctacttctctgctgctgctgtgtttcctgccaatgccagccgctgctcctggaccctgagaaatccagacccccggcgctacaccctgtacatgaaggtggccaaggcccctgtgccctgcagcggccctggccgggtgaggacctaccagtttgacagcttcctggagagcaccaggacctacctgggcgtggagagctttgatgaggtgctgcggctgtgtgaccccagcgcccccctggccttcctgcaggccagcaagcagttcctgcagatgaggcggcagcagcccccccagcatgatggcctgcggccccgggccggccccccaggccccacagatgacttctctgtggagtacctggtggtgggcaacagaaaccccagccgggccgcctgccagatgctgtgccgctggctggatgcctgcctggccggcagccgcagcagccacccctgtggcatcatgcagaccccctgtgcctgcctgggcggggaggccggcggccctgctgctggccccctggcccccagaggagatgtgtgcctgagagatgctgtggccggcggccctgagaactgcctgaccagcctgacccaggaccggggcggccacggggccactggaggctggaagctgtggagcctgtggggcgagtgcacccgggactgtggcggcggcctgcagaccaggaccaggacctgcctgcctgcccctggggtggagggcggcggctgtgaaggagtgctggaggagggccggcagtgcaaccgggaggcctgtggccctgctggccgcaccagcagccgcagccagagcctgcggagcacagatgcccggcggcgggaggagctgggagatgagctgcagcagtttggcttccctgccccccagacaggagaccctgctgctgaggagtggagcccctggagcgtgtgcagcagcacctgtggggagggctggcagaccaggacccgcttctgtgtgagcagcagctacagcacccagtgcagcggccccctgcgggagcagaggctgtgcaacaacagcgctgtgtgccctgtgcatggagcctgggatgagtggagcccctggagcctgtgcagcagcacctgtggccggggcttccgggacaggaccaggacctgccggcccccccagtttggaggcaacccctgtgagggccctgagaagcagaccaagttctgcaacatcgccctgtgccccggccgggctgtggatggcaactggaatgagtggagctcctggagcgcctgcagcgccagctgcagccagggccggcagcagaggaccagagaatgtaatggccccagctatggaggagctgagtgccagggccactgggtggagacccgggactgcttcctgcagcagtgccctgtggatggcaagtggcaggcctgggcctcctggggcagctgcagcgtgacctgtggggccggcagccagaggcgggagcgggtgtgcagcggccccttcttcggcggggccgcctgccagggcccccaggatgagtaccggcagtgtggcacccagcgctgcccagagccccatgagatctgtgatgaggacaactttggagctgtgatctggaaggagaccccagctggggaggtggccgctgtgcgctgccccagaaatgccaccggcctcatcctgcggcgctgtgagctggatgaggagggcatcgcctactgggagccccccacctacatccgctgtgtgtccattgactacagaaacatccagatgatgacccgggagcacctggccaaggcccagaggggcctgcccggggagggcgtgtctgaggtgatccagaccctggtggagatcagccaggacggcaccagctacagcggggacctgctgagcaccattgatgtgctgaggaacatgacagagatcttccggcgggcctactacagccccaccccaggagatgtgcagaactttgtgcagatcctgagcaacctgctggccgaggagaacagagacaagtgggaggaggcccagctggccggccccaatgccaaggagctgttccggctggtggaggactttgtggatgtgattggcttcaggatgaaggacctgagagatgcctaccaggtgacagacaacctggtgctgagcatccacaagctgcctgccagcggggccacagacatctccttccccatgaagggctggagggccaccggggactgggccaaggtgcctgaggacagagtgacagtgtccaagagcgtcttcagcacaggcctgacagaagcagatgaggcctctgtgtttgtggtgggcaccgtgctgtacagaaacctgggcagcttcctggccctgcagaggaacaccaccgtgctgaacagcaaggtgatctctgtgacagtgaagcccccacccaggagcctgcggacccccctggagattgaatttgcccacatgtacaacggcaccaccaaccagacctgcatcctgtgggatgaaacagatgtgcccagcagcagcgccccaccccagctgggcccctggagctggaggggctgcaggacagtgcccctggatgccctgcggacccgctgcctgtgtgaccggctgagcacctttgccatcctggcccagctgtctgcagatgccaacatggagaaggccaccctgcccagcgtgaccctcatcgtgggctgcggcgtgagcagcctgaccctgctgatgctggtgatcatctacgtgtctgtgtggagatacatccgctctgagaggagcgtcatcctgatcaacttctgcctgagcatcatcagcagcaatgccctgatcctgattggccagacccagaccaggaacaaggtggtgtgcaccctggtggccgccttcctgcacttcttcttcctgagcagcttctgctgggtgctgacagaggcctggcagagctacatggctgtgacaggccacctgaggaacagactcatcaggaagcgcttcctgtgcctgggctggggcctgcctgccctggtggtggccatctctgtgggcttcaccaaggccaagggctacagcaccatgaactactgctggctgagcctggagggcggcctgctgtatgcctttgtgggccctgctgctgctgtggtgctggtgaacatggtgattggcatcctggtgttcaacaagctggtgtccaaggatggcatcacagacaagaagctgaaggagcgggccggggccagcctgtggagcagctgtgtggtgctgcccctgctggccctgacctggatgtctgctgtgctggccgtgacagaccggcgcagcgccctcttccagatcctgtttgctgtgtttgacagcctggagggcttcgtcatcgtgatggtgcactgcatcctgcggcgggaggtgcaggatgctgtgaagtgccgggtggtggaccggcaggaggagggcaatggagacagcggcggcagcttccagaatggccacgcccagctgatgacagactttgagaaggatgtggacctggcctgccgctctgtgctgaacaaggacattgctgcctgcaggacagccaccatcaccggcaccctgaagaggcccagcctgcctgaggaggagaagctgaagctggcccacgccaagggcccccccaccaacttcaacagcctgcctgccaacgtgtccaagctgcacctgcacggcagcccccgctacccaggcggccccctgcctgacttccccaaccacagcctgaccctgaagagggacaaggcccccaagagcagctttgtgggagatggagacatcttcaagaagctggacagcgagctgagccgggcccaggagaaggccctggacaccagctatgtgatcctgcccacagccacagccaccctgcggcccaagcccaaggaggagcccaagtacagcatccacatcgaccagatgccccagaccaggctcatccacctgagcacagcccctgaggccagcctgcctgcccggagcccccccagccggcagccccccagcggcggccccccagaggcccccccagcccagcccccacctcctcctcctcctcctcctcctccaccccagcagcccctgcccccaccacccaacctggagcccgccccacccagcctgggggaccccggggagcctgctgcccaccctggccccagcacaggccccagcaccaagaatgaaaatgtggccaccctgtctgtgagcagcctggagaggaggaagagccgctatgcagagctggactttgagaagatcatgcacaccaggaagaggcaccaggacatgttccaggacctgaacaggaagctgcagcacgccgctgagaaggacaaggaggtgctgggccctgacagcaagccagagaagcagcagacccccaacaagaggccctgggagagcctgaggaaggcccacggcacccccacctgggtgaagaaggagctggagcccctgcagcccagccccctggagctgcggtctgtggagtgggagaggtctggggccaccatccccctggtgggccaggacatcatcgacctgcagacagaggtgtag

SEQ ID NO: 18575 - DNA, 4755 bp, synthetic construct; identical to SEQ ID NO: 18574
  misc_feature 1..4755: note = Description of Artificial Sequence: Synthetic coding sequence
  source 1..4755: mol_type = other DNA

SEQ ID NO: 18576 - DNA, 2334 bp, synthetic construct
  misc_feature 1..2334: note = Description of Artificial Sequence: Synthetic coding sequence
  source 1..2334: mol_type = other DNA
atgccagacaaccggcagcccaggaaccggcagccccgcatccgctctggaaatgagcccaggtctgccccagccatggagccagatggccgcggggcctgggcccacagcagagctgccctggaccggctggagaagctgctgcgctgcagccgctgcaccaacatcctgcgggagcctgtgtgcctgggcggctgtgagcacatcttctgcagcaactgtgtgtctgactgcattggaacaggctgccctgtgtgctacaccccagcctggatccaggacctgaagatcaaccggcagctggacagcatgatccagctgtgcagcaagctgaggaacctgctgcatgacaatgagctgagtgacctgaaggaggacaagcccaggaagagcctcttcaatgatgctggcaacaagaagaacagcatcaagatgtggttcagccccaggagcaagaaggtgcgctacgtggtgtccaaggcctctgtgcagacccagcctgccatcaagaaggatgccagcgcccagcaggacagctatgaatttgtgagccccagccccccagcagatgtgtctgagcgggccaagaaggccagcgcccggagcggcaagaagcagaagaagaagaccctggccgagatcaaccagaagtggaacctggaggccgagaaggaggatggagaatttgacagcaaggaggagagcaagcagaagctggtgtccttctgcagccagcccagcgtcatcagcagcccccagatcaatggagaaattgacctgctggccagcggcagcctgacagaaagtgagtgcttcggcagcctgacagaggtgtccctgcccctggccgagcagatcgagagcccagacaccaagagcagaaatgaggtggtgaccccagagaaggtgtgcaagaactacctgaccagcaagaagagcctgcccctggagaacaacgggaagaggggccaccacaaccggctgagcagccccatcagcaagcgctgcaggaccagcatcctgagcaccagcggggactttgtgaagcagacagtgcccagcgagaacatccccctgcctgaatgtagcagcccccccagctgcaagaggaaggtgggcggcaccagcggcaggaagaacagcaacatgtctgatgagttcatcagcctgagccctggcaccccacccagcaccctgagcagcagcagctacagaagagtgatgagcagccccagcgccatgaagctgctgcccaacatggctgtgaagaggaaccacagaggagagaccctgctgcacatcgccagcatcaagggggacatccccagcgtggagtacctgctgcagaatggaagtgaccccaacgtgaaggaccacgccggctggacccccctgcacgaggcctgcaaccacggccacctgaaggtggtggagctgctgctgcagcacaaggccctggtgaacaccaccggctaccagaatgacagccccctgcatgatgctgccaagaatggccacgtggacatcgtgaagctgctgctgtcctatggagccagcagaaatgctgtgaacatcttcggcctgcggcctgtggactacacagatgatgagagcatgaagagcctgctgctgctgcctgagaagaatgaaagcagcagcgccagccactgcagcgtgatgaacacaggccagaggagagatggccccctggtgctgattggcagcggcctgagcagcgagcagcagaagatgctgtctgagctggccgtcatcctgaaggccaagaagtacacagaatttgacagcacagtgacccacgtggtggtgcctggagatgctgtgcagagcaccctgaagtgcatgctgggcatcctgaatggctgctggatcctgaagtttgagtgggtgaaggcctgcctgcggaggaaggtgtgtgagcaggaggagaagtatgagatccctgagggcccccggcgcagccggctgaaccgggagcagctgctgcccaagctgtttgatggctgctacttctacctgtggggcaccttcaagcaccaccccaaggacaacctgatcaagctggtgacagctgggggcggccagatcctgagcaggaagcccaagccagacagtgatgtgacccagaccatcaacacagtggcctaccacgcccggccagacagcgaccagcgcttctgcacccagtacatcatctatgaggacctgtgcaactaccaccctgagcgggtgcggcagggcaaggtgtggaaggcccccagctcctggttcatcgactgtgtgatgagctttgagctgctgcccctggacagctag

SEQ ID NO: 18577 - DNA, 1704 bp, synthetic construct
  misc_feature 1..1704: note = Description of Artificial Sequence: Synthetic coding sequence
  source 1..1704: mol_type = other DNA
atgtggttcagccccaggagcaagaaggtgcgctacgtggtgtccaaggcctctgtgcagacccagcctgccatcaagaaggatgccagcgcccagcaggacagctatgaatttgtgagccccagccccccagcagatgtgtctgagcgggccaagaaggccagcgcccggagcggcaagaagcagaagaagaagaccctggccgagatcaaccagaagtggaacctggaggccgagaaggaggatggagaatttgacagcaaggaggagagcaagcagaagctggtgtccttctgcagccagcccagcgtcatcagcagcccccagatcaatggagaaattgacctgctggccagcggcagcctgacagaaagtgagtgcttcggcagcctgacagaggtgtccctgcccctggccgagcagatcgagagcccagacaccaagagcagaaatgaggtggtgaccccagagaaggtgtgcaagaactacctgaccagcaagaagagcctgcccctggagaacaacgggaagaggggccaccacaaccggctgagcagccccatcagcaagcgctgcaggaccagcatcctgagcaccagcggggactttgtgaagcagacagtgcccagcgagaacatccccctgcctgaatgtagcagcccccccagctgcaagaggaaggtgggcggcaccagcggcaggaagaacagcaacatgtctgatgagttcatcagcctgagccctggcaccccacccagcaccctgagcagcagcagctacagaagagtgatgagcagccccagcgccatgaagctgctgcccaacatggctgtgaagaggaaccacagaggagagaccctgctgcacatcgccagcatcaagggggacatccccagcgtggagtacctgctgcagaatggaagtgaccccaacgtgaaggaccacgccggctggacccccctgcacgaggcctgcaaccacggccacctgaaggtggtggagctgctgctgcagcacaaggccctggtgaacaccaccggctaccagaatgacagccccctgcatgatgctgccaagaatggccacgtggacatcgtgaagctgctgctgtcctatggagccagcagaaatgctgtgaacatcttcggcctgcggcctgtggactacacagatgatgagagcatgaagagcctgctgctgctgcctgagaagaatgaaagcagcagcgccagccactgcagcgtgatgaacacaggccagaggagagatggccccctggtgctgattggcagcggcctgagcagcgagcagcagaagatgctgtctgagctggccgtcatcctgaaggccaagaagtacacagaatttgacagcacagtgacccacgtggtggtgcctggagatgctgtgcagagcaccctgaagtgcatgctgggcatcctgaatggctgctggatcctgaagtttgagtgggtgaaggcctgcctgcggaggaaggtgtgtgagcaggaggagaagtatgagatccctgagggcccccggcgcagccggctgaaccgggagcactgccagagctgcctgatggatgccaccagcatctgtggggagcccagcaacaccatccagaggaccaccctgctgagcagcagcctgcaggtgggcgcccggagctctgtggagagccccagccagacagtgacctag

SEQ ID NO: 18578 - DNA, 3750 bp, synthetic construct
  misc_feature 1..3750: note = Description of Artificial Sequence: Synthetic coding sequence
  source 1..3750: mol_type = other DNA
atgagctccatgtggagcgagtacaccatcggcggcgtgaagatctacttcccctacaaggcctaccccagccagctggccatgatgaacagcatcctgcggggcctgaacagcaagcagcactgcctgctggagagccccaccggcagcggcaagagcctggccctgctgtgcagcgccctggcctggcagcagagcctgagcggcaagccagcagatgaaggagtgtctgagaaggccgaggtgcagctgagctgctgctgtgcctgccacagcaaggacttcaccaacaatgacatgaaccagggcaccagccgccacttcaactaccccagcaccccacccagcgagagaaatggcaccagcagcacctgccaggacagccctgagaagaccaccctggccgccaagctgagcgccaagaagcaggccagcatctacagagatgaaaatgatgacttccaggtggagaagaagaggatccggcccctggagaccacccagcagatcaggaagaggcactgcttcggcacagaggtgcacaacctggatgccaaggtggacagcggcaagacagtgaagctgaacagccccctggagaagatcaacagcttcagcccccagaagcccccaggccactgcagccgctgctgctgcagcaccaagcagggcaacagccaggagagcagcaacaccatcaagaaggaccacacaggcaagagcaagatccccaagatctacttcggcaccaggacccacaagcagatcgcccagatcacccgggagctgcggaggacagcctacagcggcgtgcccatgaccatcctgagcagccgggaccacacctgtgtgcaccctgaggtggtgggcaacttcaacagaaatgagaagtgcatggagctgctggatggcaagaatggcaagagctgctacttctaccacggcgtgcacaagatcagtgaccagcacaccctgcagaccttccagggcatgtgcaaggcctgggacatcgaggagctggtgtccctgggcaagaagctgaaggcctgcccctactacacagcccgggagctgatccaggatgctgacatcatcttctgcccctacaactacctgctggatgcccagatccgggagagcatggacctgaacctgaaggagcaggtggtgatcctggatgaggcccacaacatcgaggactgtgcccgggagagcgccagctacagcgtgacagaggtgcagctgcgctttgccagagatgagctggacagcatggtgaacaacaacatcaggaagaaggaccacgagcccctgcgggctgtgtgctgcagcctcatcaactggctggaggccaatgctgagtacctggtggagcgggactatgaaagtgcctgcaagatctggagcggaaatgagatgctgctgaccctgcacaagatgggcatcaccacagccaccttccccatcctgcagggccacttctctgctgtgctgcagaaggaggagaagatcagccccatctacggcaaggaggaggcccgggaggtgcctgtgatcagcgccagcacccagatcatgctgaagggcctcttcatggtgctggactacctgttccggcagaacagcagatttgctgatgactacaagatcgccatccagcagacctacagctggaccaaccagattgacatcagtgacaagaatggcctgctggtgctgcccaagaacaagaagaggagccggcagaagacagctgtgcacgtgctgaacttctggtgcctgaacccagctgtggccttcagtgacatcaacgggaaggtgcagaccatcgtgctgaccagcggcaccctgagccccatgaagagcttcagcagcgagctgggcgtgaccttcaccatccagctggaggccaaccacatcatcaagaacagccaggtgtgggtgggcaccatcggcagcggccccaagggcaggaacctgtgtgccaccttccagaacacagagacctttgagttccaggatgaggtgggcgccctgctgctgtctgtgtgccagacagtgtcccagggcatcctgtgcttcctgcccagctacaagctgctggagaagctgaaggagcgctggctgagcacaggcctgtggcacaacctggagctggtgaagacagtcatcgtggagccccagggcggggagaagaccaactttgatgagctgctgcaggtgtactatgatgccatcaagtacaagggggagaaggatggagccctgctggtggccgtgtgccggggcaaggtgtctgagggcctggacttcagtgatgacaatgcccgggccgtcatcaccatcggcatccccttccccaacgtgaaggacctgcaggtggagctgaagaggcagtacaatgaccaccacagcaagctgcggggcctgctgcccggccggcagtggtatgagatccaggcctaccgggccctgaaccaggccctgggccgctgcatccgccacagaaatgactggggcgccctgatcctggtggatgaccgcttcaggaacaaccccagccgctacatcagcggcctgagcaagtgggtgcggcagcagatccagcaccacagcacctttgagagcgccctggagagcctggccgagttcagcaagaagcaccagaaggtgctgaatgtgtccatcaaggacaggaccaacatccaggacaatgaaagcaccctggaggtgaccagcctgaagtacagcaccagcccctacctgctggaggccgccagccacctgagccctgagaactttgtggaggatgaggccaagatctgtgtgcaggagctgcagtgccccaagatcatcaccaagaacagccccctgcccagcagcatcatcagcaggaaggagaagaatgaccctgtgttcctggaggaggccggcaaggccgagaagatcgtcatcagccgcagcaccagccccaccttcaacaagcagaccaagagggtgtcctggagcagcttcaacagcctgggccagtacttcaccgggaagatccccaaggccaccccagagctgggcagcagtgaaaattctgccagcagccccccacgcttcaagacagagaagatggagagcaagacagtgctgcccttcacagacaagtgtgagagcagcaacctgactgtgaacaccagctttggcagctgcccccagagcgagaccatcatcagcagcctgaagattgatgccaccctgaccaggaagaaccacagcgagcaccccctgtgcagcgaggaggccctggaccctgacatcgagctgagcctggtgtctgaggaggacaagcagagcaccagcaacagagactttgaaacagaagcagaagatgagagcatctacttcaccccagagctgtatgaccctgaggacacagatgaggagaagaatgacctggccgagacagaccggggcaaccggctggccaacaacagcgactgcatcctggccaaggacctgtttgagatccgcaccatcaaggaggtggacagcgcccgggaggtgaaggccgaggactgcatcgacaccaagctgaatggcatcctgcacatcgaggagagcaagattgatgacattgatggaaatgtgaagaccacctggatcaatgagctggagctgggcaagacccatgaaattgagatcaagaacttcaagcccagccccagcaagaacaagggcatgtttcctggcttcaagtag

SEQ ID NO: 18579 - DNA, 945 bp, synthetic construct
  misc_feature 1..945: note = Description of Artificial Sequence: Synthetic coding sequence
  source 1..945: mol_type = other DNA
atggccagccgcagcaagagaagagctgtggagagcggcgtgccccagcccccagacccccctgtgcagagagatgaggaggaggagaaggaggtggagaatgaagatgaagatgatgatgacagcgacaaggagaaggatgaagaagatgaggtgattgatgaggaggtgaacattgaatttgaggcctacagcctgagtgacaatgactatgatggcatcaagaagctgctgcagcagctgttcctgaaggcccctgtgaacacagctgagctgacagacctgctgatccagcagaaccacatcggcagcgtcatcaagcagacagatgtgtctgaggacagcaatgatgacatggatgaagatgaggtgtttggcttcatcagcctgctgaacctgacagagaggaagggcacccagtgtgtggagcagatccaggagctggtgctgcgcttctgtgagaagaactgtgagaagtccatggtggagcagctggacaagttcctgaatgacaccaccaagcctgtgggcctgctgctgtctgagcgcttcatcaacgtgcccccccagatcgccctgcccatgtaccagcagctgcagaaggagctggccggggcccacaggaccaacaagccctgtgggaagtgctacttctacctgctgatcagcaagacctttgtggaggccggcaagaacaacagcaagaagaagcccagcaacaagaagaaggccgccctgatgtttgccaatgctgaggaggagttcttctatgagaaggccatcctgaagttcaactacagcgtgcaggaggagagtgacacctgcctgggcggcaagtggagctttgatgatgtgcccatgacccccctgaggacagtgatgctgatccctggggacaagatgaatgagatcatggacaagctgaaggagtacctgtctgtgtag

SEQ ID NO: 18580 - DNA, 879 bp, synthetic construct
  misc_feature 1..879: note = Description of Artificial Sequence: Synthetic coding sequence
  source 1..879: mol_type = other DNA
atggccagccgcagcaagagaagagctgtggagagcggcgtgccccagcccccagacccccctgtgcagagagatgaggaggaggagaaggaggtggagaatgaagatgaagatgatgatgacagcgacaaggagaaggatgaagaagatgaggtgattgatgaggaggtgaacattgaatttgaggcctacagcctgagtgacaatgactatgatggcatcaagaagctgctgcagcagctgttcctgaaggcccctgtgaacacagctgagctgacagacctgctgatccagcagaaccacatcggcagcgtcatcaagcagacagatgtgtctgaggacagcaatgatgacatggatgaagatgaggtgtttggcttcatcagcctgctgaacctgacagagaggaagggcacccagtgtgtggagcagatccaggagctggtgctgcgcttctgtgagaagaactgtgagaagtccatggtggagcagctggacaagttcctgaatgacaccaccaagcctgtgggcctgctgctgtctgagcgcttcatcaacgtgcccccccagatcgccctgcccatgtaccagcagctgcagaaggagctggccggggcccacaggaccaacaagccctgtgggaagtgctacttctacctgctgatcagcaagacctttgtggaggccggcaagaacaacagcaagaagaagcccagcaacaagaagaaggccgccctgatgtttgccaatgctgaggaggagttcttctatgaggagcagggcaagccagaggtgctgggcggccctgacacccggcggggcctggagcctgtgcccatccagcacaacggctggagcgtgccccctgtgctggagtag

SEQ ID NO: 18581 - DNA, 969 bp, synthetic construct
  misc_feature 1..969: note = Description of Artificial Sequence: Synthetic coding sequence
  source 1..969: mol_type = other DNA
atggccagccgcagcaagagaagagctgtggagagcggcgtgccccagcccccagacccccctgtgcagagagatgaggaggaggagaaggaggtggagaatgaagatgaagatgatgatgacagcgacaaggagaaggatgaagaagatgaggtgattgatgaggaggtgaacattgaatttgaggcctacagcctgagtgacaatgactatgatggcatcaagaagctgctgcagcagctgttcctgaaggcccctgtgaacacagctgagctgacagacctgctgatccagcagaaccacatcggcagcgtcatcaagcagacagatgtgtctgaggacagcaatgatgacatggatgaagatgaggtgtttggcttcatcagcctgctgaacctgacagagaggaagggcacccagtgtgtggagcagatccaggagctggtgctgcgcttctgtgagaagaactgtgagaagtccatggtggagcagctggacaagttcctgaatgacaccaccaagcctgtgggcctgctgctgtctgagcgcttcatcaacgtgcccccccagatcgccctgcccatgtaccagcagctgcagaaggagctggccggggcccacaggaccaacaagccctgtgggaagtgctacttctacctgctgatcagcaagacctttgtggaggccggcaagaacaacagcaagaagaagcccagcaacaagaagaaggccgccctgatgtttgccaatgctgaggaggagttcttctatgaggagcagggcaagccagaggtgctgggcggccctgacacccggcggggcctggagcctgtgcccatccagcacaatggaggcagccggggccaggtgacagccctggtgtccctgaaggccggcctcatccagagccgcagcaccctgagtgacttccagggcaccttcatgacagtgggcatcgccctgtcctag

SEQ ID NO: 18582 - DNA, 879 bp, synthetic construct
  misc_feature 1..879: note = Description of Artificial Sequence: Synthetic coding sequence
  source 1..879: mol_type = other DNA
atggccagccgcagcaagagaagagctgtggagagcggcgtgccccagcccccagacccccctgtgcagagagatgaggaggaggagaaggaggtggagaatgaagatgaagatgatgatgacagcgacaaggagaaggatgaagaagatgaggtgattgatgaggaggtgaacattgaatttgaggcctacagcctgagtgacaatgactatgatggcatcaagaagctgctgcagcagctgttcctgaaggcccctgtgaacacagctgagctgacagacctgctgatccagcagaaccacatcggcagcgtcatcaagcagacagatgtgtctgaggacagcaatgatgacatggatgaagatgaggtgtttggcttcatcagcctgctgaacctgacagagaggaagggcacccagtgtgtggagcagatccaggagctggtgctgcgcttctgtgagaagaactgtgagaagtccatggtggagcagctggacaagttcctgaatgacaccaccaagcctgtgggcctgctgctgtctgagcgcttcatcaacgtgcccccccagatcgccctgcccatgtaccagcagctgcagaaggagctggccggggcccacaggaccaacaagccctgtgggaagtgctacttctacctgctgatcagcaagacctttgtggaggccggcaagaacaacagcaagaagaagcccagcaacaagaagaaggccgccctgatgtttgccaatgctgaggaggagttcttctatgagaaggccatcctgaagttcaactacagcgtgcaggaggagagtgacacctgcctgggcggcaagtggagctttgatgactggagcgtgccccctgtgctggagtag

SEQ ID NO: 18583 - DNA, 789 bp, synthetic construct
  misc_feature 1..789: note = Description of Artificial Sequence: Synthetic coding sequence
  source 1..789: mol_type = other DNA
atggccagccgcagcaagagaagagctgtggagagcggcgtgccccagcccccagacccccctgtgcagagagatgaggaggaggagaaggaggtggagaatgaagatgaagatgatgatgacagcgacaaggagaaggatgaagaagatgaggtgattgatgaggaggtgaacattgaatttgaggcctacagcctgagtgacaatgactatgatggcatcaagaagctgctgcagcagctgttcctgaaggcccctgtgaacacagctgagctgacagacctgctgatccagcagaaccacatcggcagcgtcatcaagggcacccagtgtgtggagcagatccaggagctggtgctgcgcttctgtgagaagaactgtgagaagtccatggtggagcagctggacaagttcctgaatgacaccaccaagcctgtgggcctgctgctgtctgagcgcttcatcaacgtgcccccccagatcgccctgcccatgtaccagcagctgcagaaggagctggccggggcccacaggaccaacaagccctgtgggaagtgctacttctacctgctgatcagcaagacctttgtggaggccggcaagaacaacagcaagaagaagcccagcaacaagaagaaggccgccctgatgtttgccaatgctgaggaggagttcttctatgaggagcagggcaagccagaggtgctgggcggccctgacacccggcggggcctggagcctgtgcccatccagcacaacggctggagcgtgccccctgtgctggagtag

SEQ ID NO: 18584 - DNA, 1398 bp, synthetic construct
  misc_feature 1..1398: note = Description of Artificial Sequence: Synthetic coding sequence
  source 1..1398: mol_type = other DNA
atggtggaccctgtgggctttgctgaggcctggaaggcccagttcccagacagcgagccccccaggatggagctgcggtctgtgggggacatcgagcaggagctggagcgctgcaaggccagcatccggcggctggagcaggaggtgaaccaggagcgcttcaggatgatctacctgcagaccctgctggccaaggagaagaagagctatgaccggcagcgctggggcttccggcgggccgcccaggccccagatggagccagcgagccccgggccagcgccagccggccccagcctgccccagcagatggagctgaccccccacctgctgaggagcctgaggcccggccagatggagagggcagccctgggaaggcccggcccggcacagcccggcggcctggagctgctgccagcggggagagagatgaccggggccccccagcctctgtggccgccctgcggagcaactttgagcgcatcagaaaaggacatggccagcccggggctgatgctgagaagcccttctacgtgaatgtggagttccaccacgagcggggcctggtgaaggtgaatgacaaggaggtgtctgaccgcatcagcagcctgggcagccaggccatgcagatggagaggaagaagagccagcacggggccggcagctctgtgggagatgccagcaggcctccctaccggggccgcagcagcgagagcagctgtggggtggatggagactatgaagatgctgagctgaacccccgcttcctgaaggacaacctgattgatgccaacggcggcagcaggcctccctggccacccctggagtaccagccctaccagagcatctacgtgggcggcatgatggagggggagggcaagggccccctgctgcggagccagagcaccagcgagcaggagaagaggctgacctggcccaggaggagctacagccccaggagctttgaggactgtggcggcggctacaccccagactgcagcagcaatgaaaacctgaccagcagcgaggaggacttcagcagcggccagagcagccgggtgagccccagccccaccacctacaggatgttccgggacaagagccgcagccccagccagaacagccagcagagctttgacagcagcagcccccccaccccccagtgccacaagaggcaccgccactgccctgtggtggtgtctgaggccaccatcgtgggcgtgaggaagacaggccagatctggcccaatgatggagagggcgccttccatggagagcaccctggagctgctgaggaggtgttccagaagctgctgcctgacatcagaggagctgctgatgctgaccagctggtgtgtgagaccccagactgcccccagcacagcgctgaccaccagtag

SEQ ID NO: 18585 - DNA, 1377 bp, synthetic construct
  misc_feature 1..1377: note = Description of Artificial Sequence: Synthetic coding sequence
  source 1..1377: mol_type = other DNA
atggtggaccctgtgggctttgctgaggcctggaaggcccagttcccagacagcgagccccccaggatggagctgcggtctgtgggggacatcgagcaggagctggagcgctgcaaggccagcatccggcggctggagcaggaggtgaaccaggagcgcttcaggatgatctacctgcagaccctgctggccaaggagaagaagagctatgaccggcagcgctggggcttccggcgggccgcccaggccccagatggagccagcgagccccgggccagcgccagccggccccagcctgccccagcagatggagctgaccccccacctgctgaggagcctgaggcccggccagatggagagggcagccctgggaaggcccggcccggcacagcccggcggcctggagctgctgccagcggggagagagatgaccggggccccccagcctctgtggccgccctgcggagcaactttgagcgcatcagaaaaggacatggccagcccggggctgatgctgagaagcccttctacgtgaatgtggagttccaccacgagcggggcctggtgaaggtgaatgacaaggaggtgtctgaccgcatcagcagcctgggcagccaggccatgcagatggagaggaagaagagccagcacggggccggcagctctgtgggagatgccagcaggcctccctaccggggccgcagcagcgagagcagctgtggggtggatggagactatgaagatgctgagctgaacccccgcttcctgaaggacaacctgattgatgccaacggcggcagcaggcctccctggccacccctggagtaccagccctaccagagcatctacgtgggcggcatgatggagggggagggcaagggccccctgctgcggagccagagcaccagcgagcaggagaagaggctgacctggcccaggaggagctacagccccaggagctttgaggactgtggcggcggctacaccccagactgcagcagcaatgaaaacctgaccagcagcgaggaggacttcagcagcggccagagcagccgggtgagccccagccccaccacctacaggatgttccgggacaagagccgcagccccagccagaacagccagcagagctttgacagcagcagcccccccaccccccagtgccacaagaggcaccgccactgccctgtggtggtgtctgaggccaccatcgtgggcgtgaggaagacaggccagatctggcccaatgatggagagggcgccttccatggagatgctgatggcagctttggcaccccacctggctacggctgcctgtgcctgcctgcctggcccagcggctgcacagctgccacagcccgggtgaccaggagctag

SEQ ID NO: 18586 - DNA, 3816 bp, synthetic construct
  misc_feature 1..3816: note = Description of Artificial Sequence: Synthetic coding sequence
  source 1..3816: mol_type = other DNA
atggtggaccctgtgggctttgctgaggcctggaaggcccagttcccagacagcgagccccccaggatggagctgcggtctgtgggggacatcgagcaggagctggagcgctgcaaggccagcatccggcggctggagcaggaggtgaaccaggagcgcttcaggatgatctacctgcagaccctgctggccaaggagaagaagagctatgaccggcagcgctggggcttccggcgggccgcccaggccccagatggagccagcgagccccgggccagcgccagccggccccagcctgccccagcagatggagctgaccccccacctgctgaggagcctgaggcccggccagatggagagggcagccctgggaaggcccggcccggcacagcccggcggcctggagctgctgccagcggggagagagatgaccggggccccccagcctctgtggccgccctgcggagcaactttgagcgcatcagaaaaggacatggccagcccggggctgatgctgagaagcccttctacgtgaatgtggagttccaccacgagcggggcctggtgaaggtgaatgacaaggaggtgtctgaccgcatcagcagcctgggcagccaggccatgcagatggagaggaagaagagccagcacggggccggcagctctgtgggagatgccagcaggcctccctaccggggccgcagcagcgagagcagctgtggggtggatggagactatgaagatgctgagctgaacccccgcttcctgaaggacaacctgattgatgccaacggcggcagcaggcctccctggccacccctggagtaccagccctaccagagcatctacgtgggcggcatgatggagggggagggcaagggccccctgctgcggagccagagcaccagcgagcaggagaagaggctgacctggcccaggaggagctacagccccaggagctttgaggactgtggcggcggctacaccccagactgcagcagcaatgaaaacctgaccagcagcgaggaggacttcagcagcggccagagcagccgggtgagccccagccccaccacctacaggatgttccgggacaagagccgcagccccagccagaacagccagcagagctttgacagcagcagcccccccaccccccagtgccacaagaggcaccgccactgccctgtggtggtgtctgaggccaccatcgtgggcgtgaggaagacaggccagatctggcccaatgatggagagggcgccttccatggagatgctgatggcagctttggcaccccacctggctacggctgtgccgctgacagagctgaggagcagaggaggcaccaggacggcctgccctacattgatgacagccccagcagcagcccccacctgagcagcaagggccggggcagcagagatgccctggtgtctggggccctggagagcaccaaggccagcgagctggacctggagaagggcctggagatgaggaagtgggtgctgagcggcatcctggccagcgaggagacctacctgagccacctggaggccctgctgctgcccatgaagcccctgaaggccgccgccaccaccagccagcctgtgctgaccagccagcagatcgagaccatcttcttcaaggtgcctgagctgtatgagatccacaaggagttctatgatggcctcttcccccgggtgcagcagtggagccaccagcagagggtgggggacctcttccagaagctggccagccagctgggcgtgtaccgggcctttgtggacaactacggcgtggccatggagatggccgagaagtgctgccaggccaatgcccagtttgctgagatcagcgagaacctgcgggcccggagcaacaaggatgccaaggaccccaccaccaagaacagcctggagaccctgctgtacaagcctgtggacagagtgaccaggagcaccctggtgctgcatgacctgctgaagcacaccccagccagccacccagaccaccccctgctgcaggatgccctgcgcatcagccagaacttcctgagcagcatcaatgaggagatcaccccccggcggcagagcatgacagtgaagaagggggagcaccggcagctgctgaaggacagcttcatggtggagctggtggagggcgccaggaagctgcggcacgtgttcctgttcacagacctgctgctgtgcaccaagctgaagaagcagagcggcggcaagacccagcagtatgactgcaagtggtacatccccctgacagacctgtccttccagatggtggatgagctggaggccgtgcccaacatccccctggtgcctgatgaggagctggatgccctgaagatcaagatcagccagatcaagaatgacatccagcgggagaagagggccaacaagggcagcaaggccacagagcggctgaagaagaagctgtctgagcaggagagcctgctgctgctgatgagccccagcatggccttccgggtgcacagcagaaatggcaagagctacaccttcctgatcagcagtgactatgaaagagctgagtggagggagaacatccgggagcagcagaagaagtgcttccgctccttcagcctgacctctgtggagctgcagatgctgaccaacagctgtgtgaagctgcagacagtgcacagcatccccctgaccatcaacaaggaggatgatgagagccctggcctgtatggcttcctgaatgtcatcgtgcacagcgccaccggcttcaagcagagcagcaacctgtactgcaccctggaggtggacagctttggctactttgtgaacaaggccaagaccagggtgtacagagacacagctgagcccaactggaatgaggagtttgaaattgagctggagggcagccagaccctgcgcatcctgtgctatgagaagtgctacaacaagaccaagatccccaaggaggatggagagagcacagaccggctgatgggcaagggccaggtgcagctggacccccaggccctgcaggaccgggactggcagaggacagtcatcgccatgaatggaattgaggtgaagctgtctgtgaagttcaacagccgggagttcagcctgaagaggatgcccagcaggaagcagacaggagtgtttggagtgaagattgctgtggtgaccaagcgggagaggagcaaggtgccctacatcgtgcggcagtgtgtggaggagattgaaagaagaggcatggaggaggtgggcatctacagagtgtctggagtggccacagacatccaggccctgaaggccgcctttgatgtgaacaacaaggatgtgtctgtgatgatgtctgagatggatgtgaatgccatcgccggcaccctgaagctgtacttccgggagctgcctgagcccctcttcacagatgagttctaccccaactttgctgagggcatcgccctgagtgaccctgtggccaaggagagctgcatgctgaacctgctgctgagcctgcctgaggccaacctgctgaccttcctgttcctgctggaccacctgaagagggtggccgagaaggaggccgtgaacaagatgagcctgcacaacctggccaccgtgtttggccccaccctgctgcggcccagcgagaaggagagcaagctgcctgccaaccccagccagcccatcaccatgacagacagctggagcctggaggtgatgagccaggtgcaggtgctgctgtacttcctgcagctggaggccatcccagccccagacagcaagaggcagagcatcctcttcagcacagaggtgtag

SEQ ID NO: 18587 - DNA, 2811 bp, synthetic construct
  misc_feature 1..2811: note = Description of Artificial Sequence: Synthetic coding sequence
  source 1..2811: mol_type = other DNA
cccagcgccccccgggtgtccacagtgggcctgctgtgcagcggggccggcccccacctgtgcccctgtgccgaggagggcaccggcggcctggagagccagggcgagatcatccccagccggggcagcaggaagccagatggagtgtctggcagcagaagactcttcagcagcctgtgcaagagccaggagggcagcaggaaagaatgtctgaggaagcaccggcggctgggccctgccatgcctgtgagcagccctggcttccctggccccctggcccggtctgagcaccacctggacacagctgccctgcagacaggccagaggagcagcgctggcaccaagatgggctgccccaccctgatgaccaggcctccccaccggcccaccagcgctgcccgggccggggccgccggcatgcgctggagccgggagccctggagccccctgaagaggtctgagctggacctggagaagggcctggagatgaggaagtgggtgctgagcggcatcctggccagcgaggagacctacctgagccacctggaggccctgctgctgcccatgaagcccctgaaggctgctgccaccaccagccagcctgtgctgaccagccagcagatcgagaccatcttcttcaaggtgcctgagctgtatgagatccacaaggagttctatgatggcctcttcccccgggtgcagcagtggagccaccagcagagggtgggggacctcttccagaagctggccagccagctgggcgtgtaccgggcctttgtggacaactatggagtggccatggagatggccgagaagtgctgccaggccaatgcccagtttgctgagatcagcgagaacctgcgggcccggagcaacaaggatgccaaggaccccaccaccaagaacagcctggagaccctgctgtacaagcctgtggacagagtgaccaggagcaccctggtgctgcatgacctgctgaagcacaccccagccagccacccagaccaccccctgctgcaggatgccctgcgcatcagccagaacttcctgagcagcatcaatgaggagatcaccccccggcggcagagcatgacagtgaagaagggggagcaccggcagctgctgaaggacagcttcatggtggagctggtggagggcgccaggaagctgcggcacgtgttcctgttcacagacctgctgctgtgcaccaagctgaagaagcagagcggcggcaagacccagcagtatgactgcaagtggtacatccccctgacagacctgtccttccagatggtggatgagctggaggccgtgcccaacatccccctggtgcctgatgaggagctggatgccctgaagatcaagatcagccagatcaagaatgacatccagcgggagaagagggccaacaagggcagcaaggccacagagcggctgaagaagaagctgtctgagcaggagagcctgctgctgctgatgagccccagcatggccttccgggtgcacagcagaaatggcaagagctacaccttcctgatcagcagtgactatgagcgggcagagtggagggagaacatccgggagcagcagaagaagtgcttccgctccttcagcctgacctctgtggagctgcagatgctgaccaacagctgtgtgaagctgcagacagtgcacagcatccccctgaccatcaacaaggaggatgatgagagccctggcctgtatggcttcctgaatgtgattgtgcacagcgccaccggcttcaagcagagcagcaacctgtactgcaccctggaggtggacagctttggctactttgtgaacaaggccaagaccagggtgtacagagacacagctgagcccaactggaatgaggagtttgaaattgagctggagggcagccagaccctgcgcatcctgtgctatgagaagtgctacaacaagaccaagatccccaaggaggatggagagagcacagaccggctgatgggcaagggccaggtgcagctggacccccaggccctgcaggaccgggactggcagaggacagtgattgccatgaatggcatcgaggtgaagctgtctgtgaagttcaacagccgggagttcagcctgaagaggatgcccagcaggaagcagacaggagtgtttggagtgaagattgctgtggtgaccaagcgggagaggagcaaggtgccctacatcgtgcggcagtgtgtggaggagattgaaagaagaggcatggaggaggtgggcatctacagagtgtctggagtggccacagacatccaggccctgaaggccgcctttgatgtgaacaacaaggatgtgtctgtgatgatgtctgagatggatgtgaatgccatcgccggcaccctgaagctgtacttccgggagctgcctgagcccctcttcacagatgagttctaccccaactttgctgagggcatcgccctgagtgaccctgtggccaaggagagctgcatgctgaacctgctgctgagcctgcctgaggccaacctgctgaccttcctgttcctgctggaccacctgaagagggtggccgagaaggaggccgtgaacaagatgagcctgcacaacctggccaccgtgtttggccccaccctgctgcggcccagcgagaaggagagcaagctgcctgccaaccccagccagcccatcaccatgacagacagctggagcctggaggtgatgagccaggtgcaggtgctgctgtacttcctgcagctggaggccatcccagccccagacagcaagaggcagagcatcctcttcagcacagaggtgtag

SEQ ID NO: 18588 - DNA, 3684 bp, synthetic construct
  misc_feature 1..3684: note = Description of Artificial Sequence: Synthetic coding sequence
  source 1..3684: mol_type = other DNA
atggtggaccctgtgggctttgctgaggcctggaaggcccagttcccagacagcgagccccccaggatggagctgcggtctgtgggggacatcgagcaggagctggagcgctgcaaggccagcatccggcggctggagcaggaggtgaaccaggagcgcttcaggatgatctacctgcagaccctgctggccaaggagaagaagagctatgaccggcagcgctggggcttccggcgggccgcccaggccccagatggagccagcgagccccgggccagcgccagccggccccagcctgccccagcagatggagctgaccccccacctgctgaggagcctgaggcccggccagatggagagggcagccctgggaaggcccggcccggcacagcccggcggcctggagctgctgccagcggggagagagatgaccggggccccccagcctctgtggccgccctgcggagcaactttgagcgcatcagaaaaggacatggccagcccggggctgatgctgagaagcccttctacgtgaatgtggagttccaccacgagcggggcctggtgaaggtgaatgacaaggaggtgtctgaccgcatcagcagcctgggcagccaggccatgcagatggagaggaagaagagccagcacggggccggcagctctgtgggagatgccagcaggcctccctaccggggccgcagcagcgagagcagctgtggggtggatggagactatgaagatgctgagctgaacccccgcttcctgaaggacaacctgattgatgccaacggcggcagcaggcctccctggccacccctggagtaccagccctaccagagcatctacgtgggcggcatgatggagggggagggcaagggccccctgctgcggagccagagcaccagcgagcaggagaagaggctgacctggcccaggaggagctacagccccaggagctttgaggactgtggcggcggctacaccccagactgcagcagcaatgaaaacctgaccagcagcgaggaggacttcagcagcggccagagcagccgggtgagccccagccccaccacctacaggatgttccgggacaagagccgcagccccagccagaacagccagcagagctttgacagcagcagcccccccaccccccagtgccacaagaggcaccgccactgccctgtggtggtgtctgaggccaccatcgtgggcgtgaggaagacaggccagatctggcccaatgatggagagggcgccttccatggagatgctgatggcagctttggcaccccacctggctacggctgtgccgctgacagagctgaggagcagaggaggcaccaggacggcctgccctacattgatgacagccccagcagcagcccccacctgagcagcaagggccggggcagcagagatgccctggtgtctggggccctggagagcaccaaggccagcgagctggacctggagaagggcctggagatgaggaagtgggtgctgagcggcatcctggccagcgaggagacctacctgagccacctggaggccctgctgctgcccatgaagcccctgaaggccgccgccaccaccagccagcctgtgctgaccagccagcagatcgagaccatcttcttcaaggtgcctgagctgtatgagatccacaaggagttctatgatggcctcttcccccgggtgcagcagtggagccaccagcagagggtgggggacctcttccagaagctggccagccagctgggcgtgtaccgggcctttgtggacaactacggcgtggccatggagatggccgagaagtgctgccaggccaatgcccagtttgctgagatcagcgagaacctgcgggcccggagcaacaaggatgccaaggaccccaccaccaagaacagcctggagaccctgctgtacaagcctgtggacagagtgaccaggagcaccctggtgctgcatgacctgctgaagcacaccccagccagccacccagaccaccccctgctgcaggatgccctgcgcatcagccagaacttcctgagcagcatcaatgaggagatcaccccccggcggcagagcatgacagtgaagaagggggagcaccggcagctgctgaaggacagcttcatggtggagctggtggagggcgccaggaagctgcggcacgtgttcctgttcacagacctgctgctgtgcaccaagctgaagaagcagagcggcggcaagacccagcagtatgactgcaagtggtacatccccctgacagacctgtccttccagatggtggatgagctggaggccgtgcccaacatccccctggtgcctgatgaggagctggatgccctgaagatcaagatcagccagatcaagaatgacatccagcgggagaagagggccaacaagggcagcaaggccacagagcggctgaagaagaagctgtctgagcaggagagcctgctgctgctgatgagccccagcatggccttccgggtgcacagcagaaatggcaagagctacaccttcctgatcagcagtgactatgaaagagctgagtggagggagaacatccgggagcagcagaagaagtgcttccgctccttcagcctgacctctgtggagctgcagatgctgaccaacagctgtgtgaagctgcagacagtgcacagcatccccctgaccatcaacaaggaggatgatgagagccctggcctgtatggcttcctgaatgtcatcgtgcacagcgccaccggcttcaagcagagcagcaacctgtactgcaccctggaggtggacagctttggctactttgtgaacaaggccaagaccagggtgtacagagacacagctgagcccaactggaatgagctggacccccaggccctgcaggaccgggactggcagaggacagtcatcgccatgaatggaattgaggtgaagctgtctgtgaagttcaacagccgggagttcagcctgaagaggatgcccagcaggaagcagacaggagtgtttggagtgaagattgctgtggtgaccaagcgggagaggagcaaggtgccctacatcgtgcggcagtgtgtggaggagattgaaagaagaggcatggaggaggtgggcatctacagagtgtctggagtggccacagacatccaggccctgaaggccgcctttgatgtgaacaacaaggatgtgtctgtgatgatgtctgagatggatgtgaatgccatcgccggcaccctgaagctgtacttccgggagctgcctgagcccctcttcacagatgagttctaccccaactttgctgagggcatcgccctgagtgaccctgtggccaaggagagctgcatgctgaacctgctgctgagcctgcctgaggccaacctgctgaccttcctgttcctgctggaccacctgaagagggtggccgagaaggaggccgtgaacaagatgagcctgcacaacctggccaccgtgtttggccccaccctgctgcggcccagcgagaaggagagcaagctgcctgccaaccccagccagcccatcaccatgacagacagctggagcctggaggtgatgagccaggtgcaggtgctgctgtacttcctgcagctggaggccatcccagccccagacagcaagaggcagagcatcctcttcagcacagaggtgtag

SEQ ID NO: 18589 - DNA, 1404 bp, synthetic construct
  misc_feature 1..1404: note = Description of Artificial Sequence: Synthetic coding sequence
  source 1..1404: mol_type = other DNA
atggtggaccctgtgggctttgctgaggcctggaaggcccagttcccagacagcgagccccccaggatggagctgcggtctgtgggggacatcgagcaggagctggagcgctgcaaggccagcatccggcggctggagcaggaggtgaaccaggagcgcttcaggatgatctacctgcagaccctgctggccaaggagaagaagagctatgaccggcagcgctggggcttccggcgggccgcccaggccccagatggagccagcgagccccgggccagcgccagccggccccagcctgccccagcagatggagctgaccccccacctgctgaggagcctgaggcccggccagatggagagggcagccctgggaaggcccggcccggcacagcccggcggcctggagctgctgccagcggggagagagatgaccggggccccccagcctctgtggccgccctgcggagcaactttgagcgcatcagaaaaggacatggccagcccggggctgatgctgagaagcccttctacgtgaatgtggagttccaccacgagcggggcctggtgaaggtgaatgacaaggaggtgtctgaccgcatcagcagcctgggcagccaggccatgcagatggagaggaagaagagccagcacggggccggcagctctgtgggagatgccagcaggcctccctaccggggccgcagcagcgagagcagctgtggggtggatggagactatgaagatgctgagctgaacccccgcttcctgaaggacaacctgattgatgccaacggcggcagcaggcctccctggccacccctggagtaccagccctaccagagcatctacgtgggcggcatgatggagggggagggcaagggccccctgctgcggagccagagcaccagcgagcaggagaagaggctgacctggcccaggaggagctacagccccaggagctttgaggactgtggcggcggctacaccccagactgcagcagcaatgaaaacctgaccagcagcgaggaggacttcagcagcggccagagcagccgggtgagccccagccccaccacctacaggatgttccgggacaagagccgcagccccagccagaacagccagcagagctttgacagcagcagcccccccaccccccagtgccacaagaggcaccgccactgccctgtggtggtgtctgaggccaccatcgtgggcgtgaggaagacaggccagatctggcccaatgatggagagggcgccttccatggagatgctgtgctgaagacagaggtgccccaccagggcgtgcggcgggcccggctgagcctggaggccctgggggaggaccccagcttcctgtttcctgccagtgatggccccaggcacagcagcacctggtag

SEQ ID NO: 18590 - DNA, 1365 bp, synthetic construct
  misc_feature 1..1365: note = Description of Artificial Sequence: Synthetic coding sequence
  source 1..1365: mol_type = other DNA
atggtggaccctgtgggctttgctgaggcctggaaggcccagttcccagacagcgagccccccaggatggagctgcggtctgtgggggacatcgagcaggagctggagcgctgcaaggccagcatccggcggctggagcaggaggtgaaccaggagcgcttcaggatgatctacctgcagaccctgctggccaaggagaagaagagctatgaccggcagcgctggggcttccggcgggccgcccaggccccagatggagccagcgagccccgggccagcgccagccggccccagcctgccccagcagatggagctgaccccccacctgctgaggagcctgaggcccggccagatggagagggcagccctgggaaggcccggcccggcacagcccggcggcctggagctgctgccagcggggagagagatgaccggggccccccagcctctgtggccgccctgcggagcaactttgagcgcatcagaaaaggacatggccagcccggggctgatgctgagaagcccttctacgtgaatgtggagttccaccacgagcggggcctggtgaaggtgaatgacaaggaggtgtctgaccgcatcagcagcctgggcagccaggccatgcagatggagaggaagaagagccagcacggggccggcagctctgtgggagatgccagcaggcctccctaccggggccgcagcagcgagagcagctgtggggtggatggagactatgaagatgctgagctgaacccccgcttcctgaaggacaacctgattgatgccaacggcggcagcaggcctccctggccacccctggagtaccagccctaccagagcatctacgtgggcggcatgatggagggggagggcaagggccccctgctgcggagccagagcaccagcgagcaggagaagaggctgacctggcccaggaggagctacagccccaggagctttgaggactgtggcggcggctacaccccagactgcagcagcaatgaaaacctgaccagcagcgaggaggacttcagcagcggccagagcagccgggtgagccccagccccaccacctacaggatgttccgggacaagagccgcagccccagccagaacagccagcagagctttgacagcagcagcccccccaccccccagtgccacaagaggcaccgccactgccctgtggtggtgtctgaggccaccatcgtgggcgtgaggaagacaggccagatctggcccaatgatggagagggcgccttccatggagatgctgatggcagctttggcaccccacctggctacggctgtgccgccggccggcccccccacctgacagagctgcctgtgcagcaccagtag

SEQ ID NO: 18591 - DNA, 4704 bp, synthetic construct
  misc_feature 1..4704: note = Description of Artificial Sequence: Synthetic coding sequence
  source 1..4704: mol_type = other DNA
atgaatgtggagaaggccgagttctgcaacaagagcaagcagcccggcctggcccggagccagcacaaccgctgggccggcagcaaggagacctgcaatgacaggaggacccccagcacagagaagaaggtggacctgaatgctgaccccctgtgtgagaggaaggagtggaacaagcagaagctgccctgcagcgagaacccccgggacacagaagatgtgccctggatcaccctgaacagcagcatccagaaggtgaatgagtggttcagcagaagtgatgagctgctgggcagtgatgacagccatgatggagagagcgagagcaatgccaaggtggctgatgtgctggatgtgctgaatgaggtggatgagtacagcggcagcagcgagaagattgacctgctggccagtgacccccatgaggccctgatctgcaagtctgagcgggtgcacagcaagtctgtggagagcaacatcgaggacaagatctttgggaagacctacaggaagaaggccagcctgcccaacctgagccacgtgacagaaaatctcatcattggagcctttgtgacagagccccagatcatccaggagcggcccctgaccaacaagctgaagaggaagaggcggcccaccagcggcctgcaccctgaggacttcatcaagaaggctgacctggccgtgcagaagaccccagagatgatcaaccagggcaccaaccagacagagcagaatggccaggtgatgaacatcaccaacagcggccacgagaacaagaccaagggggacagcatccagaatgagaagaaccccaaccccatcgagagcctggagaaggagagcgccttcaagaccaaggccgagcccatcagcagcagcatcagcaacatggagctggagctgaacatccacaacagcaaggcccccaagaagaaccggctgcggaggaagagcagcaccaggcacatccacgccctggagctggtggtgtccaggaacctgagcccccccaactgcacagagctgcagattgacagctgcagcagcagcgaggagatcaagaagaagaagtacaaccagatgcctgtgcgccacagcaggaacctgcagctgatggagggcaaggagcccgccaccggggccaagaagagcaacaagcccaatgagcagaccagcaagagacatgacagcgacaccttccctgagctgaagctgaccaatgcccctggcagcttcaccaagtgcagcaacaccagcgagctgaaggagtttgtgaaccccagcctgccccgggaggagaaggaggagaagctggagaccgtgaaggtgagcaacaatgctgaggaccccaaggacctgatgctgtctggagagcgggtgctgcagacagagaggtctgtggagagcagcagcatcagcctggtgcctggaacagattatggcacccaggagagcatcagcctgctggaggtgtccaccctgggcaaggccaagacagagcccaacaagtgtgtgtcccagtgtgccgcctttgagaaccccaagggcctcatccacggctgcagcaaggacaacagaaatgacacagagggcttcaagtaccccctgggccacgaggtgaaccacagccgggagaccagcattgagatggaggagagcgagctggatgcccagtacctgcagaacaccttcaaggtgtccaagaggcagagctttgcccccttcagcaaccctggaaatgctgaggaggagtgtgccaccttcagcgcccacagcggcagcctgaagaagcagagccccaaggtgacctttgaatgtgagcagaaggaggagaaccagggcaagaatgaaagcaacatcaagcctgtgcagacagtgaacatcacagctggcttccctgtggtgggccagaaggacaagcctgtggacaatgccaagtgcagcatcaagggcggcagccgcttctgcctgagcagccagttcagaggaaatgaaacaggcctcatcacccccaacaagcacggcctgctgcagaacccctaccgcatccccccactcttccccatcaagagctttgtgaagaccaagtgcaagaagaacctgctggaggagaactttgaggagcacagcatgagccctgagcgggagatgggaaatgaaaacatccccagcacagtgtccaccatcagcaggaacaacatcagagaaaatgtgttcaaggaggccagcagcagcaacatcaatgaggtgggcagcagcaccaatgaggtgggcagcagcatcaatgaaattggcagcagtgatgagaacatccaggccgagctgggcaggaacagaggccccaagctgaatgccatgctgcggctgggcgtgctgcagcctgaggtgtacaagcagagcctgcccggcagcaactgcaagcaccctgagatcaagaagcaggagtatgaggaggtggtgcagacagtgaacacagacttcagcccctacctgatcagtgacaacctggagcagcccatgggcagcagccacgccagccaggtgtgcagcgagaccccagatgacctgctggatgatggagagatcaaggaggacaccagctttgctgaaaatgacatcaaggagagcagcgctgtgttcagcaagtctgtgcagaagggggagctgagccgcagccccagccccttcacccacacccacctggcccagggctacagaagaggagccaagaagctggagagcagcgaggagaacctgagcagtgaagatgaggagctgccctgcttccagcacctgctgtttgggaaggtgaacaacatccccagccagagcaccaggcacagcacagtggccacagagtgcctgagcaagaacacagaggagaacctgctgagcctgaagaacagcctgaatgactgcagcaaccaggtgatcctggccaaggccagccaggagcaccacctgtctgaggagaccaagtgcagcgccagcctcttcagcagccagtgcagcgagctggaggacctgacagccaacaccaacacccaggaccccttcctgattggcagcagcaagcagatgaggcaccagagcgagagccagggcgtgggcctgagtgacaaggagctggtgtctgatgatgaggagcggggcaccggcctggaggagaacaaccaggaggagcagagcatggacagcaacctgggggaggccgccagcggctgtgagagcgagacctctgtgtctgaggactgcagcggcctgagcagccagagcgacatcctgaccacccagcagagggacaccatgcagcacaacctgatcaagctgcagcaggagatggccgagctggaggccgtgctggagcagcacggcagccagcccagcaacagctaccccagcatcatcagtgacagcagcgccctggaggacctgagaaatcctgagcagagcaccagcgagaaggctgtgctgaccagccagaagagcagcgagtaccccatcagccagaaccctgagggcctgtctgctgacaagtttgaggtgtctgctgacagcagcaccagcaagaacaaggagcccggggtggagaggagcagccccagcaagtgccccagcctggatgaccgctggtacatgcacagctgcagcggcagcctgcagaacagaaactaccccagccaggaggagctgatcaaggtggtggatgtggaggagcagcagctggaggagagcggcccccatgacctgacagagaccagctacctgccccggcaggacctggagggcaccccctacctggagagcggcatcagcctcttcagtgatgatcctgagagtgaccccagtgaagatcgggcccctgagagcgcccgggtgggcaacatccccagcagcaccagcgccctgaaggtgccccagctgaaggtggccgagagcgcccagagccctgctgctgcccacaccacagacacagctggctacaatgccatggaggagagcgtgtcccgggagaagccagagctgacagccagcacagagcgggtgaacaagaggatgtccatggtggtgtctggcctgaccccagaggagttcatgctggtgtacaagtttgccaggaagcaccacatcaccctgaccaacctgatcacagaggagaccacccacgtggtgatgaagacagatgctgagtttgtgtgtgagaggaccctgaagtacttcctgggcattgctgggggcaagtgggtggtgtcctacttctgggtgacccagagcatcaaggagaggaagatgctgaatgaacatgactttgaggtgagaggagatgtggtgaatggaagaaaccaccagggccccaagagggcccgggagagccaggacaggaagatcttccggggcctggagatctgctgctacggccccttcaccaacatgcccacagaccagctggagtggatggtgcagctgtgtggggcctctgtggtgaaggagctgagcagcttcaccctgggcaccggggtgcaccccatcgtggtggtgcagccagatgcctggacagaagataatggcttccacgccatcggccagatgtgtgaggcccctgtggtgacccgggagtgggtgctggacagcgtggccctgtaccagtgccaggagctggacacctacctgatcccccagatcccccacagccactactag

SEQ ID NO: 18592 - DNA, 4875 bp, synthetic construct
  misc_feature 1..4875: note = Description of Artificial Sequence: Synthetic coding sequence
  source 1..4875: mol_type = other DNA
atggacctgagcgccctgcgggtggaggaggtgcagaatgtcatcaatgccatgcagaagatcctggagtgccccatctgcctggagctgatcaaggagcctgtgtccaccaagtgtgaccacatcttctgcaagttctgcatgctgaagctgctgaaccagaagaagggccccagccagtgccccctgtgcaagaatgacatcaccaagaggagcctgcaggagagcacccgcttcagccagctggtggaggagctgctgaagatcatctgtgccttccagctggacaccggcctggagtatgccaacagctacaactttgccaagaaggagaacaacagccctgagcacctgaaggatgaggtgtccatcatccagagcatgggctacagaaacagagccaagaggctgctgcagagcgagcctgagaaccccagcctgcaggagaccagcctgtctgtgcagctgagcaacctgggcaccgtgaggaccctgcggaccaagcagaggatccagccccagaagacctctgtgtacatcgagctgggcagtgacagcagcgaggacacagtgaacaaggccacctactgcagcgtgggggaccaggagctgctgcagatcaccccccagggcaccagagatgagatcagcctggacagcgccaagaaggccgcctgtgagttcagcgagacagatgtgaccaacacagagcaccaccagcccagcaacaatgacctgaacaccacagagaagagagctgctgagcggcaccctgagaagtaccagggcagctctgtgagcaacctgcacgtggagccctgtggcaccaacacccacgccagcagcctgcagcacgagaacagcagcctgctgctgaccaaggacaggatgaatgtggagaaggccgagttctgcaacaagagcaagcagcccggcctggcccggagccagcacaaccgctgggccggcagcaaggagacctgcaatgacaggaggacccccagcacagagaagaaggtggacctgaatgctgaccccctgtgtgagaggaaggagtggaacaagcagaagctgccctgcagcgagaacccccgggacacagaagatgtgccctggatcaccctgaacagcagcatccagaaggtgaatgagtggttcagcagaagtgatgagctgctgggcagtgatgacagccatgatggagagagcgagagcaatgccaaggtggctgatgtgctggatgtgctgaatgaggtggatgagtacagcggcagcagcgagaagattgacctgctggccagtgacccccatgaggccctgatctgcaagtctgagcgggtgcacagcaagtctgtggagagcaacatcgaggacaagatctttgggaagacctacaggaagaaggccagcctgcccaacctgagccacgtgacagaaaatctcatcattggagcctttgtgacagagccccagatcatccaggagcggcccctgaccaacaagctgaagaggaagaggcggcccaccagcggcctgcaccctgaggacttcatcaagaaggctgacctggccgtgcagaagaccccagagatgatcaaccagggcaccaaccagacagagcagaatggccaggtgatgaacatcaccaacagcggccacgagaacaagaccaagggggacagcatccagaatgagaagaaccccaaccccatcgagagcctggagaaggagagcgccttcaagaccaaggccgagcccatcagcagcagcatcagcaacatggagctggagctgaacatccacaacagcaaggcccccaagaagaaccggctgcggaggaagagcagcaccaggcacatccacgccctggagctggtggtgtccaggaacctgagcccccccaactgcacagagctgcagattgacagctgcagcagcagcgaggagatcaagaagaagaagtacaaccagatgcctgtgcgccacagcaggaacctgcagctgatggagggcaaggagcccgccaccggggccaagaagagcaacaagcccaatgagcagaccagcaagagacatgacagcgacaccttccctgagctgaagctgaccaatgcccctggcagcttcaccaagtgcagcaacaccagcgagctgaaggagtttgtgaaccccagcctgccccgggaggagaaggaggagaagctggagaccgtgaaggtgagcaacaatgctgaggaccccaaggacctgatgctgtctggagagcgggtgctgcagacagagaggtctgtggagagcagcagcatcagcctggtgcctggaacagattatggcacccaggagagcatcagcctgctggaggtgtccaccctgggcaaggccaagacagagcccaacaagtgtgtgtcccagtgtgccgcctttgagaaccccaagggcctcatccacggctgcagcaaggacaacagaaatgacacagagggcttcaagtaccccctgggccacgaggtgaaccacagccgggagaccagcattgagatggaggagagcgagctggatgcccagtacctgcagaacaccttcaaggtgtccaagaggcagagctttgcccccttcagcaaccctggaaatgctgaggaggagtgtgccaccttcagcgcccacagcggcagcctgaagaagcagagccccaaggtgacctttgaatgtgagcagaaggaggagaaccagggcaagaatgaaagcaacatcaagcctgtgcagacagtgaacatcacagctggcttccctgtggtgggccagaaggacaagcctgtggacaatgccaagtgcagcatcaagggcggcagccgcttctgcctgagcagccagttcagaggaaatgaaacaggcctcatcacccccaacaagcacggcctgctgcagaacccctaccgcatccccccactcttccccatcaagagctttgtgaagaccaagtgcaagaagaacctgctggaggagaactttgaggagcacagcatgagccctgagcgggagatgggaaatgaaaacatccccagcacagtgtccaccatcagcaggaacaacatcagagaaaatgtgttcaaggaggccagcagcagcaacatcaatgaggtgggcagcagcaccaatgaggtgggcagcagcatcaatgaaattggcagcagtgatgagaacatccaggccgagctgggcaggaacagaggccccaagctgaatgccatgctgcggctgggcgtgctgcagcctgaggtgtacaagcagagcctgcccggcagcaactgcaagcaccctgagatcaagaagcaggagtatgaggaggtggtgcagacagtgaacacagacttcagcccctacctgatcagtgacaacctggagcagcccatgggcagcagccacgccagccaggtgtgcagcgagaccccagatgacctgctggatgatggagagatcaaggaggacaccagctttgctgaaaatgacatcaaggagagcagcgctgtgttcagcaagtctgtgcagaagggggagctgagccgcagccccagccccttcacccacacccacctggcccagggctacagaagaggagccaagaagctggagagcagcgaggagaacctgagcagtgaagatgaggagctgccctgcttccagcacctgctgtttgggaaggtgaacaacatccccagccagagcaccaggcacagcacagtggccacagagtgcctgagcaagaacacagaggagaacctgctgagcctgaagaacagcctgaatgactgcagcaaccaggtgatcctggccaaggccagccaggagcaccacctgtctgaggagaccaagtgcagcgccagcctcttcagcagccagtgcagcgagctggaggacctgacagccaacaccaacacccaggaccccttcctgattggcagcagcaagcagatgaggcaccagagcgagagccagggcgtgggcctgagtgacaaggagctggtgtctgatgatgaggagcggggcaccggcctggaggagaacaaccaggaggagcagagcatggacagcaacctgggggaggccgccagcggctgtgagagcgagacctctgtgtctgaggactgcagcggcctgagcagccagagcgacatcctgaccacccagcagagggacaccatgcagcacaacctgatcaagctgcagcaggagatggccgagctggaggccgtgctggagcagcacggcagccagcccagcaacagctaccccagcatcatcagtgacagcagcgccctggaggacctgagaaatcctgagcagagcaccagcgagaaggatgctgagtttgtgtgtgagaggaccctgaagtacttcctgggcattgctgggggcaagtgggtggtgtcctacttctgggtgacccagagcatcaaggagaggaagatgctgaatgaacatgactttgaggtgagaggagatgtggtgaatggaagaaaccaccagggccccaagagggcccgggagagccaggacaggaagatcttccggggcctggagatctgctgctacggccccttcaccaacatgcccacagaccagctggagtggatggtgcagctgtgtggggcctctgtggtgaaggagctgagcagcttcaccctgggcactggagtgcaccccatcgtggtggtgcagccagatgcctggacagaggacaatggcttccacgccatcggccagatgtgtgaggcccctgtggtgacccgggagtgggtgctggacagcgtggccctgtaccagtgccaggagctggacacctacctgatcccccagatcccccacagccactactag

SEQ ID NO: 18593 - DNA, 2043 bp, synthetic construct
  misc_feature 1..2043: note = Description of Artificial Sequence: Synthetic coding sequence
  source 1..2043: mol_type = other DNA
atggacctgagcgccctgcgggtggaggaggtgcagaatgtcatcaatgccatgcagaagatcctggagtgccccatctgcctggagctgatcaaggagcctgtgtccaccaagtgtgaccacatcttctgcaagttctgcatgctgaagctgctgaaccagaagaagggccccagccagtgccccctgtgcaagaatgacatcaccaagaggagcctgcaggagagcacccgcttcagccagctggtggaggagctgctgaagatcatctgtgccttccagctggacaccggcctggagtatgccaacagctacaactttgccaagaaggagaacaacagccctgagcacctgaaggatgaggtgtccatcatccagagcatgggctacagaaacagagccaagaggctgctgcagagcgagcctgagaaccccagcctgcaggagaccagcctgtctgtgcagctgagcaacctgggcaccgtgaggaccctgcggaccaagcagaggatccagccccagaagacctctgtgtacatcgagctgggggaggccgccagcggctgtgagagcgagacctctgtgtctgaggactgcagcggcctgagcagccagagcgacatcctgaccacccagcagagggacaccatgcagcacaacctgatcaagctgcagcaggagatggccgagctggaggccgtgctggagcagcacggcagccagcccagcaacagctaccccagcatcatcagtgacagcagcgccctggaggacctgaggaaccctgagcagagcaccagcgagaaggctgtgctgaccagccagaagagcagcgagtaccccatcagccagaaccctgagggcctgtctgctgacaagtttgaggtgtctgctgacagcagcaccagcaagaacaaggagcccggggtggagaggagcagccccagcaaatgtcccagcctggatgaccgctggtacatgcacagctgcagcggcagcctgcagaacagaaactaccccagccaggaggagctgatcaaggtggtggatgtggaggagcagcagctggaggagagcggcccccatgacctgacagagaccagctacctgccccggcaggacctggagggcaccccctacctggagagcggcatcagcctcttcagtgatgatcctgagagtgaccccagcgaggaccgggcccctgagagcgcccgggtgggcaacatccccagcagcaccagcgccctgaaggtgccccagctgaaggtggccgagagcgcccagagccctgctgctgcccacaccacagacacagctggctacaatgccatggaggagagcgtgtcccgggagaagccagagctgacagccagcacagagcgggtgaacaagaggatgtccatggtggtgtctggcctgaccccagaggagttcatgctggtgtacaagtttgccaggaagcaccacatcaccctgaccaacctgatcacagaggagaccacccacgtggtgatgaagacagatgctgagtttgtgtgtgagaggaccctgaagtacttcctgggcattgctgggggcaagtgggtggtgtcctacttctgggtgacccagagcatcaaggagaggaagatgctgaatgaacatgactttgaggtgagaggagatgtggtgaatggaagaaaccaccagggccccaagagggcccgggagagccaggacaggaagatcttccggggcctggagatctgctgctacggccccttcaccaacatgcccacagaccagctggagtggatggtgcagctgtgtggggcctctgtggtgaaggagctgagcagcttcaccctgggcactggagtgcaccccatcgtggtggtgcagccagatgcctggacagaggacaatggcttccacgccatcggccagatgtgtgaggcccctgtggtgacccgggagtgggtgctggacagcgtggccctgtaccagtgccaggagctggacacctacctgatcccccagatcccccacagccactactag

SEQ ID NO: 18594 - DNA, 2166 bp, synthetic construct
  misc_feature 1..2166: note = Description of Artificial Sequence: Synthetic coding sequence
  source 1..2166: mol_type = other DNA
atggacctgagcgccctgcgggtggaggaggtgcagaatgtcatcaatgccatgcagaagatcctggagtgccccatctgcctggagctgatcaaggagcctgtgtccaccaagtgtgaccacatcttctgcaagttctgcatgctgaagctgctgaaccagaagaagggccccagccagtgccccctgtgcaagaatgacatcaccaagaggagcctgcaggagagcacccgcttcagccagctggtggaggagctgctgaagatcatctgtgccttccagctggacaccggcctggagtatgccaacagctacaactttgccaagaaggagaacaacagccctgagcacctgaaggatgaggtgtccatcatccagagcatgggctacagaaacagagccaagaggctgctgcagagcgagcctgagaaccccagcctgcaggagaccagcctgtctgtgcagctgagcaacctgggcaccgtgaggaccctgcggaccaagcagaggatccagccccagaagacctctgtgtacatcgagctgggcagtgacagcagcgaggacacagtgaacaaggccacctactgcagcgtgggggaccaggagctgctgcagatcaccccccagggcaccagagatgagatcagcctggacagcgccaagaagggggaggccgccagcggctgtgagagcgagacctctgtgtctgaggactgcagcggcctgagcagccagagcgacatcctgaccacccagcagagggacaccatgcagcacaacctgatcaagctgcagcaggagatggccgagctggaggccgtgctggagcagcacggcagccagcccagcaacagctaccccagcatcatcagtgacagcagcgccctggaggacctgagaaatcctgagcagagcaccagcgagaaggctgtgctgaccagccagaagagcagcgagtaccccatcagccagaaccctgagggcctgtctgctgacaagtttgaggtgtctgctgacagcagcaccagcaagaacaaggagcccggggtggagaggagcagccccagcaagtgccccagcctggatgaccgctggtacatgcacagctgcagcggcagcctgcagaacagaaactaccccagccaggaggagctgatcaaggtggtggatgtggaggagcagcagctggaggagagcggcccccatgacctgacagagaccagctacctgccccggcaggacctggagggcaccccctacctggagagcggcatcagcctcttcagtgatgatcctgagagtgaccccagtgaagatcgggcccctgagagcgcccgggtgggcaacatccccagcagcaccagcgccctgaaggtgccccagctgaaggtggccgagagcgcccagagccctgctgctgcccacaccacagacacagctggctacaatgccatggaggagagcgtgtcccgggagaagccagagctgacagccagcacagagcgggtgaacaagaggatgtccatggtggtgtctggcctgaccccagaggagttcatgctggtgtacaagtttgccaggaagcaccacatcaccctgaccaacctgatcacagaggagaccacccacgtggtgatgaagacagatgctgagtttgtgtgtgagaggaccctgaagtacttcctgggcattgctgggggcaagtgggtggtgtcctacttctgggtgacccagagcatcaaggagaggaagatgctgaatgaacatgactttgaggtgagaggagatgtggtgaatggaagaaaccaccagggccccaagagggcccgggagagccaggacaggaagatcttccggggcctggagatctgctgctacggccccttcaccaacatgcccacagaccagctggagtggatggtgcagctgtgtggggcctctgtggtgaaggagctgagcagcttcaccctgggcaccggggtgcaccccatcgtggtggtgcagccagatgcctggacagaagataatggcttccacgccatcggccagatgtgtgaggcccctgtggtgacccgggagtgggtgctggacagcgtggccctgtaccagtgccaggagctggacacctacctgatcccccagatcccccacagccactactag

SEQ ID NO: 18595 - DNA, 4797 bp, synthetic construct
  misc_feature 1..4797: note = Description of Artificial Sequence: Synthetic coding sequence
  source 1..4797: mol_type = other DNA
atggacctgagcgccctgcgggtggaggaggtgcagaatgtcatcaatgccatgcagaagatcctggagtgccccatctgcctggagctgatcaaggagcctgtgtccaccaagtgtgaccacatcttctgcaagttctgcatgctgaagctgctgaaccagaagaagggccccagccagtgccccctgtgcaagaatgacatcaccaagaggagcctgcaggagagcacccgcttcagccagctggtggaggagctgctgaagatcatctgtgccttccagctggacaccggcctggagtatgccaacagctacaactttgccaagaaggagaacaacagccctgagcacctgaaggatgaggtgtccatcatccagagcatgggctacagaaacagagccaagaggctgctgcagagcgagcctgagaaccccagcctgcaggagaccagcctgtctgtgcagctgagcaacctgggcaccgtgaggaccctgcggaccaagcagaggatccagccccagaagacctctgtgtacatcgagctgggcagtgacagcagcgaggacacagtgaacaaggccacctactgcagcgtgggggaccaggagctgctgcagatcaccccccagggcaccagagatgagatcagcctggacagcgccaagaaggccgcctgtgagttcagcgagacagatgtgaccaacacagagcaccaccagcccagcaacaatgacctgaacaccacagagaagagagctgctgagcggcaccctgagaagtaccagggcagctctgtgagcaacctgcacgtggagccctgtggcaccaacacccacgccagcagcctgcagcacgagaacagcagcctgctgctgaccaaggacaggatgaatgtggagaaggccgagttctgcaacaagagcaagcagcccggcctggcccggagccagcacaaccgctgggccggcagcaaggagacctgcaatgacaggaggacccccagcacagagaagaaggtggacctgaatgctgaccccctgtgtgagaggaaggagtggaacaagcagaagctgccctgcagcgagaacccccgggacacagaagatgtgccctggatcaccctgaacagcagcatccagaaggtgaatgagtggttcagcagaagtgatgagctgctgggcagtgatgacagccatgatggagagagcgagagcaatgccaaggtggctgatgtgctggatgtgctgaatgaggtggatgagtacagcggcagcagcgagaagattgacctgctggccagtgacccccatgaggccctgatctgcaagtctgagcgggtgcacagcaagtctgtggagagcaacatcgaggacaagatctttgggaagacctacaggaagaaggccagcctgcccaacctgagccacgtgacagaaaatctcatcattggagcctttgtgacagagccccagatcatccaggagcggcccctgaccaacaagctgaagaggaagaggcggcccaccagcggcctgcaccctgaggacttcatcaagaaggctgacctggccgtgcagaagaccccagagatgatcaaccagggcaccaaccagacagagcagaatggccaggtgatgaacatcaccaacagcggccacgagaacaagaccaagggggacagcatccagaatgagaagaaccccaaccccatcgagagcctggagaaggagagcgccttcaagaccaaggccgagcccatcagcagcagcatcagcaacatggagctggagctgaacatccacaacagcaaggcccccaagaagaaccggctgcggaggaagagcagcaccaggcacatccacgccctggagctggtggtgtccaggaacctgagcccccccaactgcacagagctgcagattgacagctgcagcagcagcgaggagatcaagaagaagaagtacaaccagatgcctgtgcgccacagcaggaacctgcagctgatggagggcaaggagcccgccaccggggccaagaagagcaacaagcccaatgagcagaccagcaagagacatgacagcgacaccttccctgagctgaagctgaccaatgcccctggcagcttcaccaagtgcagcaacaccagcgagctgaaggagtttgtgaaccccagcctgccccgggaggagaaggaggagaagctggagaccgtgaaggtgagcaacaatgctgaggaccccaaggacctgatgctgtctggagagcgggtgctgcagacagagaggtctgtggagagcagcagcatcagcctggtgcctggaacagattatggcacccaggagagcatcagcctgctggaggtgtccaccctgggcaaggccaagacagagcccaacaagtgtgtgtcccagtgtgccgcctttgagaaccccaagggcctcatccacggctgcagcaaggacaacagaaatgacacagagggcttcaagtaccccctgggccacgaggtgaaccacagccgggagaccagcattgagatggaggagagcgagctggatgcccagtacctgcagaacaccttcaaggtgtccaagaggcagagctttgcccccttcagcaaccctggaaatgctgaggaggagtgtgccaccttcagcgcccacagcggcagcctgaagaagcagagccccaaggtgacctttgaatgtgagcagaaggaggagaaccagggcaagaatgaaagcaacatcaagcctgtgcagacagtgaacatcacagctggcttccctgtggtgggccagaaggacaagcctgtggacaatgccaagtgcagcatcaagggcggcagccgcttctgcctgagcagccagttcagaggaaatgaaacaggcctcatcacccccaacaagcacggcctgctgcagaacccctaccgcatccccccactcttccccatcaagagctttgtgaagaccaagtgcaagaagaacctgctggaggagaactttgaggagcacagcatgagccctgagcgggagatgggaaatgaaaacatccccagcacagtgtccaccatcagcaggaacaacatcagagaaaatgtgttcaaggaggccagcagcagcaacatcaatgaggtgggcagcagcaccaatgaggtgggcagcagcatcaatgaaattggcagcagtgatgagaacatccaggccgagctgggcaggaacagaggccccaagctgaatgccatgctgcggctgggcgtgctgcagcctgaggtgtacaagcagagcctgcccggcagcaactgcaagcaccctgagatcaagaagcaggagtatgaggaggtggtgcagacagtgaacacagacttcagcccctacctgatcagtgacaacctggagcagcccatgggcagcagccacgccagccaggtgtgcagcgagaccccagatgacctgctggatgatggagagatcaaggaggacaccagctttgctgaaaatgacatcaaggagagcagcgctgtgttcagcaagtctgtgcagaagggggagctgagccgcagccccagccccttcacccacacccacctggcccagggctacagaagaggagccaagaagctggagagcagcgaggagaacctgagcagtgaagatgaggagctgccctgcttccagcacctgctgtttgggaaggtgaacaacatccccagccagagcaccaggcacagcacagtggccacagagtgcctgagcaagaacacagaggagaacctgctgagcctgaagaacagcctgaatgactgcagcaaccaggtgatcctggccaaggccagccaggagcaccacctgtctgaggagaccaagtgcagcgccagcctcttcagcagccagtgcagcgagctggaggacctgacagccaacaccaacacccaggaccccttcctgattggcagcagcaagcagatgaggcaccagagcgagagccagggcgtgggcctgagtgacaaggagctggtgtctgatgatgaggagcggggcaccggcctggaggagaacaaccaggaggagcagagcatggacagcaacctgggggaggccgccagcggctgtgagagcgagacctctgtgtctgaggactgcagcggcctgagcagccagagcgacatcctgaccacccagcagagggacaccatgcagcacaacctgatcaagctgcagcaggagatggccgagctggaggccgtgctggagcagcacggcagccagcccagcaacagctaccccagcatcatcagtgacagcagcgccctggaggacctgagaaatcctgagcagagcaccagcgagaagggcgtgacccagagcatcaaggagaggaagatgctgaatgaacatgactttgaggtgagaggagatgtggtgaatggaagaaaccaccagggccccaagagggcccgggagagccaggacaggaagatcttccggggcctggagatctgctgctacggccccttcaccaacatgcccacagaccagctggagtggatggtgcagctgtgtggggcctctgtggtgaaggagctgagcagcttcaccctgggcactggagtgcaccccatcgtggtggtgcagccagatgcctggacagaggacaatggcttccacgccatcggccagatgtgtgaggcccctgtggtgacccgggagtgggtgctggacagcgtggccctgtaccagtgccaggagctggacacctacctgatcccccagatcccccacagccactactag

SEQ ID NO: 18596 - DNA, 5592 bp, synthetic construct
  misc_feature 1..5592: note = Description of Artificial Sequence: Synthetic coding sequence
  source 1..5592: mol_type = other DNA
atggacctgagcgccctgcgggtggaggaggtgcagaatgtcatcaatgccatgcagaagatcctggagtgccccatctgcctggagctgatcaaggagcctgtgtccaccaagtgtgaccacatcttctgcaagttctgcatgctgaagctgctgaaccagaagaagggccccagccagtgccccctgtgcaagaatgacatcaccaagaggagcctgcaggagagcacccgcttcagccagctggtggaggagctgctgaagatcatctgtgccttccagctggacaccggcctggagtatgccaacagctacaactttgccaagaaggagaacaacagccctgagcacctgaaggatgaggtgtccatcatccagagcatgggctacagaaacagagccaagaggctgctgcagagcgagcctgagaaccccagcctgcaggagaccagcctgtctgtgcagctgagcaacctgggcaccgtgaggaccctgcggaccaagcagaggatccagccccagaagacctctgtgtacatcgagctgggcagtgacagcagcgaggacacagtgaacaaggccacctactgcagcgtgggggaccaggagctgctgcagatcaccccccagggcaccagagatgagatcagcctggacagcgccaagaaggccgcctgtgagttcagcgagacagatgtgaccaacacagagcaccaccagcccagcaacaatgacctgaacaccacagagaagagagctgctgagcggcaccctgagaagtaccagggcagctctgtgagcaacctgcacgtggagccctgtggcaccaacacccacgccagcagcctgcagcacgagaacagcagcctgctgctgaccaaggacaggatgaatgtggagaaggccgagttctgcaacaagagcaagcagcccggcctggcccggagccagcacaaccgctgggccggcagcaaggagacctgcaatgacaggaggacccccagcacagagaagaaggtggacctgaatgctgaccccctgtgtgagaggaaggagtggaacaagcagaagctgccctgcagcgagaacccccgggacacagaagatgtgccctggatcaccctgaacagcagcatccagaaggtgaatgagtggttcagcagaagtgatgagctgctgggcagtgatgacagccatgatggagagagcgagagcaatgccaaggtggctgatgtgctggatgtgctgaatgaggtggatgagtacagcggcagcagcgagaagattgacctgctggccagtgacccccatgaggccctgatctgcaagtctgagcgggtgcacagcaagtctgtggagagcaacatcgaggacaagatctttgggaagacctacaggaagaaggccagcctgcccaacctgagccacgtgacagaaaatctcatcattggagcctttgtgacagagccccagatcatccaggagcggcccctgaccaacaagctgaagaggaagaggcggcccaccagcggcctgcaccctgaggacttcatcaagaaggctgacctggccgtgcagaagaccccagagatgatcaaccagggcaccaaccagacagagcagaatggccaggtgatgaacatcaccaacagcggccacgagaacaagaccaagggggacagcatccagaatgagaagaaccccaaccccatcgagagcctggagaaggagagcgccttcaagaccaaggccgagcccatcagcagcagcatcagcaacatggagctggagctgaacatccacaacagcaaggcccccaagaagaaccggctgcggaggaagagcagcaccaggcacatccacgccctggagctggtggtgtccaggaacctgagcccccccaactgcacagagctgcagattgacagctgcagcagcagcgaggagatcaagaagaagaagtacaaccagatgcctgtgcgccacagcaggaacctgcagctgatggagggcaaggagcccgccaccggggccaagaagagcaacaagcccaatgagcagaccagcaagagacatgacagcgacaccttccctgagctgaagctgaccaatgcccctggcagcttcaccaagtgcagcaacaccagcgagctgaaggagtttgtgaaccccagcctgccccgggaggagaaggaggagaagctggagaccgtgaaggtgagcaacaatgctgaggaccccaaggacctgatgctgtctggagagcgggtgctgcagacagagaggtctgtggagagcagcagcatcagcctggtgcctggaacagattatggcacccaggagagcatcagcctgctggaggtgtccaccctgggcaaggccaagacagagcccaacaagtgtgtgtcccagtgtgccgcctttgagaaccccaagggcctcatccacggctgcagcaaggacaacagaaatgacacagagggcttcaagtaccccctgggccacgaggtgaaccacagccgggagaccagcattgagatggaggagagcgagctggatgcccagtacctgcagaacaccttcaaggtgtccaagaggcagagctttgcccccttcagcaaccctggaaatgctgaggaggagtgtgccaccttcagcgcccacagcggcagcctgaagaagcagagccccaaggtgacctttgaatgtgagcagaaggaggagaaccagggcaagaatgaaagcaacatcaagcctgtgcagacagtgaacatcacagctggcttccctgtggtgggccagaaggacaagcctgtggacaatgccaagtgcagcatcaagggcggcagccgcttctgcctgagcagccagttcagaggaaatgaaacaggcctcatcacccccaacaagcacggcctgctgcagaacccctaccgcatccccccactcttccccatcaagagctttgtgaagaccaagtgcaagaagaacctgctggaggagaactttgaggagcacagcatgagccctgagcgggagatgggaaatgaaaacatccccagcacagtgtccaccatcagcaggaacaacatcagagaaaatgtgttcaaggaggccagcagcagcaacatcaatgaggtgggcagcagcaccaatgaggtgggcagcagcatcaatgaaattggcagcagtgatgagaacatccaggccgagctgggcaggaacagaggccccaagctgaatgccatgctgcggctgggcgtgctgcagcctgaggtgtacaagcagagcctgcccggcagcaactgcaagcaccctgagatcaagaagcaggagtatgaggaggtggtgcagacagtgaacacagacttcagcccctacctgatcagtgacaacctggagcagcccatgggcagcagccacgccagccaggtgtgcagcgagaccccagatgacctgctggatgatggagagatcaaggaggacaccagctttgctgaaaatgacatcaaggagagcagcgctgtgttcagcaagtctgtgcagaagggggagctgagccgcagccccagccccttcacccacacccacctggcccagggctacagaagaggagccaagaagctggagagcagcgaggagaacctgagcagtgaagatgaggagctgccctgcttccagcacctgctgtttgggaaggtgaacaacatccccagccagagcaccaggcacagcacagtggccacagagtgcctgagcaagaacacagaggagaacctgctgagcctgaagaacagcctgaatgactgcagcaaccaggtgatcctggccaaggccagccaggagcaccacctgtctgaggagaccaagtgcagcgccagcctcttcagcagccagtgcagcgagctggaggacctgacagccaacaccaacacccaggaccccttcctgattggcagcagcaagcagatgaggcaccagagcgagagccagggcgtgggcctgagtgacaaggagctggtgtctgatgatgaggagcggggcaccggcctggaggagaacaaccaggaggagcagagcatggacagcaacctgggggaggccgccagcggctgtgagagcgagacctctgtgtctgaggactgcagcggcctgagcagccagagcgacatcctgaccacccagcagagggacaccatgcagcacaacctgatcaagctgcagcaggagatggccgagctggaggccgtgctggagcagcacggcagccagcccagcaacagctaccccagcatcatcagtgacagcagcgccctggaggacctgagaaatcctgagcagagcaccagcgagaaggctgtgctgaccagccagaagagcagcgagtaccccatcagccagaaccctgagggcctgtctgctgacaagtttgaggtgtctgctgacagcagcaccagcaagaacaaggagcccggggtggagaggagcagccccagcaagtgccccagcctggatgaccgctggtacatgcacagctgcagcggcagcctgcagaacagaaactaccccagccaggaggagctgatcaaggtggtggatgtggaggagcagcagctggaggagagcggcccccatgacctgacagagaccagctacctgccccggcaggacctggagggcaccccctacctggagagcggcatcagcctcttcagtgatgatcctgagagtgaccccagtgaagatcgggcccctgagagcgcccgggtgggcaacatccccagcagcaccagcgccctgaaggtgccccagctgaaggtggccgagagcgcccagagccctgctgctgcccacaccacagacacagctggctacaatgccatggaggagagcgtgtcccgggagaagccagagctgacagccagcacagagcgggtgaacaagaggatgtccatggtggtgtctggcctgaccccagaggagttcatgctggtgtacaagtttgccaggaagcaccacatcaccctgaccaacctgatcacagaggagaccacccacgtggtgatgaagacagatgctgagtttgtgtgtgagaggaccctgaagtacttcctgggcattgctgggggcaagtgggtggtgtcctacttctgggtgacccagagcatcaaggagaggaagatgctgaatgaacatgactttgaggtgagaggagatgtggtgaatggaagaaaccaccagggccccaagagggcccgggagagccaggacaggaagatcttccggggcctggagatctgctgctacggccccttcaccaacatgcccacagaccagctggagtggatggtgcagctgtgtggggcctctgtggtgaaggagctgagcagcttcaccctgggcaccggggtgcaccccatcgtggtggtgcagccagatgcctggacagaagataatggcttccacgccatcggccagatgtgtgaggcccctgtggtgacccgggagtgggtgctggacagcgtggccctgtaccagtgccaggagctggacacctacctgatcccccagatcccccacagccactactag

SEQ ID NO: 18597 - DNA, 2139 bp, synthetic construct
  misc_feature 1..2139: note = Description of Artificial Sequence: Synthetic coding sequence
  source 1..2139: mol_type = other DNA
atgctgaagctgctgaaccagaagaagggccccagccagtgccccctgtgcaagaatgacatcaccaagaggagcctgcaggagagcacccgcttcagccagctggtggaggagctgctgaagatcatctgtgccttccagctggacaccggcctggagtatgccaacagctacaactttgccaagaaggagaacaacagccctgagcacctgaaggatgaggtgtccatcatccagagcatgggctacagaaacagagccaagaggctgctgcagagcgagcctgagaaccccagcctgcaggagaccagcctgtctgtgcagctgagcaacctgggcaccgtgaggaccctgcggaccaagcagaggatccagccccagaagacctctgtgtacatcgagctgggcagtgacagcagtgaagatactgtgaacaaggccacctactgcagcgtgggggaccaggagctgctgcagatcaccccccagggcaccagagatgagatcagcctggacagcgccaagaaggccgcctgtgagttcagcgagacagatgtgaccaacacagagcaccaccagcccagcaacaatgacctgaacaccacagagaagagagctgctgagcggcaccctgagaagtaccagggcgaggccgccagcggctgtgagagcgagacctctgtgtctgaggactgcagcggcctgagcagccagagcgacatcctgaccacccagcagagggacaccatgcagcacaacctgatcaagctgcagcaggagatggccgagctggaggccgtgctggagcagcacggcagccagcccagcaacagctaccccagcatcatcagtgacagcagcgccctggaggacctgagaaatcctgagcagagcaccagcgagaaggtgctgaccagccagaagagcagcgagtaccccatcagccagaaccctgagggcctgtctgctgacaagtttgaggtgtctgctgacagcagcaccagcaagaacaaggagcccggggtggagaggagcagccccagcaaatgtcccagcctggatgaccgctggtacatgcacagctgcagcggcagcctgcagaacagaaactaccccagccaggaggagctgatcaaggtggtggatgtggaggagcagcagctggaggagagcggcccccatgacctgacagagaccagctacctgccccggcaggacctggagggcaccccctacctggagagcggcatcagcctcttcagtgatgatcctgagagtgaccccagcgaggaccgggcccctgagagcgcccgggtgggcaacatccccagcagcaccagcgccctgaaggtgccccagctgaaggtggccgagagcgcccagagccctgctgctgcccacaccacagacacagctggctacaatgccatggaggagagcgtgtcccgggagaagccagagctgacagccagcacagagcgggtgaacaagaggatgtccatggtggtgtctggcctgaccccagaggagttcatgctggtgtacaagtttgccaggaagcaccacatcaccctgaccaacctgatcacagaggagaccacccacgtggtgatgaagacagatgctgagtttgtgtgtgagaggaccctgaagtacttcctgggcattgctgggggcaagtgggtggtgtcctacttctgggtgacccagagcatcaaggagaggaagatgctgaatgaacatgactttgaggtgagaggagatgtggtgaatggaagaaaccaccagggccccaagagggcccgggagagccaggacaggaagatcttccggggcctggagatctgctgctacggccccttcaccaacatgcccacagaccagctggagtggatggtgcagctgtgtggggcctctgtggtgaaggagctgagcagcttcaccctgggcactggagtgcaccccatcgtggtggtgcagccagatgcctggacagaggacaatggcttccacgccatcggccagatgtgtgaggcccctgtggtgacccgggagtgggtgctggacagcgtggccctgtaccagtgccaggagctggacacctacctgatcccccagatcccccacagccactactag

SEQ ID NO: 18598 - DNA, 5655 bp, synthetic construct
  misc_feature 1..5655: note = Description of Artificial Sequence: Synthetic coding sequence
  source 1..5655: mol_type = other DNA
atggacctgagcgccctgcgggtggaggaggtgcagaatgtcatcaatgccatgcagaagatcctggagtgccccatctgcctggagctgatcaaggagcctgtgtccaccaagtgtgaccacatcttctgcaagttctgcatgctgaagctgctgaaccagaagaagggccccagccagtgccccctgtgcaagaatgacatcaccaagaggagcctgcaggagagcacccgcttcagccagctggtggaggagctgctgaagatcatctgtgccttccagctggacaccggcctggagtatgccaacagctacaactttgccaagaaggagaacaacagccctgagcacctgaaggatgaggtgtccatcatccagagcatgggctacagaaacagagccaagaggctgctgcagagcgagcctgagaaccccagcctgcaggagaccagcctgtctgtgcagctgagcaacctgggcaccgtgaggaccctgcggaccaagcagaggatccagccccagaagacctctgtgtacatcgagctgggcagtgacagcagcgaggacacagtgaacaaggccacctactgcagcgtgggggaccaggagctgctgcagatcaccccccagggcaccagagatgagatcagcctggacagcgccaagaaggccgcctgtgagttcagcgagacagatgtgaccaacacagagcaccaccagcccagcaacaatgacctgaacaccacagagaagagagctgctgagcggcaccctgagaagtaccagggcagctctgtgagcaacctgcacgtggagccctgtggcaccaacacccacgccagcagcctgcagcacgagaacagcagcctgctgctgaccaaggacaggatgaatgtggagaaggccgagttctgcaacaagagcaagcagcccggcctggcccggagccagcacaaccgctgggccggcagcaaggagacctgcaatgacaggaggacccccagcacagagaagaaggtggacctgaatgctgaccccctgtgtgagaggaaggagtggaacaagcagaagctgccctgcagcgagaacccccgggacacagaagatgtgccctggatcaccctgaacagcagcatccagaaggtgaatgagtggttcagcagaagtgatgagctgctgggcagtgatgacagccatgatggagagagcgagagcaatgccaaggtggctgatgtgctggatgtgctgaatgaggtggatgagtacagcggcagcagcgagaagattgacctgctggccagtgacccccatgaggccctgatctgcaagtctgagcgggtgcacagcaagtctgtggagagcaacatcgaggacaagatctttgggaagacctacaggaagaaggccagcctgcccaacctgagccacgtgacagaaaatctcatcattggagcctttgtgacagagccccagatcatccaggagcggcccctgaccaacaagctgaagaggaagaggcggcccaccagcggcctgcaccctgaggacttcatcaagaaggctgacctggccgtgcagaagaccccagagatgatcaaccagggcaccaaccagacagagcagaatggccaggtgatgaacatcaccaacagcggccacgagaacaagaccaagggggacagcatccagaatgagaagaaccccaaccccatcgagagcctggagaaggagagcgccttcaagaccaaggccgagcccatcagcagcagcatcagcaacatggagctggagctgaacatccacaacagcaaggcccccaagaagaaccggctgcggaggaagagcagcaccaggcacatccacgccctggagctggtggtgtccaggaacctgagcccccccaactgcacagagctgcagattgacagctgcagcagcagcgaggagatcaagaagaagaagtacaaccagatgcctgtgcgccacagcaggaacctgcagctgatggagggcaaggagcccgccaccggggccaagaagagcaacaagcccaatgagcagaccagcaagagacatgacagcgacaccttccctgagctgaagctgaccaatgcccctggcagcttcaccaagtgcagcaacaccagcgagctgaaggagtttgtgaaccccagcctgccccgggaggagaaggaggagaagctggagaccgtgaaggtgagcaacaatgctgaggaccccaaggacctgatgctgtctggagagcgggtgctgcagacagagaggtctgtggagagcagcagcatcagcctggtgcctggaacagattatggcacccaggagagcatcagcctgctggaggtgtccaccctgggcaaggccaagacagagcccaacaagtgtgtgtcccagtgtgccgcctttgagaaccccaagggcctcatccacggctgcagcaaggacaacagaaatgacacagagggcttcaagtaccccctgggccacgaggtgaaccacagccgggagaccagcattgagatggaggagagcgagctggatgcccagtacctgcagaacaccttcaaggtgtccaagaggcagagctttgcccccttcagcaaccctggaaatgctgaggaggagtgtgccaccttcagcgcccacagcggcagcctgaagaagcagagccccaaggtgacctttgaatgtgagcagaaggaggagaaccagggcaagaatgaaagcaacatcaagcctgtgcagacagtgaacatcacagctggcttccctgtggtgggccagaaggacaagcctgtggacaatgccaagtgcagcatcaagggcggcagccgcttctgcctgagcagccagttcagaggaaatgaaacaggcctcatcacccccaacaagcacggcctgctgcagaacccctaccgcatccccccactcttccccatcaagagctttgtgaagaccaagtgcaagaagaacctgctggaggagaactttgaggagcacagcatgagccctgagcgggagatgggaaatgaaaacatccccagcacagtgtccaccatcagcaggaacaacatcagagaaaatgtgttcaaggaggccagcagcagcaacatcaatgaggtgggcagcagcaccaatgaggtgggcagcagcatcaatgaaattggcagcagtgatgagaacatccaggccgagctgggcaggaacagaggccccaagctgaatgccatgctgcggctgggcgtgctgcagcctgaggtgtacaagcagagcctgcccggcagcaactgcaagcaccctgagatcaagaagcaggagtatgaggaggtggtgcagacagtgaacacagacttcagcccctacctgatcagtgacaacctggagcagcccatgggcagcagccacgccagccaggtgtgcagcgagaccccagatgacctgctggatgatggagagatcaaggaggacaccagctttgctgaaaatgacatcaaggagagcagcgctgtgttcagcaagtctgtgcagaagggggagctgagccgcagccccagccccttcacccacacccacctggcccagggctacagaagaggagccaagaagctggagagcagcgaggagaacctgagcagtgaagatgaggagctgccctgcttccagcacctgctgtttgggaaggtgaacaacatccccagccagagcaccaggcacagcacagtggccacagagtgcctgagcaagaacacagaggagaacctgctgagcctgaagaacagcctgaatgactgcagcaaccaggtgatcctggccaaggccagccaggagcaccacctgtctgaggagaccaagtgcagcgccagcctcttcagcagccagtgcagcgagctggaggacctgacagccaacaccaacacccaggaccccttcctgattggcagcagcaagcagatgaggcaccagagcgagagccagggcgtgggcctgagtgacaaggagctggtgtctgatgatgaggagcggggcaccggcctggaggagaacaaccaggaggagcagagcatggacagcaacctgggggaggccgccagcggctgtgagagcgagacctctgtgtctgaggactgcagcggcctgagcagccagagcgacatcctgaccacccagcagagggacaccatgcagcacaacctgatcaagctgcagcaggagatggccgagctggaggccgtgctggagcagcacggcagccagcccagcaacagctaccccagcatcatcagtgacagcagcgccctggaggacctgagaaatcctgagcagagcaccagcgagaaggacagccacatccacggccagaggaacaacagcatgttcagcaagaggccccgggagcacatctctgtgctgaccagccagaagagcagcgagtaccccatcagccagaaccctgagggcctgtctgctgacaagtttgaggtgtctgctgacagcagcaccagcaagaacaaggagcccggggtggagaggagcagccccagcaaatgtcccagcctggatgaccgctggtacatgcacagctgcagcggcagcctgcagaacagaaactaccccagccaggaggagctgatcaaggtggtggatgtggaggagcagcagctggaggagagcggcccccatgacctgacagagaccagctacctgccccggcaggacctggagggcaccccctacctggagagcggcatcagcctcttcagtgatgatcctgagagtgaccccagcgaggaccgggcccctgagagcgcccgggtgggcaacatccccagcagcaccagcgccctgaaggtgccccagctgaaggtggccgagagcgcccagagccctgctgctgcccacaccacagacacagctggctacaatgccatggaggagagcgtgtcccgggagaagccagagctgacagccagcacagagcgggtgaacaagaggatgtccatggtggtgtctggcctgaccccagaggagttcatgctggtgtacaagtttgccaggaagcaccacatcaccctgaccaacctgatcacagaggagaccacccacgtggtgatgaagacagatgctgagtttgtgtgtgagaggaccctgaagtacttcctgggcattgctgggggcaagtgggtggtgtcctacttctgggtgacccagagcatcaaggagaggaagatgctgaatgaacatgactttgaggtgagaggagatgtggtgaatggaagaaaccaccagggccccaagagggcccgggagagccaggacaggaagatcttccggggcctggagatctgctgctacggccccttcaccaacatgcccacagaccagctggagtggatggtgcagctgtgtggggcctctgtggtgaaggagctgagcagcttcaccctgggcactggagtgcaccccatcgtggtggtgcagccagatgcctggacagaggacaatggcttccacgccatcggccagatgtgtgaggcccctgtggtgacccgggagtgggtgctggacagcgtggccctgtaccagtgccaggagctggacacctacctgatcccccagatcccccacagccactactag

SEQ ID NO: 18599 - DNA, 192 bp, synthetic construct
  misc_feature 1..192: note = Description of Artificial Sequence: Synthetic coding sequence
  source 1..192: mol_type = other DNA
atggacctgagcgccctgcgggtggaggaggtgcagaatgtcatcaatgccatgcagaagatcctggagtgccccatctgcctggagctgatcaaggagcctgtgtccaccaagtgtgaccacatcttctgcaagttctgcatgctgaagctgctgaaccagaagaagggccccagccagtgccccctgtag

SEQ ID NO: 18600 - DNA, 192 bp, synthetic construct; identical to SEQ ID NO: 18599
  misc_feature 1..192: note = Description of Artificial Sequence: Synthetic coding sequence
  source 1..192: mol_type = other DNA

SEQ ID NO: 18601 - DNA, 2100 bp, synthetic construct
  misc_feature 1..2100: note = Description of Artificial Sequence: Synthetic coding sequence
  source 1..2100: mol_type = other DNA
atggacctgagcgccctgcgggtggaggaggtgcagaatgtcatcaatgccatgcagaagatcctggagtgccccatctgcctggagctgatcaaggagcctgtgtccaccaagtgtgaccacatcttctgcaagttctgcatgctgaagctgctgaaccagaagaagggccccagccagtgccccctgtgcaagaatgacatcaccaagaggagcctgcaggagagcacccgcttcagccagctggtggaggagctgctgaagatcatctgtgccttccagctggacaccggcctggagtatgccaacagctacaactttgccaagaaggagaacaacagccctgagcacctgaaggatgaggtgtccatcatccagagcatgggctacagaaacagagccaagaggctgctgcagagcgagcctgagaaccccagcctgcaggagaccagcctgtctgtgcagctgagcaacctgggcaccgtgaggaccctgcggaccaagcagaggatccagccccagaagacctctgtgtacatcgagctgggcagtgacagcagcgaggacacagtgaacaaggccacctactgcagcgtgggggaccaggagctgctgcagatcaccccccagggcaccagagatgagatcagcctggacagcgccaagaaggccgcctgtgagttcagcgagacagatgtgaccaacacagagcaccaccagcccagcaacaatgacctgaacaccacagagaagagagctgctgagcggcaccctgagaagtaccagggcgaggccgccagcggctgtgagagcgagacctctgtgtctgaggactgcagcggcctgagcagccagagcgacatcctgaccacccagcagagggacaccatgcagcacaacctgatcaagctgcagcaggagatggccgagctggaggccgtgctggagcagcacggcagccagcccagcaacagctaccccagcatcatcagtgacagcagcgccctggaggacctgaggaaccctgagcagagcaccagcgagaaggtgctgaccagccagaagagcagcgagtaccccatcagccagaaccctgagggcctgtctgctgacaagtttgaggtgtctgctgacagcagcaccagcaagaacaaggagcccggggtggagaggagcagccccagcaagtgccccagcctggatgaccgctggtacatgcacagctgcagcggcagcctgcagaacagaaactaccccagccaggaggagctgatcaaggtggtggatgtggaggagcagcagctggaggagagcggcccccatgacctgacagagaccagctacctgccccggcaggacctggagggcaccccctacctggagagcggcatcagcctcttcagtgatgatcctgagagtgaccccagtgaagatcgggcccctgagagcgcccgggtgggcaacatccccagcagcaccagcgccctgaaggtgccccagctgaaggtggccgagagcgcccagagccctgctgctgcccacaccacagacacagctggctacaatgccatggaggagagcgtgtcccgggagaagccagagctgacagccagcacagagcgggtgaacaagaggatgtccatggtggtgtctggcctgaccccagaggagttcatgctggtgtacaagtttgccaggaagcaccacatcaccctgaccaacctgatcacagaggagaccacccacgtggtgatgaagacagatgctgagtttgtgtgtgagaggaccctgaagtacttcctgggcattgctgggggcaagtgggtggtgtcctacttctgggtgacccagagcatcaaggagaggaagatgctgaatgaacatgactttgaggtgagaggagatgtggtgaatggaagaaaccaccagggccccaagagggcccgggagagccaggacaggaagatcttccggggcctggagatctgctgctacggccccttcaccaacatgcccaccggctgcccccccaactgtggctgtgccgcccgctgcctggaccggggccagtggctgccctgcaactgggcagatgtgtag

SEQ ID NO: 18602 - DNA, 1950 bp, synthetic construct
  misc_feature 1..1950: note = Description of Artificial Sequence: Synthetic coding sequence
  source 1..1950: mol_type = other DNA
atggacctgagcgccctgcgggtggaggaggtgcagaatgtcatcaatgccatgcagaagatcctggagtgccccatctgcctggagctgatcaaggagcctgtgtccaccaagtgtgaccacatcttctgcaagttctgcatgctgaagctgctgaaccagaagaagggccccagccagtgccccctgtgcaagaatgacatcaccaagaggagcctgcaggagagcacccgcttcagccagctggtggaggagctgctgaagatcatctgtgccttccagctggacaccggcctggagtatgccaacagctacaactttgccaagaaggagaacaacagccctgagcacctgaaggatgaggtgtccatcatccagagcatgggctacagaaacagagccaagaggctgctgcagagcgagcctgagaaccccagcctgcaggagaccagcctgtctgtgcagctgagcaacctgggcaccgtgaggaccctgcggaccaagcagaggatccagccccagaagacctctgtgtacatcgagctgggcagtgacagcagcgaggacacagtgaacaaggccacctactgcagcgtgggggaccaggagctgctgcagatcaccccccagggcaccagagatgagatcagcctggacagcgccaagaaggccgcctgtgagttcagcgagacagatgtgaccaacacagagcaccaccagcccagcaacaatgacctgaacaccacagagaagagagctgctgagcggcaccctgagaagtaccagggcagctctgtgagcaacctgcacgtggagccctgtggcaccaacacccacgccagcagcctgcagcacgagaacagcagcctgctgctgaccaaggacaggatgaatgtggagaaggccgagttctgcaacaagagcaagcagcccggcctggcccggagccagcacaaccgctgggccggcagcaaggagacctgcaatgacaggaggacccccagcacagagaagaaggtggacctgaatgctgaccccctgtgtgagaggaaggagtggaacaagcagaagctgccctgcagcgagaacccccgggacacagaagatgtgccctggatcaccctgaacagcagcatccagaaggtgaatgagtggttcagcagaagtgatgagctgctgggcagtgatgacagccatgatggagagagcgagagcaatgccaaggtggctgatgtgctggatgtgctgaatgaggtggatgagtacagcggcagcagcgagaagattgacctgctggccagtgacccccatgaggccctgatctgcaagtctgagcgggtgcacagcaagtctgtggagagcaacatcgaggacaagatctttgggaagacctacaggaagaaggccagcctgcccaacctgagccacgtgacagaaaatctcatcattggagcctttgtgacagagccccagatcatccaggagcggcccctgaccaacaagctgaagaggaagaggcggcccaccagcggcctgcaccctgaggacttcatcaagaaggctgacctggccgtgcagaagaccccagagatgatcaaccagggcaccaaccagacagagcagaatggccaggtgatgaacatcaccaacagcggccacgagaacaagaccaagggggacagcatccagaatgagaagaaccccaaccccatcgagagcctggagaaggagagcgccttcaagaccaaggccgagcccatcagcagcagcatcagcaacatggagctggagctgaacatccacaacagcaaggcccccaagaagaaccggctgcggaggaagagcagcaccaggcacatccacgccctggagctggtggtgtccaggaacctgagcccccccaactgcacagagctgcagattgacagctgcagcagcagcgaggagtag

SEQ ID NO: 18603 - DNA, 5658 bp, synthetic construct
  misc_feature 1..5658: note = Description of Artificial Sequence: Synthetic coding sequence
  source 1..5658: mol_type = other DNA
atggacctgagcgccctgcgggtggaggaggtgcagaatgtcatcaatgccatgcagaagatcctggagtgccccatctgcctggagctgatcaaggagcctgtgtccaccaagtgtgaccacatcttctgcaagttctgcatgctgaagctgctgaaccagaagaagggccccagccagtgccccctgtgcaagaatgacatcaccaagaggagcctgcaggagagcacccgcttcagccagctggtggaggagctgctgaagatcatctgtgccttccagctggacaccggcctggagtatgccaacagctacaactttgccaagaaggagaacaacagccctgagcacctgaaggatgaggtgtccatcatccagagcatgggctacagaaacagagccaagaggctgctgcagagcgagcctgagaaccccagcctgcaggagaccagcctgtctgtgcagctgagcaacctgggcaccgtgaggaccctgcggaccaagcagaggatccagccccagaagacctctgtgtacatcgagctgggcagtgacagcagcgaggacacagtgaacaaggccacctactgcagcgtgggggaccaggagctgctgcagatcaccccccagggcaccagagatgagatcagcctggacagcgccaagaaggccgcctgtgagttcagcgagacagatgtgaccaacacagagcaccaccagcccagcaacaatgacctgaacaccacagagaagagagctgctgagcggcaccctgagaagtaccagggcagctctgtgagcaacctgcacgtggagccctgtggcaccaacacccacgccagcagcctgcagcacgagaacagcagcctgctgctgaccaaggacaggatgaatgtggagaaggccgagttctgcaacaagagcaagcagcccggcctggcccggagccagcacaaccgctgggccggcagcaaggagacctgcaatgacaggaggacccccagcacagagaagaaggtggacctgaatgctgaccccctgtgtgagaggaaggagtggaacaagcagaagctgccctgcagcgagaacccccgggacacagaagatgtgccctggatcaccctgaacagcagcatccagaaggtgaatgagtggttcagcagaagtgatgagctgctgggcagtgatgacagccatgatggagagagcgagagcaatgccaaggtggctgatgtgctggatgtgctgaatgaggtggatgagtacagcggcagcagcgagaagattgacctgctggccagtgacccccatgaggccctgatctgcaagtctgagcgggtgcacagcaagtctgtggagagcaacatcgaggacaagatctttgggaagacctacaggaagaaggccagcctgcccaacctgagccacgtgacagaaaatctcatcattggagcctttgtgacagagccccagatcatccaggagcggcccctgaccaacaagctgaagaggaagaggcggcccaccagcggcctgcaccctgaggacttcatcaagaaggctgacctggccgtgcagaagaccccagagatgatcaaccagggcaccaaccagacagagcagaatggccaggtgatgaacatcaccaacagcggccacgagaacaagaccaagggggacagcatccagaatgagaagaaccccaaccccatcgagagcctggagaaggagagcgccttcaagaccaaggccgagcccatcagcagcagcatcagcaacatggagctggagctgaacatccacaacagcaaggcccccaagaagaaccggctgcggaggaagagcagcaccaggcacatccacgccctggagctggtggtgtccaggaacctgagcccccccaactgcacagagctgcagattgacagctgcagcagcagcgaggagatcaagaagaagaagtacaaccagatgcctgtgcgccacagcaggaacctgcagctgatggagggcaaggagcccgccaccggggccaagaagagcaacaagcccaatgagcagaccagcaagagacatgacagcgacaccttccctgagctgaagctgaccaatgcccctggcagcttcaccaagtgcagcaacaccagcgagctgaaggagtttgtgaaccccagcctgccccgggaggagaaggaggagaagctggagaccgtgaaggtgagcaacaatgctgaggaccccaaggacctgatgctgtctggagagcgggtgctgcagacagagaggtctgtggagagcagcagcatcagcctggtgcctggaacagattatggcacccaggagagcatcagcctgctggaggtgtccaccctgggcaaggccaagacagagcccaacaagtgtgtgtcccagtgtgccgcctttgagaaccccaagggcctcatccacggctgcagcaaggacaacagaaatgacacagagggcttcaagtaccccctgggccacgaggtgaaccacagccgggagaccagcattgagatggaggagagcgagctggatgcccagtacctgcagaacaccttcaaggtgtccaagaggcagagctttgcccccttcagcaaccctggaaatgctgaggaggagtgtgccaccttcagcgcccacagcggcagcctgaagaagcagagccccaaggtgacctttgaatgtgagcagaaggaggagaaccagggcaagaatgaaagcaacatcaagcctgtgcagacagtgaacatcacagctggcttccctgtggtgggccagaaggacaagcctgtggacaatgccaagtgcagcatcaagggcggcagccgcttctgcctgagcagccagttcagaggaaatgaaacaggcctcatcacccccaacaagcacggcctgctgcagaacccctaccgcatccccccactcttccccatcaagagctttgtgaagaccaagtgcaagaagaacctgctggaggagaactttgaggagcacagcatgagccctgagcgggagatgggaaatgaaaacatccccagcacagtgtccaccatcagcaggaacaacatcagagaaaatgtgttcaaggaggccagcagcagcaacatcaatgaggtgggcagcagcaccaatgaggtgggcagcagcatcaatgaaattggcagcagtgatgagaacatccaggccgagctgggcaggaacagaggccccaagctgaatgccatgctgcggctgggcgtgctgcagcctgaggtgtacaagcagagcctgcccggcagcaactgcaagcaccctgagatcaagaagcaggagtatgaggaggtggtgcagacagtgaacacagacttcagcccctacctgatcagtgacaacctggagcagcccatgggcagcagccacgccagccaggtgtgcagcgagaccccagatgacctgctggatgatggagagatcaaggaggacaccagctttgctgaaaatgacatcaaggagagcagcgctgtgttcagcaagtctgtgcagaagggggagctgagccgcagccccagccccttcacccacacccacctggcccagggctacagaagaggagccaagaagctggagagcagcgaggagaacctgagcagtgaagatgaggagctgccctgcttccagcacctgctgtttgggaaggtgaacaacatccccagccagagcaccaggcacagcacagtggccacagagtgcctgagcaagaacacagaggagaacctgctgagcctgaagaacagcctgaatgactgcagcaaccaggtgatcctggccaaggccagccaggagcaccacctgtctgaggagaccaagtgcagcgccagcctcttcagcagccagtgcagcgagctggaggacctgacagccaacaccaacacccaggaccccttcctgattggcagcagcaagcagatgaggcaccagagcgagagccagggcgtgggcctgagtgacaaggagctggtgtctgatgatgaggagcggggcaccggcctggaggagaacaaccaggaggagcagagcatggacagcaacctgggggaggccgccagcggctgtgagagcgagacctctgtgtctgaggactgcagcggcctgagcagccagagcgacatcctgaccacccagcagagggacaccatgcagcacaacctgatcaagctgcagcaggagatggccgagctggaggccgtgctggagcagcacggcagccagcccagcaacagctaccccagcatcatcagtgacagcagcgccctggaggacctgagaaatcctgagcagagcaccagcgagaaggacagccacatccacggccagaggaacaacagcatgttcagcaagaggccccgggagcacatctctgctgtgctgaccagccagaagagcagcgagtaccccatcagccagaaccctgagggcctgtctgctgacaagtttgaggtgtctgctgacagcagcaccagcaagaacaaggagcccggggtggagaggagcagccccagcaagtgccccagcctggatgaccgctggtacatgcacagctgcagcggcagcctgcagaacagaaactaccccagccaggaggagctgatcaaggtggtggatgtggaggagcagcagctggaggagagcggcccccatgacctgacagagaccagctacctgccccggcaggacctggagggcaccccctacctggagagcggcatcagcctcttcagtgatgatcctgagagtgaccccagtgaagatcgggcccctgagagcgcccgggtgggcaacatccccagcagcaccagcgccctgaaggtgccccagctgaaggtggccgagagcgcccagagccctgctgctgcccacaccacagacacagctggctacaatgccatggaggagagcgtgtcccgggagaagccagagctgacagccagcacagagcgggtgaacaagaggatgtccatggtggtgtctggcctgaccccagaggagttcatgctggtgtacaagtttgccaggaagcaccacatcaccctgaccaacctgatcacagaggagaccacccacgtggtgatgaagacagatgctgagtttgtgtgtgagaggaccctgaagtacttcctgggcattgctgggggcaagtgggtggtgtcctacttctgggtgacccagagcatcaaggagaggaagatgctgaatgaacatgactttgaggtgagaggagatgtggtgaatggaagaaaccaccagggccccaagagggcccgggagagccaggacaggaagatcttccggggcctggagatctgctgctacggccccttcaccaacatgcccacagaccagctggagtggatggtgcagctgtgtggggcctctgtggtgaaggagctgagcagcttcaccctgggcaccggggtgcaccccatcgtggtggtgcagccagatgcctggacagaagataatggcttccacgccatcggccagatgtgtgaggcccctgtggtgacccgggagtgggtgctggacagcgtggccctgtaccagtgccaggagctggacacctacctgatcccccagatcccccacagccactactag

SEQ ID NO: 18604 - DNA, 669 bp, synthetic construct
  misc_feature 1..669: note = Description of Artificial Sequence: Synthetic coding sequence
  source 1..669: mol_type = other DNA
atggacctgagcgccctgcgggtggaggaggtgcagaatgtcatcaatgccatgcagaagatcctggagtgccccatctgcctggagctgatcaaggagcctgtgtccaccaagtgtgaccacatcttctgcaagttctgcatgctgaagctgctgaaccagaagaagggccccagccagtgccccctgtgcaagaatgacatcaccaagaggagcctgcaggagagcacccgcttcagccagctggtggaggagctgctgaagatcatctgtgccttccagctggacaccggcctggagtatgccaacagctacaactttgccaagaaggagaacaacagccctgagcacctgaaggatgaggtgtccatcatccagagcatgggctacagaaacagagccaagaggctgctgcagagcgagcctgagaaccccagcctggagaccagcctgtctgtgcagctgagcaacctgggcaccgtgaggaccctgcggaccaagcagaggatccagccccagaagacctctgtgtacatcgagctgggcagtgacagcagtgaagatactgtgaacaaggccacctactgcagcgtgggggaccaggagctgctgcagatcaccccccagggcaccagagatgagatcagcctggacagcgccaagaagtag

SEQ ID NO: 18605 - DNA, 1869 bp, synthetic construct
  misc_feature 1..1869: note = Description of Artificial Sequence: Synthetic coding sequence
  source 1..1869: mol_type = other DNA
atggacctgagcgccctgcgggtggaggaggtgcagaatgtcatcaatgccatgcagaagatcctggagtgccccatctgcctggagctgatcaaggagcctgtgtccaccaagtgtgaccacatcttctgcaagagcctgcaggagagcacccgcttcagccagctggtggaggagctgctgaagatcatctgtgccttccagctggacaccggcctggagtatgccaacagctacaactttgccaagaaggagaacaacagccctgagcacctgaaggatgaggtgtccatcatccagagcatgggctacagaaacagagccaagaggctgctgcagagcgagcctgagaaccccagcctgcaggagaccagcctgtctgtgcagctgagcaacctgggcaccgtgaggaccctgcggaccaagcagaggatccagccccagaagacctctgtgtacatcgagctgggcagtgacagcagcgaggacacagtgaacaaggccacctactgcagcgtgggggaccaggagctgctgcagatcaccccccagggcaccagagatgagatcagcctggacagcgccaagaaggccgcctgtgagttcagcgagacagatgtgaccaacacagagcaccaccagcccagcaacaatgacctgaacaccacagagaagagagctgctgagcggcaccctgagaagtaccagggcagctctgtgagcaacctgcacgtggagccctgtggcaccaacacccacgccagcagcctgcagcacgagaacagcagcctgctgctgaccaaggacaggatgaatgtggagaaggccgagttctgcaacaagagcaagcagcccggcctggcccggagccagcacaaccgctgggccggcagcaaggagacctgcaatgacaggaggacccccagcacagagaagaaggtggacctgaatgctgaccccctgtgtgagaggaaggagtggaacaagcagaagctgccctgcagcgagaacccccgggacacagaagatgtgccctggatcaccctgaacagcagcatccagaaggtgaatgagtggttcagcagaagtgatgagctgctgggcagtgatgacagccatgatggagagagcgagagcaatgccaaggtggctgatgtgctggatgtgctgaatgaggtggatgagtacagcggcagcagcgagaagattgacctgctggccagtgacccccatgaggccctgatctgcaagtctgagcgggtgcacagcaagtctgtggagagcaacatcgaggacaagatctttgggaagacctacaggaagaaggccagcctgcccaacctgagccacgtgacagaaaatctcatcattggagcctttgtgacagagccccagatcatccaggagcggcccctgaccaacaagctgaagaggaagaggcggcccaccagcggcctgcaccctgaggacttcatcaagaaggctgacctggccgtgcagaagaccccagagatgatcaaccagggcaccaaccagacagagcagaatggccaggtgatgaacatcaccaacagcggccacgagaacaagaccaagggggacagcatccagaatgagaagaaccccaaccccatcgagagcctggagaaggagagcgccttcaagaccaaggccgagcccatcagcagcagcatcagcaacatggagctggagctgaacatccacaacagcaaggcccccaagaagaaccggctgcggaggaagagcagcaccaggcacatccacgccctggagctggtggtgtccaggaacctgagcccccccaactgcacagagctgcagattgacagctgcagcagcagcgagtag

SEQ ID NO: 18606 - DNA, 1872 bp, synthetic construct
  misc_feature 1..1872: note = Description of Artificial Sequence: Synthetic coding sequence
  source 1..1872: mol_type = other DNA
atggacctgagcgccctgcgggtggaggaggtgcagaatgtcatcaatgccatgcagaagatcctggagtgccccatctgcctggagctgatcaaggagcctgtgtccaccaagtgtgaccacatcttctgcaagttctgcatgctgaagctgctgaaccagaagaagggccccagccagtgccccctgtgcaagaatgacatcaccaagaggagcctgcaggagagcacccgcttcagccagctggtggaggagctgctgaagatcatctgtgccttccagctggacaccggcctggagtatgccaacagctacaactttgccaagaaggagaacaacagccctgagcacctgaaggatgaggtgtccatcatccagagcatgggctacagaaacagagccaagaggctgctgcagagcgagcctgagaaccccagcctggagaccagcctgtctgtgcagctgagcaacctgggcaccgtgaggaccctgcggaccaagcagaggatccagccccagaagacctctgtgtacatcgagctgggcagtgacagcagtgaagatactgtgaacaaggccacctactgcagcgtgggggaccaggagctgctgcagatcaccccccagggcaccagagatgagatcagcctggacagcgccaagaaggccgcctgtgagttcagcgagacagatgtgaccaacacagagcaccaccagcccagcaacaatgacctgaacaccacagagaagagagctgctgagcggcaccctgagaagtaccagggcgaggccgccagcggctgtgagagcgagacctctgtgtctgaggactgcagcggcctgagcagccagagcgacatcctgaccacccagcagagggacaccatgcagcacaacctgatcaagctgcagcaggagatggccgagctggaggccgtgctggagcagcacggcagccagcccagcaacagctaccccagcatcatcagtgacagcagcgccctggaggacctgagaaatcctgagcagagcaccagcgagaaggctgtgctgaccagccagaagagcagcgagtaccccatcagccagaaccctgagggcctgtctgctgacaagtttgaggtgtctgctgacagcagcaccagcaagaacaaggagcccggggtggagaggagcagccccagcaagtgccccagcctggatgaccgctggtacatgcacagctgcagcggcagcctgcagaacagaaactaccccagccaggaggagctgatcaaggtggtggatgtggaggagcagcagctggaggagagcggcccccatgacctgacagagaccagctacctgccccggcaggacctggagggcaccccctacctggagagcggcatcagcctcttcagtgatgatcctgagagtgaccccagtgaagatcgggcccctgagagcgcccgggtgggcaacatccccagcagcaccagcgccctgaaggtgccccagctgaaggtggccgagagcgcccagagccctgctgctgcccacaccacagacacagctggctacaatgccatggaggagagcgtgtcccgggagaagccagagctgacagccagcacagagcgggtgaacaagaggatgtccatggtggtgtctggcctgaccccagaggagttcatgctggtgtacaagtttgccaggaagcaccacatcaccctgaccaacctgatcacagaggagaccacccacgtggtgatgaagacagatgctgagtttgtgtgtgagaggaccctgaagtacttcctgggcattgctgggggcaagtgggtggtgtcctacttctgggtgacccagagcatcaaggagaggaagtag

SEQ ID NO: 18607 - DNA, 1497 bp, synthetic construct
  misc_feature 1..1497: note = Description of Artificial Sequence: Synthetic coding sequence
  source 1..1497: mol_type = other DNA
gagctgctgaagatcatctgtgccttccagctggacaccggcctggagtatgccaacagctacaactttgccaagaaggagaacaacagccctgagcacctgaaggatgaggtgtccatcatccagagcatgggctacagaaacagagccaagaggctgctgcagagcgagcctgagaaccccagcctggagaccagcctgtctgtgcagctgagcaacctgggcaccgtgaggaccctgcggaccaagcagaggatccagccccagaagacctctgtgtacatcgagctggccgcctgtgagttcagcgagacagatgtgaccaacacagagcaccaccagcccagcaacaatgacctgaacaccacagagaagagagctgctgagcggcaccctgagaagtaccagggcgaggccgccagcggctgtgagagcgagacctctgtgtctgaggactgcagcggcctgagcagccagagcgacatcctgaccacccagcagagggacaccatgcagcacaacctgatcaagctgcagcaggagatggccgagctggaggccgtgctggagcagcacggcagccagcccagcaacagctaccccagcatcatcagtgacagcagcgccctggaggacctgaggaaccctgagcagagcaccagcgagaaggctgtgctgaccagccagaagagcagcgagtaccccatcagccagaaccctgagggcctgtctgctgacaagtttgaggtgtctgctgacagcagcaccagcaagaacaaggagcccggggtggagaggagcagccccagcaaatgtcccagcctggatgaccgctggtacatgcacagctgcagcggcagcctgcagaacagaaactaccccagccaggaggagctgatcaaggtggtggatgtggaggagcagcagctggaggagagcggcccccatgacctgacagagaccagctacctgccccggcaggacctggagggcaccccctacctggagagcggcatcagcctcttcagtgatgatcctgagagtgaccccagcgaggaccgggcccctgagagcgcccgggtgggcaacatccccagcagcaccagcgccctgaaggtgccccagctgaaggtggccgagagcgcccagagccctgctgctgcccacaccacagacacagctggctacaatgccatggaggagagcgtgtcccgggagaagccagagctgacagccagcacagagcgggtgaacaagaggatgtccatggtggtgtctggcctgaccccagaggagttcatgctggtgtacaagtttgccaggaagcaccacatcaccctgaccaacctgatcacagaggagaccacccacgtggtgatgaagacagatgctgagtttgtgtgtgagaggaccctgaagtacttcctgggcattgctgggggcaagtgggtggtgtcctacttctgggtgacccagagcatcaaggagaggaagtag

SEQ ID NO: 18608 - DNA, 297 bp, synthetic construct
  misc_feature 1..297: note = Description of Artificial Sequence: Synthetic coding sequence
  source 1..297: mol_type = other DNA
atggacctgagcgccctgcgggtggaggaggtgcagaatgtcatcaatgccatgcagaagatcctggagtgccccatctgcctggagctgatcaaggagcctgtgtccaccaagtgtgaccacatcttctgcaagagcctgcaggagagcacccgcttcagccagctggtggaggagctgctgaagatcatctgtgccttccagctggacaccggcctggagtatgccaacagctacaactttgccaagaaggagaacaacagccctgagcacctgaaggatgaggtgtccatctag

SEQ ID NO: 18609 - DNA, 2280 bp, synthetic construct
  misc_feature 1..2280: note = Description of Artificial Sequence: Synthetic coding sequence
  source 1..2280: mol_type = other DNA
atggacctgagcgccctgcgggtggaggaggtgcagaatgtcatcaatgccatgcagaagatcctggagtgccccatctgcctggagctgatcaaggagcctgtgtccaccaagtgtgaccacatcttctgcaagttctgcatgctgaagctgctgaaccagaagaagggccccagccagtgccccctgtgcaagaatgacatcaccaagaggagcctgcaggagagcacccgcttcagccagctggtggaggagctgctgaagatcatctgtgccttccagctggacaccggcctggagtatgccaacagctacaactttgccaagaaggagaacaacagccctgagcacctgaaggatgaggtgtccatcatccagagcatgggctacagaaacagagccaagaggctgctgcagagcgagcctgagaaccccagcctgcaggagaccagcctgtctgtgcagctgagcaacctgggcaccgtgaggaccctgcggaccaagcagaggatccagccccagaagacctctgtgtacatcgagctgggcagtgacagcagcgaggacacagtgaacaaggccacctactgcagcgtgggggaccaggagctgctgcagatcaccccccagggcaccagagatgagatcagcctggacagcgccaagaaggccgcctgtgagttcagcgagacagatgtgaccaacacagagcaccaccagcccagcaacaatgacctgaacaccacagagaagagagctgctgagcggcaccctgagaagtaccagggcgaggccgccagcggctgtgagagcgagacctctgtgtctgaggactgcagcggcctgagcagccagagcgacatcctgaccacccagcagagggacaccatgcagcacaacctgatcaagctgcagcaggagatggccgagctggaggccgtgctggagcagcacggcagccagcccagcaacagctaccccagcatcatcagtgacagcagcgccctggaggacctgaggaaccctgagcagagcaccagcgagaaggtgctgaccagccagaagagcagcgagtaccccatcagccagaaccctgagggcctgtctgctgacaagtttgaggtgtctgctgacagcagcaccagcaagaacaaggagcccggggtggagaggagcagccccagcaagtgccccagcctggatgaccgctggtacatgcacagctgcagcggcagcctgcagaacagaaactaccccagccaggaggagctgatcaaggtggtggatgtggaggagcagcagctggaggagagcggcccccatgacctgacagagaccagctacctgccccggcaggacctggagggcaccccctacctggagagcggcatcagcctcttcagtgatgatcctgagagtgaccccagtgaagatcgggcccctgagagcgcccgggtgggcaacatccccagcagcaccagcgccctgaaggtgccccagctgaaggtggccgagagcgcccagagccctgctgctgcccacaccacagacacagctggctacaatgccatggaggagagcgtgtcccgggagaagccagagctgacagccagcacagagcgggtgaacaagaggatgtccatggtggtgtctggcctgaccccagaggagttcatgctggtgtacaagtttgccaggaagcaccacatcaccctgaccaacctgatcacagaggagaccacccacgtggtgatgaagacagatgctgagtttgtgtgtgagaggaccctgaagtacttcctgggcattgctgggggcaagtgggtggtgtcctacttctgggtgacccagagcatcaaggagaggaagatgctgaatgaacatgactttgaggtgagaggagatgtggtgaatggaagaaaccaccagggccccaagagggcccgggagagccaggacaggaagatcttccggggcctggagatctgctgctacggccccttcaccaacatgcccacagaccagctggagtggatggtgcagctgtgtggggcctctgtggtgaaggagctgagcagcttcaccctgggcaccggggtgcaccccatcgtggtggtgcagccagatgcctggacagaagataatggcttccacgccatcggccagatgtgtgaggcccctgtggtgacccgggagtgggtgctggacagcgtggccctgtaccagtgccaggagctggacacctacctgatcccccagatcccccacagccactactag

SEQ ID NO: 18610 - DNA, 180 bp, synthetic construct
  misc_feature 1..180: note = Description of Artificial Sequence: Synthetic coding sequence
  source 1..180: mol_type = other DNA
atggacctgagcgccctgcgggtggaggaggtgcagaatgtcatcaatgccatgcagaagatcctggagtgccccatctgcctggagctgatcaaggagcctgtgtccaccaagtgtgaccacatcttctgcaaggtgctgctgtgctgccccagctggagcacagtggtgcgctcctag

SEQ ID NO: 18611 - DNA, 5451 bp, synthetic construct
  misc_feature 1..5451: note = Description of Artificial Sequence: Synthetic coding sequence
  source 1..5451: mol_type = other DNA
atgctgaagctgctgaaccagaagaagggccccagccagtgccccctgtgcaagaatgacatcaccaagaggagcctgcaggagagcacccgcttcagccagctggtggaggagctgctgaagatcatctgtgccttccagctggacaccggcctggagtatgccaacagctacaactttgccaagaaggagaacaacagccctgagcacctgaaggatgaggtgtccatcatccagagcatgggctacagaaacagagccaagaggctgctgcagagcgagcctgagaaccccagcctgcaggagaccagcctgtctgtgcagctgagcaacctgggcaccgtgaggaccctgcggaccaagcagaggatccagccccagaagacctctgtgtacatcgagctgggcagtgacagcagtgaagatactgtgaacaaggccacctactgcagcgtgggggaccaggagctgctgcagatcaccccccagggcaccagagatgagatcagcctggacagcgccaagaaggccgcctgtgagttcagcgagacagatgtgaccaacacagagcaccaccagcccagcaacaatgacctgaacaccacagagaagagagctgctgagcggcaccctgagaagtaccagggcagctctgtgagcaacctgcacgtggagccctgtggcaccaacacccacgccagcagcctgcagcacgagaacagcagcctgctgctgaccaaggacaggatgaatgtggagaaggccgagttctgcaacaagagcaagcagcccggcctggcccggagccagcacaaccgctgggccggcagcaaggagacctgcaatgacaggaggacccccagcacagagaagaaggtggacctgaatgctgaccccctgtgtgagaggaaggagtggaacaagcagaagctgccctgcagcgagaacccccgggacacagaagatgtgccctggatcaccctgaacagcagcatccagaaggtgaatgagtggttcagcagaagtgatgagctgctgggcagtgatgacagccatgatggagagagcgagagcaatgccaaggtggctgatgtgctggatgtgctgaatgaggtggatgagtacagcggcagcagcgagaagattgacctgctggccagtgacccccatgaggccctgatctgcaagtctgagcgggtgcacagcaagtctgtggagagcaacatcgaggacaagatctttgggaagacctacaggaagaaggccagcctgcccaacctgagccacgtgacagagaacctgatcatcggggcctttgtgacagagccccagatcatccaggagcggcccctgaccaacaagctgaagaggaagagaagacccaccagcggcctgcaccctgaggacttcatcaagaaggctgacctggccgtgcagaagaccccagagatgatcaaccagggcaccaaccagacagagcagaatggccaggtgatgaacatcaccaacagcggccacgagaacaagaccaagggggacagcatccagaatgagaagaaccccaaccccatcgagagcctggagaaggagagcgccttcaagaccaaggccgagcccatcagcagcagcatcagcaacatggagctggagctgaacatccacaacagcaaggcccccaagaagaaccggctgcggaggaagagcagcaccaggcacatccacgccctggagctggtggtgtccaggaacctgagcccccccaactgcacagagctgcagattgacagctgcagcagcagcgaggagatcaagaagaagaagtacaaccagatgcctgtgcgccacagcaggaacctgcagctgatggagggcaaggagcccgccactggagccaagaagagcaacaagcccaatgagcagaccagcaagagacatgacagcgacaccttccctgagctgaagctgaccaatgcccctggcagcttcaccaagtgcagcaacaccagcgagctgaaggagtttgtgaaccccagcctgccccgggaggagaaggaggagaagctggagaccgtgaaggtgagcaacaatgctgaggaccccaaggacctgatgctgagcggggagcgggtgctgcagacagagaggtctgtggagagcagcagcatcagcctggtgcccggcacagattatggcacccaggagagcatcagcctgctggaggtgtccaccctgggcaaggccaagacagagcccaacaagtgtgtgtcccagtgtgccgcctttgagaaccccaagggcctcatccacggctgcagcaaggacaacagaaatgacacagagggcttcaagtaccccctgggccacgaggtgaaccacagccgggagaccagcattgagatggaggagagcgagctggatgcccagtacctgcagaacaccttcaaggtgtccaagaggcagagctttgcccccttcagcaaccctggaaatgctgaggaggagtgtgccaccttcagcgcccacagcggcagcctgaagaagcagagccccaaggtgacctttgaatgtgagcagaaggaggagaaccagggcaagaatgaaagcaacatcaagcctgtgcagacagtgaacatcacagctggcttccctgtggtgggccagaaggacaagcctgtggacaatgccaagtgcagcatcaagggcggcagccgcttctgcctgagcagccagttcagaggaaatgagaccggcctcatcacccccaacaagcacggcctgctgcagaacccctaccgcatccccccactcttccccatcaagagctttgtgaagaccaagtgcaagaagaacctgctggaggagaactttgaggagcacagcatgagccctgagcgggagatgggaaatgaaaacatccccagcacagtgtccaccatcagcaggaacaacatccgggagaatgtgttcaaggaggccagcagcagcaacatcaatgaggtgggcagcagcaccaatgaggtgggcagcagcatcaatgagatcggcagcagtgatgagaacatccaggccgagctgggcaggaacagaggccccaagctgaatgccatgctgcggctgggcgtgctgcagcctgaggtgtacaagcagagcctgcccggcagcaactgcaagcaccctgagatcaagaagcaggagtatgaggaggtggtgcagacagtgaacacagacttcagcccctacctgatcagtgacaacctggagcagcccatgggcagcagccacgccagccaggtgtgcagcgagaccccagatgacctgctggatgatggagagatcaaggaggacaccagctttgctgaaaatgacatcaaggagagcagcgctgtgttcagcaagtctgtgcagaagggggagctgagccgcagccccagccccttcacccacacccacctggcccagggctaccgccgcggggccaagaagctggagagcagcgaggagaacctgagcagtgaagatgaggagctgccctgcttccagcacctgctgtttgggaaggtgaacaacatccccagccagagcaccaggcacagcacagtggccacagaatgtctgagcaagaacacagaggagaacctgctgagcctgaagaacagcctgaatgactgcagcaaccaggtgatcctggccaaggccagccaggagcaccacctgtctgaggagaccaagtgcagcgccagcctcttcagcagccagtgcagcgagctggaggacctgacagccaacaccaacacccaggaccccttcctgattggcagcagcaagcagatgaggcaccagagcgagagccagggcgtgggcctgagtgacaaggagctggtgtctgatgatgaggagcggggcaccggcctggaggagaacaaccaggaggagcagagcatggacagcaacctgggggaggccgccagcggctgtgagagcgagacctctgtgtctgaggactgcagcggcctgagcagccagagcgacatcctgaccacccagcagagggacaccatgcagcacaacctgatcaagctgcagcaggagatggccgagctggaggccgtgctggagcagcacggcagccagcccagcaacagctaccccagcatcatcagtgacagcagcgccctggaggacctgaggaaccctgagcagagcaccagcgagaaggctgtgctgaccagccagaagagcagcgagtaccccatcagccagaaccctgagggcctgtctgctgacaagtttgaggtgtctgctgacagcagcaccagcaagaacaaggagcccggggtggagaggagcagccccagcaaatgtcccagcctggatgaccgctggtacatgcacagctgcagcggcagcctgcagaacagaaactaccccagccaggaggagctgatcaaggtggtggatgtggaggagcagcagctggaggagagcggcccccatgacctgacagagaccagctacctgccccggcaggacctggagggcaccccctacctggagagcggcatcagcctcttcagtgatgatcctgagagtgaccccagcgaggaccgggcccctgagagcgcccgggtgggcaacatccccagcagcaccagcgccctgaaggtgccccagctgaaggtggccgagagcgcccagagccctgctgctgcccacaccacagacacagctggctacaatgccatggaggagagcgtgtcccgggagaagccagagctgacagccagcacagagcgggtgaacaagaggatgtccatggtggtgtctggcctgaccccagaggagttcatgctggtgtacaagtttgccaggaagcaccacatcaccctgaccaacctgatcacagaggagaccacccacgtggtgatgaagacagatgctgagtttgtgtgtgagaggaccctgaagtacttcctgggcattgctgggggcaagtgggtggtgtcctacttctgggtgacccagagcatcaaggagaggaagatgctgaatgaacatgactttgaggtgagaggagatgtggtgaatggaagaaaccaccagggccccaagagggcccgggagagccaggacaggaagatcttccggggcctggagatctgctgctacggccccttcaccaacatgcccacagaccagctggagtggatggtgcagctgtgtggggcctctgtggtgaaggagctgagcagcttcaccctgggcactggagtgcaccccatcgtggtggtgcagccagatgcctggacagaggacaatggcttccacgccatcggccagatgtgtgaggcccctgtggtgacccgggagtgggtgctggacagcgtggccctgtaccagtgccaggagctggacacctacctgatcccccagatcccccacagccactactag

SEQ ID NO: 18612 - DNA, 1719 bp, synthetic construct
  misc_feature 1..1719: note = Description of Artificial Sequence: Synthetic coding sequence
  source 1..1719: mol_type = other DNA
atgctgaagctgctgaaccagaagaagggccccagccagtgccccctgtgcaagaatgacatcaccaagaggagcctgcaggagagcacccgcttcagccagctggtggaggagctgctgaagatcatctgtgccttccagctggacaccggcctggagtatgccaacagctacaactttgccaagaaggagaacaacagccctgagcacctgaaggatgaggtgtccatcatccagagcatgggctacagaaacagagccaagaggctgctgcagagcgagcctgagaaccccagcctgcaggagaccagcctgtctgtgcagctgagcaacctgggcaccgtgaggaccctgcggaccaagcagaggatccagccccagaagacctctgtgtacatcgagctgggcagtgacagcagtgaagatactgtgaacaaggccacctactgcagcgtgggggaccaggagctgctgcagatcaccccccagggcaccagagatgagatcagcctggacagcgccaagaaggccgcctgtgagttcagcgagacagatgtgaccaacacagagcaccaccagcccagcaacaatgacctgaacaccacagagaagagagctgctgagcggcaccctgagaagtaccagggcgaggccgccagcggctgtgagagcgagacctctgtgtctgaggactgcagcggcctgagcagccagagcgacatcctgaccacccagcagagggacaccatgcagcacaacctgatcaagctgcagcaggagatggccgagctggaggccgtgctggagcagcacggcagccagcccagcaacagctaccccagcatcatcagtgacagcagcgccctggaggacctgagaaatcctgagcagagcaccagcgagaaggctgtgctgaccagccagaagagcagcgagtaccccatcagccagaaccctgagggcctgtctgctgacaagtttgaggtgtctgctgacagcagcaccagcaagaacaaggagcccggggtggagaggagcagccccagcaagtgccccagcctggatgaccgctggtacatgcacagctgcagcggcagcctgcagaacagaaactaccccagccaggaggagctgatcaaggtggtggatgtggaggagcagcagctggaggagagcggcccccatgacctgacagagaccagctacctgccccggcaggacctggagggcaccccctacctggagagcggcatcagcctcttcagtgatgatcctgagagtgaccccagtgaagatcgggcccctgagagcgcccgggtgggcaacatccccagcagcaccagcgccctgaaggtgccccagctgaaggtggccgagagcgcccagagccctgctgctgcccacaccacagacacagctggctacaatgccatggaggagagcgtgtcccgggagaagccagagctgacagccagcacagagcgggtgaacaagaggatgtccatggtggtgtctggcctgaccccagaggagttcatgctggtgtacaagtttgccaggaagcaccacatcaccctgaccaacctgatcacagaggagaccacccacgtggtgatgaagacagatgctgagtttgtgtgtgagaggaccctgaagtacttcctgggcattgctgggggcaagtgggtggtgtcctacttctgggtgacccagagctag

SEQ ID NO: 18613 - DNA, 1422 bp, synthetic construct
  misc_feature 1..1422: note = Description of Artificial Sequence: Synthetic coding sequence
  source 1..1422: mol_type = other DNA
atggacctgagcgccctgcgggtggaggaggtgcagaatgtcatcaatgccatgcagaagatcctggagtgccccatctgcctggagctgatcaaggagcctgtgtccaccaagtgtgaccacatcttctgcaagttctgcatgctgaagctgctgaaccagaagaagggccccagccagtgccccctgtgcaagaatgacatcaccaagaggagcctgcaggagagcacccgcttcagccagctggtggaggagctgctgaagatcatctgtgccttccagctggacaccggcctggagtatgccaacagctacaactttgccaagaaggagaacaacagccctgagcacctgaaggatgaggtgtccatcatccagagcatgggctacagaaacagagccaagaggctgctgcagagcgagcctgagaaccccagcctgcaggagaccagcctgtctgtgcagctgagcaacctgggcaccgtgaggaccctgcggaccaagcagaggatccagccccagaagacctctgtgtacatcgagctgggcagtgacagcagcgaggacacagtgaacaaggccacctactgcagcgtgggggaccaggagctgctgcagatcaccccccagggcaccagagatgagatcagcctggacagcgccaagaaggccgcctgtgagttcagcgagacagatgtgaccaacacagagcaccaccagcccagcaacaatgacctgaacaccacagagaagagagctgctgagcggcaccctgagaagtaccagggcagctctgtgagcaacctgcacgtggagccctgtggcaccaacacccacgccagcagcctgcagcacgagaacagcagcctgctgctgaccaaggacaggatgaatgtggagaaggccgagttctgcaacaagagcaagcagcccggcctggcccggagccagcacaaccgctgggccggcagcaaggagacctgcaatgacaggaggacccccagcacagagaagaaggtggacctgaatgctgaccccctgtgtgagaggaaggagtggaacaagcagaagctgccctgcagcgagaacccccgggacacagaagatgtgccctggatcaccctgaacagcagcatccagaaggtgaatgagtggttcagcagaagtgatgagctgctgggcagtgatgacagccatgatggagagagcgagagcaatgccaaggtggctgatgtgctggatgtgctgaatgaggtggatgagtacagcggcagcagcgagaagattgacctgctggccagtgacccccatgaggccctgatctgcaagtctgagcgggtgcacagcaagtctgtggagagcaacatcgaggacaagatctttgggaagacctacaggaagaaggccagcctgcccaactag

SEQ ID NO: 18614 - DNA, 534 bp, synthetic construct
  misc_feature 1..534: note = Description of Artificial Sequence: Synthetic coding sequence
  source 1..534: mol_type = other DNA
atgaatgtggagaaggccgagttctgcaacaagagcaagcagcccggcctggcccggagccagcacaaccgctgggccggcagcaaggagacctgcaatgacaggaggacccccagcacagagaagaaggtggacctgaatgctgaccccctgtgtgagaggaaggagtggaacaagcagaagctgccctgcagcgagaacccccgggacacagaagatgtgccctggatcaccctgaacagcagcatccagaaggtgaatgagtggttcagcagaagtgatgagctgctgggcagtgatgacagccatgatggagagagcgagagcaatgccaaggtggctgatgtgctggatgtgctgaatgaggtggatgagtacagcggcagcagcgagaagattgacctgctggccagtgacccccatgaggccctgatctgcaagtctgagcgggtgcacagcaagtctgtggagagcaacatcgaggacaagatctttgggaagacctacaggaagaaggccagcctgcccaactag

SEQ ID NO: 18615 - DNA, 10257 bp, synthetic construct
  misc_feature 1..10257: note = Description of Artificial Sequence: Synthetic coding sequence
  source 1..10257: mol_type = other DNA
atgcccatcggcagcaaggagcggcccaccttctttgagatcttcaagacccgctgcaacaaggctgacctgggccccatcagcctgaactggtttgaggagctgagcagcgaggccccaccctacaacagcgagcctgctgaggagagcgagcacaagaacaacaactatgagcccaacctcttcaagaccccccagaggaagcccagctacaaccagctggccagcacccccatcatcttcaaggagcagggcctgaccctgcccctgtaccagagccctgtgaaggagctggacaagttcaagctggacctgggcagaaatgtgcccaacagccgccacaagagcctgaggacagtgaagaccaagatggaccaggctgatgatgtgtcctgccccctgctgaacagctgcctgtctgagagccctgtggtgctgcagtgcacccacgtgaccccccagagggacaagtctgtggtgtgtggcagcctcttccacacccccaagtttgtgaagggccggcagacccccaagcacatcagcgagagcctgggcgctgaggtggaccctgacatgtcctggagcagcagcctggccaccccacccaccctgagcagcacagtgctgattgtgagaaatgaggaggccagcgagaccgtcttcccccatgacaccacagccaacgtgaagagctacttcagcaaccatgatgagagcctgaagaagaatgaccgcttcatcgcctctgtgacagattctgagaacaccaaccagcgggaggccgccagccacggctttgggaagaccagcggcaacagcttcaaggtgaacagctgcaaggaccacatcggcaagtccatgcccaacgtgctggaggatgaggtgtatgagaccgtggtggacaccagtgaagaagattccttcagcctgtgcttcagcaagtgcaggaccaagaacctgcagaaggtgaggaccagcaagaccaggaagaagatcttccacgaggccaatgctgatgaatgtgagaagagcaagaaccaggtgaaggagaagtacagctttgtgtctgaggtggagcccaatgacacagaccccctggacagcaatgtggccaaccagaagccctttgagagcggcagtgacaagatcagcaaggaggtggtgcccagcctggcctgtgagtggagccagctgaccctgagcggcctgaatggagcccagatggagaagatccccctgctgcacatcagcagctgtgaccagaacatcagcgagaaggacctgctggacacagagaacaagaggaagaaggacttcctgaccagcgagaacagcctgccccgcatcagcagcctgcccaagtctgagaagcccctgaatgaggagaccgtggtgaacaagagagatgaggagcagcacctggagagccacacagactgcatcctggccgtgaagcaggccatcagcggcaccagccctgtggccagcagcttccagggcatcaagaagagcatcttccgcatccgggagagccccaaggagaccttcaatgccagcttcagcggccacatgacagaccccaacttcaagaaggagacagaggccagcgagagcggcctggagatccacacagtgtgcagccagaaggaggacagcctgtgccccaacctgattgacaatggctcctggccagccaccaccacccagaacagcgtggccctgaagaatgccggcctcatcagcaccctgaagaagaagaccaacaagttcatctatgccatccatgatgagaccagctacaagggcaagaagatccccaaggaccagaagtctgagctgatcaactgcagcgcccagtttgaggccaatgcctttgaggcccccctgacctttgccaatgctgacagcggcctgctgcacagctctgtgaagaggagctgcagccagaatgacagcgaggagcccaccctgagcctgaccagcagctttggcaccatcctgaggaagtgcagcagaaatgagacctgcagcaacaacacagtcatcagccaggacctggactacaaggaggccaagtgcaacaaggagaagctgcagctgttcatcaccccagaggccgacagcctgagctgcctgcaggagggccagtgtgaaaatgaccccaagagcaagaaggtgtctgacatcaaggaggaggtgctggccgccgcctgccaccctgtgcagcacagcaaggtggagtacagcgacacagacttccagagccagaagagcctgctgtatgaccatgaaaatgccagcaccctcatcctgacccccaccagcaaggatgtgctgagcaacctggtgatgatcagccggggcaaggagagctacaagatgtctgacaagctgaagggcaacaactatgaaagtgatgtggagctgaccaagaacatccccatggagaagaaccaggatgtgtgtgccctgaatgaaaactacaagaatgtggagctgctgcccccagagaagtacatgagggtggccagccccagcaggaaggtgcagttcaaccagaacaccaacctgcgggtcatccagaagaaccaggaggagaccaccagcatcagcaagatcaccgtgaacccagattctgaggagctgttcagtgacaatgaaaacaactttgtgttccaggtggccaatgaaagaaacaacctggccctgggcaacaccaaggagctgcacgagacagacctgacctgtgtgaatgagcccatcttcaagaacagcaccatggtgctgtatggagacacaggagacaagcaggccacccaggtgtccatcaagaaggacctggtgtatgtgctggccgaggagaacaagaacagcgtgaagcagcacatcaagatgaccctgggccaggacctgaagagtgacatcagcctgaacatcgacaagatccctgagaagaacaatgactacatgaacaagtgggccggcctgctgggccccatcagcaaccacagctttggaggcagcttcagaacagccagcaacaaggagatcaagctgtctgagcacaacatcaagaagagcaagatgttcttcaaggacatcgaggagcagtaccccaccagcctggcctgtgtggagatcgtgaacaccctggccctggacaaccagaagaagctgagcaagccccagagcatcaacacagtgtctgcccacctgcagagctctgtggtggtgtctgactgcaagaacagccacatcaccccccagatgctgttcagcaagcaggacttcaacagcaaccacaacctgacccccagccagaaggccgagatcacagagctgagcaccatcctggaggagagcggcagccagtttgagttcacccagttcaggaagcccagctacatcctgcagaagagcacctttgaggtgcctgagaaccagatgaccatcctgaagaccaccagcgaggagtgcagagatgctgacctgcacgtgatcatgaatgcccccagcatcggccaggtggacagcagcaagcagtttgagggcaccgtggagatcaagaggaagtttgctggcctgctgaagaatgactgcaacaagagcgccagcggctacctgacagatgaaaatgaggtgggcttccggggcttctacagcgcccacggcaccaagctgaatgtgtccacagaggccctgcagaaggctgtgaagctgttcagtgacatcgagaacatcagcgaggagaccagcgctgaggtgcaccccatcagcctgagcagcagcaagtgccacgacagcgtggtgtccatgttcaagattgagaaccacaatgacaagacagtgtctgagaagaacaacaagtgccagctgatcctgcagaacaacatcgagatgaccaccggcacctttgtggaggagatcacagagaactacaagaggaacacagaaaatgaagacaacaagtacacagctgccagcaggaacagccacaacctggagtttgatggcagtgacagcagcaagaatgacacagtgtgcatccacaaggatgaaacagacctgctcttcacagaccagcacaacatctgcctgaagctgagcggccagttcatgaaggagggcaacacccagatcaaggaggacctgagtgacctgaccttcctggaggtggccaaggcccaggaggcctgccacggcaacaccagcaacaaggagcagctgacagccaccaagacagagcagaacatcaaggactttgagaccagtgacaccttcttccagacagccagcggcaagaacatctctgtggccaaggagagcttcaacaagatcgtgaacttctttgaccagaagccagaggagctgcacaacttcagcctgaacagcgagctgcacagcgacatcaggaagaacaagatggacatcctgtcctatgaggagacagacatcgtgaagcacaagatcctgaaggagagcgtgcctgtgggcactggaaaccagctggtgaccttccagggccagcctgagagagatgagaagatcaaggagcccaccctgctgggcttccacacagccagcggcaagaaggtgaagatcgccaaggagagcctggacaaggtgaagaacctgtttgatgagaaggagcagggcaccagcgagatcaccagcttcagccaccagtgggccaagaccctgaagtaccgggaggcctgcaaggacctggagctggcctgtgagaccatcgagatcacagctgcccccaagtgcaaggagatgcagaacagcctgaacaatgacaagaacctggtgtccattgaaacagtggtgccccccaagctgctgagtgacaacctgtgccggcagacagagaacctgaagaccagcaagagcatcttcctgaaggtgaaggtgcatgaaaatgtggagaaggagacagccaagagccctgccacctgctacaccaaccagagcccctacagcgtgattgaaaattctgccctggccttctacaccagctgcagcaggaagacctctgtgtcccagaccagcctgctggaggccaagaagtggctgcgggagggcatctttgatggccagcctgagcgcatcaacacagctgactatgtgggcaactacctgtatgagaacaacagcaacagcaccatcgccgagaatgacaagaaccacctgtctgagaagcaggacacctacctgagcaacagctccatgagcaacagctacagctaccacagtgatgaggtgtacaatgacagcggctacctgagcaagaacaagctggacagcggcatcgagcctgtgctgaagaatgtggaggaccagaagaacaccagcttcagcaaggtgatcagcaatgtgaaggatgccaatgcctacccccagacagtgaatgaagacatctgtgtggaggagctggtgaccagcagcagcccctgcaagaacaagaatgctgccatcaagctgagcatcagcaacagcaacaactttgaggtgggccccccagccttccgcatcgccagcggcaagatcgtgtgtgtgtcccatgagaccatcaagaaggtgaaggacatcttcacagacagcttcagcaaggtgatcaaggagaacaatgaaaacaagagcaagatctgccagaccaagatcatggccggctgctatgaggccctggatgacagcgaggacatcctgcacaacagcctggacaatgatgagtgcagcacccacagccacaaggtgtttgctgacatccagagcgaggagatcctgcagcacaaccagaacatgagcggcctggagaaggtgtccaagatcagcccctgtgatgtgtccctggagaccagtgacatctgcaagtgcagcatcggcaagctgcacaagtctgtgtcctctgccaacacctgtggcatcttcagcacagccagcggcaagtctgtgcaggtgtctgatgccagcctgcagaatgcccggcaggtgttttctgaaattgaggacagcaccaagcaggtgttcagcaaggtgctcttcaagagcaatgagcacagcgaccagctgacccgggaggagaacacagccatccgcaccccagagcacctgatcagccagaagggcttctcctacaacgtggtgaacagcagcgccttcagcggcttcagcacagccagcggcaagcaggtgtccatcctggagagcagcctgcacaaggtgaagggcgtgctggaggagtttgacctgatcagaacagagcacagcctgcactacagccccaccagccggcagaatgtgtccaagatcctgccccgggtggacaagaggaaccctgagcactgtgtgaacagcgagatggagaagacctgcagcaaggagttcaagctgagcaacaacctgaatgtggagggcggcagcagcgagaacaaccacagcatcaaggtgagcccctacctgagccagttccagcaggacaagcagcagctggtgctgggcaccaaggtgtccctggtggagaacatccacgtgctgggcaaggagcaggccagccccaagaatgtgaagatggagatcggcaagacagagaccttcagtgatgtgcctgtgaagaccaacatcgaggtgtgcagcacctacagcaaggacagcgagaactactttgaaacagaagctgtggagatcgccaaggccttcatggaggatgatgagctgacagacagcaagctgcccagccacgccacccacagcctcttcacctgcccagaaaatgaggagatggtgctgagcaacagcagaattggcaagagaagaggagagcccctcatcctggtgggggagcccagcatcaagaggaacctgctgaatgaatttgaccgcatcatcgagaaccaggagaagagcctgaaggccagcaagagcaccccagatggcaccatcaaggaccggcggctcttcatgcaccacgtgtccctggagcccatcacctgtgtgcccttccgcaccaccaaggagcggcaggagatccagaaccccaacttcaccgcccctggccaggagttcctgagcaagagccacctgtatgagcacctgaccctggagaagagcagcagcaacctggccgtgtctggccaccccttctaccaggtgtctgccaccagaaatgagaagatgaggcacctgatcaccaccggccggcccaccaaggtgtttgtgccccccttcaagaccaagagccacttccaccgggtggagcagtgtgtgaggaacatcaacctggaggagaaccggcagaagcagaacattgatggccacggcagtgatgacagcaagaacaagatcaatgacaatgagatccaccagttcaacaagaacaacagcaaccaggccgtggccgtgaccttcaccaagtgtgaggaggagcccctggacctgatcaccagcctgcagaatgcccgggacatccaggacatgaggatcaagaagaagcagaggcagagggtcttcccccagcccggcagcctgtacctggccaagaccagcaccctgccccgcatcagcctgaaggctgctgtgggcggccaggtgcccagcgcctgcagccacaagcagctgtacacctatggagtgtccaagcactgcatcaagatcaacagcaagaatgctgagagcttccagttccacacagaggactactttgggaaggagagcctgtggacaggcaagggcatccagctggctgatggcggctggctgatccccagcaatgatggcaaggccggcaaggaggagttctaccgggccctgtgtgacaccccaggagtggaccccaagctgatcagccgcatctgggtgtacaaccactaccgctggatcatctggaagctggccgccatggagtgtgccttccccaaggagtttgccaaccgctgcctgagccctgagcgggtgctgctgcagctgaagtaccgctatgacacagaaattgacaggagccgccgcagcgccatcaagaagatcatggagagagatgacacagctgccaagaccctggtgctgtgtgtgtctgacatcatcagcctgagcgccaacatcagcgagaccagcagcaacaagaccagcagcgctgacacccagaaggtggccatcatcgagctgacagatggctggtatgctgtgaaggcccagctggacccccccctgctggccgtgctgaagaatggccgcctgactgtgggccagaagatcatcctgcacggggctgagctggtgggcagcccagatgcctgcacccccctggaggcccctgagagcctgatgctgaagatcagcgccaacagcaccaggcctgcccgctggtacaccaagctgggcttcttcccagacccccggcccttccccctgcccctgagcagcctcttcagtgatggcggcaatgtgggctgtgtggatgtgatcatccagagggcctaccccatccagtggatggagaagaccagcagcggcctgtacatcttcagaaatgaaagagaggaggagaaggaggccgccaagtatgtggaggcccagcagaagaggctggaggccctcttcaccaagatccaggaggagtttgaggagcacgaggagaacaccaccaagccctacctgcccagccgggccctgacccggcagcaggtgcgggccctgcaggatggagctgagctgtatgaagctgtgaagaatgctgctgaccctgcctacctggagggctacttcagcgaggagcagctgcgggccctgaacaaccaccggcagatgctgaatgacaagaagcaggcccagatccagctggagatcaggaaggccatggagagcgctgagcagaaggagcagggcctgagcagagatgtgaccaccgtgtggaagctgcgcatcgtgtcctacagcaagaaggagaaggacagcgtcatcctgagcatctggaggcccagcagtgacctgtacagcctgctgacagagggcaagcgctaccgcatctaccacctggccaccagcaagagcaagagcaagtctgagcgggccaacatccagctggccgccaccaagaagacccagtaccagcagctgcctgtgtctgatgagatcctcttccagatctaccagccccgggagcccctgcacttcagcaagttcctggaccctgacttccagcccagctgcagcgaggtggacctgattggatttgtggtgtctgtggtgaagaagacaggcctggccccctttgtgtacctgagtgatgagtgctacaacctgctggccatcaagttctggattgacctgaatgaagacatcatcaagccccacatgctgattgctgccagcaacctgcagtggaggcctgagagcaagagcggcctgctgaccctgtttgctggggacttcagcgtcttcagcgccagccccaaggagggccacttccaggagaccttcaacaagatgaagaacacagtggagaacatcgacatcctgtgcaatgaagctgagaacaagctgatgcacatcctgcacgccaatgaccccaagtggagcacccccaccaaggactgcaccagcggcccctacacagcccagatcatccctggcactggaaacaagctgctgatgagcagccccaactgtgagatctactaccagagccccctgagcctgtgcatggccaagaggaagtctgtgtccacccctgtgtctgcccagatgaccagcaagagctgcaagggggagaaggagattgatgaccagaagaactgcaagaagaggcgggccctggacttcctgagccggctgcccctgcccccacctgtgagccccatctgcacctttgtgtccccagctgcccagaaggccttccagccccccaggagctgtggcaccaagtatgagacccccatcaagaagaaggagctgaacagcccccagatgacccccttcaagaagttcaatgagatcagcctgctggagagcaacagcattgctgatgaggagctggccctgatcaacacccaggccctgctgagcggcagcactggagagaagcagttcatctctgtgtctgagagcaccaggacagcccccaccagcagcgaggactacctgcggctgaagaggcgctgcaccaccagcctcatcaaggagcaggagagcagccaggccagcacagaagaatgtgagaagaacaagcaggacaccatcaccaccaagaagtacatctag

SEQ ID NO: 18616 - DNA, 1809 bp, synthetic construct
  misc_feature 1..1809: note = Description of Artificial Sequence: Synthetic coding sequence
  source 1..1809: mol_type = other DNA
atgcccatcggcagcaaggagcggcccaccttctttgagatcttcaagacccgctgcaacaaggccggccccatcagcctgaactggtttgaggagctgagcagcgaggccccaccctacaacagcgagcctgctgaggagagcgagcacaagaacaacaactatgagcccaacctcttcaagaccccccagaggaagcccagctacaaccagctggccagcacccccatcatcttcaaggagcagggcctgaccctgcccctgtaccagagccctgtgaaggagctggacaagttcaagctggacctgggcagaaatgtgcccaacagccgccacaagagcctgaggacagtgaagaccaagatggaccaggctgatgatgtgtcctgccccctgctgaacagctgcctgtctgagagccctgtggtgctgcagtgcacccacgtgaccccccagagggacaagtctgtggtgtgtggcagcctcttccacacccccaagtttgtgaagggccggcagacccccaagcacatcagcgagagcctgggcgctgaggtggaccctgacatgtcctggagcagcagcctggccaccccacccaccctgagcagcacagtgctgattgtgagaaatgaggaggccagcgagaccgtcttcccccatgacaccacagccaacgtgaagagctacttcagcaaccatgatgagagcctgaagaagaatgaccgcttcatcgcctctgtgacagattctgagaacaccaaccagcgggaggccgccagccacggctttgggaagaccagcggcaacagcttcaaggtgaacagctgcaaggaccacatcggcaagtccatgcccaacgtgctggaggatgaggtgtatgagaccgtggtggacaccagtgaagaagattccttcagcctgtgcttcagcaagtgcaggaccaagaacctgcagaaggtgaggaccagcaagaccaggaagaagatcttccacgaggccaatgctgatgaatgtgagaagagcaagaaccaggtgaaggagaagtacagctttgtgtctgaggtggagcccaatgacacagaccccctggacagcaatgtggccaaccagaagccctttgagagcggcagtgacaagatcagcaaggaggtggtgcccagcctggcctgtgagtggagccagctgaccctgagcggcctgaatggagcccagatggagaagatccccctgctgcacatcagcagctgtgaccagaacatcagcgagaaggacctgctggacacagagaacaagaggaagaaggacttcctgaccagcgagaacagcctgccccgcatcagcagcctgcccaagtctgagaagcccctgaatgaggagaccgtggtgaacaagagagatgaggagcagcacctggagagccacacagactgcatcctggccgtgaagcaggccatcagcggcaccagccctgtggccagcagcttccagggcatcaagaagagcatcttccgcatccgggagagccccaaggagaccttcaatgccagcttcagcggccacatgacagaccccaacttcaagaaggagacagaggccagcgagagcggcctggagatccacacagtgtgcagccagaaggaggacagcctgtgccccaacctgattgacaatggctcctggccagccaccaccacccagaacagcgtggccctgaagaatgccggcctcatcagcaccctgaagaagaagaccaacaagttcatctatgccatccatgatgagaccagctacaagggcaagaagtag

SEQ ID NO: 18617 - DNA, 10257 bp, synthetic construct; identical to SEQ ID NO: 18615
  misc_feature 1..10257: note = Description of Artificial Sequence: Synthetic coding sequence
  source 1..10257: mol_type = other DNA

SEQ ID NO: 18618 - DNA, 2667 bp, synthetic construct
  misc_feature 1..2667: note = Description of Artificial Sequence: Synthetic coding sequence
  source 1..2667: mol_type = other DNA
atgcactgccctggagaggcccccctggccgccccccggcccacccccaaggacccctgcctgagaaatgtgctggccaaggccctgtatgacaacgtggccgagagcccagatgagctgtccttcaggaagggggacatcatgacagtgctggagcaggacacccagggcctggatggctggtggctgtgcagcctgcacggccggcagggcatcgtgcccggcaaccggctgaagatcctggtgggcatgtatgacaagaagccagctggccctggccctggccccccagccaccccagcccagccccagcccggcctgcacgccccagcccccccagccagccagtacacccccatgctgcccaacacctaccagccccagccagattctgtgtacctggtgcccacccccagcaaggcccagcagggcctgtaccaggtgcccggccccagcccccagttccagagccccccagccaagcagaccagcaccttcagcaagcagaccccccaccaccccttccccagccctgccacagacctgtaccaggtgcccccaggccctgggggccctgcccaggacatctaccaggtgccccccagcgctggcatgggccatgacatctaccaggtgcccccatccatggacaccaggtcctgggagggcaccaagcccccagccaaggtggtggtgcccaccagggtgggccagggctacgtgtatgaggccgcccagcctgagcaggatgaatatgacatccccaggcacctgctggcccctggcccccaggacatctatgatgtgccccctgtgcggggcctgctgcccagccagtatggccaggaggtgtatgacaccccacccatggctgtgaagggccccaacggccgggaccccctgctggaggtgtatgatgtgccccccagcgtggagaagggcctgccccccagcaaccaccacgctgtgtatgatgtgcccccatctgtgtccaaggatgtgcctgatggccccctgctgcgggaggagacctatgatgtgcccccagcctttgccaaggccaagccctttgatcctgcccggacccccctggtgctggccgcccctcctccagacagccccccagcagaagatgtgtatgatgtgcccccaccagccccagacctgtatgatgtgcccccaggcctgcggcggcccggccctggcaccctgtatgatgtgccccgggagcgggtgctgcccccagaggtggctgatggaggagtggtggacagcggcgtgtatgctgtgcccccacctgctgagcgggaggccccagctgagggcaagaggctgagcgccagcagcacaggcagcaccaggagcagccagagcgccagcagcctggaggtggccggccctggccgggagcccctggagctggaggtggccgtggaggccctggcccggctgcagcagggcgtgtctgccaccgtggcccacctgctggacctggccggcagcgctggggccaccggctcctggaggagccccagcgagccccaggagcccctggtgcaggacctgcaggccgctgtggccgctgtgcagagcgctgtgcatgagctgctggagtttgcccggtctgctgtgggcaatgctgcccacaccagtgaccgggccctgcacgccaagctgagccggcagctgcagaagatggaggatgtgcaccagaccctggtggcccacggccaggccctggatgctggccggggcggcagcggggccaccctggaggacctggaccggctggtggcctgcagcagagctgtgcctgaagatgccaagcagctggccagcttcctgcacggcaatgccagcctgctcttccggaggaccaaggccacagcccctggccctgagggcggcggcaccctgcaccccaaccccacagacaagaccagcagcatccagagccggcccctgcccagcccccccaagttcaccagccaggacagcccagatggccagtatgagaacagcgagggcggctggatggaggactatgactatgtgcacctgcagggcaaggaggagtttgagaagacccagaaggagctgctggagaagggcagcatcacccggcagggcaagagccagctggagctgcagcagctgaagcagtttgagcggctggagcaggaggtgtcccggcccatcgaccatgacctggccaactggaccccagcccagcccctggcccctggccgcactggaggcctgggccccagcgaccggcagctgctgctcttctacctggagcagtgtgaggccaacctgaccaccctgaccaatgctgtggatgccttcttcaccgctgtggccaccaaccagccccccaagatctttgtggcccacagcaagtttgtgatcctgagcgcccacaagctggtgttcatcggggacaccctgagccggcaggccaaggccgcagatgtgcgcagccaggtgacccactacagcaacctgctgtgtgacctgctgcggggcatcgtggccaccaccaaggctgctgccctgcagtaccccagccccagcgctgcccaggacatggtggagcgggtgaaggagctgggccacagcacccagcagttcagaagagtgctgggccagctggccgccgcctag

SEQ ID NO: 18619 - DNA, 2613 bp, synthetic construct
  misc_feature 1..2613: note = Description of Artificial Sequence: Synthetic coding sequence
  source 1..2613: mol_type = other DNA
atgaaccacctgaatgtgctggccaaggccctgtatgacaacgtggccgagagcccagatgagctgtccttcaggaagggggacatcatgacagtgctggagcaggacacccagggcctggatggctggtggctgtgcagcctgcacggccggcagggcatcgtgcccggcaaccggctgaagatcctggtgggcatgtatgacaagaagccagctggccctggccctggccccccagccaccccagcccagccccagcccggcctgcacgccccagcccccccagccagccagtacacccccatgctgcccaacacctaccagccccagccagattctgtgtacctggtgcccacccccagcaaggcccagcagggcctgtaccaggtgcccggccccagcccccagttccagagccccccagccaagcagaccagcaccttcagcaagcagaccccccaccaccccttccccagccctgccacagacctgtaccaggtgcccccaggccctgggggccctgcccaggacatctaccaggtgccccccagcgctggcatgggccatgacatctaccaggtgcccccatccatggacaccaggtcctgggagggcaccaagcccccagccaaggtggtggtgcccaccagggtgggccagggctacgtgtatgaggccgcccagcctgagcaggatgaatatgacatccccaggcacctgctggcccctggcccccaggacatctatgatgtgccccctgtgcggggcctgctgcccagccagtatggccaggaggtgtatgacaccccacccatggctgtgaagggccccaacggccgggaccccctgctggaggtgtatgatgtgccccccagcgtggagaagggcctgccccccagcaaccaccacgctgtgtatgatgtgcccccatctgtgtccaaggatgtgcctgatggccccctgctgcgggaggagacctatgatgtgcccccagcctttgccaaggccaagccctttgatcctgcccggacccccctggtgctggccgcccctcctccagacagccccccagcagaagatgtgtatgatgtgcccccaccagccccagacctgtatgatgtgcccccaggcctgcggcggcccggccctggcaccctgtatgatgtgccccgggagcgggtgctgcccccagaggtggctgatggaggagtggtggacagcggcgtgtatgctgtgcccccacctgctgagcgggaggccccagctgagggcaagaggctgagcgccagcagcacaggcagcaccaggagcagccagagcgccagcagcctggaggtggccggccctggccgggagcccctggagctggaggtggccgtggaggccctggcccggctgcagcagggcgtgtctgccaccgtggcccacctgctggacctggccggcagcgctggggccaccggctcctggaggagccccagcgagccccaggagcccctggtgcaggacctgcaggccgctgtggccgctgtgcagagcgctgtgcatgagctgctggagtttgcccggtctgctgtgggcaatgctgcccacaccagtgaccgggccctgcacgccaagctgagccggcagctgcagaagatggaggatgtgcaccagaccctggtggcccacggccaggccctggatgctggccggggcggcagcggggccaccctggaggacctggaccggctggtggcctgcagcagagctgtgcctgaagatgccaagcagctggccagcttcctgcacggcaatgccagcctgctcttccggaggaccaaggccacagcccctggccctgagggcggcggcaccctgcaccccaaccccacagacaagaccagcagcatccagagccggcccctgcccagcccccccaagttcaccagccaggacagcccagatggccagtatgagaacagcgagggcggctggatggaggactatgactatgtgcacctgcagggcaaggaggagtttgagaagacccagaaggagctgctggagaagggcagcatcacccggcagggcaagagccagctggagctgcagcagctgaagcagtttgagcggctggagcaggaggtgtcccggcccatcgaccatgacctggccaactggaccccagcccagcccctggcccctggccgcactggaggcctgggccccagcgaccggcagctgctgctcttctacctggagcagtgtgaggccaacctgaccaccctgaccaatgctgtggatgccttcttcaccgctgtggccaccaaccagccccccaagatctttgtggcccacagcaagtttgtgatcctgagcgcccacaagctggtgttcatcggggacaccctgagccggcaggccaaggccgcagatgtgcgcagccaggtgacccactacagcaacctgctgtgtgacctgctgcggggcatcgtggccaccaccaaggctgctgccctgcagtaccccagccccagcgctgcccaggacatggtggagcgggtgaaggagctgggccacagcacccagcagttcagaagagtgctgggccagctggccgccgcctag

SEQ ID NO: 18620 - DNA, 2667 bp, synthetic construct
  misc_feature 1..2667: note = Description of Artificial Sequence: Synthetic coding sequence
  source 1..2667: mol_type = other DNA
atgaaccacctgaatgtgctggccaaggccctgtatgacaacgtggccgagagcccagatgagctgtccttcaggaagggggacatcatgacagtgctggagcaggacacccagggcctggatggctggtggctgtgcagcctgcacggccggcagggcatcgtgcccggcaaccggctgaagatcctggtgggcatgtatgacaagaagccagctggccctggccctggccccccagccaccccagcccagccccagcccggcctgcacgccccagcccccccagccagccagtacacccccatgctgcccaacacctaccagccccagccagattctgtgtacctggtgcccacccccagcaaggcccagcagggcctgtaccaggtgcccggccccagcccccagttccagagccccccagccaagcagaccagcaccttcagcaagcagaccccccaccaccccttccccagccctgccacagacctgtaccaggtgcccccaggccctgggggccctgcccaggacatctaccaggtgccccccagcgctggcatgggccatgacatctaccaggtgcccccatccatggacaccaggtcctgggagggcaccaagcccccagccaaggtggtggtgcccaccagggtgggccagggctacgtgtatgaggccgcccagcctgagcaggatgaatatgacatccccaggcacctgctggcccctggcccccaggacatctatgatgtgccccctgtgcggggcctgctgcccagccagtatggccaggaggtgtatgacaccccacccatggctgtgaagggccccaacggccgggaccccctgctggaggtgtatgatgtgccccccagcgtggagaagggcctgccccccagcaaccaccacgctgtgtccaagtgccagggcaatgcccgggcccggctgcggctgtggggcgtgtgggtgtatgatgtgcccccatctgtgtccaaggatgtgcctgatggccccctgctgcgggaggagacctatgatgtgcccccagcctttgccaaggccaagccctttgatcctgcccggacccccctggtgctggccgcccctcctccagacagccccccagcagaagatgtgtatgatgtgcccccaccagccccagacctgtatgatgtgcccccaggcctgcggcggcccggccctggcaccctgtatgatgtgccccgggagcgggtgctgcccccagaggtggctgatggaggagtggtggacagcggcgtgtatgctgtgcccccacctgctgagcgggaggccccagctgagggcaagaggctgagcgccagcagcacaggcagcaccaggagcagccagagcgccagcagcctggaggtggccggccctggccgggagcccctggagctggaggtggccgtggaggccctggcccggctgcagcagggcgtgtctgccaccgtggcccacctgctggacctggccggcagcgctggggccaccggctcctggaggagccccagcgagccccaggagcccctggtgcaggacctgcaggccgctgtggccgctgtgcagagcgctgtgcatgagctgctggagtttgcccggtctgctgtgggcaatgctgcccacaccagtgaccgggccctgcacgccaagctgagccggcagctgcagaagatggaggatgtgcaccagaccctggtggcccacggccaggccctggatgctggccggggcggcagcggggccaccctggaggacctggaccggctggtggcctgcagcagagctgtgcctgaagatgccaagcagctggccagcttcctgcacggcaatgccagcctgctcttccggaggaccaaggccacagcccctggccctgagggcggcggcaccctgcaccccaaccccacagacaagaccagcagcatccagagccggcccctgcccagcccccccaagttcaccagccaggacagcccagatggccagtatgagaacagcgagggcggctggatggaggactatgactatgtgcacctgcagggcaaggaggagtttgagaagacccagaaggagctgctggagaagggcagcatcacccggcagggcaagagccagctggagctgcagcagctgaagcagtttgagcggctggagcaggaggtgtcccggcccatcgaccatgacctggccaactggaccccagcccagcccctggcccctggccgcactggaggcctgggccccagcgaccggcagctgctgctcttctacctggagcagtgtgaggccaacctgaccaccctgaccaatgctgtggatgccttcttcaccgctgtggccaccaaccagccccccaagatctttgtggcccacagcaagtttgtgatcctgagcgcccacaagctggtgttcatcggggacaccctgagccggcaggccaaggccgcagatgtgcgcagccaggtgacccactacagcaacctgctgtgtgacctgctgcggggcatcgtggccaccaccaaggctgctgccctgcagtaccccagccccagcgctgcccaggacatggtggagcgggtgaaggagctgggccacagcacccagcagttcagaagagtgctgggccagctggccgccgcctag

SEQ ID NO: 18621 - DNA, 2751 bp, synthetic construct
  misc_feature 1..2751: note = Description of Artificial Sequence: Synthetic coding sequence
  source 1..2751: mol_type = other DNA
atgcctgccaagcccttcctgagctctgtgctgctgtcctggaaggtgctggacttcagcggccctggcccccagggcaccggccagccctgcagctgtggccactgggccgagggccagggcggccccccagagcctgctgggggccccaacgtgctggccaaggccctgtatgacaacgtggccgagagcccagatgagctgtccttcaggaagggggacatcatgacagtgctggagcaggacacccagggcctggatggctggtggctgtgcagcctgcacggccggcagggcatcgtgcccggcaaccggctgaagatcctggtgggcatgtatgacaagaagccagctggccctggccctggccccccagccaccccagcccagccccagcccggcctgcacgccccagcccccccagccagccagtacacccccatgctgcccaacacctaccagccccagccagattctgtgtacctggtgcccacccccagcaaggcccagcagggcctgtaccaggtgcccggccccagcccccagttccagagccccccagccaagcagaccagcaccttcagcaagcagaccccccaccaccccttccccagccctgccacagacctgtaccaggtgcccccaggccctgggggccctgcccaggacatctaccaggtgccccccagcgctggcatgggccatgacatctaccaggtgcccccatccatggacaccaggtcctgggagggcaccaagcccccagccaaggtggtggtgcccaccagggtgggccagggctacgtgtatgaggccgcccagcctgagcaggatgaatatgacatccccaggcacctgctggcccctggcccccaggacatctatgatgtgccccctgtgcggggcctgctgcccagccagtatggccaggaggtgtatgacaccccacccatggctgtgaagggccccaacggccgggaccccctgctggaggtgtatgatgtgccccccagcgtggagaagggcctgccccccagcaaccaccacgctgtgtatgatgtgcccccatctgtgtccaaggatgtgcctgatggccccctgctgcgggaggagacctatgatgtgcccccagcctttgccaaggccaagccctttgatcctgcccggacccccctggtgctggccgcccctcctccagacagccccccagcagaagatgtgtatgatgtgcccccaccagccccagacctgtatgatgtgcccccaggcctgcggcggcccggccctggcaccctgtatgatgtgccccgggagcgggtgctgcccccagaggtggctgatggaggagtggtggacagcggcgtgtatgctgtgcccccacctgctgagcgggaggccccagctgagggcaagaggctgagcgccagcagcacaggcagcaccaggagcagccagagcgccagcagcctggaggtggccggccctggccgggagcccctggagctggaggtggccgtggaggccctggcccggctgcagcagggcgtgtctgccaccgtggcccacctgctggacctggccggcagcgctggggccaccggctcctggaggagccccagcgagccccaggagcccctggtgcaggacctgcaggccgctgtggccgctgtgcagagcgctgtgcatgagctgctggagtttgcccggtctgctgtgggcaatgctgcccacaccagtgaccgggccctgcacgccaagctgagccggcagctgcagaagatggaggatgtgcaccagaccctggtggcccacggccaggccctggatgctggccggggcggcagcggggccaccctggaggacctggaccggctggtggcctgcagcagagctgtgcctgaagatgccaagcagctggccagcttcctgcacggcaatgccagcctgctcttccggaggaccaaggccacagcccctggccctgagggcggcggcaccctgcaccccaaccccacagacaagaccagcagcatccagagccggcccctgcccagcccccccaagttcaccagccaggacagcccagatggccagtatgagaacagcgagggcggctggatggaggactatgactatgtgcacctgcagggcaaggaggagtttgagaagacccagaaggagctgctggagaagggcagcatcacccggcagggcaagagccagctggagctgcagcagctgaagcagtttgagcggctggagcaggaggtgtcccggcccatcgaccatgacctggccaactggaccccagcccagcccctggcccctggccgcactggaggcctgggccccagcgaccggcagctgctgctcttctacctggagcagtgtgaggccaacctgaccaccctgaccaatgctgtggatgccttcttcaccgctgtggccaccaaccagccccccaagatctttgtggcccacagcaagtttgtgatcctgagcgcccacaagctggtgttcatcggggacaccctgagccggcaggccaaggccgcagatgtgcgcagccaggtgacccactacagcaacctgctgtgtgacctgctgcggggcatcgtggccaccaccaaggctgctgccctgcagtaccccagccccagcgctgcccaggacatggtggagcgggtgaaggagctgggccacagcacccagcagttcagaagagtgctgggccagctggccgccgcctag

SEQ ID NO: 18622 - DNA, 2667 bp, synthetic construct
  misc_feature 1..2667: note = Description of Artificial Sequence: Synthetic coding sequence
  source 1..2667: mol_type = other DNA
atgctgacccaccggccccaggaggccgagcagaggggccgcaccccaggccccagctttgagtggaatgtgctggccaaggccctgtatgacaacgtggccgagagcccagatgagctgtccttcaggaagggggacatcatgacagtgctggagcaggacacccagggcctggatggctggtggctgtgcagcctgcacggccggcagggcatcgtgcccggcaaccggctgaagatcctggtgggcatgtatgacaagaagccagctggccctggccctggccccccagccaccccagcccagccccagcccggcctgcacgccccagcccccccagccagccagtacacccccatgctgcccaacacctaccagccccagccagattctgtgtacctggtgcccacccccagcaaggcccagcagggcctgtaccaggtgcccggccccagcccccagttccagagccccccagccaagcagaccagcaccttcagcaagcagaccccccaccaccccttccccagccctgccacagacctgtaccaggtgcccccaggccctgggggccctgcccaggacatctaccaggtgccccccagcgctggcatgggccatgacatctaccaggtgcccccatccatggacaccaggtcctgggagggcaccaagcccccagccaaggtggtggtgcccaccagggtgggccagggctacgtgtatgaggccgcccagcctgagcaggatgaatatgacatccccaggcacctgctggcccctggcccccaggacatctatgatgtgccccctgtgcggggcctgctgcccagccagtatggccaggaggtgtatgacaccccacccatggctgtgaagggccccaacggccgggaccccctgctggaggtgtatgatgtgccccccagcgtggagaagggcctgccccccagcaaccaccacgctgtgtatgatgtgcccccatctgtgtccaaggatgtgcctgatggccccctgctgcgggaggagacctatgatgtgcccccagcctttgccaaggccaagccctttgatcctgcccggacccccctggtgctggccgcccctcctccagacagccccccagcagaagatgtgtatgatgtgcccccaccagccccagacctgtatgatgtgcccccaggcctgcggcggcccggccctggcaccctgtatgatgtgccccgggagcgggtgctgcccccagaggtggctgatggaggagtggtggacagcggcgtgtatgctgtgcccccacctgctgagcgggaggccccagctgagggcaagaggctgagcgccagcagcacaggcagcaccaggagcagccagagcgccagcagcctggaggtggccggccctggccgggagcccctggagctggaggtggccgtggaggccctggcccggctgcagcagggcgtgtctgccaccgtggcccacctgctggacctggccggcagcgctggggccaccggctcctggaggagccccagcgagccccaggagcccctggtgcaggacctgcaggccgctgtggccgctgtgcagagcgctgtgcatgagctgctggagtttgcccggtctgctgtgggcaatgctgcccacaccagtgaccgggccctgcacgccaagctgagccggcagctgcagaagatggaggatgtgcaccagaccctggtggcccacggccaggccctggatgctggccggggcggcagcggggccaccctggaggacctggaccggctggtggcctgcagcagagctgtgcctgaagatgccaagcagctggccagcttcctgcacggcaatgccagcctgctcttccggaggaccaaggccacagcccctggccctgagggcggcggcaccctgcaccccaaccccacagacaagaccagcagcatccagagccggcccctgcccagcccccccaagttcaccagccaggacagcccagatggccagtatgagaacagcgagggcggctggatggaggactatgactatgtgcacctgcagggcaaggaggagtttgagaagacccagaaggagctgctggagaagggcagcatcacccggcagggcaagagccagctggagctgcagcagctgaagcagtttgagcggctggagcaggaggtgtcccggcccatcgaccatgacctggccaactggaccccagcccagcccctggcccctggccgcactggaggcctgggccccagcgaccggcagctgctgctcttctacctggagcagtgtgaggccaacctgaccaccctgaccaatgctgtggatgccttcttcaccgctgtggccaccaaccagccccccaagatctttgtggcccacagcaagtttgtgatcctgagcgcccacaagctggtgttcatcggggacaccctgagccggcaggccaaggccgcagatgtgcgcagccaggtgacccactacagcaacctgctgtgtgacctgctgcggggcatcgtggccaccaccaaggctgctgccctgcagtaccccagccccagcgctgcccaggacatggtggagcgggtgaaggagctgggccacagcacccagcagttcagaagagtgctgggccagctggccgccgcctag

SEQ ID NO: 18623 - DNA, 2169 bp, synthetic construct
  misc_feature 1..2169: note = Description of Artificial Sequence: Synthetic coding sequence
  source 1..2169: mol_type = other DNA
atgcagggcaagaatgtgctggccaaggccctgtatgacaacgtggccgagagcccagatgagctgtccttcaggaagggggacatcatgacagtgctggagcaggacacccagggcctggatggctggtggctgtgcagcctgcacggccggcagggcatcgtgcccggcaaccggctgaagatcctggtggtggtgcccaccagggtgggccagggctacgtgtatgaggccgcccagcctgagcaggatgaatatgacatccccaggcacctgctggcccctggcccccaggacatctatgatgtgccccctgtgcggggcctgctgcccagccagtatggccaggaggtgtatgacaccccacccatggctgtgaagggccccaacggccgggaccccctgctggaggtgtatgatgtgccccccagcgtggagaagggcctgccccccagcaaccaccacgctgtgtatgatgtgcccccatctgtgtccaaggatgtgcctgatggccccctgctgcgggaggagacctatgatgtgcccccagcctttgccaaggccaagccctttgatcctgcccggacccccctggtgctggccgcccctcctccagacagccccccagcagaagatgtgtatgatgtgcccccaccagccccagacctgtatgatgtgcccccaggcctgcggcggcccggccctggcaccctgtatgatgtgccccgggagcgggtgctgcccccagaggtggctgatggaggagtggtggacagcggcgtgtatgctgtgcccccacctgctgagcgggaggccccagctgagggcaagaggctgagcgccagcagcacaggcagcaccaggagcagccagagcgccagcagcctggaggtggccggccctggccgggagcccctggagctggaggtggccgtggaggccctggcccggctgcagcagggcgtgtctgccaccgtggcccacctgctggacctggccggcagcgctggggccaccggctcctggaggagccccagcgagccccaggagcccctggtgcaggacctgcaggccgctgtggccgctgtgcagagcgctgtgcatgagctgctggagtttgcccggtctgctgtgggcaatgctgcccacaccagtgaccgggccctgcacgccaagctgagccggcagctgcagaagatggaggatgtgcaccagaccctggtggcccacggccaggccctggatgctggccggggcggcagcggggccaccctggaggacctggaccggctggtggcctgcagcagagctgtgcctgaagatgccaagcagctggccagcttcctgcacggcaatgccagcctgctcttccggaggaccaaggccacagcccctggccctgagggcggcggcaccctgcaccccaaccccacagacaagaccagcagcatccagagccggcccctgcccagcccccccaagttcaccagccaggacagcccagatggccagtatgagaacagcgagggcggctggatggaggactatgactatgtgcacctgcagggcaaggaggagtttgagaagacccagaaggagctgctggagaagggcagcatcacccggcagggcaagagccagctggagctgcagcagctgaagcagtttgagcggctggagcaggaggtgtcccggcccatcgaccatgacctggccaactggaccccagcccagcccctggcccctggccgcactggaggcctgggccccagcgaccggcagctgctgctcttctacctggagcagtgtgaggccaacctgaccaccctgaccaatgctgtggatgccttcttcaccgctgtggccaccaaccagccccccaagatctttgtggcccacagcaagtttgtgatcctgagcgcccacaagctggtgttcatcggggacaccctgagccggcaggccaaggccgcagatgtgcgcagccaggtgacccactacagcaacctgctgtgtgacctgctgcggggcatcgtggccaccaccaaggctgctgccctgcagtaccccagccccagcgctgcccaggacatggtggagcgggtgaaggagctgggccacagcacccagcagttcagaagagtgctgggccagctggccgccgcctag

SEQ ID NO: 18624 - DNA, 2613 bp, synthetic construct
  misc_feature 1..2613: note = Description of Artificial Sequence: Synthetic coding sequence
  source 1..2613: mol_type = other DNA
atgtctgtgcccaacgtgctggccaaggccctgtatgacaacgtggccgagagcccagatgagctgtccttcaggaagggggacatcatgacagtgctggagcaggacacccagggcctggatggctggtggctgtgcagcctgcacggccggcagggcatcgtgcccggcaaccggctgaagatcctggtgggcatgtatgacaagaagccagctggccctggccctggccccccagccaccccagcccagccccagcccggcctgcacgccccagcccccccagccagccagtacacccccatgctgcccaacacctaccagccccagccagattctgtgtacctggtgcccacccccagcaaggcccagcagggcctgtaccaggtgcccggccccagcccccagttccagagccccccagccaagcagaccagcaccttcagcaagcagaccccccaccaccccttccccagccctgccacagacctgtaccaggtgcccccaggccctgggggccctgcccaggacatctaccaggtgccccccagcgctggcatgggccatgacatctaccaggtgcccccatccatggacaccaggtcctgggagggcaccaagcccccagccaaggtggtggtgcccaccagggtgggccagggctacgtgtatgaggccgcccagcctgagcaggatgaatatgacatccccaggcacctgctggcccctggcccccaggacatctatgatgtgccccctgtgcggggcctgctgcccagccagtatggccaggaggtgtatgacaccccacccatggctgtgaagggccccaacggccgggaccccctgctggaggtgtatgatgtgccccccagcgtggagaagggcctgccccccagcaaccaccacgctgtgtatgatgtgcccccatctgtgtccaaggatgtgcctgatggccccctgctgcgggaggagacctatgatgtgcccccagcctttgccaaggccaagccctttgatcctgcccggacccccctggtgctggccgcccctcctccagacagccccccagcagaagatgtgtatgatgtgcccccaccagccccagacctgtatgatgtgcccccaggcctgcggcggcccggccctggcaccctgtatgatgtgccccgggagcgggtgctgcccccagaggtggctgatggaggagtggtggacagcggcgtgtatgctgtgcccccacctgctgagcgggaggccccagctgagggcaagaggctgagcgccagcagcacaggcagcaccaggagcagccagagcgccagcagcctggaggtggccggccctggccgggagcccctggagctggaggtggccgtggaggccctggcccggctgcagcagggcgtgtctgccaccgtggcccacctgctggacctggccggcagcgctggggccaccggctcctggaggagccccagcgagccccaggagcccctggtgcaggacctgcaggccgctgtggccgctgtgcagagcgctgtgcatgagctgctggagtttgcccggtctgctgtgggcaatgctgcccacaccagtgaccgggccctgcacgccaagctgagccggcagctgcagaagatggaggatgtgcaccagaccctggtggcccacggccaggccctggatgctggccggggcggcagcggggccaccctggaggacctggaccggctggtggcctgcagcagagctgtgcctgaagatgccaagcagctggccagcttcctgcacggcaatgccagcctgctcttccggaggaccaaggccacagcccctggccctgagggcggcggcaccctgcaccccaaccccacagacaagaccagcagcatccagagccggcccctgcccagcccccccaagttcaccagccaggacagcccagatggccagtatgagaacagcgagggcggctggatggaggactatgactatgtgcacctgcagggcaaggaggagtttgagaagacccagaaggagctgctggagaagggcagcatcacccggcagggcaagagccagctggagctgcagcagctgaagcagtttgagcggctggagcaggaggtgtcccggcccatcgaccatgacctggccaactggaccccagcccagcccctggcccctggccgcactggaggcctgggccccagcgaccggcagctgctgctcttctacctggagcagtgtgaggccaacctgaccaccctgaccaatgctgtggatgccttcttcaccgctgtggccaccaaccagccccccaagatctttgtggcccacagcaagtttgtgatcctgagcgcccacaagctggtgttcatcggggacaccctgagccggcaggccaaggccgcagatgtgcgcagccaggtgacccactacagcaacctgctgtgtgacctgctgcggggcatcgtggccaccaccaaggctgctgccctgcagtaccccagccccagcgctgcccaggacatggtggagcgggtgaaggagctgggccacagcacccagcagttcagaagagtgctgggccagctggccgccgcctag

SEQ ID NO: 18625 - DNA, 2607 bp, synthetic construct
  misc_feature 1..2607: note = Description of Artificial Sequence: Synthetic coding sequence
  source 1..2607: mol_type = other DNA
atggagaatgtgctggccaaggccctgtatgacaacgtggccgagagcccagatgagctgtccttcaggaagggggacatcatgacagtgctggagcaggacacccagggcctggatggctggtggctgtgcagcctgcacggccggcagggcatcgtgcccggcaaccggctgaagatcctggtgggcatgtatgacaagaagccagctggccctggccctggccccccagccaccccagcccagccccagcccggcctgcacgccccagcccccccagccagccagtacacccccatgctgcccaacacctaccagccccagccagattctgtgtacctggtgcccacccccagcaaggcccagcagggcctgtaccaggtgcccggccccagcccccagttccagagccccccagccaagcagaccagcaccttcagcaagcagaccccccaccaccccttccccagccctgccacagacctgtaccaggtgcccccaggccctgggggccctgcccaggacatctaccaggtgccccccagcgctggcatgggccatgacatctaccaggtgcccccatccatggacaccaggtcctgggagggcaccaagcccccagccaaggtggtggtgcccaccagggtgggccagggctacgtgtatgaggccgcccagcctgagcaggatgaatatgacatccccaggcacctgctggcccctggcccccaggacatctatgatgtgccccctgtgcggggcctgctgcccagccagtatggccaggaggtgtatgacaccccacccatggctgtgaagggccccaacggccgggaccccctgctggaggtgtatgatgtgccccccagcgtggagaagggcctgccccccagcaaccaccacgctgtgtatgatgtgcccccatctgtgtccaaggatgtgcctgatggccccctgctgcgggaggagacctatgatgtgcccccagcctttgccaaggccaagccctttgatcctgcccggacccccctggtgctggccgcccctcctccagacagccccccagcagaagatgtgtatgatgtgcccccaccagccccagacctgtatgatgtgcccccaggcctgcggcggcccggccctggcaccctgtatgatgtgccccgggagcgggtgctgcccccagaggtggctgatggaggagtggtggacagcggcgtgtatgctgtgcccccacctgctgagcgggaggccccagctgagggcaagaggctgagcgccagcagcacaggcagcaccaggagcagccagagcgccagcagcctggaggtggccggccctggccgggagcccctggagctggaggtggccgtggaggccctggcccggctgcagcagggcgtgtctgccaccgtggcccacctgctggacctggccggcagcgctggggccaccggctcctggaggagccccagcgagccccaggagcccctggtgcaggacctgcaggccgctgtggccgctgtgcagagcgctgtgcatgagctgctggagtttgcccggtctgctgtgggcaatgctgcccacaccagtgaccgggccctgcacgccaagctgagccggcagctgcagaagatggaggatgtgcaccagaccctggtggcccacggccaggccctggatgctggccggggcggcagcggggccaccctggaggacctggaccggctggtggcctgcagcagagctgtgcctgaagatgccaagcagctggccagcttcctgcacggcaatgccagcctgctcttccggaggaccaaggccacagcccctggccctgagggcggcggcaccctgcaccccaaccccacagacaagaccagcagcatccagagccggcccctgcccagcccccccaagttcaccagccaggacagcccagatggccagtatgagaacagcgagggcggctggatggaggactatgactatgtgcacctgcagggcaaggaggagtttgagaagacccagaaggagctgctggagaagggcagcatcacccggcagggcaagagccagctggagctgcagcagctgaagcagtttgagcggctggagcaggaggtgtcccggcccatcgaccatgacctggccaactggaccccagcccagcccctggcccctggccgcactggaggcctgggccccagcgaccggcagctgctgctcttctacctggagcagtgtgaggccaacctgaccaccctgaccaatgctgtggatgccttcttcaccgctgtggccaccaaccagccccccaagatctttgtggcccacagcaagtttgtgatcctgagcgcccacaagctggtgttcatcggggacaccctgagccggcaggccaaggccgcagatgtgcgcagccaggtgacccactacagcaacctgctgtgtgacctgctgcggggcatcgtggccaccaccaaggctgctgccctgcagtaccccagccccagcgctgcccaggacatggtggagcgggtgaaggagctgggccacagcacccagcagttcagaagagtgctgggccagctggccgccgcctag

SEQ ID NO: 18626 - DNA, 2526 bp, synthetic construct
  misc_feature 1..2526: note = Description of Artificial Sequence: Synthetic coding sequence
  source 1..2526: mol_type = other DNA
atgacagtgctggagcaggacacccagggcctggatggctggtggctgtgcagcctgcacggccggcagggcatcgtgcccggcaaccggctgaagatcctggtgggcatgtatgacaagaagccagctggccctggccctggccccccagccaccccagcccagccccagcccggcctgcacgccccagcccccccagccagccagtacacccccatgctgcccaacacctaccagccccagcctgacagcgtgtacctggtgcccacccccagcaaggcccagcagggcctgtaccaggtgcccggccccagcccccagttccagagccccccagccaagcagaccagcaccttcagcaagcagaccccccaccaccccttccccagccctgccacagacctgtaccaggtgcccccaggccctgggggccctgcccaggacatctaccaggtgcccccatctgctggcatgggccatgacatctaccaggtgccccccagcatggacaccaggtcctgggagggcaccaagcccccagccaaggtggtggtgcccaccagggtgggccagggctacgtgtatgaagctgcccagcctgagcaggatgaatatgacatccccaggcacctgctggcccctggcccccaggacatctatgatgtgccccctgtgcggggcctgctgcccagccagtatggccaggaggtgtatgacaccccacccatggctgtgaagggccccaacggccgggaccccctgctggaggtgtatgatgtgcccccatctgtggagaagggcctgccccccagcaaccaccacgctgtgtatgatgtgccccccagcgtgtccaaggatgtgcctgatggccccctgctgcgggaggagacctatgatgtgcccccagcctttgccaaggccaagccctttgatcctgcccggacccccctggtgctggccgcccctcctccagacagccccccagcagaagatgtgtatgatgtgcccccaccagccccagacctgtatgatgtgcccccaggcctgcggcggcccggccctggcaccctgtatgatgtgccccgggagcgggtgctgcccccagaggtggctgatggcggcgtggtggacagcggcgtgtatgctgtgcccccacctgctgagcgggaggccccagctgagggcaagaggctgagcgccagcagcacaggcagcaccaggagcagccagagcgccagcagcctggaggtggccggccctggccgggagcccctggagctggaggtggccgtggaggccctggcccggctgcagcagggcgtgtctgccaccgtggcccacctgctggacctggccggcagcgctggggccaccggctcctggaggagccccagcgagccccaggagcccctggtgcaggacctgcaggccgctgtggccgctgtgcagagcgctgtgcatgagctgctggagtttgcccggtctgctgtgggcaatgctgcccacaccagtgaccgggccctgcacgccaagctgagccggcagctgcagaagatggaggatgtgcaccagaccctggtggcccacggccaggccctggatgctggccggggcggcagcggggccaccctggaggacctggaccggctggtggcctgcagcagagctgtgcctgaagatgccaagcagctggccagcttcctgcatggaaatgccagcctgctcttccggaggaccaaggccacagcccctggccctgagggcggcggcaccctgcaccccaaccccacagacaagaccagcagcatccagagccggcccctgcccagcccccccaagttcaccagccaggacagcccagatggccagtatgaaaattctgagggcggctggatggaggactatgactatgtgcacctgcagggcaaggaggagtttgagaagacccagaaggagctgctggagaagggcagcatcacccggcagggcaagagccagctggagctgcagcagctgaagcagtttgagcggctggagcaggaggtgtcccggcccatcgaccatgacctggccaactggaccccagcccagcccctggcccctggccgcactggaggcctgggccccagcgaccggcagctgctgctcttctacctggagcagtgtgaggccaacctgaccaccctgaccaatgctgtggatgccttcttcaccgctgtggccaccaaccagccccccaagatctttgtggcccacagcaagtttgtgatcctgagcgcccacaagctggtgttcatcggggacaccctgagccggcaggccaaggctgctgatgtgcgcagccaggtgacccactacagcaacctgctgtgtgacctgctgcggggcatcgtggccaccaccaaggccgccgccctgcagtaccccagccccagcgctgcccaggacatggtggagcgggtgaaggagctgggccacagcacccagcagttccggcgggtgctgggccagctggccgccgcctag

SEQ ID NO: 18627 - DNA, 741 bp, synthetic construct
  misc_feature 1..741: note = Description of Artificial Sequence: Synthetic coding sequence
  source 1..741: mol_type = other DNA
atgcctgtgcagccccccagcaaggacacagaggagatggaggccgagggggacagcgctgctgagatgaatggagaggaggaggagagcgaggaggagaggagcggcagccagacagaaagtgaggaggagagcagcgagatggatgatgaagattatgaaagaagaagaagtgaatgtgtgtctgagatgctggacctggagaagcagttcagcgagctgaaggagaagctgttccgggagcggctgagccagctgcggctgcggctggaggaggtgggcgctgagcgggcccctgagtacacagagcccctgggcggcctgcagaggagcctgaagatccgcatccaggtggccggcatctacaagggcttctgcctggatgtgatccggaacaagtatgaatgtgagctgcagggcgccaagcagcacctggagagcgagaagctgctgctgtatgacaccctgcagggcgagctgcaggagcgcatccagaggctggaggaggaccggcagagcctggacctgagcagcgagtggtgggatgacaagctgcacgcccggggcagcagccgctcctgggacagcctgccccccagcaagaggaagaaggcccccctggtgtctggcccctacatcgtgtacatgctgcaggagattgacatcctggaggactggacagccatcaagaaggcccgggctgctgtgagcccccagaagaggaagagtgatggcccctag

SEQ ID NO: 18628 - DNA, 873 bp, synthetic construct
  misc_feature 1..873: note = Description of Artificial Sequence: Synthetic coding sequence
  source 1..873: mol_type = other DNA
atgcctgtgcagccccccagcaaggacacagaggagatggaggccgagggggacagcgctgctgagatgaatggagaggaggaggagagcgaggaggagaggagcggcagccagacagaaagtgaggaggagagcagcgagatggatgatgaagattatgaaagaagaagaagtgaatgtgtgtctgagatgctggacctggagaagcagttcagcgagctgaaggagaagctgttccgggagcggctgagccagctgcggctgcggctggaggaggtgggcgctgagcgggcccctgagtacacagagcccctgggcggcctgcagaggagcctgaagatccgcatccaggtggccggcatctacaagggcttctgcctggatgtgatccggaacaagtatgaatgtgagctgcagggcgccaagcagcacctggagagcgagaagctgctgctgtatgacaccctgcagggcgagctgcaggagcgcatccagaggctggaggaggaccggcagagcctggacctgagcagcgagtggtgggatgacaagctgcacgcccggggcagcagccgctcctgggacagcctgccccccagcaagaggaagaaggcccccctggtgtctggcccctacatcgtgtacatgctgcaggagattgacatcctggaggactggacagccatcaagaaggcccgggctgctgtgagcccccagaagaggaagagtgatgacaggaggacccaccggcccctgcgggtgtgcccagcccggctgctgtggtgctgctgggccctgcccctgcacctggccctggcctggaccccacccctgcccagcagcaggcctgcccagctgtggccctggagctag

SEQ ID NO: 18629 - DNA, 735 bp, synthetic construct
  misc_feature 1..735: note = Description of Artificial Sequence: Synthetic coding sequence
  source 1..735: mol_type = other DNA
atgcctgtgcagccccccagcaaggacacagaggagatggaggccgagggggacagcgctgctgagatgaatggagaggaggaggagagcgaggaggagaggagcggcagccagacagaaagtgaggaggagagcagcgagatggatgatgaagattatgaaagaagaagaagtgaatgtgtgtctgagatgctggacctggagaagcagttcagcgagctgaaggagaagctgttccgggagcggctgagccagctgcggctgcggctggaggaggtgggcgctgagcgggcccctgagtacacagagcccctgggcggcctgcagaggagcctgaagatccgcatccaggtggccggcatctacaagggcttctgcctggatgtgatccggaacaagtatgaatgtgagctgcagggcgccaagcagcacctggagagcgagaagctgctgctgtatgacaccctgcagggcgagctgcaggagcgcatccagaggctggaggaggaccggcagagcctggacctgagcagcgagtggtgggatgacaagctgcacgcccggggcagcagccgctcctgggacagcctgccccccagcaagaggaagaaggcccccctggtgtctggcccctacatcgtgtacatgctgcaggagattgacatcctggaggactggacagccatcaagaaggcccgggctgctgtgagcccccagaagaggaagagtgactag

SEQ ID NO: 18630 - DNA, 1494 bp, synthetic construct
  misc_feature 1..1494: note = Description of Artificial Sequence: Synthetic coding sequence
  source 1..1494: mol_type = other DNA
atggccgagatgggcagcaaaggagtgacagctgggaagatcgccagcaatgtgcagaagaagctgacccgggcccaggagaaggtgctgcagaagctgggcaaggcagatgagaccaaggatgagcagtttgagcagtgtgtgcagaacttcaacaagcagctgacagagggcacccggctgcagaaggacctgcggacctacctggcctctgtgaaggccatgcatgaggccagcaagaagctgaatgaatgtctgcaggaggtgtatgagccagactggccaggaagagatgaggccaacaagattgctgaaaataatgacctgctgtggatggactaccaccagaagctggtggaccaggccctgctgaccatggacacctacctgggccagttcccagacatcaagagccgcatcgccaagaggggcaggaagctggtggactatgacagcgcccggcaccactatgagagcctgcagacagccaagaagaaggatgaggccaagatcgccaaggccgaggaggagctgatcaaggcccagaaggtgtttgaggagatgaatgtggacctgcaggaggagctgcccagcctgtggaacagccgggtgggcttctacgtgaacaccttccagagcattgctggcctggaggagaacttccacaaggagatgagcaagctgaaccagaacctgaatgatgtgctggtgggcctggagaagcagcacggcagcaacaccttcaccgtgaaggcccagcccaggaagaagagcaagctgttcagccggctgcggaggaagaagaacagcgacaatgccccagccaagggcaacaagagccccagccccccagatggcagccctgctgccaccccagagatccgggtgaaccacgagcctgagcctgctggaggagccacccctggggccaccctgcccaagagccccagccagctgaggaaaggacctcctgtgcccccaccacccaagcacacccccagcaaggaggtgaagcaggagcagatcctgagcctgtttgaggacacctttgtgcctgagatctctgtgaccacccccagccagcctgctgaggccagcgaggtggccggcggcacccagcctgctgctggggcccaggagcctggagaaacagctgccagcgaggccgccagcagcagcctgcctgctgtggtggtggagaccttccctgccaccgtgaatggaacagtggagggcggcagcggggccggccgcctggacctgcccccaggcttcatgttcaaggtgcaggcccagcacgactacacagccacagacacagatgagctgcagctgaaggctggagatgtggtgctggtgatccccttccagaaccctgaggagcaggatgagggctggctgatgggcgtgaaggagagtgactggaaccagcacaaggagctggagaagtgccggggcgtcttccctgagaacttcacagagcgggtgccctag

SEQ ID NO: 18631 - DNA, 1782 bp, synthetic construct
  misc_feature 1..1782: note = Description of Artificial Sequence: Synthetic coding sequence
  source 1..1782: mol_type = other DNA
atggccgagatgggcagcaaaggagtgacagctgggaagatcgccagcaatgtgcagaagaagctgacccgggcccaggagaaggtgctgcagaagctgggcaaggcagatgagaccaaggatgagcagtttgagcagtgtgtgcagaacttcaacaagcagctgacagagggcacccggctgcagaaggacctgcggacctacctggcctctgtgaaggccatgcatgaggccagcaagaagctgaatgaatgtctgcaggaggtgtatgagccagactggccaggaagagatgaggccaacaagattgctgaaaataatgacctgctgtggatggactaccaccagaagctggtggaccaggccctgctgaccatggacacctacctgggccagttcccagacatcaagagccgcatcgccaagaggggcaggaagctggtggactatgacagcgcccggcaccactatgagagcctgcagacagccaagaagaaggatgaggccaagatcgccaagcctgtgtccctgctggagaaggccgccccccagtggtgccagggcaagctgcaggcccacctggtggcccagaccaacctgctgaggaaccaggccgaggaggagctgatcaaggcccagaaggtgtttgaggagatgaatgtggacctgcaggaggagctgcccagcctgtggaacagccgggtgggcttctacgtgaacaccttccagagcattgctggcctggaggagaacttccacaaggagatgagcaagctgaaccagaacctgaatgatgtgctggtgggcctggagaagcagcacggcagcaacaccttcaccgtgaaggcccagcccagcgacaatgccccagccaagggcaacaagagccccagccccccagatggcagccctgctgccaccccagagatccgggtgaaccacgagcctgagcctgctggaggagccacccctggggccaccctgcccaagagccccagccagctgaggaaaggacctcctgtgcccccaccacccaagcacacccccagcaaggaggtgaagcaggagcagatcctgagcctgtttgaggacacctttgtgcctgagatctctgtgaccacccccagccagtttgaggcccctggccccttcagcgagcaggccagcctgctggacctggactttgaccccctgccccctgtgaccagccctgtgaaggcccccaccccatctggccagagcatcccctgggacctgtgggagcccacagagagccctgctggcagcctgcccagcggggagcccagcgctgctgagggcacctttgctgtgtcctggcccagccagacagctgagcccggccctgcccagcctgctgaggccagcgaggtggccggcggcacccagcctgctgctggggcccaggagcctggagaaacagctgccagcgaggccgccagcagcagcctgcctgctgtggtggtggagaccttccctgccaccgtgaatggaacagtggagggcggcagcggggccggccgcctggacctgcccccaggcttcatgttcaaggtgcaggcccagcacgactacacagccacagacacagatgagctgcagctgaaggctggagatgtggtgctggtgatccccttccagaaccctgaggagcaggatgagggctggctgatgggcgtgaaggagagtgactggaaccagcacaaggagctggagaagtgccggggcgtcttccctgagaacttcacagagcgggtgccctag

SEQ ID NO: 18632 - DNA, 1557 bp, synthetic construct
  misc_feature 1..1557: note = Description of Artificial Sequence: Synthetic coding sequence
  source 1..1557: mol_type = other DNA
atggccgagatgggcagcaaaggagtgacagctgggaagatcgccagcaatgtgcagaagaagctgacccgggcccaggagaaggtgctgcagaagctgggcaaggcagatgagaccaaggatgagcagtttgagcagtgtgtgcagaacttcaacaagcagctgacagagggcacccggctgcagaaggacctgcggacctacctggcctctgtgaaggccatgcatgaggccagcaagaagctgaatgaatgtctgcaggaggtgtatgagccagactggccaggaagagatgaggccaacaagattgctgaaaataatgacctgctgtggatggactaccaccagaagctggtggaccaggccctgctgaccatggacacctacctgggccagttcccagacatcaagagccgcatcgccaagaggggcaggaagctggtggactatgacagcgcccggcaccactatgagagcctgcagacagccaagaagaaggatgaggccaagatcgccaaggccgaggaggagctgatcaaggcccagaaggtgtttgaggagatgaatgtggacctgcaggaggagctgcccagcctgtggaacagccgggtgggcttctacgtgaacaccttccagagcattgctggcctggaggagaacttccacaaggagatgagcaagctgaaccagaacctgaatgatgtgctggtgggcctggagaagcagcacggcagcaacaccttcaccgtgaaggcccagcccagcgacaatgccccagccaagggcaacaagagccccagccccccagatggcagccctgctgccaccccagagatccgggtgaaccacgagcctgagcctgctgggggcgccacccctggggccaccctgcccaagagccccagccagctgaggaagggcccccctgtgcccccaccacccaagcacacccccagcaaggaggtgaagcaggagcagatcctgagcctgtttgaggacacctttgtgcctgagatctctgtgaccacccccagccagcccacagagagccctgctggcagcctgcccagcggggagcccagcgctgctgagggcacctttgctgtgtcctggcccagccagacagctgagcccggccctgcccagcctgctgaggccagcgaggtggccggcggcacccagcctgctgctggggcccaggagcccggggagacagctgccagcgaggccgccagcagcagcctgcctgctgtggtggtggagaccttccctgccaccgtgaatggcaccgtggagggcggcagcggggccggccgcctggacctgcccccaggcttcatgttcaaggtgcaggcccagcacgactacacagccacagacacagatgagctgcagctgaaggctggagatgtggtgctggtgatccccttccagaaccctgaggagcaggatgagggctggctgatgggcgtgaaggagagtgactggaaccagcacaaggagctggagaagtgccggggcgtcttccctgagaacttcacagagcgggtgccctag

SEQ ID NO: 18633 - DNA, 1230 bp, synthetic construct
  misc_feature 1..1230: note = Description of Artificial Sequence: Synthetic coding sequence
  source 1..1230: mol_type = other DNA
atggccgagatgggcagcaaaggagtgacagctgggaagatcgccagcaatgtgcagaagaagctgacccgggcccaggagaaggtgctgcagaagctgggcaaggcagatgagaccaaggatgagcagtttgagcagtgtgtgcagaacttcaacaagcagctgacagagggcacccggctgcagaaggacctgcggacctacctggcctctgtgaaggccatgcatgaggccagcaagaagctgaatgaatgtctgcaggaggtgtatgagccagactggccaggaagagatgaggccaacaagattgctgaaaataatgacctgctgtggatggactaccaccagaagctggtggaccaggccctgctgaccatggacacctacctgggccagttcccagacatcaagagccgcatcgccaagaggggcaggaagctggtggactatgacagcgcccggcaccactatgagagcctgcagacagccaagaagaaggatgaggccaagatcgccaaggccgaggaggagctgatcaaggcccagaaggtgtttgaggagatgaatgtggacctgcaggaggagctgcccagcctgtggaacagccgggtgggcttctacgtgaacaccttccagagcattgctggcctggaggagaacttccacaaggagatgagcaagctgaaccagaacctgaatgatgtgctggtgggcctggagaagcagcacggcagcaacaccttcaccgtgaaggcccagcccagcgacaatgccccagccaagggcaacaagagccccagccccccagatggcagccctgctgccaccccagagatccgggtgaaccacgagcctgagcctgctgggggcgccacccctggggccaccctgcccaagagccccagccagagcagcctgcctgctgtggtggtggagaccttccctgccaccgtgaatggaacagtggagggcggcagcggggccggccgcctggacctgcccccaggcttcatgttcaaggtgcaggcccagcacgactacacagccacagacacagatgagctgcagctgaaggctggagatgtggtgctggtgatccccttccagaaccctgaggagcaggatgagggctggctgatgggcgtgaaggagagtgactggaaccagcacaaggagctggagaagtgccggggcgtcttccctgagaacttcacagagcgggtgccctag

SEQ ID NO: 18634 - DNA, 1521 bp, synthetic construct
  misc_feature 1..1521: note = Description of Artificial Sequence: Synthetic coding sequence
  source 1..1521: mol_type = other DNA
atggccgagatgggcagcaaaggagtgacagctgggaagatcgccagcaatgtgcagaagaagctgacccgggcccaggagaaggtgctgcagaagctgggcaaggcagatgagaccaaggatgagcagtttgagcagtgtgtgcagaacttcaacaagcagctgacagagggcacccggctgcagaaggacctgcggacctacctggcctctgtgaaggccatgcatgaggccagcaagaagctgaatgaatgtctgcaggaggtgtatgagccagactggccaggaagagatgaggccaacaagattgctgaaaataatgacctgctgtggatggactaccaccagaagctggtggaccaggccctgctgaccatggacacctacctgggccagttcccagacatcaagagccgcatcgccaagaggggcaggaagctggtggactatgacagcgcccggcaccactatgagagcctgcagacagccaagaagaaggatgaggccaagatcgccaagcctgtgtccctgctggagaaggccgccccccagtggtgccagggcaagctgcaggcccacctggtggcccagaccaacctgctgaggaaccaggccgaggaggagctgatcaaggcccagaaggtgtttgaggagatgaatgtggacctgcaggaggagctgcccagcctgtggaacagccgggtgggcttctacgtgaacaccttccagagcattgctggcctggaggagaacttccacaaggagatgagcaagctgaaccagaacctgaatgatgtgctggtgggcctggagaagcagcacggcagcaacaccttcaccgtgaaggcccagcccagcgacaatgccccagccaagggcaacaagagccccagccccccagatggcagccctgctgccaccccagagatccgggtgaaccacgagcctgagcctgctggaggagccacccctggggccaccctgcccaagagccccagccagcccacagagagccctgctggcagcctgcccagcggggagcccagcgctgctgagggcacctttgctgtgtcctggcccagccagacagctgagcccggccctgcccagcctgctgaggccagcgaggtggccggcggcacccagcctgctgctggggcccaggagcccggggagacagctgccagcgaggccgccagcagcagcctgcctgctgtggtggtggagaccttccctgccaccgtgaatggcaccgtggagggcggcagcggggccggccgcctggacctgcccccaggcttcatgttcaaggtgcaggcccagcacgactacacagccacagacacagatgagctgcagctgaaggctggagatgtggtgctggtgatccccttccagaaccctgaggagcaggatgagggctggctgatgggcgtgaaggagagtgactggaaccagcacaaggagctggagaagtgccggggcgtcttccctgagaacttcacagagcgggtgccctag

SEQ ID NO: 18635 - DNA, 1365 bp, synthetic construct
  misc_feature 1..1365: note = Description of Artificial Sequence: Synthetic coding sequence
  source 1..1365: mol_type = other DNA
atggccgagatgggcagcaaaggagtgacagctgggaagatcgccagcaatgtgcagaagaagctgacccgggcccaggagaaggtgctgcagaagctgggcaaggcagatgagaccaaggatgagcagtttgagcagtgtgtgcagaacttcaacaagcagctgacagagggcacccggctgcagaaggacctgcggacctacctggcctctgtgaaggccatgcatgaggccagcaagaagctgaatgaatgtctgcaggaggtgtatgagccagactggccaggaagagatgaggccaacaagattgctgaaaataatgacctgctgtggatggactaccaccagaagctggtggaccaggccctgctgaccatggacacctacctgggccagttcccagacatcaagagccgcatcgccaagaggggcaggaagctggtggactatgacagcgcccggcaccactatgagagcctgcagacagccaagaagaaggatgaggccaagatcgccaaggccgaggaggagctgatcaaggcccagaaggtgtttgaggagatgaatgtggacctgcaggaggagctgcccagcctgtggaacagccgggtgggcttctacgtgaacaccttccagagcattgctggcctggaggagaacttccacaaggagatgagcaagctgaaccagaacctgaatgatgtgctggtgggcctggagaagcagcacggcagcaacaccttcaccgtgaaggcccagcccaggaagaagagcaagctgttcagccggctgcggaggaagaagaacagcgacaatgccccagccaagggcaacaagagccccagccccccagatggcagccctgctgccaccccagagatccgggtgaaccacgagcctgagcctgctggaggagccacccctggggccaccctgcccaagagccccagccagcctgctgaggccagcgaggtggccggcggcacccagcctgctgctggggcccaggagcccggggagacagctgccagcgaggccgccagcagcagcctgcctgctgtggtggtggagaccttccctgccaccgtgaatggcaccgtggagggcggcagcggggccggccgcctggacctgcccccaggcttcatgttcaaggtgcaggcccagcacgactacacagccacagacacagatgagctgcagctgaaggctggagatgtggtgctggtgatccccttccagaaccctgaggagcaggatgagggctggctgatgggcgtgaaggagagtgactggaaccagcacaaggagctggagaagtgccggggcgtcttccctgagaacttcacagagcgggtgccctag

SEQ ID NO: 18636 - DNA, 1653 bp, synthetic construct
  misc_feature 1..1653: note = Description of Artificial Sequence: Synthetic coding sequence
  source 1..1653: mol_type = other DNA
atggccgagatgggcagcaaaggagtgacagctgggaagatcgccagcaatgtgcagaagaagctgacccgggcccaggagaaggtgctgcagaagctgggcaaggcagatgagaccaaggatgagcagtttgagcagtgtgtgcagaacttcaacaagcagctgacagagggcacccggctgcagaaggacctgcggacctacctggcctctgtgaaggccatgcatgaggccagcaagaagctgaatgaatgtctgcaggaggtgtatgagccagactggccaggaagagatgaggccaacaagattgctgaaaataatgacctgctgtggatggactaccaccagaagctggtggaccaggccctgctgaccatggacacctacctgggccagttcccagacatcaagagccgcatcgccaagaggggcaggaagctggtggactatgacagcgcccggcaccactatgagagcctgcagacagccaagaagaaggatgaggccaagatcgccaagcctgtgtccctgctggagaaggccgccccccagtggtgccagggcaagctgcaggcccacctggtggcccagaccaacctgctgaggaaccaggccgaggaggagctgatcaaggcccagaaggtgtttgaggagatgaatgtggacctgcaggaggagctgcccagcctgtggaacagccgggtgggcttctacgtgaacaccttccagagcattgctggcctggaggagaacttccacaaggagatgagcaagctgaaccagaacctgaatgatgtgctggtgggcctggagaagcagcacggcagcaacaccttcaccgtgaaggcccagcccagcgacaatgccccagccaagggcaacaagagccccagccccccagatggcagccctgctgccaccccagagatccgggtgaaccacgagcctgagcctgctggaggagccacccctggggccaccctgcccaagagccccagccagtttgaggcccctggccccttcagcgagcaggccagcctgctggacctggactttgaccccctgccccctgtgaccagccctgtgaaggcccccacccccagcggccagagcatcccctgggacctgtgggagcccacagagagccctgctggcagcctgcccagcggggagcccagcgctgctgagggcacctttgctgtgtcctggcccagccagacagctgagcccggccctgcccagcctgctgaggccagcgaggtggccggcggcacccagcctgctgctggggcccaggagcccggggagacagctgccagcgaggccgccagcagcagcctgcctgctgtggtggtggagaccttccctgccaccgtgaatggcaccgtggagggcggcagcggggccggccgcctggacctgcccccaggcttcatgttcaaggtgcaggcccagcacgactacacagccacagacacagatgagctgcagctgaaggctggagatgtggtgctggtgatccccttccagaaccctgaggagcaggatgagggctggctgatgggcgtgaaggagagtgactggaaccagcacaaggagctggagaagtgccggggcgtcttccctgagaacttcacagagcgggtgccctag

SEQ ID NO: 18637 - DNA, 1449 bp, synthetic construct
  misc_feature 1..1449: note = Description of Artificial Sequence: Synthetic coding sequence
  source 1..1449: mol_type = other DNA
atggccgagatgggcagcaaaggagtgacagctgggaagatcgccagcaatgtgcagaagaagctgacccgggcccaggagaaggtgctgcagaagctgggcaaggcagatgagaccaaggatgagcagtttgagcagtgtgtgcagaacttcaacaagcagctgacagagggcacccggctgcagaaggacctgcggacctacctggcctctgtgaaggccatgcatgaggccagcaagaagctgaatgaatgtctgcaggaggtgtatgagccagactggccaggaagagatgaggccaacaagattgctgaaaataatgacctgctgtggatggactaccaccagaagctggtggaccaggccctgctgaccatggacacctacctgggccagttcccagacatcaagagccgcatcgccaagaggggcaggaagctggtggactatgacagcgcccggcaccactatgagagcctgcagacagccaagaagaaggatgaggccaagatcgccaaggccgaggaggagctgatcaaggcccagaaggtgtttgaggagatgaatgtggacctgcaggaggagctgcccagcctgtggaacagccgggtgggcttctacgtgaacaccttccagagcattgctggcctggaggagaacttccacaaggagatgagcaagctgaaccagaacctgaatgatgtgctggtgggcctggagaagcagcacggcagcaacaccttcaccgtgaaggcccagcccagcgacaatgccccagccaagggcaacaagagccccagccccccagatggcagccctgctgccaccccagagatccgggtgaaccacgagcctgagcctgctgggggcgccacccctggggccaccctgcccaagagccccagccagctgaggaagggcccccctgtgcccccaccacccaagcacacccccagcaaggaggtgaagcaggagcagatcctgagcctgtttgaggacacctttgtgcctgagatctctgtgaccacccccagccagcctgctgaggccagcgaggtggccggcggcacccagcctgctgctggggcccaggagcccggggagacagctgccagcgaggccgccagcagcagcctgcctgctgtggtggtggagaccttccctgccaccgtgaatggcaccgtggagggcggcagcggggccggccgcctggacctgcccccaggcttcatgttcaaggtgcaggcccagcacgactacacagccacagacacagatgagctgcagctgaaggctggagatgtggtgctggtgatccccttccagaaccctgaggagcaggatgagggctggctgatgggcgtgaaggagagtgactggaaccagcacaaggagctggagaagtgccggggcgtcttccctgagaacttcacagagcgggtgccctag

SEQ ID NO: 18638 - DNA, 1428 bp, synthetic construct
  misc_feature 1..1428: note = Description of Artificial Sequence: Synthetic coding sequence
  source 1..1428: mol_type = other DNA
atggccgagatgggcagcaaaggagtgacagctgggaagatcgccagcaatgtgcagaagaagctgacccgggcccaggagaaggtgctgcagaagctgggcaaggcagatgagaccaaggatgagcagtttgagcagtgtgtgcagaacttcaacaagcagctgacagagggcacccggctgcagaaggacctgcggacctacctggcctctgtgaaggccatgcatgaggccagcaagaagctgaatgaatgtctgcaggaggtgtatgagccagactggccaggaagagatgaggccaacaagattgctgaaaataatgacctgctgtggatggactaccaccagaagctggtggaccaggccctgctgaccatggacacctacctgggccagttcccagacatcaagagccgcatcgccaagaggggcaggaagctggtggactatgacagcgcccggcaccactatgagagcctgcagacagccaagaagaaggatgaggccaagatcgccaaggccgaggaggagctgatcaaggcccagaaggtgtttgaggagatgaatgtggacctgcaggaggagctgcccagcctgtggaacagccgggtgggcttctacgtgaacaccttccagagcattgctggcctggaggagaacttccacaaggagatgagcaagctgaaccagaacctgaatgatgtgctggtgggcctggagaagcagcacggcagcaacaccttcaccgtgaaggcccagcccagcgacaatgccccagccaagggcaacaagagccccagccccccagatggcagccctgctgccaccccagagatccgggtgaaccacgagcctgagcctgctgggggcgccacccctggggccaccctgcccaagagccccagccagcccacagagagccctgctggcagcctgcccagcggggagcccagcgctgctgagggcacctttgctgtgtcctggcccagccagacagctgagcccggccctgcccagcctgctgaggccagcgaggtggccggcggcacccagcctgctgctggggcccaggagcctggagaaacagctgccagcgaggccgccagcagcagcctgcctgctgtggtggtggagaccttccctgccaccgtgaatggaacagtggagggcggcagcggggccggccgcctggacctgcccccaggcttcatgttcaaggtgcaggcccagcacgactacacagccacagacacagatgagctgcagctgaaggctggagatgtggtgctggtgatccccttccagaaccctgaggagcaggatgagggctggctgatgggcgtgaaggagagtgactggaaccagcacaaggagctggagaagtgccggggcgtcttccctgagaacttcacagagcgggtgccctag

SEQ ID NO: 18639 - DNA, 1320 bp, synthetic construct
  misc_feature 1..1320: note = Description of Artificial Sequence: Synthetic coding sequence
  source 1..1320: mol_type = other DNA
atggccgagatgggcagcaaaggagtgacagctgggaagatcgccagcaatgtgcagaagaagctgacccgggcccaggagaaggtgctgcagaagctgggcaaggcagatgagaccaaggatgagcagtttgagcagtgtgtgcagaacttcaacaagcagctgacagagggcacccggctgcagaaggacctgcggacctacctggcctctgtgaaggccatgcatgaggccagcaagaagctgaatgaatgtctgcaggaggtgtatgagccagactggccaggaagagatgaggccaacaagattgctgaaaataatgacctgctgtggatggactaccaccagaagctggtggaccaggccctgctgaccatggacacctacctgggccagttcccagacatcaagagccgcatcgccaagaggggcaggaagctggtggactatgacagcgcccggcaccactatgagagcctgcagacagccaagaagaaggatgaggccaagatcgccaaggccgaggaggagctgatcaaggcccagaaggtgtttgaggagatgaatgtggacctgcaggaggagctgcccagcctgtggaacagccgggtgggcttctacgtgaacaccttccagagcattgctggcctggaggagaacttccacaaggagatgagcaagctgaaccagaacctgaatgatgtgctggtgggcctggagaagcagcacggcagcaacaccttcaccgtgaaggcccagcccagcgacaatgccccagccaagggcaacaagagccccagccccccagatggcagccctgctgccaccccagagatccgggtgaaccacgagcctgagcctgctgggggcgccacccctggggccaccctgcccaagagccccagccagcctgctgaggccagcgaggtggccggcggcacccagcctgctgctggggcccaggagcctggagaaacagctgccagcgaggccgccagcagcagcctgcctgctgtggtggtggagaccttccctgccaccgtgaatggaacagtggagggcggcagcggggccggccgcctggacctgcccccaggcttcatgttcaaggtgcaggcccagcacgactacacagccacagacacagatgagctgcagctgaaggctggagatgtggtgctggtgatccccttccagaaccctgaggagcaggatgagggctggctgatgggcgtgaaggagagtgactggaaccagcacaaggagctggagaagtgccggggcgtcttccctgagaacttcacagagcgggtgccctag

SEQ ID NO: 18640 - DNA, 1956 bp, synthetic construct
  misc_feature 1..1956: note = Description of Artificial Sequence: Synthetic coding sequence
  source 1..1956: mol_type = other DNA
atgggcaagaagcacaagaagcacaagagtgacaagcacctgtatgaggagtatgtggagaagcccctgaagctggtgctgaaggtgggcggcaatgaggtgacagagctgagcacaggcagcagcggccatgacagcagcctgtttgaggacaagaatgaccatgacaagcacaaggacaggaagaggaagaagaggaagaagggggagaagcagatccctggagaggagaagggcaggaagagaagaagagtgaaggaggacaagaagaagagggaccgggacagagtggagaatgaagctgagaaggacctgcagtgccacgcccctgtgcggctggacctgcccccagagaagcccctgaccagcagcctggccaagcaggaggaggtggagcagacccccctgcaggaggccctgaaccagctgatgaggcagctgcagaggaaggaccccagcgccttcttctccttccctgtgacagacttcatcgcccctggctacagcatgatcatcaagcaccccatggacttcagcaccatgaaggagaagatcaagaacaatgactaccagagcattgaggagctgaaggacaacttcaagctgatgtgcaccaatgccatgatctacaacaagccagagaccatctactacaaggccgccaagaagctgctgcacagcggcatgaagatcctgagccaggagcgcatccagagcctgaagcagagcattgacttcatggctgacctgcagaagaccaggaagcagaaggatggaacagacaccagccagagcggagaagatggcggctgctggcagcgggagagagaagattctggagatgctgaggcccacgccttcaagagccccagcaaagaaaacaagaagaaggacaaggacatgctggaggacaagttcaagagcaacaacctggagcgggagcaggagcagctggacagaattgtgaaggagagcggcggcaagctgacccggcggctggtgaacagccagtgtgaatttgagaggaggaagccagatggcaccaccaccctgggcctgctgcaccctgtggaccccatcgtgggggagcccggctactgccctgtgcggctgggcatgaccaccggccgcctgcagagcggcgtgaacaccctgcagggcttcaaggaggacaagaggaacaaggtgacccctgtgctgtacctgaactacggcccctacagcagctatgccccccactatgacagcacctttgccaacatcagcaaggatgacagcgacctgatctacagcacctatggagaagattctgacctgcccagcgacttcagcatccacgagttcctggccacctgccaggactacccctacgtgatggctgacagcctgctggatgtgctgaccaagggcggccacagcaggaccctgcaggagatggagatgagcctgcctgaagatgagggccacaccaggaccctggacacagccaaggagatggagatcacagaggtggagcccccaggccgcctggacagcagcacccaggaccggctgattgccctgaaggctgtgaccaactttggagtgcctgtggaggtgtttgacagcgaggaggccgagatcttccagaagaagctggatgagaccacccggctgctgcgggagctgcaggaggcccagaatgaaaggctgagcacccggcccccacccaacatgatctgcctgctgggccccagctaccgggagatgcacctggccgagcaggtgaccaacaacctgaaggagctggcccagcaggtgacccctggggacatcgtgtccacctatggagtgaggaaggccatgggcatcagcatccccagccctgtgatggagaacaactttgtggacctgacagaggacacagaggagcccaagaagacagatgtggctgaatgtggccctgggggcagctag

SEQ ID NO: 18641 - DNA, 1959 bp, synthetic construct
  misc_feature 1..1959: note = Description of Artificial Sequence: Synthetic coding sequence
  source 1..1959: mol_type = other DNA
atgggcaagaagcacaagaagcacaagagtgacaagcacctgtatgaggagtatgtggagaagcccctgaagctggtgctgaaggtgggcggcaatgaggtgacagagctgagcacaggcagcagcggccatgacagcagcctgtttgaggacaagaatgaccatgacaagcacaaggacaggaagaggaagaagaggaagaagggggagaagcagatccctggagaggagaagggcaggaagagaagaagagtgaaggaggacaagaagaagagggaccgggacagagtggagaatgaagctgagaaggacctgcagtgccacgcccctgtgcggctggacctgcccccagagaagcccctgaccagcagcctggccaagcaggaggaggtggagcagacccccctgcaggaggccctgaaccagctgatgaggcagctgcagaggaaggaccccagcgccttcttctccttccctgtgacagacttcatcgcccctggctacagcatgatcatcaagcaccccatggacttcagcaccatgaaggagaagatcaagaacaatgactaccagagcattgaggagctgaaggacaacttcaagctgatgtgcaccaatgccatgatctacaacaagccagagaccatctactacaaggccgccaagaagctgctgcacagcggcatgaagatcctgagccaggagcgcatccagagcctgaagcagagcattgacttcatggctgacctgcagaagaccaggaagcagaaggatggaacagacaccagccagagcggagaagatggcggctgctggcagcgggagagagaagattctggagatgctgaggcccacgccttcaagagccccagcaaagaaaacaagaagaaggacaaggacatgctggaggacaagttcaagagcaacaacctggagcgggagcaggagcagctggacagaattgtgaaggagagcggcggcaagctgacccggcggctggtgaacagccagtgtgaatttgagaggaggaagccagatggcaccaccaccctgggcctgctgcaccctgtggaccccatcgtgggggagcccggctactgccctgtgcggctgggcatgaccaccggccgcctgcagagcggcgtgaacaccctgcagggcttcaaggaggacaagaggaacaaggtgacccctgtgctgtacctgaactacggcccctacagcagctatgccccccactatgacagcacctttgccaacatcagcaaggatgacagcgacctgatctacagcacctatggagaagattctgacctgcccagcgacttcagcatccacgagttcctggccacctgccaggactacccctacgtgatggctgacagcctgctggatgtgctgaccaagggcggccacagcaggaccctgcaggagatggagatgagcctgcctgaagatgagggccacaccaggaccctggacacagccaaggagatggagcagatcacagaggtggagcccccaggccgcctggacagcagcacccaggacaggctcatcgccctgaaggctgtgaccaactttggagtgcctgtggaggtgtttgattctgaggaggccgagatcttccagaagaagctggatgagaccacccggctgctgcgggagctgcaggaggcccagaatgaaaggctgagcacccggcccccacccaacatgatctgcctgctgggccccagctaccgggagatgcacctggccgagcaggtgaccaacaacctgaaggagctggcccagcaggtgacccctggggacatcgtgtccacctacggcgtgaggaaggccatgggcatcagcatccccagccctgtgatggagaacaactttgtggacctgacagaggacacagaggagcccaagaagacagatgtggccgagtgtggccctgggggcagctag

SEQ ID NO: 18642 - DNA, 1959 bp, synthetic construct; identical to SEQ ID NO: 18641
  misc_feature 1..1959: note = Description of Artificial Sequence: Synthetic coding sequence
  source 1..1959: mol_type = other DNA

SEQ ID NO: 18643 - DNA, 1980 bp, synthetic construct
  misc_feature 1..1980: note = Description of Artificial Sequence: Synthetic coding sequence
  source 1..1980: mol_type = other DNA
atggctgctgtgatcctggagagcatcttcctgaagaggagccagcagaagaagaagaccagccccctgaacttcaagaagaggctcttcctgctgactgtgcacaagctgagctactatgaatatgactttgagcggggccggcggggcagcaagaagggcagcattgatgtggagaagatcacctgtgtggagaccgtggtgcctgagaagaaccccccacctgagcggcagatccccaggagaggagaggagagcagcgagatggagcagatcagcatcatcgagcgcttcccctaccccttccaggtggtgtatgatgagggccccctgtatgtgttcagccccacagaggagctgaggaagcgctggatccaccagctgaagaatgtcatccgctacaacagcgacctggtgcagaagtaccacccctgcttctggattgatggccagtacctgtgctgcagccagacagccaagaatgccatgggctgccagatcctggagaacagaaatggcagcctgaagccaggcagcagccacaggaagaccaagaagcccctgccccccaccccagaggaggaccagatcctgaagaagcccctgcccccagagcctgctgctgcccctgtgtccaccagcgagctgaagaaggtggtggccctgtatgactacatgcccatgaatgccaatgacctgcagctgaggaaaggagatgagtacttcatcctggaggagagcaacctgccctggtggagggcccgggacaagaatggccaggagggctacatccccagcaactacgtgacagaagcagaagattccattgagatgtatgagtggtacagcaagcacatgaccaggagccaggccgagcagctgctgaagcaggagggcaaggagggcggcttcatcgtgcgggacagcagcaaggccggcaagtacacagtgtctgtgtttgccaagagcactggagacccccagggcgtcatccgccactacgtggtgtgcagcaccccccagagccagtactacctggccgagaagcacctgttcagcaccatccctgagctgatcaactaccaccagcacaacagcgctggcctcatcagccggctgaagtaccctgtgtcccagcagaacaagaatgcccccagcacagctggcctgggctacggctcctgggagattgaccccaaggacctgaccttcctgaaggagctgggcaccggccagtttggagtggtgaagtatggcaagtggaggggccagtatgatgtggccatcaagatgatcaaggagggctccatgtctgaagatgagttcatcgaggaggccaaggtgatgatgaacctgagccatgagaagctggtgcagctgtatggagtgtgcaccaagcagaggcccatcttcatcatcacagagtacatggccaacggctgcctgctgaactacctgcgggagatgaggcaccgcttccagacccagcagctgctggagatgtgcaaggatgtgtgtgaggccatggagtacctggagagcaagcagttcctgcaccgggacctggccgccaggaactgcctggtgaatgaccagggcgtggtgaaggtgtctgactttggcctgagccgctacgtgctggatgatgagtacaccagctctgtgggcagcaagtttcctgtgcgctggagccccccagaggtgctgatgtacagcaagttcagcagcaagagtgacatctgggcctttggagtgctgatgtgggagatctacagcctgggcaagatgccctatgagcgcttcaccaacagcgagacagctgagcacatcgcccagggcctgcggctgtaccggccccacctggccagcgagaaggtgtacaccatcatgtacagctgctggcatgagaaggcagatgagcggcccaccttcaagatcctgctgagcaacatcctggatgtgatggatgaggagagctag

SEQ ID NO: 18644 - DNA, 627 bp, synthetic construct
  misc_feature 1..627: note = Description of Artificial Sequence: Synthetic coding sequence
  source 1..627: mol_type = other DNA
gtcatccgccactacgtggtgtgcagcaccccccagagccagtactacctggccgagaagcacctgttcagcaccatccctgagctgatcaactaccaccagcacaacagcgctggcctcatcagcaggacccagcagctgctggagatgtgcaaggatgtgtgtgaggccatggagtacctggagagcaagcagttcctgcaccgggacctggccgccaggaactgcctggtgaatgaccagggcgtggtgaaggtgtctgactttggcctgagccgctacgtgctggatgatgagtacaccagctctgtgggcagcaagtttcctgtgcgctggagccccccagaggtgctgatgtacagcaagttcagcagcaagagtgacatctgggccttcggcgtgctgatgtgggagatctacagcctgggcaagatgccctatgagcgcttcaccaacagcgagacagctgagcacatcgcccagggcctgcggctgtaccggccccacctggccagcgagaaggtgtacaccatcatgtacagctgctggcatgagaaggcagatgagcggcccaccttcaagatcctgctgagcaacatcctggatgtgatggatgaggagagctag

SEQ ID NO: 18645 - DNA, 420 bp, synthetic construct
  misc_feature 1..420: note = Description of Artificial Sequence: Synthetic coding sequence
  source 1..420: mol_type = other DNA
gtcatccgccactacgtggtgtgcagcaccccccagagccagtactacctggccgagaagcacctgttcagcaccatccctgagctgatcaactaccaccagcacaacagcgctggcctcatcagccggctgaagtaccctgtgtcccagcagaacaagaatgcccccagcacagctggcctgggctatggagtgctgatgtgggagatctacagcctgggcaagatgccctatgagcgcttcaccaacagcgagacagctgagcacatcgcccagggcctgcggctgtaccggccccacctggccagcgagaaggtgtacaccatcatgtacagctgctggcatgagaaggcagatgagcggcccaccttcaagatcctgctgagcaacatcctggatgtgatggatgaggagagctag

SEQ ID NO: 18646 - DNA, 705 bp, synthetic construct
  misc_feature 1..705: note = Description of Artificial Sequence: Synthetic coding sequence
  source 1..705: mol_type = other DNA
cgccactacgtggtgtgcagcaccccccagagccagtactacctggccgagaagcacctgttcagcaccatccctgagctgatcaactaccaccagcacaacagcgctggcctcatcagccggctgaagtaccctgtgtcccagcagaacaagaatgcccccagcacagctggcctgggctacggctcctgggagattgaccccaaggacctgaccttcctgaaggagctgggcaccggccagtttggagtggtgaagtatggcaagtggaggggccagtatgatgtggccatcaagatgatcaaggagggctccatgtctgaagatgagttcatcgaggaggccaaggtgatgatgtatgtgctggatgatgagtacaccagctctgtgggcagcaagtttcctgtgcgctggagccccccagaggtgctgatgtacagcaagttcagcagcaagagtgacatctgggccttcggcgtgctgatgtgggagatctacagcctgggcaagatgccctatgagcgcttcaccaacagcgagacagctgagcacatcgcccagggcctgcggctgtaccggccccacctggccagcgagaaggtgtacaccatcatgtacagctgctggcatgagaaggcagatgagcggcccaccttcaagatcctgctgagcaacatcctggatgtgatggatgaggagagctag

SEQ ID NO: 18647 - DNA, 225 bp, synthetic construct
  misc_feature 1..225: note = Description of Artificial Sequence: Synthetic coding sequence
  source 1..225: mol_type = other DNA
gtcatccgccactacgtggtgtgcagcaccccccagagccagtactacctggccgagaagcacctgttcagcaccatccctgagctgatcaactaccaccagcacaacagcgctggcctcatcagccggctgaagtaccctgtgtcccagcagaacaagaatgcccccagcacagctggcctgggctacggcatgtcctggatgatgaacacccaggcccagtag

SEQ ID NO: 18648 - DNA, 1452 bp, synthetic construct
  misc_feature 1..1452: note = Description of Artificial Sequence: Synthetic coding sequence
  source 1..1452: mol_type = other DNA
atggctgctgtgatcctggagagcatcttcctgaagaggagccagcagaagaagaagaccagccccctgaacttcaagaagaggctcttcctgctgactgtgcacaagctgagctactatgaatatgactttgagcggggccggcggggcagcaagaagggcagcattgatgtggagaagatcacctgtgtggagaccgtggtgcctgagaagaaccccccacctgagcggcagatccccaggagaggagaggagagcagcgagatggagcagatcagcatcatcgagcgcttcccctaccccttccaggtggtgtatgatgagggccccctgtatgtgttcagccccacagaggagctgaggaagcgctggatccaccagctgaagaatgtcatccgctacaacagcgacctggtgcagaagtaccacccctgcttctggattgatggccagtacctgtgctgcagccagacagccaagaatgccatgggctgccagatcctggagaacagaaatggcagcctgaagccaggcagcagccacaggaagaccaagaagcccctgccccccaccccagaggaggaccagatcctgaagaagcccctgcccccagagcctgctgctgcccctgtgtccaccagcgagctgaagaaggtggtggccctgtatgactacatgcccatgaatgccaatgacctgcagctgaggaaaggagatgagtacttcatcctggaggagagcaacctgccctggtggagggcccgggacaagaatggccaggagggctacatccccagcaactacgtgacagaagcagaagattccattgagatgtatgagtggtacagcaagcacatgaccaggagccaggccgagcagctgctgaagcaggagggcaaggagggcggcttcatcgtgcgggacagcagcaaggccggcaagtacacagtgtctgtgtttgccaagagcactggagacccccagggcgtcatccgccactacgtggtgtgcagcaccccccagagccagtactacctggccgccaggaactgcctggtgaatgaccagggcgtggtgaaggtgtctgactttggcctgagccgctacgtgctggatgatgagtacaccagctctgtgggcagcaagtttcctgtgcgctggagccccccagaggtgctgatgtacagcaagttcagcagcaagagtgacatctgggcctttggagtgctgatgtgggagatctacagcctgggcaagatgccctatgagcgcttcaccaacagcgagacagctgagcacatcgcccagggcctgcggctgtaccggccccacctggccagcgagaaggtgtacaccatcatgtacagctgctggcatgagaaggcagatgagcggcccaccttcaagatcctgctgagcaacatcctggatgtgatggatgaggagagctag

SEQ ID NO: 18649 - DNA, 519 bp, synthetic construct
  misc_feature 1..519: note = Description of Artificial Sequence: Synthetic coding sequence
  source 1..519: mol_type = other DNA
gtcatccgccactacgtggtgtgcagcaccccccagagccagtactacctggccgagaagcacctgttcagcaccatccctgagctgatcaactaccaccagcacaacagcgctggcctcatcagccggctgaagtaccctgtgtcccagcagaacaagaatgcccccagcacagctggcctgggctacggctcctgggagattgaccccaaggacctgaccttcctgaaggagctgggcaccggccagtttggagtggtgaagtatggcaagtggaggggccagtatgatgtggccatcaagatgatcaaggagggctccatgtctgaagatgagttcatcgaggaggccaaggtgatgatgaacctgagccatgagaagctggtgcagctgtatggagtgtgcaccaagcagaggcccatcttcatcatcacagagtacatggccaacggctgcctgccctgcaccgtggccggcatgaggaagcagatgtctgtgcccctgagcaagttcttctag

SEQ ID NO: 18650 - DNA, 594 bp, synthetic construct
  misc_feature 1..594: note = Description of Artificial Sequence: Synthetic coding sequence
  source 1..594: mol_type = other DNA
gtcatccgccactacgtggtgtgcagcaccccccagagccagtactacctggccgagaagcacctgttcagcaccatccctgagctgatcaactaccaccagcacaacagcgctggcctcatcagccggctgaagtaccctgtgtcccagcagaacaagaatgcccccagcacagctggcctgggctacggctcctgggagattgaccccaaggacctgaccttcctgaaggagctgggcaccggccagtttggagtggtgaagtatggcaagtggaggggccagtatgatgtggccatcaagatgatcaaggagggctccatgtctgaagatgagttcatcgaggaggccaaggtgatgatgaacctgagccatgagaagctggtgcagctgtatggagtgtgcaccaagcagaggcccatcttcatcatcacagagtacatggccaacggctgcctgctgaactacctgcgggagatgaggcaccgcttccagacccagcagctgctggagatgtgcaaggatgtgtgtgaggccatggagtacctggagagcaagcagttcctgcaccgggacctggtgtgccccggctag

SEQ ID NO: 18651 - DNA, 156 bp, synthetic construct
  misc_feature 1..156: note = Description of Artificial Sequence: Synthetic coding sequence
  source 1..156: mol_type = other DNA
atccgccactacgtggtgtgcagcaccccccagagccagtactacctggccgagaagcacctgttcagcaccatccctgagctgatcaactaccaccagcacaacagcgctggagaagattctgctgctgccagagatgtgcagggctgcctgtag

SEQ ID NO: 18652 - DNA, 891 bp, synthetic construct
  misc_feature 1..891: note = Description of Artificial Sequence: Synthetic coding sequence
  source 1..891: mol_type = other DNA
atgaagaatgaaattgctgctgtggtgttcttcttcacccggctggtgaggaagcatgacaagctgaagaaggaggccgtggagagatttgctgagaagctgaccctcatcctgcaggagaagtacaagaaccactggtacccagagaagcccagcaagggccaggcctaccgctgcatccgggtgaacaagttccagagggtggaccctgatgtgctgaaggcctgtgagaacagctgcatcctgtacagcgacctgggcctgcccaaggagctgaccctgtgggtggacccctgtgaggtgtgctgcagaagagatggagtgagcccctgctggccagactgcagccagaccccagacctggtgatccggcccccctggccacccaaggccctggactacagaagagagcccctgcggcctgccagcagcttcctgatcatgtatggagagaagaacaatgccttcatcgtggccagctttgagaacaaggatgagaacaaggatgagatcagcaggaaggtgacccgggccctggacaaggtgaccagtgactaccacagcggcagcagcagcagtgatgaggagaccagcaaggagatggaggtgaagcccagctctgtgacagctgctgccagccctgtgtaccagatcagcgagctgatcttcccccccctgcccatgtggcaccccctgcccaggaagaagccaggcatgtacagaggaaatggccaccagaaccactacccacctcctgtgcccttcggctaccccaaccagggcaggaagaacaagccctaccggcccatccctgtgacctgggtgcccccacctggcatgcactgtgacaggaaccactggatcaacccccacatgctggccccccactag

SEQ ID NO: 18653 - DNA, 759 bp, synthetic construct
  misc_feature 1..759: note = Description of Artificial Sequence: Synthetic coding sequence
  source 1..759: mol_type = other DNA
atgaagaatgaaattgctgctgtggtgttcttcttcacccggctggtgaggaagcatgacaagctgaagaaggaggccgtggagagatttgctgagaagctgaccctcatcctgcaggagaagtacaagaaccactggtacccagagaagcccagcaagggccaggcctaccgctgcatccgggtgaacaagttccagagggtggaccctgatgtgctgaaggcctgtgagaacagctgcatcctgtacagcgacctgggcctgcccaaggagctgaccctgtgggtggacccctgtgaggtgtgctgccgctatggagagaagaacaatgccttcatcgtggccagctttgagaacaaggatgagaacaaggatgagatcagcaggaaggtgacccgggccctggacaaggtgaccagtgactaccacagcggcagcagcagcagtgatgaggagaccagcaaggagatggaggtgaagcccagctctgtgacagctgctgccagccctgtgtaccagatcagcgagctgatcttcccccccctgcccatgtggcaccccctgcccaggaagaagccaggcatgtacagaggaaatggccaccagaaccactacccacctcctgtgcccttcggctaccccaaccagggcaggaagaacaagccctaccggcccatccctgtgacctgggtgcccccacctggcatgcactgtgacaggaaccactggatcaacccccacatgctggccccccactag

SEQ ID NO: 18654 - DNA, 141 bp, synthetic construct
  misc_feature 1..141: note = Description of Artificial Sequence: Synthetic coding sequence
  source 1..141: mol_type = other DNA
atgaagaatgaaattgctgctgtggtgttcttcttcacccggctggtgaggaagcatgacaagctgaagaaggaggccgtggagagatttgctgagaagctgaccctcatcctgcaggagaagtacaagaaccactggtag

SEQ ID NO: 18655 - DNA, 1560 bp, synthetic construct
  misc_feature 1..1560: note = Description of Artificial Sequence: Synthetic coding sequence
  source 1..1560: mol_type = other DNA
atgatgtctgaacatgacctggctgatgtggtgcagattgctgtggaggacctgagcccagaccaccctgtggtgctggagaaccacgtggtgacagatgaagatgagcccgccctgaagaggcagaggctggagatcaactgccaggaccccagcatcaagaccatctgcctgcggctggacagcattgaggccaagctgcaggccctggaggccacctgcaagagcctggaggagaagctggacctggtgaccaacaagcagcacagccccatccaggtgcccatggtggccggcagccccctgggcgccacccagacctgcaacaaggtgcgctgtgtggtgccccagaccaccgtcatcctgaacaatgaccggcagaatgccatcgtggccaagatggaggaccccctgagcaacagagccccagacagcctggagaatgtcatcagcaatgctgtgcctggaagacggcagaacaccatcgtggtgaaggtgcccggccaggaggacagccaccatgaagatggagagagcggcagcgaggccagtgacagcgtgagcagctgtggccaggccggcagccagagcatcggcagcaatgtgaccctcatcaccctgaacagcgaggaggactacccaaatggcacctggctgggagatgagaacaaccctgagatgagggtgcgctgtgccatcatccccagcgacatgctgcacatcagcaccaactgcaggacagctgagaagatggccctgaccctgctggactacctgttccaccgggaggtgcaggccgtgagcaacctgagcggccagggcaagcacggcaagaagcagctggaccccctgaccatctacggcatccgctgccacctgttctacaagtttggcatcacagaaagtgactggtaccgcatcaagcagagcattgacagcaagtgcaggacagcctggaggaggaagcagaggggccagagcctggccgtgaagagcttcagcaggaggacccccaacagcagcagctactgccccagcgagcccatgatgagcaccccacctccagccagcgagctgccccagccccagccccagccccaggccctgcactacgccctggccaatgcccagcaggtgcagatccaccagatcggggaggatggccaggtgcaggtgggccacctgcacatcgcccaggtgccccagggcgagcaggtgcagatcacccaggacagcgagggcaacctgcagatccaccacgtgggccaggacggccagctgctggaggccacccgcatcccctgcctgctggcccccagcgtcttcaaggccagcagcggccaggtgctgcagggcgcccagctgattgctgtggccagcagtgaccctgctgctgctggggtggatggcagccccctgcagggcagtgacatccaggtgcagtatgtgcagctggcccctgtgtctgaccacacagctggggcccagacagctgaggccctgcagcccaccctgcagcctgagatgcagctggagcacggggccatccagatccagtag

SEQ ID NO: 18656 - DNA, 1398 bp, synthetic construct
  misc_feature 1..1398: note = Description of Artificial Sequence: Synthetic coding sequence
  source 1..1398: mol_type = other DNA
atgatgtctgaacatgacctggctgatgtggtgcagattgctgtggaggacctgagcccagaccaccctgtggtgctggagaaccacgtggtgacagatgaagatgagcccgccctgaagaggcagaggctggagatcaactgccaggaccccagcatcaagagcttcctgtacagcatcaaccagaccatctgcctgcggctggacagcattgaggccaagctgcaggccctggaggccacctgcaagagcctggaggagaagctggacctggtgaccaacaagcagcacagccccatccaggtgcccatggtggccggcagccccctgggcgccacccagacctgcaatgctgtgcccggccggcggcagaacaccatcgtggtgaaggtgcccggccaggaggacagccaccatgaagatggagagagcggcagcgaggccagtgacagcgtgagcagctgtggccaggccggcagccagagcatcggcagcaatgtgaccctcatcaccctgaacagcgaggaggactaccccaacggcacctggctgggagatgagaacaaccctgagatgagggtgcgctgtgccatcatccccagcgacatgctgcacatcagcaccaactgcaggacagctgagaagatggccctgaccctgctggactacctgttccaccgggaggtgcaggccgtgagcaacctgagcggccagggcaagcacggcaagaagcagctggaccccctgaccatctacggcatccgctgccacctgttctacaagtttggcatcacagaaagtgactggtaccgcatcaagcagagcattgacagcaaatgtagaacagcctggaggaggaagcagaggggccagagcctggccgtgaagagcttcagcaggaggacccccaacagcagcagctactgccccagcgagcccatgatgagcaccccacctccagccagcgagctgccccagccccagccccagccccaggccctgcactacgccctggccaatgcccagcaggtgcagatccaccagattggagaagatggccaggtgcaggtgatcccccagggccacctgcacatcgcccaggtgccccagggcgagcaggtgcagatcacccaggacagcgagggcaacctgcagatccaccacgtgggccaggacggccaggtgctgcagggcgcccagctgattgctgtggccagcagtgaccctgctgctgctggggtggatggcagccccctgcagggcagtgacatccaggtgcagtatgtgcagctggcccctgtgtctgaccacacagctggggcccagacagctgaggccctgcagcccaccctgcagcctgagatgcagctggagcacggggccatccagatccagtag

SEQ ID NO: 18657 - DNA, 1410 bp, synthetic construct
  misc_feature 1..1410: note = Description of Artificial Sequence: Synthetic coding sequence
  source 1..1410: mol_type = other DNA
atgatgtctgaacatgacctggctgatgtggtgcagattgctgtggaggacctgagcccagaccaccctgtggtgctggagaaccacgtggtgacagatgaagatgagcccgccctgaagaggcagaggctggagatcaactgccaggaccccagcatcaagagcttcctgtacagcatcaaccagaccatctgcctgcggctggacagcattgaggccaagctgcaggccctggaggccacctgcaagagcctggaggagaagctggacctggtgaccaacaagcagcacagccccatccaggtgcccatggtggccggcagccccctgggcgccacccagacctgcaacaaggtgcgctgtgctgtgcccggccggcggcagaacaccatcgtggtgaaggtgcccggccaggaggacagccaccatgaagatggagagagcggcagcgaggccagtgacagcgtgagcagctgtggccaggccggcagccagagcatcggcagcaatgtgaccctcatcaccctgaacagcgaggaggactaccccaacggcacctggctgggagatgagaacaaccctgagatgagggtgcgctgtgccatcatccccagcgacatgctgcacatcagcaccaactgcaggacagctgagaagatggccctgaccctgctggactacctgttccaccgggaggtgcaggccgtgagcaacctgagcggccagggcaagcacggcaagaagcagctggaccccctgaccatctacggcatccgctgccacctgttctacaagtttggcatcacagaaagtgactggtaccgcatcaagcagagcattgacagcaaatgtagaacagcctggaggaggaagcagaggggccagagcctggccgtgaagagcttcagcaggaggacccccaacagcagcagctactgccccagcgagcccatgatgagcaccccacctccagccagcgagctgccccagccccagccccagccccaggccctgcactacgccctggccaatgcccagcaggtgcagatccaccagattggagaagatggccaggtgcaggtgatcccccagggccacctgcacatcgcccaggtgccccagggcgagcaggtgcagatcacccaggacagcgagggcaacctgcagatccaccacgtgggccaggacggccaggtgctgcagggcgcccagctgattgctgtggccagcagtgaccctgctgctgctggggtggatggcagccccctgcagggcagtgacatccaggtgcagtatgtgcagctggcccctgtgtctgaccacacagctggggcccagacagctgaggccctgcagcccaccctgcagcctgagatgcagctggagcacggggccatccagatccagtag

SEQ ID NO: 18658 - DNA, 1494 bp, synthetic construct
  misc_feature 1..1494: note = Description of Artificial Sequence: Synthetic coding sequence
  source 1..1494: mol_type = other DNA
atgatgtctgaacatgacctggctgatgtggtgcagattgctgtggaggacctgagcccagaccaccctggaacagagctgtgggacatcgtgctggagaaccacgtggtgacagatgaagatgagcccgccctgaagaggcagaggctggagatcaactgccaggaccccagcatcaagagcttcctgtacagcatcaaccagaccatctgcctgcggctggacagcattgaggccaagctgcaggccctggaggccacctgcaagagcctggaggagaagctggacctggtgaccaacaagcagcacagccccatccaggtgcccatggtggccggcagccccctgggcgccacccagacctgcaacaaggtgcgctgtgctgtgcccggccggcggcagaacaccatcgtggtgaaggtgcccggccaggaggacagccaccatgaagatggagagagcggcagcgaggccagtgacagcgtgagcagctgtggccaggccggcagccagagcatcggcagcaatgtgaccctcatcaccctgaacagcgaggaggactaccccaacggcacctggctgggagatgagaacaaccctgagatgagggtgcgctgtgccatcatccccagcgacatgctgcacatcagcaccaactgcaggacagctgagaagatggccctgaccctgctggactacctgttccaccgggaggtgcaggccgtgagcaacctgagcggccagggcaagcacggcaagaagcagctggaccccctgaccatctacggcatccgctgccacctgttctacaagtttggcatcacagaaagtgactggtaccgcatcaagcagagcattgacagcaaatgtagaacagcctggaggaggaagcagaggggccagagcctggccgtgaagagcttcagcaggaggacccccaacagcagcagctactgccccagcgagcccatgatgagcaccccacctccagccagcgagctgccccagccccagccccagccccaggccctgcactacgccctggccaatgcccagcaggtgcagatccaccagattggagaagatggccaggtgcaggtgatcccccagggccacctgcacatcgcccaggtgccccagggcgagcaggtgcagatcacccaggacagcgagggcaacctgcagatccaccacgtgggccaggacggccagctgctggaggccacccgcatcccctgcctgctggcccccagcgtcttcaaggccagcagcggccaggtgctgcagggcgcccagctgattgctgtggccagcagtgaccctgctgctgctggggtggatggcagccccctgcagggcagtgacatccaggtgcagtatgtgcagctggcccctgtgtctgaccacacagctggggcccagacagctgaggccctgcagcccaccctgcagcctgagatgcagctggagcacggggccatccagatccagtag

SEQ ID NO: 18659 - DNA, 1560 bp, synthetic construct; identical to SEQ ID NO: 18655
  misc_feature 1..1560: note = Description of Artificial Sequence: Synthetic coding sequence
  source 1..1560: mol_type = other DNA

SEQ ID NO: 18660 - DNA, 1476 bp, synthetic construct
  misc_feature 1..1476: note = Description of Artificial Sequence: Synthetic coding sequence
  source 1..1476: mol_type = other DNA
atgatgtctgaacatgacctggctgatgtggtgcagattgctgtggaggacctgagcccagaccaccctgtggtgctggagaaccacgtggtgacagatgaagatgagcccgccctgaagaggcagaggctggagatcaactgccaggaccccagcatcaagagcttcctgtacagcatcaaccagaccatctgcctgcggctggacagcattgaggccaagctgcaggccctggaggccacctgcaagagcctggaggagaagctggacctggtgaccaacaagcagcacagccccatccaggtgcccatggtggccggcagccccctgggcgccacccagacctgcaacaaggtgcgctgtgctgtgcccggccggcggcagaacaccatcgtggtgaaggtgcccggccaggaggacagccaccatgaagatggagagagcggcagcgaggccagtgacagcgtgagcagctgtggccaggccggcagccagagcatcggcagcaatgtgaccctcatcaccctgaacagcgaggaggactaccccaacggcacctggctgggagatgagaacaaccctgagatgagggtgcgctgtgccatcatccccagcgacatgctgcacatcagcaccaactgcaggacagctgagaagatggccctgaccctgctggactacctgttccaccgggaggtgcaggccgtgagcaacctgagcggccagggcaagcacggcaagaagcagctggaccccctgaccatctacggcatccgctgccacctgttctacaagtttggcatcacagaaagtgactggtaccgcatcaagcagagcattgacagcaaatgtagaacagcctggaggaggaagcagaggggccagagcctggccgtgaagagcttcagcaggaggacccccaacagcagcagctactgccccagcgagcccatgatgagcaccccacctccagccagcgagctgccccagccccagccccagccccaggccctgcactacgccctggccaatgcccagcaggtgcagatccaccagattggagaagatggccaggtgcaggtgatcccccagggccacctgcacatcgcccaggtgccccagggcgagcaggtgcagatcacccaggacagcgagggcaacctgcagatccaccacgtgggccaggacggccagctgctggaggccacccgcatcccctgcctgctggcccccagcgtcttcaaggccagcagcggccaggtgctgcagggcgcccagctgattgctgtggccagcagtgaccctgctgctgctggggtggatggcagccccctgcagggcagtgacatccaggtgcagtatgtgcagctggcccctgtgtctgaccacacagctggggcccagacagctgaggccctgcagcccaccctgcagcctgagatgcagctggagcacggggccatccagatccagtag

SEQ ID NO: 18661 - DNA, 357 bp, synthetic construct
  misc_feature 1..357: note = Description of Artificial Sequence: Synthetic coding sequence
  source 1..357: mol_type = other DNA
atgatgtctgaacatgacctggctgatgtggtgcagattgctgtggaggacctgagcccagaccaccctgtggtgctggagaaccacgtggtgacagatgaagatgagcccgccctgaagaggcagaggctggagatcaactgccaggaccccagcatcaagagcttcctgtacagcatcaaccagaccatctgcctgcggctggacagcattgaggccaagctgcaggccctggaggccacctgcaagagcctggaggagaagctggacctggtgaccaacaagcagcacagccccatccaggtgcccatggtggccggcagccccctgggcgccacccagacctgcaacaagtag

SEQ ID NO: 18662 - DNA, 87 bp, synthetic construct
  misc_feature 1..87: note = Description of Artificial Sequence: Synthetic coding sequence
  source 1..87: mol_type = other DNA
atgatgtctgaacatgacctggctgatgtggtgcagattgctgtggaggacctgagcccagaccaccctgtggtgctggagaactag

SEQ ID NO: 18663 - DNA, 288 bp, synthetic construct
  misc_feature 1..288: note = Description of Artificial Sequence: Synthetic coding sequence
  source 1..288: mol_type = other DNA
atgatgtctgaacatgacctggctgatgtggtgcagattgctgtggaggacctgagcccagaccaccctgtggtgctggagaaccacgtggtgacagatgaagatgagcccgccctgaagaggcagaggctggagatcaactgccaggaccccagcatcaagagcttcctgtacagcatcaaccagaccatctgcctgcggctggacagcattgaggccaagctgcaggccctggaggccacctgcaagagcctggaggagaagctggacctggtgaccaacaagtag

SEQ ID NO: 18664 - DNA, 372 bp, synthetic construct
  misc_feature 1..372: note = Description of Artificial Sequence: Synthetic coding sequence
  source 1..372: mol_type = other DNA
atgatgtctgaacatgacctggctgatgtggtgcagattgctgtggaggacctgagcccagaccaccctgtggtgctggagaaccacgtggtgacagatgaagatgagcccgccctgaagaggcagaggctggagatcaactgccaggaccccagcatcaagagcttcctgtacagcatcaaccagaccatctgcctgcggctggacagcattgaggccaagctgcaggccctggaggccacctgcaagagcctggaggagaagctggacctggtgaccaacaagcagcacagccccatccaggtgcccatggtggccggcagccccctgggcgccacccagacctgcaacaaggtgcgctgtgtggtgtag

SEQ ID NO: 18665 - DNA, 588 bp, synthetic construct
  misc_feature 1..588: note = Description of Artificial Sequence: Synthetic coding sequence
  source 1..588: mol_type = other DNA
atgatgtctgaacatgacctggctgatgtggtgcagattgctgtggaggacctgagcccagaccaccctggaacagagctgtgggacatcgtgctggagaaccacgtggtgacagatgaagatgagcccgccctgaagaggcagaggctggagatcaactgccaggaccccagcatcaagagcttcctgtacagcatcaaccagaccatctgcctgcggctggacagcattgaggccaagctgcaggccctggaggccacctgcaagagcctggaggagaagctggacctggtgaccaacaagcagcacagccccatccaggtgcccatggtggccggcagccccctgggcgccacccagacctgcaacaaggtgcgctgtgctgtgcccggccggcggcagaacaccatcgtggtgaaggtgcccggccaggaggacagccaccatgaagatggagagagcggcagcgaggccagtgacagcgtgagcagctgtggccaggccggcagccagagcatcggcagcaatgtgaccctcatcaccctgaacagcgaggaggactaccccaacggcacctggctgggctag

SEQ ID NO: 18666 - DNA, 360 bp, synthetic construct
  misc_feature 1..360: note = Description of Artificial Sequence: Synthetic coding sequence
  source 1..360: mol_type = other DNA
atgatgtctgaacatgacctggctgatgtggtgcagattgctgtggaggacctgagcccagaccaccctgtggtgctggagaaccacgtggtgacagatgaagatgagcccgccctgaagaggcagaggctggagatcaactgccaggaccccagcatcaagagcttcctgtacagcatcaaccagaccatctgcctgcggctggacagcattgaggccaagctgcaggccctggaggccacctgcaagagcctggaggagaagctggacctggtgaccaacaagcagcacagccccatccaggtgcccatggtggccggcagccccctgggcgccacccagacctgcaacaaggtgtag

SEQ ID NO: 18667 - DNA, 1401 bp, synthetic construct
  misc_feature 1..1401: note = Description of Artificial Sequence: Synthetic coding sequence
  source 1..1401: mol_type = other DNA
atgatgtctgaacatgacctggctgatgtggtgcagattgctgtggaggacctgagcccagaccaccctgtggtgctggagaaccacgtggtgacagatgaagatgagcccgccctgaagaggcagaggctggagatcaactgccaggaccccagcatcaagagcttcctgtacagcatcaaccagaccatctgcctgcggctggacagcattgaggccaagctgcaggccctggaggccacctgcaagagcctggaggagaagctggacctggtgaccaacaagcagcacagccccatccaggtgcccatggtggccggcagccccctgggcgccacccagacctgcaacaaggtgcgctgtgctgtgcccggccggcggcagaacaccatcgtggtgaaggtgcccggccaggaggacagccaccatgaagatggagagagcggcagcgaggccagtgacagcgtgagcagctgtggccaggccggcagccagagcatcggcagcaatgtgaccctcatcaccctgaacagcgaggaggactaccccaacggcacctggctgggagatgagaacaaccctgagatgagggtgcgctgtgccatcatccccagcgacatgctgcacatcagcaccaactgcaggacagctgagaagatggccctgaccctgctggactacctgttccaccgggaggtgcaggccgtgagcaacctgagcggccagggcaagcacggcaagaagcagctggaccccctgaccatctacggcatccgctgccacctgttctacaagtttggcatcacagaaagtgactggtaccgcatcaagcagagcattgacagcaaatgtagaacagcctggaggaggaagcagaggggccagagcctggccgtgaagagcttcagcaggaggacccccaacagcagcagctactgccccagcgagcccatgatgagcaccccacctccagccagcgagctgccccagccccagccccagccccaggccctgcactacgccctggccaatgcccagcaggtgcagatccaccagattggagaagatggccaggtgcaggtgggccacctgcacatcgcccaggtgccccagggcgagcaggtgcagatcacccaggacagcgagggcaacctgcagatccaccacgtgggccaggacggccaggtgctgcagggcgcccagctgattgctgtggccagcagtgaccctgctgctgctggggtggatggcagccccctgcagggcagtgacatccaggtgcagtatgtgcagctggcccctgtgtctgaccacacagctggggcccagacagctgaggccctgcagcccaccctgcagcctgagatgcagctggagcacggggccatccagatccagtag

SEQ ID NO: 18668 - DNA, 753 bp, synthetic construct
  misc_feature 1..753: note = Description of Artificial Sequence: Synthetic coding sequence
  source 1..753: mol_type = other DNA
atgggcagccctgagcccacccagggcccccggctgagccccatcctgatcccctacagcggccgccgctacaaggtgggccgggccagcggggccctgtgccaccaggacagcctgccccccatcctggagctgggcctgaccttcctgcgggccagcgctggcttctctgtgcccaccagcagcagctttgccctgcctgagcccctgcggagcctgtgcctgggcaatggagagggcctgggcctgagcctgaccctgactgtgctggcctggatcctgggcctgagcggcaccctgggcgccctggtgctcttcatggtggccaccggcatcttccaggaggccctgtggcacctgctgctgctgtccttctctgtggaggccctgccctgcttcttcttcttccccttcttcctgctgtgccgctgcctgcgggcagagctgcagatccagcagaggctggatggcaccctgagcctggacctgatgaggctggagagtgatggagagaccggctgtgccgctgagagctctgtgctgcagggcgcccagctgattgctgtggccagcagtgaccctgctgctgctggggtggatggcagccccctgcagggcagtgacatccaggtgcagtatgtgcagctggcccctgtgtctgaccacacagctggggcccagacagctgaggccctgcagcccaccctgcagcctgagatgcagctggagcacggggccatccagatccagtag

SEQ ID NO: 18669 - DNA, 1527 bp, synthetic construct
  misc_feature 1..1527: note = Description of Artificial Sequence: Synthetic coding sequence
  source 1..1527: mol_type = other DNA
atgatgtctgaacatgacctggctgatgtggtgcagattgctgtggaggacctgagcccagaccaccctgtggtgctggagaaccacgtggtgacagatgaagatgagcccgccctgaagaggcagaggctggagatcaactgccaggaccccagcatcaagagcttcctgtacagcatcaaccagaccatctgcctgcggctggacagcattgaggccaagctgcaggccctggaggccacctgcaagagcctggaggagaagctggacctggtgaccaacaagcagcacagccccatccaggtgcccatggtggccggcagccccctgggcgccacccagacctgcaacaaggtgcgctgtgtggtgccccagaccaccgtcatcctgaacaatgaccggcagaatgccatcgtggccaagatggaggaccccctgagcaacagagccccagacagcctggagaatgtcatcagcaatgctgtgcctggaagacggcagaacaccatcgtggtgaaggtgcccggccaggaggacagccaccatgaagatggagagagcggcagcgaggccagtgacagcgtgagcagctgtggccaggccggcagccagagcatcggcagcaatgtgaccctcatcaccctgaacagcgaggaggactacccaaatggcacctggctgggagatgagaacaaccctgagatgagggtgcgctgtgccatcatccccagcgacatgctgcacatcagcaccaactgcaggacagctgagaagatggccctgaccctgctggactacctgttccaccgggaggtgcaggccgtgagcaacctgagcggccagggcaagcacggcaagaagcagctggaccccctgaccatctacggcatccgctgccacctgttctacaagtttggcatcacagaaagtgactggtaccgcatcaagcagagcattgacagcaagtgcaggacagcctggaggaggaagcagaggggccagagcctggccgtgaagagcttcagcaggaggacccccaacagcagcagctactgccccagcgagcccatgatgagcaccccacctccagccagcgagctgccccagccccagccccagccccaggccctgcactacgccctggccaatgcccagcaggtgcagatccaccagatcggggaggatggccaggtgcaggtgatcccccagggccacctgcacatcgcccaggtgccccagggcgagcaggtgcagatcacccaggacagcgagggcaacctgcagatccaccacgtgggccaggacggccaggtgctgcagggcgcccagctgattgctgtggccagcagtgaccctgctgctgctggggtggatggcagccccctgcagggcagtgacatccaggtgcagtatgtgcagctggcccctgtgtctgaccacacagctggggcccagacagctgaggccctgcagcccaccctgcagcctgagatgcagctggagcacggggccatccagatccagtag

SEQ ID NO: 18670 - DNA, 1476 bp, synthetic construct; identical to SEQ ID NO: 18660
  misc_feature 1..1476: note = Description of Artificial Sequence: Synthetic coding sequence
  source 1..1476: mol_type = other DNA

SEQ ID NO: 18671 - DNA, 3153 bp, synthetic construct
  misc_feature 1..3153: note = Description of Artificial Sequence: Synthetic coding sequence
  source 1..3153: mol_type = other DNA
atggctgctgtgaagaaggagggcggggccctgtctgaggccatgagcctggagggagatgagtgggagctgagcaaagaaaatgtgcagcccctgcggcagggccgcatcatgagcaccctgcagggcgccctggcccaggagagcgcctgcaacaacaccctgcagcagcagaagagggcctttgaatatgagatccgcttctacacaggaaatgaccccctggatgtgtgggaccgctacatctcctggacagagcagaactacccccagggcggcaaggagagcaacatgagcaccctgctggagagagctgtggaggccctgcagggcgagaagcgctactacagcgacccccgcttcctgaacctgtggctgaagctgggccgcctgtgcaatgagcccctggacatgtacagctacctgcacaaccagggcattggagtgtccctggcccagttctacatctcctgggccgaggagtatgaggcccgggagaacttcaggaaggcagatgccatcttccaggagggcatccagcagaaggccgagcccctggagcggctgcagagccagcaccggcagttccaggcccgggtgtcccggcagaccctgctggccctggagaaggaggaggaggaggaggtgtttgagagctctgtgccccagaggagcaccctggccgagctgaagagcaagggcaagaagacagcccgggcccccatcatccgggtgggcggggccctgaaggcccccagccagaacagaggcctgcagaaccccttcccccagcagatgcagaacaacagccgcatcaccgtgtttgatgaaaatgctgatgaggccagcacagctgagctgagcaagcccaccgtgcagccctggatcgccccacccatgccccgggccaaggaaaatgagctgcaggccggcccctggaacacaggccgcagcctggagcaccggccccggggcaacacagccagcctgattgctgtgcctgctgtgctgcccagcttcaccccctacgtggaggagacagcccggcagcctgtgatgaccccctgcaagattgagcccagcatcaaccacatcctgagcaccaggaagccaggcaaggaggagggggaccccctgcagagggtgcagagccaccagcaggccagcgaggagaagaaggagaagatgatgtactgcaaggagaagatctatgccggcgtgggggagttctcctttgaggagatccgggcagaggtgttcaggaagaagctgaaggagcagcgggaggccgagctgctgaccagcgctgagaagagagctgagatgcagaagcagatcgaggagatggagaagaagctgaaggagatccagaccacccagcaggagaggactggagaccagcaggaggagaccatgcccaccaaggagaccaccaagctgcagatcgccagcgagagccagaagatccctggcatgaccctgagcagctctgtgtgccaggtgaactgctgtgcccgggagaccagcctggccgagaacatctggcaggagcagccccacagcaagggccccagcgtgcccttcagcatctttgatgagttcctgctgtctgagaagaagaacaagagccccccagctgaccccccccgggtgctggcccagaggcggcccctggccgtgctgaagaccagcgagagcatcaccagcaatgaagatgtgtccccagatgtgtgtgatgagttcaccggcatcgagcccctgtctgaagatgccatcatcaccggcttcagaaatgtgaccatctgccccaaccctgaggacacctgtgactttgcccgggccgccaggtttgtgtccacccccttccacgagatcatgagcctgaaggacctgcccagcgaccctgagcggctgctgcctgaggaggacctggatgtgaagaccagcgaggaccagcagacagcctgtggcaccatctacagccagaccctgagcatcaagaagctgagccccatcatcgaggacagccgggaggccacccacagcagcggcttcagcggcagcagcgcctctgtggccagcaccagcagcatcaagtgcctgcagatccctgagaagctggagctgaccaatgagaccagcgagaaccccacccagagcccctggtgcagccagtaccgccggcagctgctgaagagcctgcctgagctgagcgccagcgctgagctgtgcatcgaggaccggcccatgcccaagctggagattgagaaggagattgagctgggcaatgaagactactgcatcaagcgggagtacctgatctgtgaggactacaagctgttctgggtggcccccaggaacagcgctgagctgaccgtcatcaaggtgagcagccagcctgtgccctgggacttctacatcaacctgaagctgaaggagcggctgaatgaagattttgaccacttctgcagctgctaccagtaccaggacggctgcatcgtgtggcaccagtacatcaactgcttcaccctgcaggacctgctgcagcacagcgagtacatcacccatgagatcaccgtgctgatcatctacaacctgctgaccatcgtggagatgctgcacaaggccgagatcgtgcacggggacctgagcccccgctgcctgatcctgaggaaccgcatccatgacccctatgactgcaacaagaacaaccaggccctgaagatcgtggacttctcctacagcgtggacctgcgggtgcagctggatgtgttcaccctgagcggcttcagaacagtgcagatcctggagggccagaagatcctggccaactgcagcagcccctaccaggtggacctgtttggaattgctgacctggcccacctgctgctcttcaaggagcacctgcaggtgttctgggatggcagcttctggaagctgagccagaacatcagcgagctgaaggatggagagctgtggaacaagttctttgtgcgcatcctgaatgccaatgatgaggccaccgtgtctgtgctgggggagctggccgctgagatgaatggagtgtttgacaccaccttccagagccacctgaacaaggccctgtggaaggtgggcaagctgaccagccctggggccctgctcttccagtag

SEQ ID NO: 18672 - DNA, 3195 bp, synthetic construct
  misc_feature 1..3195: note = Description of Artificial Sequence: Synthetic coding sequence
  source 1..3195: mol_type = other DNA
atggctgctgtgaagaaggagggcggggccctgtctgaggccatgagcctggagggagatgagtgggagctgagcaaagaaaatgtgcagcccctgcggcagggccgcatcatgagcaccctgcagggcgccctggcccaggagagcgcctgcaacaacaccctgcagcagcagaagagggcctttgaatatgagatccgcttctacacaggaaatgaccccctggatgtgtgggaccgctgggtgttcctgttccacaaggacaacagaaacatcaaccgctacatctcctggacagagcagaactacccccagggcggcaaggagagcaacatgagcaccctgctggagagagctgtggaggccctgcagggcgagaagcgctactacagcgacccccgcttcctgaacctgtggctgaagctgggccgcctgtgcaatgagcccctggacatgtacagctacctgcacaaccagggcattggagtgtccctggcccagttctacatctcctgggccgaggagtatgaggcccgggagaacttcaggaaggcagatgccatcttccaggagggcatccagcagaaggccgagcccctggagcggctgcagagccagcaccggcagttccaggcccgggtgtcccggcagaccctgctggccctggagaaggaggaggaggaggaggtgtttgagagctctgtgccccagaggagcaccctggccgagctgaagagcaagggcaagaagacagcccgggcccccatcatccgggtgggcggggccctgaaggcccccagccagaacagaggcctgcagaaccccttcccccagcagatgcagaacaacagccgcatcaccgtgtttgatgaaaatgctgatgaggccagcacagctgagctgagcaagcccaccgtgcagccctggatcgccccacccatgccccgggccaaggaaaatgagctgcaggccggcccctggaacacaggccgcagcctggagcaccggccccggggcaacacagccagcctgattgctgtgcctgctgtgctgcccagcttcaccccctacgtggaggagacagcccggcagcctgtgatgaccccctgcaagattgagcccagcatcaaccacatcctgagcaccaggaagccaggcaaggaggagggggaccccctgcagagggtgcagagccaccagcaggccagcgaggagaagaaggagaagatgatgtactgcaaggagaagatctatgccggcgtgggggagttctcctttgaggagatccgggcagaggtgttcaggaagaagctgaaggagcagcgggaggccgagctgctgaccagcgctgagaagagagctgagatgcagaagcagatcgaggagatggagaagaagctgaaggagatccagaccacccagcaggagaggactggagaccagcaggaggagaccatgcccaccaaggagaccaccaagctgcagatcgccagcgagagccagaagatccctggcatgaccctgagcagctctgtgtgccaggtgaactgctgtgcccgggagaccagcctggccgagaacatctggcaggagcagccccacagcaagggccccagcgtgcccttcagcatctttgatgagttcctgctgtctgagaagaagaacaagagccccccagctgaccccccccgggtgctggcccagaggcggcccctggccgtgctgaagaccagcgagagcatcaccagcaatgaagatgtgtccccagatgtgtgtgatgagttcaccggcatcgagcccctgtctgaagatgccatcatcaccggcttcagaaatgtgaccatctgccccaaccctgaggacacctgtgactttgcccgggccgccaggtttgtgtccacccccttccacgagatcatgagcctgaaggacctgcccagcgaccctgagcggctgctgcctgaggaggacctggatgtgaagaccagcgaggaccagcagacagcctgtggcaccatctacagccagaccctgagcatcaagaagctgagccccatcatcgaggacagccgggaggccacccacagcagcggcttcagcggcagcagcgcctctgtggccagcaccagcagcatcaagtgcctgcagatccctgagaagctggagctgaccaatgagaccagcgagaaccccacccagagcccctggtgcagccagtaccgccggcagctgctgaagagcctgcctgagctgagcgccagcgctgagctgtgcatcgaggaccggcccatgcccaagctggagattgagaaggagattgagctgggcaatgaagactactgcatcaagcgggagtacctgatctgtgaggactacaagctgttctgggtggcccccaggaacagcgctgagctgaccgtcatcaaggtgagcagccagcctgtgccctgggacttctacatcaacctgaagctgaaggagcggctgaatgaagattttgaccacttctgcagctgctaccagtaccaggacggctgcatcgtgtggcaccagtacatcaactgcttcaccctgcaggacctgctgcagcacagcgagtacatcacccatgagatcaccgtgctgatcatctacaacctgctgaccatcgtggagatgctgcacaaggccgagatcgtgcacggggacctgagcccccgctgcctgatcctgaggaaccgcatccatgacccctatgactgcaacaagaacaaccaggccctgaagatcgtggacttctcctacagcgtggacctgcgggtgcagctggatgtgttcaccctgagcggcttcagaacagtgcagatcctggagggccagaagatcctggccaactgcagcagcccctaccaggtggacctgtttggaattgctgacctggcccacctgctgctcttcaaggagcacctgcaggtgttctgggatggcagcttctggaagctgagccagaacatcagcgagctgaaggatggagagctgtggaacaagttctttgtgcgcatcctgaatgccaatgatgaggccaccgtgtctgtgctgggggagctggccgctgagatgaatggagtgtttgacaccaccttccagagccacctgaacaaggccctgtggaaggtgggcaagctgaccagccctggggccctgctcttccagtag

SEQ ID NO: 18673 - DNA, 2802 bp, synthetic construct
  misc_feature 1..2802: note = Description of Artificial Sequence: Synthetic coding sequence
  source 1..2802: mol_type = other DNA
atggctgctgtgaagaaggagggcggggccctgtctgaggccatgagcctggagggagatgagtgggagctgagcaaagaaaatgtgcagcccctgcggcagggccgcatcatgagcaccctgcagggcgccctggcccaggagagcgcctgcaacaacaccctgcagcagcagaagagggcctttgaatatgagatccgcttctacacaggaaatgaccccctggatgtgtgggaccgctacatctcctggacagagcagaactacccccagggcggcaaggagagcaacatgagcaccctgctggagagagctgtggaggccctgcagggcgagaacttctggaaggcagatgccatcttccaggagggcatccagcagaaggccgagcccctggagcggctgcagagccagcaccggcagttccaggcccgggtgtcccggcagaccctgctggccctggagaaggaggaggaggaggaggtgtttgagagctctgtgccccagaggagcaccctggccgagctgaagagcaagggcaagaagacagcccgggcccccatcatccgggtgggcggggccctgaaggcccccagccagaacagaggcctgcagaaccccttcccccagcagatgcagaacaacagccgcatcaccgtgtttgatgaaaatgctgatgaggccagcacagctgagctgagcaagcccaccgtgcagccctggatcgccccacccatgccccgggccaaggaaaatgagctgcaggccggcccctggaacacaggccgcagcctggagcaccggccccggggcaacacagccagcctgattgctgtgcctgctgtgctgcccagcttcaccccctacgtggaggagacagcccggcagcctgtgatgaccccctgcaagattgagcccagcatcaaccacatcctgagcaccaggaagccaggcaaggaggagggggaccccctgcagagggtgcagagccaccagcaggccagcgaggagaagaaggagaagatgatgtactgcaaggagaagatctatgccggcgtgggggagttctcctttgaggagatccgggcagaggtgttcaggaagaagctgaaggagcagcgggaggccgagctgctgaccagcgctgagaagagagctgagatgcagaagcagatcgaggagatggagaagaagctgaaggagatccagaccacccagcaggagaggactggagaccagcaggaggagaccatgcccaccaaggagaccaccaagctgcagatcgccagcgagagccagaagatccctggcatgaccctgagcagctctgtgtgccaggtgaactgctgtgcccgggagaccagcctggccgagaacatctggcaggagcagccccacagcaaggtgtccctgagcctgggccccagcgtgcccttcagcatctttgatgagttcctgctgtctgagaagaagaacaagagccccccagctgaccccccccgggtgctggcccagaggcggcccctggccgtgctgaagaccagcgagagcatcaccagcaatgaagatgtgtccccagatgtgtgtgatgagttcaccggcatcgagcccctgtctgaagatgccatcatcaccggcttcagaaatgtgaccatctgccccaaccctgaggacacccgggaggccacccacagcagcggcttcagcggcagcagcgcctctgtggccagcaccagcagcatcaagtgcctgcagatccctgagaagctggagctgaccaatgagaccagcgagaaccccacccagagcccctggtgcagccagtaccgccggcagctgctgaagagcctgcctgagctgagcgccagcgctgagctgtgcattgaagatcggcccatgcccaagctggagattgagaaggagattgagctgggcaatgaagactactgcatcaagcgggagtacctgatctgtgaggactacaagctgttctgggtggcccccagaaattctgctgagctgaccgtcatcaaggtgagcagccagcctgtgccctgggacttctacatcaacctgaagctgaaggagcggctgaatgaagattttgaccacttctgcagctgctaccagtaccaggacggctgcatcgtgtggcaccagtacatcaactgcttcaccctgcaggacctgctgcagcacagcgagtacatcacccatgagatcaccgtgctgatcatctacaacctgctgaccatcgtggagatgctgcacaaggccgagatcgtgcatggagacctgagcccccgctgcctgatcctgaggaaccgcatccatgacccctatgactgcaacaagaacaaccaggccctgaagatcgtggacttctcctacagcgtggacctgcgggtgcagctggatgtgttcaccctgagcggcttcagaacagtgcagatcctggagggccagaagatcctggccaactgcagcagcccctaccaggtggacctgtttggaattgctgacctggcccacctgctgctcttcaaggagcacctgcaggtgttctgggatggcagcttctggaagctgagccagaacatcagcgagctgaaggatggagagctgtggaacaagttctttgtgcgcatcctgaatgccaatgatgaggccaccgtgtctgtgctgggggagctggccgctgagatgaatggagtgtttgacaccaccttccagagccacctgaacaaggccctgtggaaggtgggcaagctgaccagccctggggccctgctcttccagtag

SEQ ID NO: 18674 - DNA, 3393 bp, synthetic construct
  misc_feature 1..3393: note = Description of Artificial Sequence: Synthetic coding sequence
  source 1..3393: mol_type = other DNA
atgctggagatctgcctgaagctggtgggctgcaagagcaagaagggcctgagcagcagcagcagctgctacctggaggaggccctgcagaggcctgtggccagtgactttgagccccagggcctgtctgaggccgcccgctggaacagcaaggagaacctgctggccggccccagtgaaaatgaccccaacctgtttgtggccctgtatgactttgtggccagcggggacaacaccctgagcatcaccaagggggagaagctgcgggtgctgggctacaaccacaacggggagtggtgtgaggcccagaccaagaatggccagggctgggtgcccagcaactacatcacccctgtgaacagcctggagaagcacagctggtaccacggccctgtgtccagaaatgctgctgagtacctgctgagcagcggcatcaatggcagcttcctggtgcgggagagcgagagcagccctggccagaggagcatcagcctgcgctatgagggccgggtgtaccactaccgcatcaacacagccagtgatggcaagctgtatgtgagcagcgagagccgcttcaacaccctggccgagctggtgcaccaccacagcacagtggctgatggcctcatcaccaccctgcactacccagcccccaagaggaacaagcccaccgtgtatggagtgagccccaactatgacaagtgggagatggagaggacagacatcaccatgaagcacaagctgggcggcggccagtatggagaggtgtatgaaggagtgtggaagaagtacagcctgactgtggccgtgaagaccctgaaggaggacaccatggaggtggaggagttcctgaaggaggccgctgtgatgaaggagatcaagcaccccaacctggtgcagctgctgggcgtgtgcacccgggagccccccttctacatcatcacagagttcatgacctacggcaacctgctggactacctgcgggagtgcaaccggcaggaggtgaatgctgtggtgctgctgtacatggccacccagatcagcagcgccatggagtacctggagaagaagaacttcatccaccgggacctggccgccaggaactgcctggtgggggagaaccacctggtgaaggtggccgactttggcctgagccggctgatgactggagacacctacacagcccatgctggggccaagttccccatcaagtggacagcccctgagagcctggcctacaacaagttcagcatcaagagtgatgtgtgggcctttggagtgctgctgtgggagatcgccacctacggcatgagcccctacccaggcatcgacctgagccaggtgtatgagctgctggagaaggactacaggatggagaggcctgagggctgcccagagaaggtgtatgagctgatgagggcctgctggcagtggaaccccagcgaccggcccagctttgctgagatccaccaggcctttgagaccatgttccaggagagcagcatcagtgatgaggtggagaaggagctgggcaagcagggcgtgagaggagctgtgtccaccctgctgcaggcccctgagctgcccaccaagaccaggaccagccggcgggctgctgagcaccgggacaccacagatgtgcctgagatgccccacagcaagggccagggcgagagtgaccccctggaccacgagcctgctgtgagccccctgctgcccaggaaggagcggggccccccagagggcggcctgaatgaagatgagcggctgctgcccaaggacaagaagaccaacctcttcagcgccctgatcaagaagaagaagaagacagcccccaccccacccaagaggagcagcagcttccgggagatggatggccagcctgagaggagaggagctggggaggaggagggccgggacatcagcaatggagccctggccttcacccccctggacacagctgaccctgccaagagccccaagcccagcaatggagctggggtgcccaacggggccctgcgggagagcggcggcagcggcttccgcagcccccacctgtggaagaagagcagcaccctgaccagcagccggctggccaccggggaggaggagggcggcggcagcagcagcaagcgcttcctgcggagctgcagcgccagctgtgtgccccacggggccaaggacacagagtggaggtctgtgaccctgccccgggacctgcagagcacaggccggcagtttgacagcagcaccttcggcggccacaagtctgagaagccagccctgcccaggaagagagctggagaaaatagaagtgaccaggtgacccggggcaccgtgaccccaccaccccggctggtgaagaagaatgaggaggccgcagatgaggtgttcaaggacatcatggagagcagccctggcagcagcccccccaacctgacccccaagcccctgcggcggcaggtgacagtggccccagccagcggcctgccccacaaggaggaggccggcaagggcagcgccctgggcaccccagctgctgctgagcctgtgacccccaccagcaaggccggcagcggggcccctgggggcaccagcaaaggacctgctgaggagagccgggtgcggcggcacaagcacagcagcgagagccctggccgggacaagggcaagctgagccggctgaagccagcccctcctcctcctcctgctgccagcgctgggaaggccggcggcaagcccagccagagccccagccaggaggccgccggggaggccgtgctgggcgccaagaccaaggccaccagcctggtggatgctgtgaacagtgatgctgccaagcccagccagcctggagagggcctgaagaagcctgtgctgcctgccacccccaagccccagagcgccaagcccagcggcacccccatcagccctgcccctgtgcccagcaccctgcccagcgccagcagcgccctggccggggaccagcccagcagcacagccttcatccccctcatcagcaccagggtgtccctgaggaagacccggcagcccccagagcgcatcgccagcggggccatcaccaagggcgtggtgctggacagcacagaggccctgtgcctggccatcagcagaaattctgagcagatggccagccacagcgctgtgctggaggccggcaagaacctgtacaccttctgtgtgtcctatgtggacagcatccagcagatgaggaacaagtttgccttccgggaggccatcaacaagctggagaacaacctgcgggagctgcagatctgcccagccacagctggcagcggccctgctgccacccaggacttcagcaagctgctgagctctgtgaaggagatcagtgacatcgtgcagaggtag

SEQ ID NO: 18675 - DNA, 3450 bp, synthetic construct
  misc_feature 1..3450: note = Description of Artificial Sequence: Synthetic coding sequence
  source 1..3450: mol_type = other DNA
atgggccagcagcccgggaaggtgctgggggaccagaggcggcccagcctgcctgccctgcacttcatcaagggggccggcaagaaggagagcagccgccacggcggcccccactgcaatgtgtttgtggagcacgaggccctgcagaggcctgtggccagtgactttgagccccagggcctgtctgaggccgcccgctggaacagcaaagaaaacctgctggccggccccagtgaaaatgaccccaacctgtttgtggccctgtatgactttgtggccagcggggacaacaccctgagcatcaccaagggggagaagctgcgggtgctgggctacaaccacaatggagagtggtgtgaggcccagaccaagaatggccagggctgggtgcccagcaactacatcacccctgtgaacagcctggagaagcacagctggtaccacggccctgtgtccagaaatgctgctgagtacctgctgagcagcggcatcaatggcagcttcctggtgcgggagagcgagagcagccctggccagaggagcatcagcctgcgctatgagggccgggtgtaccactaccgcatcaacacagccagtgatggcaagctgtatgtgtcctctgagagccgcttcaacaccctggccgagctggtgcaccaccacagcacagtggctgatggcctcatcaccaccctgcactacccagcccccaagaggaacaagcccaccgtgtatggagtgagccccaactatgacaagtgggagatggagaggacagacatcaccatgaagcacaagctgggcggcggccagtacggggaggtgtatgagggcgtgtggaagaagtacagcctgactgtggccgtgaagaccctgaaggaggacaccatggaggtggaggagttcctgaaggaggccgctgtgatgaaggagatcaagcaccccaacctggtgcagctgctgggcgtgtgcacccgggagccccccttctacatcatcacagagttcatgacctacggcaacctgctggactacctgcgggagtgcaaccggcaggaggtgaatgctgtggtgctgctgtacatggccacccagatcagcagcgccatggagtacctggagaagaagaacttcatccaccgggacctggccgccaggaactgcctggtgggggagaaccacctggtgaaggtggccgactttggcctgagccggctgatgaccggggacacctacacagcccacgccggggccaagttccccatcaagtggacagcccctgagagcctggcctacaacaagttcagcatcaagagtgatgtgtgggccttcggcgtgctgctgtgggagatcgccacctacggcatgagcccctacccaggcatcgacctgagccaggtgtatgagctgctggagaaggactacaggatggagaggcctgagggctgcccagagaaggtgtatgagctgatgagggcctgctggcagtggaaccccagcgaccggcccagctttgctgagatccaccaggcctttgagaccatgttccaggagagcagcatcagtgatgaggtggagaaggagctgggcaagcagggcgtgagaggagctgtgtccaccctgctgcaggcccctgagctgcccaccaagaccaggaccagcagaagagctgctgagcaccgggacaccacagatgtgcctgagatgccccacagcaagggccagggcgagagtgaccccctggaccacgagcctgctgtgagccccctgctgcccaggaaggagcggggccccccagagggcggcctgaatgaagatgagcggctgctgcccaaggacaagaagaccaacctcttcagcgccctgatcaagaagaagaagaagacagcccccaccccacccaagaggagcagcagcttccgggagatggatggccagcctgagaggagaggagctggggaggaggagggccgggacatcagcaatggagccctggccttcacccccctggacacagctgaccctgccaagagccccaagcccagcaatggagctggggtgcccaatggagccctgcgggagagcggcggcagcggcttccgcagcccccacctgtggaagaagagcagcaccctgaccagcagccggctggccactggagaggaggagggcggcggcagcagcagcaagcgcttcctgcggagctgcagcgccagctgtgtgccccatggagccaaggacacagagtggaggtctgtgaccctgccccgggacctgcagagcacaggccggcagtttgacagcagcacctttggaggccacaagtctgagaagccagccctgcccaggaagagagctggggagaacagaagtgaccaggtgacccggggcaccgtgaccccaccaccccggctggtgaagaagaatgaggaggccgcagatgaggtgttcaaggacatcatggagagcagccctggcagcagcccccccaacctgacccccaagcccctgcggcggcaggtgacagtggccccagccagcggcctgccccacaaggaggaggccgggaaaggaagtgccctgggcaccccagctgctgctgagcctgtgacccccaccagcaaggccggcagcggggcccctgggggcaccagcaagggccctgctgaggagagccgggtgagaagacacaagcacagcagcgagagccctggccgggacaagggcaagctgagccggctgaagccagcccctcctcctcctcctgctgccagcgctgggaaggccggcggcaagcccagccagagccccagccaggaggccgccggggaggccgtgctgggcgccaagaccaaggccaccagcctggtggatgctgtgaacagtgatgctgccaagcccagccagcccggggagggcctgaagaagcctgtgctgcctgccacccccaagccccagagcgccaagcccagcggcacccccatcagccctgcccctgtgcccagcaccctgcccagcgccagcagcgccctggccggggaccagcccagcagcacagccttcatccccctcatcagcaccagggtgtccctgaggaagacccggcagcccccagagagaattgccagcggggccatcaccaagggcgtggtgctggacagcacagaggccctgtgcctggccatcagcaggaacagcgagcagatggccagccacagcgctgtgctggaggccggcaagaacctgtacaccttctgtgtgtcctatgtggacagcatccagcagatgaggaacaagtttgccttccgggaggccatcaacaagctggagaacaacctgcgggagctgcagatctgcccagccacagctggcagcggccctgctgccacccaggacttcagcaagctgctgagctctgtgaaggagatcagtgacatcgtgcagaggtag

SEQ ID NO: 18676 - DNA, 195 bp, synthetic construct
  misc_feature 1..195: note = Description of Artificial Sequence: Synthetic coding sequence
  source 1..195: mol_type = other DNA
atgggccagcagcccgggaaggtgctgggggaccagaggcggcccagcctgcctgccctgcacttcatcaagggggccggcaagaaggagagcagccgccacggcggcccccactgcaatgtgtttgtggagcaggccctgcagaggcctgtggccagtgactttgagccccagggcctgtctgaggccgcctag

SEQ ID NO: 18677 - DNA, 486 bp, synthetic construct
  misc_feature 1..486: note = Description of Artificial Sequence: Synthetic coding sequence
  source 1..486: mol_type = other DNA
ggccggcccggccgcagccgggcccggggcggcggggagggcggctggaggggcggcggccgggccggccgggccggccctgagcccggccccagggctggccggggcgtgcctgccccagactgctggaggggcaagatgctggagatctgcctgaagctggtgggctgcaagagcaagaagggcctgagcagcagcagcagctgctacctggaggaggccctgcagaggcctgtggccagtgactttgagccccagggcctgtctgaggccgcccgctggaacagcaaggagaacctgctggccggccccagtgaaaatgaccccaacctgtttgtggccctgtatgactttgtggccagcggggacaacaccctgagcatcaccaagggggagaagctgcgggtgctgggctacaaccacaacggggagtggtgtgaggcccagaccaagaatggccagggctgggtgcccagcaactactag

SEQ ID NO: 18678 - DNA, 2838 bp, synthetic construct
  misc_feature 1..2838: note = Description of Artificial Sequence: Synthetic coding sequence
  source 1..2838: mol_type = other DNA
ctgcggctgctgcgggagcccctgcagcaccctggccgggtgggcagcagcagcttcaacggcggcagaagagcccaccaccacgcccccctgagcagccccaaggcccagcaggcccactgcctgtggtgtgtgccccagctgcggcaggtgggagatggcacccacggccaccaccacgaggcccagggcggcggccagtacggggaggtgtatgagggcgtgtggaagaagtacagcctgactgtggccgtgaagaccctgaaggaggacaccatggaggtggaggagttcctgaaggaggccgctgtgatgaaggagatcaagcaccccaacctggtgcagctgctgggcgtgtgcacccgggagccccccttctacatcatcacagagttcatgacctacggcaacctgctggactacctgcgggagtgcaaccggcaggaggtgaatgctgtggtgctgctgtacatggccacccagatcagcagcgccatggagtacctggagaagaagaacttcatccaccgggacctggccgccaggaactgcctggtgggggagaaccacctggtgaaggtggccgactttggcctgagccggctgatgaccggggacacctacacagcccacgccggggccaagttccccatcaagtggacagcccctgagagcctggcctacaacaagttcagcatcaagagtgatgtgtgggccttcggcgtgctgctgtgggagatcgccacctacggcatgagcccctacccaggcatcgacctgagccaggtgtatgagctgctggagaaggactacaggatggagaggcctgagggctgcccagagaaggtgtatgagctgatgagggcctgctggcagtggaaccccagcgaccggcccagctttgctgagatccaccaggcctttgagaccatgttccaggagagcagcatcagtgatgaggtggagaaggagctgggcaagcagggcgtgagaggagctgtgtccaccctgctgcaggcccctgagctgcccaccaagaccaggaccagcagaagagctgctgagcaccgggacaccacagatgtgcctgagatgccccacagcaagggccagggcgagagtgaccccctggaccacgagcctgctgtgagccccctgctgcccaggaaggagcggggccccccagagggcggcctgaatgaagatgagcggctgctgcccaaggacaagaagaccaacctcttcagcgccctgatcaagaagaagaagaagacagcccccaccccacccaagaggagcagcagcttccgggagatggatggccagcctgagaggagaggagctggggaggaggagggccgggacatcagcaatggagccctggccttcacccccctggacacagctgaccctgccaagagccccaagcccagcaatggagctggggtgcccaatggagccctgcgggagagcggcggcagcggcttccgcagcccccacctgtggaagaagagcagcaccctgaccagcagccggctggccactggagaggaggagggcggcggcagcagcagcaagcgcttcctgcggagctgcagcgccagctgtgtgccccatggagccaaggacacagagtggaggtctgtgaccctgccccgggacctgcagagcacaggccggcagtttgacagcagcacctttggaggccacaagtctgagaagccagccctgcccaggaagagagctggggagaacagaagtgaccaggtgacccggggcaccgtgaccccaccaccccggctggtgaagaagaatgaggaggccgcagatgaggtgttcaaggacatcatggagagcagccctggcagcagcccccccaacctgacccccaagcccctgcggcggcaggtgacagtggccccagccagcggcctgccccacaaggaggaggccgggaaaggaagtgccctgggcaccccagctgctgctgagcctgtgacccccaccagcaaggccggcagcggggcccctgggggcaccagcaagggccctgctgaggagagccgggtgagaagacacaagcacagcagcgagagccctggccgggacaagggcaagctgagccggctgaagccagcccctcctcctcctcctgctgccagcgctgggaaggccggcggcaagcccagccagagccccagccaggaggccgccggggaggccgtgctgggcgccaagaccaaggccaccagcctggtggatgctgtgaacagtgatgctgccaagcccagccagcccggggagggcctgaagaagcctgtgctgcctgccacccccaagccccagagcgccaagcccagcggcacccccatcagccctgcccctgtgcccagcaccctgcccagcgccagcagcgccctggccggggaccagcccagcagcacagccttcatccccctcatcagcaccagggtgtccctgaggaagacccggcagcccccagagagaattgccagcggggccatcaccaagggcgtggtgctggacagcacagaggccctgtgcctggccatcagcaggaacagcgagcagatggccagccacagcgctgtgctggaggccggcaagaacctgtacaccttctgtgtgtcctatgtggacagcatccagcagatgaggaacaagtttgccttccgggaggccatcaacaagctggagaacaacctgcgggagctgcagatctgcccagccacagctggcagcggccctgctgccacccaggacttcagcaagctgctgagctctgtgaaggagatcagtgacatcgtgcagaggtag

SEQ ID NO: 18679 - DNA, 2649 bp, synthetic construct
  misc_feature 1..2649: note = Description of Artificial Sequence: Synthetic coding sequence
  source 1..2649: mol_type = other DNA
atgggcccctggagccgcagcctgagcgccctgctgctgctgctgcaggtgtcctcctggctgtgccaggagcctgagccctgccaccctggctttgatgctgagagctacaccttcaccgtgcccaggaggcacctggagcggggccgggtgctgggccgggtgaactttgaggactgcaccggccggcagaggacagcctacttcagcctggacacccgcttcaaggtgggcacagatggagtcatcaccgtgaagaggcccctgcgcttccacaacccccagatccacttcctggtgtatgcctgggacagcacctacaggaagttcagcaccaaggtgaccctgaacacagtgggccaccaccaccggcccccaccccaccaggcctctgtgtctggcatccaggccgagctgctgaccttccccaacagcagccctggcctgcggcggcagaagagggactgggtgattcctcccatcagctgcccagaaaatgagaagggccccttccccaagaacctggtgcagatcaagagcaacaaggacaaggagggcaaggtgttctacagcatcaccggccagggcgctgacaccccacctgtgggcgtcttcatcatcgagcgggagaccggctggctgaaggtgacagagcccctggaccgggagagaattgccacctacaccctcttcagccatgctgtgagcagcaatggaaatgctgtggaggaccccatggagatcctgatcaccgtgacagaccagaatgacaacaagccagagttcacccaggaggtgttcaagggctctgtgatggagggcgccctgcccggcacctctgtgatggaggtgacagccacagatgctgatgatgatgtgaacacctacaatgctgccatcgcctacaccatcctgagccaggaccctgagctgcctgacaagaacatgttcaccatcaacagaaatactggagtcatctctgtggtgaccaccggcctggaccgggagagcttccccacctacaccctggtggtgcaggccgctgacctgcagggcgagggcctgagcaccacagccacagctgtgatcaccgtgacagacaccaatgacaacccccccatcttcaaccccaccacctacaagggccaggtgcctgaaaatgaggccaacgtggtgatcaccaccctgaaggtgacagatgctgatgcccccaacaccccagcctgggaggccgtgtacaccatcctgaatgatgatggcggccagtttgtggtgaccaccaaccctgtgaacaatgatggcatcctgaagacagccaagggcctggactttgaggccaagcagcagtacatcctgcacgtggccgtgaccaacgtggtgccctttgaggtgtccctgaccaccagcacagccaccgtgacagtggatgtgctggatgtgaatgaggcccccatctttgtgcccccagagaagagggtggaggtgtctgaagattttggagtgggccaggagatcaccagctacacagcccaggagccagacaccttcatggagcagaagatcacctaccgcatctggagggacacagccaactggctggagatcaacccagacacaggagccatcagcaccagggctgagctggacagagaagattttgaacatgtgaagaacagcacctacacagccctgatcatcgccacagacaatggcagccctgtggccaccggcaccggcaccctgctgctgatcctgagtgatgtgaatgacaatgcccccatccctgagcccaggaccatcttcttctgtgaaagaaaccccaagccccaggtgatcaacatcattgatgctgacctgccccccaacaccagccccttcaccgctgagctgacccacggggccagcgccaactggaccatccagtacaatgaccccacccaggagagcatcatcctgaagcccaagatggccctggaggtgggggactacaagatcaacctgaagctgatggacaaccagaacaaggaccaggtgaccaccctggaggtgtctgtgtgtgactgtgagggcgccgccggcgtgtgcaggaaggcccagcctgtggaggccggcctgcagatcccagccatcctgggcatcctgggcggcatcctggccctgctgatcctgatcctgctgctgctgctcttcctgcggaggagagctgtggtgaaggagcccctgctgcccccagaagatgacacccgggacaacgtgtactactatgatgaggagggcggcggggaggaggaccaggactttgacctgagccagctgcaccggggcctggatgcccggcctgaggtgaccagaaatgatgtggcccccaccctgatgtctgtgccccgctacctgcccaggcctgccaacccagatgaaattggcaacttcattgatgagaacctgaaggctgctgacacagaccccacagccccaccctatgacagcctgctggtgtttgattatgagggcagcggcagcgaggccgccagcctgagcagcctgaacagcagcgagagtgacaaggaccaggactatgactacctgaatgagtggggcaaccgcttcaagaagctggccgacatgtatggaggaggagaagatgactag

SEQ ID NO: 18680 - DNA, 1944 bp, synthetic construct
  misc_feature 1..1944: note = Description of Artificial Sequence: Synthetic coding sequence
  source 1..1944: mol_type = other DNA
atgggcccctggagccgcagcctgagcgccctgctgctgctgctgcaggtgtcctcctggctgtgccaggagcctgagccctgccaccctggctttgatgctgagagctacaccttcaccgtgcccaggaggcacctggagcggggccgggtgctgggccgggtgaactttgaggactgcaccggccggcagaggacagcctacttcagcctggacacccgcttcaaggtgggcacagatggagtcatcaccgtgaagaggcccctgcgcttccacaacccccagatccacttcctggtgtatgcctgggacagcacctacaggaagttcagcaccaaggtgaccctgaacacagtgggccaccaccaccggcccccaccccaccaggcctctgtgtctggcatccaggccgagctgctgaccttccccaacagcagccctggcctgcggcggcagaagagggactgggtgattcctcccatcagctgcccagaaaatgagaagggccccttccccaagaacctggtgcagatcaagagcaacaaggacaaggagggcaaggtgttctacagcatcaccggccagggcgctgacaccccacctgtgggcgtcttcatcatcgagcgggagaccggctggctgaaggtgacagagcccctggaccgggagagaattgccacctacaccctcttcagccatgctgtgagcagcaatggaaatgctgtggaggaccccatggagatcctgatcaccgtgacagaccagaatgacaacaagccagagttcacccaggaggtgttcaagggctctgtgatggagggcgccctgcccggcacctctgtgatggaggtgacagccacagatgctgatgatgatgtgaacacctacaatgctgccatcgcctacaccatcctgagccaggaccctgagctgcctgacaagaacatgttcaccatcaacagaaatactggagtcatctctgtggtgaccaccggcctggaccgggagagcttccccacctacaccctggtggtgcaggccgctgacctgcagggcgagggcctgagcaccacagccacagctgtgatcaccgtgacagacaccaatgacaacccccccatcttcaaccccaccacctacaagggccaggtgcctgaaaatgaggccaacgtggtgatcaccaccctgaaggtgacagatgctgatgcccccaacaccccagcctgggaggccgtgtacaccatcctgaatgatgatggcggccagtttgtggtgaccaccaaccctgtgaacaatgatggcatcctgaagacagccaagggcctggactttgaggccaagcagcagtacatcctgcacgtggccgtgaccaacgtggtgccctttgaggtgtccctgaccaccagcacagccaccgtgacagtggatgtgctggatgtgaatgaggcccccatctttgtgcccccagagaagagggtggaggtgtctgaagattttggagtgggccaggagatcaccagctacacagcccaggagccagacaccttcatggagcagaagatcacctaccgcatctggagggacacagccaactggctggagatcaacccagacacaggagccatcagcaccagggctgagctggacagagaagattttgaacatgtgaagaacagcacctacacagccctgatcatcgccacagacaatggcagccctgtggccaccggcaccggcaccctgctgctgatcctgagtgatgtgaatgacaatgcccccatccctgagcccaggaccatcttcttctgtgaaagaaaccccaagccccaggtgatcaacatcattgatgctgacctgccccccaacctggccagccagagcatcggcatcacagacatgagccactgcacctgcccagccccccagctgcctgccatcttctag

SEQ ID NO: 18681 - DNA, 2703 bp, synthetic construct
  misc_feature 1..2703: note = Description of Artificial Sequence: Synthetic coding sequence
  source 1..2703: mol_type = other DNA
atgggcccctggagccgcagcctgagcgccctgctgctgctgctgcaggtgtcctcctggctgtgccaggagcctgagccctgccaccctggctttgatgctgagagctacaccttcaccgtgcccaggaggcacctggagcggggccgggtgctgggccgggtgaactttgaggactgcaccggccggcagaggacagcctacttcagcctggacacccgcttcaaggtgggcacagatggagtcatcaccgtgaagaggcccctgcgcttccacaacccccagatccacttcctggtgtatgcctgggacagcacctacaggaagttcagcaccaaggtgaccctgaacacagtgggccaccaccaccggcccccaccccaccaggcctctgtgtctggcatccaggccgagctgctgaccttccccaacagcagccctggcctgcggcggcagaagagggactgggtgattcctcccatcagctgcccagaaaatgagaagggccccttccccaagaacctggtgcagatcaagagcaacaaggacaaggagggcaaggtgttctacagcatcaccggccagggcgctgacaccccacctgtgggcgtcttcatcatcgagcgggagaccggctggctgaaggtgacagagcccctggaccgggagagaattgccacctacaccctcttcagccatgctgtgagcagcaatggaaatgctgtggaggaccccatggagatcctgatcaccgtgacagaccagaatgacaacaagccagagttcacccaggaggtgttcaagggctctgtgatggagggcgccctgcccggcacctctgtgatggaggtgacagccacagatgctgatgatgatgtgaacacctacaatgctgccatcgcctacaccatcctgagccaggaccctgagctgcctgacaagaacatgttcaccatcaacagaaatactggagtcatctctgtggtgaccaccggcctggaccgggagagcttccccacctacaccctggtggtgcaggccgctgacctgcagggcgagggcctgagcaccacagccacagctgtgatcaccgtgacagacaccaatgacaacccccccatcttcaaccccaccacctacaagggccaggtgcctgaaaatgaggccaacgtggtgatcaccaccctgaaggtgacagatgctgatgcccccaacaccccagcctgggaggccgtgtacaccatcctgaatgatgatggcggccagtttgtggtgaccaccaaccctgtgaacaatgatggcatcctgaagacagccaagctggcccgctgcaggaactggcacccccacagctgcagctacccctgccccctgggcctggactttgaggccaagcagcagtacatcctgcacgtggccgtgaccaacgtggtgccctttgaggtgtccctgaccaccagcacagccaccgtgacagtggatgtgctggatgtgaatgaggcccccatctttgtgcccccagagaagagggtggaggtgtctgaagattttggagtgggccaggagatcaccagctacacagcccaggagccagacaccttcatggagcagaagatcacctaccgcatctggagggacacagccaactggctggagatcaacccagacacaggagccatcagcaccagggctgagctggacagagaagattttgaacatgtgaagaacagcacctacacagccctgatcatcgccacagacaatggcagccctgtggccaccggcaccggcaccctgctgctgatcctgagtgatgtgaatgacaatgcccccatccctgagcccaggaccatcttcttctgtgaaagaaaccccaagccccaggtgatcaacatcattgatgctgacctgccccccaacaccagccccttcaccgctgagctgacccacggggccagcgccaactggaccatccagtacaatgaccccacccaggagagcatcatcctgaagcccaagatggccctggaggtgggggactacaagatcaacctgaagctgatggacaaccagaacaaggaccaggtgaccaccctggaggtgtctgtgtgtgactgtgagggcgccgccggcgtgtgcaggaaggcccagcctgtggaggccggcctgcagatcccagccatcctgggcatcctgggcggcatcctggccctgctgatcctgatcctgctgctgctgctcttcctgcggaggagagctgtggtgaaggagcccctgctgcccccagaagatgacacccgggacaacgtgtactactatgatgaggagggcggcggggaggaggaccaggactttgacctgagccagctgcaccggggcctggatgcccggcctgaggtgaccagaaatgatgtggcccccaccctgatgtctgtgccccgctacctgcccaggcctgccaacccagatgaaattggcaacttcattgatgagaacctgaaggctgctgacacagaccccacagccccaccctatgacagcctgctggtgtttgattatgagggcagcggcagcgaggccgccagcctgagcagcctgaacagcagcgagagtgacaaggaccaggactatgactacctgaatgagtggggcaaccgcttcaagaagctggccgacatgtatggaggaggagaagatgactag

SEQ ID NO: 18682 - DNA, 2466 bp, synthetic construct
  misc_feature 1..2466: note = Description of Artificial Sequence: Synthetic coding sequence
  source 1..2466: mol_type = other DNA
atgggcccctggagccgcagcctgagcgccctgctgctgctgctgcaggtgtcctcctggctgtgccaggagcctgagccctgccaccctggctttgatgctgagagctacaccttcaccgtgcccaggaggcacctggagcggggccgggtgctgggccgggtgaactttgaggactgcaccggccggcagaggacagcctacttcagcctggacacccgcttcaaggtgggcacagatggagtcatcaccgtgaagaggcccctgcgcttccacaacccccagatccacttcctggtgtatgcctgggacagcacctacaggaagttcagcaccaaggtgaccctgaacacagtgggccaccaccaccggcccccaccccaccaggcctctgtgtctggcatccaggccgagctgctgaccttccccaacagcagccctggcctgcggcggcagaagagggactgggtgattcctcccatcagctgcccagaaaatgagaagggccccttccccaagaacctggtgcagatcaagagcaacaaggacaaggagggcaaggtgttctacagcatcaccggccagggcgctgacaccccacctgtgggcgtcttcatcatcgagcgggagaccggctggctgaaggtgacagagcccctggaccgggagagaattgccacctacaccctcttcagccatgctgtgagcagcaatggaaatgctgtggaggaccccatggagatcctgatcaccgtgacagaccagaatgacaacaagccagagttcacccaggaggtgttcaagggctctgtgatggagggcgccctgcccggcacctctgtgatggaggtgacagccacagatgctgatgatgatgtgaacacctacaatgctgccatcgcctacaccatcctgagccaggaccctgagctgcctgacaagaacatgttcaccatcaacagaaatactggagtcatctctgtggtgaccaccggcctggaccgggagagcttccccacctacaccctggtggtgcaggccgctgacctgcagggcgagggcctgagcaccacagccacagctgtgatcaccgtgacagacaccaatgacaacccccccatcttcaaccccaccaccggcctggactttgaggccaagcagcagtacatcctgcacgtggccgtgaccaacgtggtgccctttgaggtgtccctgaccaccagcacagccaccgtgacagtggatgtgctggatgtgaatgaggcccccatctttgtgcccccagagaagagggtggaggtgtctgaggactttggagtgggccaggagatcaccagctacacagcccaggagccagacaccttcatggagcagaagatcacctaccgcatctggagggacacagccaactggctggagatcaacccagacaccggggccatcagcaccagggctgagctggaccgggaggactttgagcacgtgaagaacagcacctacacagccctgatcatcgccacagacaatggcagccctgtggccactggaacaggcaccctgctgctgatcctgagtgatgtgaatgacaatgcccccatccctgagcccaggaccatcttcttctgtgagaggaaccccaagccccaggtgatcaacatcattgatgctgacctgccccccaacaccagccccttcaccgctgagctgacccatggagccagcgccaactggaccatccagtacaatgaccccacccaggagagcatcatcctgaagcccaagatggccctggaggtgggggactacaagatcaacctgaagctgatggacaaccagaacaaggaccaggtgaccaccctggaggtgtctgtgtgtgactgtgagggcgctgctggggtgtgcaggaaggcccagcctgtggaggccggcctgcagatcccagccatcctgggcatcctgggcggcatcctggccctgctgatcctgatcctgctgctgctgctcttcctgcggcggcgggctgtggtgaaggagcccctgctgcccccagaagatgacacccgggacaacgtgtactactatgatgaggagggcggcggggaggaggaccaggactttgacctgagccagctgcaccggggcctggatgcccggcctgaggtgaccagaaatgatgtggcccccaccctgatgtctgtgccccgctacctgcccaggcctgccaacccagatgagatcggcaacttcattgatgagaacctgaaggctgctgacacagaccccacagccccaccctatgacagcctgctggtgtttgattatgagggcagcggcagcgaggccgccagcctgagcagcctgaacagcagcgagagtgacaaggaccaggactatgactacctgaatgagtggggcaaccgcttcaagaagctggccgacatgtatggaggaggagaagatgactag

SEQ ID NO: 18683 - DNA, 2391 bp, synthetic construct
  misc_feature 1..2391: note = Description of Artificial Sequence: Synthetic coding sequence
  source 1..2391: mol_type = other DNA
atgaaggagaactactgcctgcaggccgccctggtgtgcctgggcatgctgtgccacagccacgcctttgcccctgagcggcggggccacctgcggcccagcttccacggccaccacgagaagggcaaggagggccaggtgctgcagaggagcaagaggggctgggtgtggaaccagttctttgtgattgaggagtacacaggccctgaccctgtgctggtgggccgcctgcacagcgacattgattctggagatggcaacatcaagtacatcctgtctggagagggcgccggcaccatctttgtgattgatgacaagagcggcaacatccacgccaccaagaccctggaccgggaggagcgggcccagtacaccctgatggcccaggccgtggaccgggacaccaaccggcccctggagcccccatctgagttcatcgtgaaggtgcaggacatcaatgacaaccccccagagttcctgcacgagacctaccacgccaacgtgcctgagaggagcaatgtgggcaccagcgtcatccaggtgacagccagtgatgctgatgaccccacctacggcaacagcgccaagctggtgtacagcatcctggagggccagccctacttctctgtggaggcccagacaggcatcatcagaacagccctgcccaacatggaccgggaggccaaggaggagtaccacgtggtgatccaggccaaggacatgggcggccacatgggcggcctgagcggcaccaccaaggtgaccatcaccctgacagatgtgaatgacaacccccccaagttcccccagagcgtgtaccagatgtctgtgtctgaggccgctgtgcctggagaggaggtgggccgggtgaaggccaaggaccctgacattggagaaaatggcctggtgacctacaacatcgtggatggagatggcatggagagctttgagatcaccacagattatgagacccaggagggcgtcatcaagctgaagaagcctgtggactttgagaccaagagggcctacagcctgaaggtggaggccgccaacgtgcacatcgaccccaagttcatcagcaatggccccttcaaggacacagtgacagtgaagatctctgtggaggatgctgatgagccccccatgttcctggcccccagctacatccacgaggtgcaggagaatgctgctgctggcaccgtggtgggccgggtgcacgccaaggaccctgatgctgccaacagccccatccgctacagcattgacagacacacagacctggaccgcttcttcaccatcaacccagaagatggcttcatcaagaccaccaagcccctggaccgggaggagacagcctggctgaacatcaccgtgtttgctgctgagatccacaacagacaccaggaggccaaggtgcctgtggccatccgggtgctggatgtgaatgacaatgcccccaagtttgctgccccctatgagggcttcatctgtgagagtgaccagaccaagcccctgagcaaccagcccatcgtgaccatctctgcagatgacaaggatgacacagccaacggcccccgcttcatcttcagcctgcccccagagatcatccacaaccccaacttcaccgtgcgggacaacagagacaacacagctggggtgtatgcccggcggggcggcttcagccggcagaagcaggacctgtacctgctgcccatcgtcatcagtgatggcggcatcccccccatgagcagcaccaacaccctgaccatcaaggtgtgtggctgtgatgtgaatggagccctgctgagctgcaatgctgaggcctacatcctgaatgccggcctgagcactggagccctgattgccatcctggcctgcatcgtcatcctgctggtgattgtggtgctgtttgtgaccctgcggcggcagaagaaggagcccctgattgtgtttgaggaggaggatgtgcgggagaacatcatcacctatgatgatgaaggaggaggagaggaggacacagaggcctttgacatcgccaccctgcagaacccagatggcatcaatggcttcatccccaggaaggacatcaagccagagtaccagtacatgccccggcccggcctgcggcctgcccccaacagcgtggatgtggatgacttcatcaacacccgcatccaggaggccgacaatgaccccacagccccaccctatgacagcatccagatctacggctatgagggccggggctctgtggccggcagcctgagcagcctggagagcgccaccacagacagcgacctggactatgactacctgcagaactggggcccccgcttcaagaagctggccgacctgtatggcagcaaggacacctttgatgatgacagctag

SEQ ID NO: 18684 - DNA, 2082 bp, synthetic construct
  misc_feature 1..2082: note = Description of Artificial Sequence: Synthetic coding sequence
  source 1..2082: mol_type = other DNA
atgaaggagaactactgcctgcaggccgccctggtgtgcctgggcatgctgtgccacagccacgcctttgcccctgagcggcggggccacctgcggcccagcttccacggccaccacgagaagggcaaggagggccaggtgctgcagaggagcaagaggggctgggtgtggaaccagttctttgtgattgaggagtacacaggccctgaccctgtgctggtgggccgcctgcacagcgacattgattctggagatggcaacatcaagtacatcctgtctggagagggcgccggcaccatctttgtgattgatgacaagagcggcaacatccacgccaccaagaccctggaccgggaggagcgggcccagtacaccctgatggcccaggccgtggaccgggacaccaaccggcccctggagcccccatctgagttcatcgtgaaggtgcaggacatcaatgacaaccccccagagttcctgcacgagacctaccacgccaacgtgcctgagaggagcaatgtgggcaccagcgtcatccaggtgacagccagtgatgctgatgaccccacctacggcaacagcgccaagctggtgtacagcatcctggagggccagccctacttctctgtggaggcccagacaggcatcatcagaacagccctgcccaacatggaccgggaggccaaggaggagtaccacgtggtgatccaggccaaggacatgggcggccacatgggcggcctgagcggcaccaccaaggtgaccatcaccctgacagatgtgaatgacaacccccccaagttcccccagagcgtgtaccagatgtctgtgtctgaggccgctgtgcctggagaggaggtgggccgggtgaaggccaaggaccctgacattggagaaaatggcctggtgacctacaacatcgtggatggagatggcatggagagctttgagatcaccacagattatgagacccaggagggcgtcatcaagctgaagaagcctgtggactttgagaccaagagggcctacagcctgaaggtggaggccgccaacgtgcacatcgaccccaagttcatcagcaatggccccttcaaggacacagtgacagtgaagatctctgtggaggatgctgatgagccccccatgttcctggcccccagctacatccacgaggtgcaggagaatgctgctgctggcaccgtggtgggccgggtgcacgccaaggaccctgatgctgccaacagccccatccgctacagcattgacagacacacagacctggaccgcttcttcaccatcaacccagaagatggcttcatcaagaccaccaagcccctggaccgggaggagacagcctggctgaacatcaccgtgtttgctgctgagatccacaacagacaccaggaggccaaggtgcctgtggccatccgggtgctggatgtgaatgacaatgcccccaagtttgctgccccctatgagggcttcatctgtgagagtgaccagaccaagcccctgagcaaccagcccatcgtgaccatctctgcagatgacaaggatgacacagccaacggcccccgcttcatcttcagcctgcccccagagatcatccacaaccccaacttcaccgtgcgggacaacagagacaacacagctggggtgtatgcccggcggggcggcttcagccggcagaagcaggacctgtacctgctgcccatcgtcatcagtgatggcggcatcccccccatgagcagcaccaacaccctgaccatcaaggtgtgtggctgtgatgtgaatggagccctgctgagctgcaatgctgaggcctacatcctgaatgccggcctgagcactggagccctgattgccatcctggcctgcatcgtcatcctgctgggctgccccagcctgatggagccccccagcccccgggaggacatgaggctgctgtacctgggcttccagctgatgctgttctcctatgtgaaggtgaacagacgcttctgcctgctgggcgtcttcatcaagctgcccttcctgtatgtggtggccacagagagccccaccaccctgaccagcctgtag

SEQ ID NO: 18685 - DNA, 516 bp, synthetic construct
  misc_feature 1..516: note = Description of Artificial Sequence: Synthetic coding sequence
  source 1..516: mol_type = other DNA
atgaaggagaactactgcctgcaggccgccctggtgtgcctgggcatgctgtgccacagccacgcctttgcccctgagcggcggggccacctgcggcccagcttccacggccaccacgagaagggcaaggagggccaggtgctgcagaggagcaagaggggctgggtgtggaaccagttctttgtgattgaggagtacacaggccctgaccctgtgctggtgggccgcctgcacagcgacattgattctggagatggcaacatcaagtacatcctgtctggagagggcgccggcaccatctttgtgattgatgacaagagcggcaacatccacgccaccaagaccctggaccgggaggagcgggcccagtacaccctgatggcccaggccgtggaccgggacaccaacagaaacagcctgagccgcagcaggaccctgatgaccaccctgcggagcagctgcacccggcccatcatgcccacctgcctgcggggccccatgtgggtgaggacatag

SEQ ID NO: 18686 - DNA, 2340 bp, synthetic construct
  misc_feature 1..2340: note = Description of Artificial Sequence: Synthetic coding sequence
  source 1..2340: mol_type = other DNA
atgggccctggcctggccgcccggcggctgcggccccccagccgggcccctgagatcaccgtcttcagcgcccagaggccctgtgacatccccagctgctgccacctgctgagtgaccagagtgatggctggagcgtgctgcagaagctggccgccagcatccagtgggtgaagaagctgcacagcgacatcgacagcggagatggcaacatcaagtacatcctgagcggggagggcgccggcaccatctttgtgattgatgacaagagcggcaacatccacgccaccaagaccctggaccgggaggagcgggcccagtacaccctgatggcccaggccgtggaccgggacaccaaccggcccctggagccccccagcgagttcatcgtgaaggtgcaggacatcaatgacaaccccccagagttcctgcacgagacctaccacgccaacgtgcctgagaggagcaatgtgggcaccagcgtcatccaggtgacagccagtgatgctgatgaccccacctacggcaacagcgccaagctggtgtacagcatcctggagggccagccctacttctctgtggaggcccagacaggcatcatcagaacagccctgcccaacatggaccgggaggccaaggaggagtaccacgtggtgatccaggccaaggacatgggcggccacatgggcggcctgagcggcaccaccaaggtgaccatcaccctgacagatgtgaatgacaacccccccaagttcccccagagcgtgtaccagatgtctgtgtctgaggccgctgtgcctggagaggaggtgggccgggtgaaggccaaggaccctgacatcggggagaatggcctggtgacctacaacatcgtggatggagatggcatggagagctttgagatcaccacagattatgagacccaggagggcgtcatcaagctgaagaagcctgtggactttgagaccaagagggcctacagcctgaaggtggaggccgccaacgtgcacatcgaccccaagttcatcagcaatggccccttcaaggacacagtgacagtgaagatctctgtggaggatgctgatgagccccccatgttcctggcccccagctacatccacgaggtgcaggagaatgctgctgctggcaccgtggtgggccgggtgcacgccaaggaccctgatgctgccaacagccccatccgctacagcattgacagacacacagacctggaccgcttcttcaccatcaacccagaagatggcttcatcaagaccaccaagcccctggaccgggaggagacagcctggctgaacatcaccgtgtttgctgctgagatccacaacagacaccaggaggccaaggtgcctgtggccatccgggtgctggatgtgaatgacaatgcccccaagtttgctgccccctatgagggcttcatctgtgagagtgaccagaccaagcccctgagcaaccagcccatcgtgaccatctctgcagatgacaaggatgacacagccaacggcccccgcttcatcttcagcctgcccccagagatcatccacaaccccaacttcaccgtgcgggacaacagagacaacacagctggggtgtatgccaggagaggaggcttcagccggcagaagcaggacctgtacctgctgcccatcgtcatcagtgatggcggcatcccccccatgagcagcaccaacaccctgaccatcaaggtgtgtggctgtgatgtgaatggagccctgctgagctgcaatgctgaggcctacatcctgaatgccggcctgagcactggagccctgattgccatcctggcctgcatcgtcatcctgctggtgattgtggtgctgtttgtgaccctgcggcggcagaagaaggagcccctcatcgtgtttgaggaggaggatgtgcgggagaacatcatcacctatgatgatgagggcggcggggaggaggacacagaggcctttgatattgccaccctgcagaacccagatggcatcaatggcttcatccccaggaaggacatcaagccagagtaccagtacatgcccaggcctggcctgcggcctgcccccaacagcgtggatgtggatgacttcatcaacacccgcatccaggaggccgacaatgaccccacagccccaccctatgacagcatccagatctacggctatgagggccggggctctgtggccggcagcctgagcagcctggagagcgccaccacagacagcgacctggactatgactacctgcagaactggggcccccgcttcaagaagctggccgacctgtatggcagcaaggacacctttgatgatgacagctag

SEQ ID NO: 18687 - DNA, 528 bp, synthetic construct
  misc_feature 1..528: note = Description of Artificial Sequence: Synthetic coding sequence
  source 1..528: mol_type = other DNA
atgcagcccaggacccccctggtgctgtgtgtgctgctgagccaggtgctgctgctgaccagcgctgaggacctggactgcaccccaggcttccagcagaaggtgttccacatcaaccagcctgctgagttcatcgaggaccagagcatcctgaacctgaccttcagtgactgcaagggaaatgacaagctgcgctatgaggtgagcagcccctacttcaaggtgaacagtgatggcggcctggtggccctgaggaacatcacagctgtgggcaagaccctgtttgtgcacgcccggacccctcatgctgaggacatggccgagctggtgattgtgggcggcaaggacatccagggcagcctgcaggacatcttcaagtttgcccggaccagccctgtgccccggcagaagaggagcatcgtggtgagccccatcctgatccctgagaaccagaggcagcccttccccagagatgtgggcaagatgaagatctggcaggtgctgtgcctggcccgctggctgacctag

SEQ ID NO: 18688 - DNA, 2142 bp, synthetic construct
  misc_feature 1..2142: note = Description of Artificial Sequence: Synthetic coding sequence
  source 1..2142: mol_type = other DNA
atgcagcccaggacccccctggtgctgtgtgtgctgctgagccaggtgctgctgctgaccagcgctgaggacctggactgcaccccaggcttccagcagaaggtgttccacatcaaccagcctgctgagttcatcgaggaccagagcatcctgaacctgaccttcagtgactgcaagggaaatgacaagctgcgctatgaggtgagcagcccctacttcaaggtgaacagtgatggcggcctggtggccctgaggaacatcacagctgtgggcaagaccctgtttgtgcacgcccggacccctcatgctgaggacatggccgagctggtgattgtgggcggcaaggacatccagggcagcctgcaggacatcttcaagtttgcccggaccagccctgtgccccggcagaagaggagcatcgtggtgagccccatcctgatccctgagaaccagaggcagcccttccccagagatgtgggcaaggtggtggacagcgacaggcctgagaggagcaagttccggctgaccgggaagggcgtggaccaggagcccaagggcatcttccgcatcaatgaaaatacaggctctgtgtctgtgaccaggaccctggaccgggaggtgattgctgtgtaccagctgtttgtggagaccacagatgtgaatggcaagaccctggagggccctgtgcccctggaggtgattgtcatcgaccagaatgacaaccggcccatcttccgggagggcccctacatcggccacgtgatggagggcagccccaccggcaccaccgtgatgaggatgacagcctttgatgctgatgatcctgccacagacaatgccctgctgcgctacaacatccggcagcagaccccagacaagcccagccccaacatgttctacattgatcctgagaagggggacatcgtgacagtggtgtccccagccctgctggaccgggagaccctggagaaccccaagtatgagctgatcatcgaggcccaggacatggccggcctggatgtgggcctgaccggcacagccacagccaccatcatgattgatgacaagaatgaccacagccccaagttcaccaagaaggagttccaggccaccgtggaggagggcgctgtgggcgtcatcgtgaacctgactgtggaggacaaggatgaccccaccactggagcctggagggctgcctacaccatcatcaatggaaatcctggccagagctttgagatccacaccaacccccagaccaatgaaggcatgctgtctgtggtgaagcccctggactatgagatcagcgccttccacaccctgctgatcaaggtggagaatgaagaccccctggtgcctgatgtgtcctatggccccagcagcacagccaccgtgcacatcaccgtgctggatgtgaatgaaggacctgtgttctacccagaccccatgatggtgacccggcaggaggacctgtctgtgggctctgtgctgctgactgtgaatgccacagatcctgacagcctgcagcaccagaccatccgctacagcgtgtacaaggaccctgctggctggctgaacatcaaccccatcaatggcaccgtggacaccacagctgtgctggaccgggagagcccctttgtggacaacagcgtgtacacagccctcttcctggccatcgacagcggcaaccccccagccaccggcaccggcaccctgctgatcaccctggaggatgtgaatgacaatgcccccttcatctaccccaccgtggccgaggtgtgtgatgatgccaagaacctgtctgtggtgatcctgggcgccagtgacaaggacctgcaccccaacacagaccccttcaagtttgagatccacaagcaggccgtgcctgacaaggtgtggaagatcagcaagatcaacaacacccacgccctggtgtccctgctgcagaacctgaacaaggccaactacaacctgcccatcatggtgacagacagcggcaagccacccatgaccaacatcacagacctgcgggtgcaggtgtgcagctgcaggaacagcaaggtggactgcaatgctgctggggccctgcgcttcagcctgcccagcgtgctgctgctgagcctcttcagcctggcctgcctgtag

SEQ ID NO: 18689 - DNA, 2283 bp, synthetic construct
  misc_feature 1..2283: note = Description of Artificial Sequence: Synthetic coding sequence
  source 1..2283: mol_type = other DNA
atgaagaccccacctggggccagcagcaggaccaagtgcagccgggagctgcgctccttctgtgccttcagctgcccccgggccaagcagcccacctgcacagcctggttcccccagcaggagcaccccagtgaaaatggcccccagatgcctggccgggaccccccagctgccagcaccatgcaggtgctgctgctgaccagcgctgaggacctggactgcaccccaggcttccagcagaaggtgttccacatcaaccagcctgctgagttcatcgaggaccagagcatcctgaacctgaccttcagtgactgcaagggaaatgacaagctgcgctatgaggtgagcagcccctacttcaaggtgaacagtgatggcggcctggtggccctgaggaacatcacagctgtgggcaagaccctgtttgtgcacgcccggacccctcatgctgaggacatggccgagctggtgattgtgggcggcaaggacatccagggcagcctgcaggacatcttcaagtttgcccggaccagccctgtgccccggcagaagaggagcatcgtggtgagccccatcctgatccctgagaaccagaggcagcccttccccagagatgtgggcaaggtggtggacagcgacaggcctgagaggagcaagttccggctgactggaaaaggagtggaccaggagcccaagggcatcttccgcatcaatgaaaatactggatctgtgtctgtgaccaggaccctggaccgggaggtgattgctgtgtaccagctgtttgtggagaccacagatgtgaatggcaagaccctggagggccctgtgcccctggaggtgattgtgattgaccagaatgacaaccggcccatcttccgggagggcccctacatcggccacgtgatggagggcagccccaccggcaccaccgtgatgaggatgacagcctttgatgctgatgatcctgccacagacaatgccctgctgcgctacaacatccggcagcagaccccagacaagcccagccccaacatgttctacatcgaccctgagaagggggacatcgtgacagtggtgtccccagccctgctggaccgggagaccctggagaaccccaagtatgagctgatcatcgaggcccaggacatggccggcctggatgtgggcctgactggaacagccacagccaccatcatgattgatgacaagaatgaccacagccccaagttcaccaagaaggagttccaggccaccgtggaggagggcgctgtgggcgtgattgtgaacctgactgtggaggacaaggatgaccccaccaccggggcctggagggctgcctacaccatcatcaatggaaatcctggccagagctttgagatccacaccaacccccagaccaatgaaggcatgctgtctgtggtgaagcccctggactatgagatcagcgccttccacaccctgctgatcaaggtggagaatgaagaccccctggtgcctgatgtgtcctatggccccagcagcacagccaccgtgcacatcaccgtgctggatgtgaatgaaggacctgtgttctacccagaccccatgatggtgacccggcaggaggacctgtctgtgggctctgtgctgctgactgtgaatgccacagatcctgacagcctgcagcaccagaccatccgctacagcgtgtacaaggaccctgctggctggctgaacatcaaccccatcaatggaacagtggacaccacagctgtgctggaccgggagagcccctttgtggacaacagcgtgtacacagccctcttcctggccattgattctggcaaccccccagccactggaacaggcaccctgctgatcaccctggaggatgtgaatgacaatgcccccttcatctaccccaccgtggccgaggtgtgtgatgatgccaagaacctgtctgtggtgatcctgggcgccagtgacaaggacctgcaccccaacacagaccccttcaagtttgagatccacaagcaggccgtgcctgacaaggtgtggaagatcagcaagatcaacaacacccacgccctggtgtccctgctgcagaacctgaacaaggccaactacaacctgcccatcatggtgacagattctgggaagccacccatgaccaacatcacagacctgcgggtgcaggtgtgcagctgcaggaacagcaaggtggactgcaatgctgctggggccctgcgcttcagcctgcccagcgtgctgctgctgagcctcttcagcctggcctgcaagtag

SEQ ID NO: 18690 - DNA, 2142 bp, synthetic construct
  misc_feature 1..2142: note = Description of Artificial Sequence: Synthetic coding sequence
  source 1..2142: mol_type = other DNA
atgcagcccaggacccccctggtgctgtgtgtgctgctgagccaggtgctgctgctgaccagcgctgaggacctggactgcaccccaggcttccagcagaaggtgttccacatcaaccagcctgctgagttcatcgaggaccagagcatcctgaacctgaccttcagtgactgcaagggaaatgacaagctgcgctatgaggtgagcagcccctacttcaaggtgaacagtgatggcggcctggtggccctgaggaacatcacagctgtgggcaagaccctgtttgtgcacgcccggacccctcatgctgaggacatggccgagctggtgattgtgggcggcaaggacatccagggcagcctgcaggacatcttcaagtttgcccggaccagccctgtgccccggcagaagaggagcatcgtggtgagccccatcctgatccctgagaaccagaggcagcccttccccagagatgtgggcaaggtggtggacagcgacaggcctgagaggagcaagttccggctgaccgggaagggcgtggaccaggagcccaagggcatcttccgcatcaatgaaaatacaggctctgtgtctgtgaccaggaccctggaccgggaggtgattgctgtgtaccagctgtttgtggagaccacagatgtgaatggcaagaccctggagggccctgtgcccctggaggtgattgtcatcgaccagaatgacaaccggcccatcttccgggagggcccctacatcggccacgtgatggagggcagccccaccggcaccaccgtgatgaggatgacagcctttgatgctgatgatcctgccacagacaatgccctgctgcgctacaacatccggcagcagaccccagacaagcccagccccaacatgttctacattgatcctgagaagggggacatcgtgacagtggtgtccccagccctgctggaccgggagaccctggagaaccccaagtatgagctgatcatcgaggcccaggacatggccggcctggatgtgggcctgaccggcacagccacagccaccatcatgattgatgacaagaatgaccacagccccaagttcaccaagaaggagttccaggccaccgtggaggagggcgctgtgggcgtcatcgtgaacctgactgtggaggacaaggatgaccccaccactggagcctggagggctgcctacaccatcatcaatggaaatcctggccagagctttgagatccacaccaacccccagaccaatgaaggcatgctgtctgtggtgaagcccctggactatgagatcagcgccttccacaccctgctgatcaaggtggagaatgaagaccccctggtgcctgatgtgtcctatggccccagcagcacagccaccgtgcacatcaccgtgctggatgtgaatgaaggacctgtgttctacccagaccccatgatggtgacccggcaggaggacctgtctgtgggctctgtgctgctgactgtgaatgccacagatcctgacagcctgcagcaccagaccatccgctacagcgtgtacaaggaccctgctggctggctgaacatcaaccccatcaatggcaccgtggacaccacagctgtgctggaccgggagagcccctttgtggacaacagcgtgtacacagccctcttcctggccatcgacagcggcaaccccccagccaccggcaccggcaccctgctgatcaccctggaggatgtgaatgacaatgcccccttcatctaccccaccgtggccgaggtgtgtgatgatgccaagaacctgtctgtggtgatcctgggcgccagtgacaaggacctgcaccccaacacagaccccttcaagtttgagatccacaagcaggccgtgcctgacaaggtgtggaagatcagcaagatcaacaacacccacgccctggtgtccctgctgcagaacctgaacaaggccaactacaacctgcccatcatggtgacagacagcggcaagccacccatgaccaacatcacagacctgcgggtgcaggtgtgcagctgcaggaacagcaaggtggactgcaatgctgctggggccctgcgcttcagcctgcccagcgtgctgctgctgagcctcttcagcctggcctgcaagtag

SEQ ID NO: 18691 - DNA, 573 bp, synthetic construct
  misc_feature 1..573: note = Description of Artificial Sequence: Synthetic coding sequence
  source 1..573: mol_type = other DNA
atgcagcccaggacccccctggtgctgtgtgtgctgctgagccaggtgctgctgctgaccagcgctgaggacctggactgcaccccaggcttccagcagaaggtgttccacatcaaccagcctgctgagttcatcgaggaccagagcatcctgaacctgaccttcagtgactgcaagggaaatgacaagctgcgctatgaggtgagcagcccctacttcaaggtgaacagtgatggcggcctggtggccctgaggaacatcacagctgtgggcaagaccctgtttgtgcacgcccggacccctcatgctgaggacatggccgagctggtgattgtgggcggcaaggacatccagggcagcctgcaggacatcttcaagtttgcccggaccagccctgtgccccggcagaagaggagcatcgtggtgagccccatcctgatccctgagaaccagaggcagcccttccccagagatgtgggcaagaggacccacaaccccatcaacagcgagctgctgctgaatgaaggcatcacagctgacctgaacccctgcatcaccatcctggccatctag

SEQ ID NO: 18692 - DNA, 528 bp, synthetic construct; identical to SEQ ID NO: 18687
  misc_feature 1..528: note = Description of Artificial Sequence: Synthetic coding sequence
  source 1..528: mol_type = other DNA

SEQ ID NO: 18693 - DNA, 2025 bp, synthetic construct
  misc_feature 1..2025: note = Description of Artificial Sequence: Synthetic coding sequence
  source 1..2025: mol_type = other DNA
atgcagcccaggacccccctggtgctgtgtgtgctgctgagccaggtgctgctgctgaccagcgctgaggacctggactgcaccccaggcttccagcagaaggtgttccacatcaaccagcctgctgagttcatcgaggaccagagcatcctgaacctgaccttcagtgactgcaagggaaatgacaagctgcgctatgaggtgagcagcccctacttcaaggtgaacagtgatggcggcctggtggccctgaggaacatcacagctgtgggcaagaccctgtttgtgcacgcccggacccctcatgctgaggacatggccgagctggtgattgtgggcggcaaggacatccagggcagcctgcaggtggtggacagcgacaggcctgagaggagcaagttccggctgactggaaaaggagtggaccaggagcccaagggcatcttccgcatcaatgaaaatactggatctgtgtctgtgaccaggaccctggaccgggaggtgattgctgtgtaccagctgtttgtggagaccacagatgtgaatggcaagaccctggagggccctgtgcccctggaggtgattgtgattgaccagaatgacaaccggcccatcttccgggagggcccctacatcggccacgtgatggagggcagccccaccggcaccaccgtgatgaggatgacagcctttgatgctgatgatcctgccacagacaatgccctgctgcgctacaacatccggcagcagaccccagacaagcccagccccaacatgttctacatcgaccctgagaagggggacatcgtgacagtggtgtccccagccctgctggaccgggagaccctggagaaccccaagtatgagctgatcatcgaggcccaggacatggccggcctggatgtgggcctgactggaacagccacagccaccatcatgattgatgacaagaatgaccacagccccaagttcaccaagaaggagttccaggccaccgtggaggagggcgctgtgggcgtgattgtgaacctgactgtggaggacaaggatgaccccaccaccggggcctggagggctgcctacaccatcatcaatggaaatcctggccagagctttgagatccacaccaacccccagaccaatgaaggcatgctgtctgtggtgaagcccctggactatgagatcagcgccttccacaccctgctgatcaaggtggagaatgaagaccccctggtgcctgatgtgtcctatggccccagcagcacagccaccgtgcacatcaccgtgctggatgtgaatgaaggacctgtgttctacccagaccccatgatggtgacccggcaggaggacctgtctgtgggctctgtgctgctgactgtgaatgccacagatcctgacagcctgcagcaccagaccatccgctacagcgtgtacaaggaccctgctggctggctgaacatcaaccccatcaatggaacagtggacaccacagctgtgctggaccgggagagcccctttgtggacaacagcgtgtacacagccctcttcctggccattgattctggcaaccccccagccactggaacaggcaccctgctgatcaccctggaggatgtgaatgacaatgcccccttcatctaccccaccgtggccgaggtgtgtgatgatgccaagaacctgtctgtggtgatcctgggcgccagtgacaaggacctgcaccccaacacagaccccttcaagtttgagatccacaagcaggccgtgcctgacaaggtgtggaagatcagcaagatcaacaacacccacgccctggtgtccctgctgcagaacctgaacaaggccaactacaacctgcccatcatggtgacagattctgggaagccacccatgaccaacatcacagacctgcgggtgcaggtgtgcagctgcaggaacagcaaggtggactgcaatgctgctggggccctgcgcttcagcctgcccagcgtgctgctgctgagcctcttcagcctggcctgcaagtag

SEQ ID NO: 18694 - DNA, 1248 bp, synthetic construct
  misc_feature 1..1248: note = Description of Artificial Sequence: Synthetic coding sequence
  source 1..1248: mol_type = other DNA
atgcagcccaggacccccctggtgctgtgtgtgctgctgagccaggtggccctgctggaccgggagaccctggagaaccccaagtatgagctgatcatcgaggcccaggacatggccggcctggatgtgggcctgaccggcacagccacagccaccatcatgattgatgacaagaatgaccacagccccaagttcaccaagaaggagttccaggccaccgtggaggagggcgctgtgggcgtcatcgtgaacctgactgtggaggacaaggatgaccccaccactggagcctggagggctgcctacaccatcatcaatggaaatcctggccagagctttgagatccacaccaacccccagaccaatgaaggcatgctgtctgtggtgaagcccctggactatgagatcagcgccttccacaccctgctgatcaaggtggagaatgaagaccccctggtgcctgatgtgtcctatggccccagcagcacagccaccgtgcacatcaccgtgctggatgtgaatgaaggacctgtgttctacccagaccccatgatggtgacccggcaggaggacctgtctgtgggctctgtgctgctgactgtgaatgccacagatcctgacagcctgcagcaccagaccatccgctacagcgtgtacaaggaccctgctggctggctgaacatcaaccccatcaatggcaccgtggacaccacagctgtgctggaccgggagagcccctttgtggacaacagcgtgtacacagccctcttcctggccatcgacagcggcaaccccccagccaccggcaccggcaccctgctgatcaccctggaggatgtgaatgacaatgcccccttcatctaccccaccgtggccgaggtgtgtgatgatgccaagaacctgtctgtggtgatcctgggcgccagtgacaaggacctgcaccccaacacagaccccttcaagtttgagatccacaagcaggccgtgcctgacaaggtgtggaagatcagcaagatcaacaacacccacgccctggtgtccctgctgcagaacctgaacaaggccaactacaacctgcccatcatggtgacagacagcggcaagccacccatgaccaacatcacagacctgcgggtgcaggtgtgcagctgcaggaacagcaaggtggactgcaatgctgctggggccctgcgcttcagcctgcccagcgtgctgctgctgagcctcttcagcctggcctgcaagtag

SEQ ID NO: 18695 - DNA, 819 bp, synthetic construct
  misc_feature 1..819: note = Description of Artificial Sequence: Synthetic coding sequence
  source 1..819: mol_type = other DNA
atgcagcccaggacccccctggtgctgtgtgtgctgctgagccaggtgctgctgctgaccagcgctgaggacctggactgcaccccaggcttccagcagaaggtgttccacatcaaccagcctgctgagttcatcgaggaggacctgtctgtgggctctgtgctgctgactgtgaatgccacagatcctgacagcctgcagcaccagaccatccgctacagcgtgtacaaggaccctgctggctggctgaacatcaaccccatcaatggaacagtggacaccacagctgtgctggaccgggagagcccctttgtggacaacagcgtgtacacagccctcttcctggccattgattctggcaaccccccagccactggaacaggcaccctgctgatcaccctggaggatgtgaatgacaatgcccccttcatctaccccaccgtggccgaggtgtgtgatgatgccaagaacctgtctgtggtgatcctgggcgccagtgacaaggacctgcaccccaacacagaccccttcaagtttgagatccacaagcaggccgtgcctgacaaggtgtggaagatcagcaagatcaacaacacccacgccctggtgtccctgctgcagaacctgaacaaggccaactacaacctgcccatcatggtgacagattctgggaagccacccatgaccaacatcacagacctgcgggtgcaggtgtgcagctgcaggaacagcaaggtggactgcaatgctgctggggccctgcgcttcagcctgcccagcgtgctgctgctgagcctcttcagcctggcctgcaagtag

SEQ ID NO: 18696 - DNA, 1212 bp, synthetic construct
  misc_feature 1..1212: note = Description of Artificial Sequence: Synthetic coding sequence
  source 1..1212: mol_type = other DNA
gtggtgtccccagccctgctggaccgggagaccctggagaaccccaagtatgagctgatcatcgaggcccaggacatggccggcctggatgtgggcctgaccggcacagccacagccaccatcatgattgatgacaagaatgaccacagccccaagttcaccaagaaggagttccaggccaccgtggaggagggcgctgtgggcgtcatcgtgaacctgactgtggaggacaaggatgaccccaccactggagcctggagggctgcctacaccatcatcaatggaaatcctggccagagctttgagatccacaccaacccccagaccaatgaaggcatgctgtctgtggtgaagcccctggactatgagatcagcgccttccacaccctgctgatcaaggtggagaatgaagaccccctggtgcctgatgtgtcctatggccccagcagcacagccaccgtgcacatcaccgtgctggatgtgaatgaaggacctgtgttctacccagaccccatgatggtgacccggcaggaggacctgtctgtgggctctgtgctgctgactgtgaatgccacagatcctgacagcctgcagcaccagaccatccgctacagcgtgtacaaggaccctgctggctggctgaacatcaaccccatcaatggcaccgtggacaccacagctgtgctggaccgggagagcccctttgtggacaacagcgtgtacacagccctcttcctggccatcgacagcggcaaccccccagccaccggcaccggcaccctgctgatcaccctggaggatgtgaatgacaatgcccccttcatctaccccaccgtggccgaggtgtgtgatgatgccaagaacctgtctgtggtgatcctgggcgccagtgacaaggacctgcaccccaacacagaccccttcaagtttgagatccacaagcaggccgtgcctgacaaggtgtggaagatcagcaagatcaacaacacccacgccctggtgtccctgctgcagaacctgaacaaggccaactacaacctgcccatcatggtgacagacagcggcaagccacccatgaccaacatcacagacctgcgggtgcaggtgtgcagctgcaggaacagcaaggtggactgcaatgctgctggggccctgcgcttcagcctgcccagcgtgctgctgctgagcctcttcagcctggcctgcctgtag

SEQ ID NO: 18697 - DNA, 2721 bp, synthetic construct
  misc_feature 1..2721: note = Description of Artificial Sequence: Synthetic coding sequence
  source 1..2721: mol_type = other DNA
atgtgcagaattgctggggccctgcggaccctgctgcccctgctggccgccctgctgcaggcctctgtggaggccagcggggagatcgccctgtgcaagacaggcttcccagaagatgtgtacagcgctgtgctgagcaaggatgtgcatgagggccagcccctgctgaatgtgaagttcagcaactgcaatggcaagaggaaggtgcagtatgagagcagcgagcctgctgacttcaaggtggatgaagatggcatggtgtatgctgtgcgctccttccccctgagcagcgagcacgccaagttcctgatctatgcccaggacaaggagacccaggagaagtggcaggtggccgtgaagctgagcctgaagcccaccctgacagaggagagcgtgaaggagagcgctgaggtggaggagatcgtgttcccccggcagttcagcaagcacagcggccacctgcagaggcagaagagggactgggtgatcccccccatcaacctgcctgagaacagccggggccccttcccccaggagctggtgcgcatccgcagtgaccgggacaagaacctgagcctgcgctacagcgtgacaggccctggagctgaccagcccccaacaggcatcttcatcatcaaccccatcagcggccagctgtctgtgaccaagcccctggaccgggagcagatcgcccgcttccacctgcgggcccatgctgtggacatcaatggaaaccaggtggagaaccccattgatattgtcatcaacgtcatcgacatgaatgacaacagacctgagttcctgcaccaggtgtggaatggaacagtgcctgagggcagcaagccaggcacctacgtgatgacagtgacagccattgatgctgatgaccccaatgccctgaatggcatgctgcgctaccgcatcgtgtcccaggcccccagcacccccagccccaacatgttcaccatcaacaatgaaacaggagacatcatcaccgtggccgccggcctggaccgggagaaggtgcagcagtacaccctcatcatccaggccacagacatggagggcaaccccacctacggcctgagcaacacagccacagctgtgatcaccgtgacagatgtgaatgacaaccccccagagttcaccgccatgaccttctacggggaggtgcctgaaaatagagtggacatcatcgtggccaacctgactgtgacagacaaggaccagccccacaccccagcctggaatgctgtgtaccgcatctctggaggagaccccaccggccgctttgccatccagacagaccccaacagcaatgatggcctggtgacagtggtgaagcccatcgactttgagaccaacaggatgtttgtgctgactgtggccgctgagaaccaggtgcccctggccaagggcatccagcaccccccccagagcacagccaccgtgtctgtgacagtgattgatgtgaatgaaaacccctactttgcccccaaccccaagatcatccggcaggaggagggcctgcacgccggcaccatgctgaccaccttcaccgcccaggaccctgaccgctacatgcagcagaacatccgctacaccaagctgagtgaccctgccaactggctgaagattgatcctgtgaatggccagatcaccaccatcgctgtgctggaccgggagagccccaacgtgaagaacaacatctacaatgccaccttcctggccagtgacaatggcatcccccccatgagcggcaccggcaccctgcagatctacctgctggacatcaatgacaatgccccccaggtgctgccccaggaggccgagacctgtgagaccccagaccccaacagcatcaacatcacagccctggactatgacatcgaccccaatgccggcccctttgcctttgacctgcccctgagccctgtgaccatcaagaggaactggaccatcacccggctgaatggagactttgcccagctgaacctgaagatcaagttcctggaggccggcatctatgaggtgcccatcatcatcacagattctggcaacccccccaagagcaacatcagcatcctgcgggtgaaggtgtgccagtgtgacagcaatggagactgcacagatgtggacagaattgtgggcgccggcctgggcaccggggccatcatcgccatcctgctgtgcatcatcatcctgctgatcctggtgctgatgtttgtggtgtggatgaagaggcgggacaaggagcggcaggccaagcagctgctgattgatcctgaagatgatgtgcgggacaacatcctgaagtatgatgaggagggcggcggggaggaggaccaggactatgacctgagccagctgcagcagcctgacacagtggagccagatgccatcaagcctgtgggcatccggaggatggatgagcggcccatccacgccgagccccagtaccctgtgcgctctgctgccccccaccctggggacatcggggacttcatcaatgaaggcctgaaggctgctgacaatgaccccacagccccaccctatgacagcctgctggtgtttgattatgagggcagcggcagcacagctggcagcctgagcagcctgaacagcagcagcagcggcggggagcaggactatgactacctgaatgactggggcccccgcttcaagaagctggccgacatgtatggaggaggagatgactag

SEQ ID NO: 18698 - DNA, 2628 bp, synthetic construct
  misc_feature 1..2628: note = Description of Artificial Sequence: Synthetic coding sequence
  source 1..2628: mol_type = other DNA
atgttcctgctgcggcgctacgtgtgcatcttcacagagaagctgaagaaccaggccgagctgtatgtgttcctgtctgtgaagttcagcaactgcaatggcaagaggaaggtgcagtatgagagcagcgagcctgctgacttcaaggtggatgaagatggcatggtgtatgctgtgcgctccttccccctgagcagcgagcacgccaagttcctgatctatgcccaggacaaggagacccaggagaagtggcaggtggccgtgaagctgagcctgaagcccaccctgacagaggagagcgtgaaggagagcgctgaggtggaggagatcgtgttcccccggcagttcagcaagcacagcggccacctgcagaggcagaagagggactgggtgattcctcccatcaacctgcctgagaacagccggggccccttcccccaggagctggtgcgcatccgcagtgaccgggacaagaacctgagcctgcgctacagcgtgactggacctggagctgaccagccccccaccggcatcttcatcatcaaccccatcagcggccagctgtctgtgaccaagcccctggaccgggagcagatcgcccgcttccacctgcgggcccatgctgtggacatcaatggaaaccaggtggagaaccccatcgacatcgtcatcaacgtgattgacatgaatgacaacagacctgagttcctgcaccaggtgtggaatggcaccgtgcctgagggcagcaagccaggcacctacgtgatgacagtgacagccattgatgctgatgaccccaatgccctgaatggcatgctgcgctacagaattgtgtcccaggcccccagcacccccagccccaacatgttcaccatcaacaatgagaccggggacatcatcaccgtggccgccggcctggaccgggagaaggtgcagcagtacaccctcatcatccaggccacagacatggagggcaaccccacctacggcctgagcaacacagccacagctgtgatcaccgtgacagatgtgaatgacaaccccccagagttcaccgccatgaccttctatggagaggtgcctgagaacagagtggacatcatcgtggccaacctgactgtgacagacaaggaccagccccacaccccagcctggaatgctgtgtaccgcatcagcggcggggaccccaccggccgctttgccatccagacagaccccaacagcaatgatggcctggtgacagtggtgaagcccatcgactttgagaccaacaggatgtttgtgctgactgtggccgctgagaaccaggtgcccctggccaagggcatccagcaccccccccagagcacagccaccgtgtctgtgacagtgattgatgtgaatgaaaacccctactttgcccccaaccccaagatcatccggcaggaggagggcctgcatgctggcaccatgctgaccaccttcaccgcccaggaccctgaccgctacatgcagcagaacatccgctacaccaagctgagtgaccctgccaactggctgaagattgatcctgtgaatggccagatcaccaccatcgctgtgctggaccgggagagccccaacgtgaagaacaacatctacaatgccaccttcctggccagtgacaatggcatcccccccatgtctggaacaggcaccctgcagatctacctgctggacatcaatgacaatgccccccaggtgctgccccaggaggccgagacctgtgagaccccagaccccaacagcatcaacatcacagccctggactatgacatcgaccccaatgccggcccctttgcctttgacctgcccctgagccctgtgaccatcaagaggaactggaccatcacccggctgaatggagactttgcccagctgaacctgaagatcaagttcctggaggccggcatctatgaggtgcccatcatcatcacagacagcggcaacccccccaagagcaacatcagcatcctgcgggtgaaggtgtgccagtgtgacagcaatggagactgcacagatgtggaccgcatcgtgggcgccggcctgggcactggagccatcatcgccatcctgctgtgcatcatcatcctgctgatcctggtgctgatgtttgtggtgtggatgaagagaagagacaaggagcggcaggccaagcagctgctgattgatcctgaagatgatgtgcgggacaacatcctgaagtatgatgaggagggcggcggggaggaggaccaggactatgacctgagccagctgcagcagcctgacacagtggagccagatgccatcaagcctgtgggcatccggaggatggatgagcggcccatccatgctgagccccagtaccctgtgcgctctgctgccccccaccctggggacattggagacttcatcaatgaaggcctgaaggctgctgacaatgaccccacagccccaccctatgacagcctgctggtgtttgattatgagggcagcggcagcacagctggcagcctgagcagcctgaacagcagcagcagtggaggagagcaggactatgactacctgaatgactggggcccccgcttcaagaagctggccgacatgtatggaggaggagatgactag

SEQ ID NO: 18699 - DNA, 2355 bp, synthetic construct
  misc_feature 1..2355: note = Description of Artificial Sequence: Synthetic coding sequence
  source 1..2355: mol_type = other DNA
atgcagaggctgatgatgctgctggccaccagcggggcctgcctgggcctgctggccgtggccgctgtggccgccgccggggccaacccagcccagagggacacccacagcctgctgcccacccaccggcggcagaagagggactggatctggaaccagatgcacattgatgaggagaagaacaccagcctgccccaccacgtgggcaagatcaagagctctgtgtccaggaagaatgccaagtacctgctgaagggggagtatgtgggcaaggtgttccgggtggatgctgagactggagatgtgtttgccatcgagcggctggaccgggagaacatcagcgagtaccacctgacagctgtgattgtggacaaggacacaggagagaacctggagacccccagcagcttcaccatcaaggtgcatgatgtgaatgacaactggcctgtgttcacccacaggctcttcaatgcctctgtgcctgagagcagcgctgtgggcaccagcgtcatctctgtgacagctgtggatgctgatgaccccaccgtgggggaccacgcctctgtgatgtaccagatcctgaagggcaaggagtactttgccatcgacaacagcggccgcatcatcaccatcaccaagagcctggaccgggagaagcaggcccgctatgaaattgtggtggaggccagagatgcccagggcctgcggggggacagcggcacagccaccgtgctggtgaccctgcaggacatcaatgacaacttccccttcttcacccagaccaagtacacctttgtggtgcctgaggacaccagggtgggcacctctgtgggcagcctgtttgtggaggaccctgatgagccccagaacaggatgaccaagtacagcatcctgcggggggactaccaggatgccttcaccatcgagaccaacccagcccacaatgaaggcatcatcaagcccatgaagcccctggactatgagtacatccagcagtacagcttcatcgtggaggccacagaccccaccatcgacctgcgctacatgagccccccagctggcaacagagcccaggtgatcatcaacatcacagatgtggatgagccccccatcttccagcagcccttctaccacttccagctgaaggagaaccagaagaagcccctcatcggcaccgtgctggccatggaccctgatgctgcccggcacagcatcggctacagcatccggaggaccagtgacaagggccagttcttccgggtgaccaagaagggggacatctacaatgagaaggagctggaccgggaggtgtacccctggtacaacctgactgtggaggccaaggagctggacagcacaggcacccccaccgggaaggagagcatcgtgcaggtgcacatcgaggtgctggatgaaaatgacaatgcccctgagtttgccaagccctaccagcccaaggtgtgtgaaaatgctgtgcacggccagctggtgctgcagatcagcgccatcgacaaggacatcaccccaagaaatgtgaagttcaagttcatcctgaacacagagaacaacttcaccctgacagacaaccacgacaacacagccaacatcaccgtgaagtatggccagtttgaccgggagcacaccaaggtgcacttcctgcctgtggtgatcagtgacaatggcatgcccagcaggacaggcaccagcaccctgactgtggccgtgtgcaagtgcaatgagcagggcgagttcaccttctgtgaggacatggccgcccaggtgggcgtgtccatccaggccgtggtggccatcctgctgtgcatcctgaccatcaccgtcatcaccctgctgatcttcctgcggcggcggctgaggaagcaggcccgggcccacggcaagtctgtgcctgagatccacgagcagctggtgacctatgatgaggagggcggcggggagatggacaccaccagctatgatgtgtctgtgctgaacagcgtgagaagaggaggagccaagccacccaggcctgccctggatgcccggcccagcctgtatgcccaggtgcagaagcccccaagacatgcccctggggcccatggaggccctggagagatggccgccatgattgaggtgaagaaggatgaggccgaccatgatggagatggccccccctatgacaccctgcacatctacggctatgagggcagcgagagcattgctgagagcctgagcagcctgggcacagacagcagtgacagtgatgtggactatgacttcctgaatgactggggcccccgcttcaagatgctggccgagctgtatggcagtgacccccgggaggagctgctgtactag

SEQ ID NO: 18700 - DNA, 2010 bp, synthetic construct
  misc_feature 1..2010: note = Description of Artificial Sequence: Synthetic coding sequence
  source 1..2010: mol_type = other DNA
atgcagaggctgatgatgctgctggccaccagcggggcctgcctgggcctgctggccgtggccgctgtggccgccgccggggccaacccagcccagagggacacccacagcctgctgcccacccaccggcggcagaagagggactggatctggaaccagatgcacattgatgaggagaagaacaccagcctgccccaccacgtgggcaagatcaagagctctgtgtccaggaagaatgccaagtacctgctgaagggggagtatgtgggcaaggtgttccgggtggatgctgagactggagatgtgtttgccatcgagcggctggaccgggagaacatcagcgagtaccacctgacagctgtgattgtggacaaggacacaggagagaacctggagacccccagcagcttcaccatcaaggtgcatgatgtgaatgacaactggcctgtgttcacccacaggctcttcaatgcctctgtgcctgagagcagcgctgtgggcaccagcgtcatctctgtgacagctgtggatgctgatgaccccaccgtgggggaccacgcctctgtgatgtaccagatcctgaagggcaaggagtactttgccatcgacaacagcggccgcatcatcaccatcaccaagagcctggaccgggagaagcaggcccgctatgaaattgtggtggaggccagagatgcccagggcctgcggggggacagcggcacagccaccgtgctggtgaccctgcaggacatcaatgacaacttccccttcttcacccagaccaagtacacctttgtggtgcctgaggacaccagggtgggcacctctgtgggcagcctgtttgtggaggaccctgatgagccccagaacaggatgaccaagtacagcatcctgcggggggactaccaggatgccttcaccatcgagaccaacccagcccacaatgaaggcatcatcaagcccatgaagcccctggactatgagtacatccagcagtacagcttcatcgtggaggccacagaccccaccatcgacctgcgctacatgagccccccagctggcaacagagcccaggtgatcatcaacatcacagatgtggatgagccccccatcttccagcagcccttctaccacttccagctggtgctgcagatcagcgccatcgacaaggacatcaccccaagaaatgtgaagttcaagttcatcctgaacacagagaacaacttcaccctgacagacaaccacgacaacacagccaacatcaccgtgaagtatggccagtttgaccgggagcacaccaaggtgcacttcctgcctgtggtgatcagtgacaatggcatgcccagcaggacaggcaccagcaccctgactgtggccgtgtgcaagtgcaatgagcagggcgagttcaccttctgtgaggacatggccgcccaggtgggcgtgtccatccaggccgtggtggccatcctgctgtgcatcctgaccatcaccgtcatcaccctgctgatcttcctgcggcggcggctgaggaagcaggcccgggcccacggcaagtctgtgcctgagatccacgagcagctggtgacctatgatgaggagggcggcggggagatggacaccaccagctatgatgtgtctgtgctgaacagcgtgcggcggggcggggccaagccacccaggcctgccctggatgcccggcccagcctgtatgcccaggtgcagaagccacccaggcatgcccctggggcccacggcggccctggagagatggccgccatgattgaggtgaagaaggatgaagctgaccatgatggagatggccccccctatgacaccctgcacatctacggctatgagggcagcgagagcattgctgagagcctgagcagcctgggcacagacagcagtgacagtgatgtggactatgacttcctgaatgactggggcccccgcttcaagatgctggccgagctgtatggcagtgacccccgggaggagctgctgtactag

SEQ ID NO: 18701 - DNA, 672 bp, synthetic construct
  misc_feature 1..672: note = Description of Artificial Sequence: Synthetic coding sequence
  source 1..672: mol_type = other DNA
atgcccagcaggacaggcaccagcaccctgactgtggccgtgtgcaagtgcaatgagcagggcgagttcaccttctgtgaggacatggccgcccaggtgggcgtgtccatccaggccgtggtggccatcctgctgtgcatcctgaccatcaccgtcatcaccctgctgatcttcctgcggcggcggctgaggaagcaggcccgggcccacggcaagtctgtgcctgagatccacgagcagctggtgacctatgatgaggagggcggcggggagatggacaccaccagctatgatgtgtctgtgctgaacagcgtgcggcggggcggggccaagccacccaggcctgccctggatgcccggcccagcctgtatgcccaggtgcagaagccacccaggcatgcccctggggcccacggcggccctggagagatggccgccatgattgaggtgaagaaggatgaagctgaccatgatggagatggccccccctatgacaccctgcacatctacggctatgagggcagcgagagcattgctgagagcctgagcagcctgggcacagacagcagtgacagtgatgtggactatgacttcctgaatgactggggcccccgcttcaagatgctggccgagctgtatggcagtgacccccgggaggagctgctgtactag

SEQ ID NO: 18702 - DNA, 1578 bp, synthetic construct
  misc_feature 1..1578: note = Description of Artificial Sequence: Synthetic coding sequence
  source 1..1578: mol_type = other DNA
atgcccagcacctgcagcaaggagaacatgtgggcccggagcagcggctccatgcagaggcaggagacctgcagccccctgcgggcccagaacaggatgaccaagtacagcatcctgcggggggactaccaggatgccttcaccatcgagaccaacccagcccacaatgaaggcatcatcaagcccatgaagcccctggactatgagtacatccagcagtacagcttcatcgtggaggccacagaccccaccatcgacctgcgctacatgagccccccagctggcaacagagcccaggtgatcatcaacatcacagatgtggatgagccccccatcttccagcagcccttctaccacttccagctgaaggagaaccagaagaagcccctgattggaacagtgctggccatggaccctgatgctgcccggcacagcatcggctacagcatccggaggaccagtgacaagggccagttcttccgggtgaccaagaagggggacatctacaatgagaaggagctggaccgggaggtgtacccctggtacaacctgactgtggaggccaaggagctggacagcacaggcacccccaccgggaaggagagcatcgtgcaggtgcacatcgaggtgctggatgaaaatgacaatgcccctgagtttgccaagccctaccagcccaaggtgtgtgaaaatgctgtgcacggccagctggtgctgcagatcagcgccatcgacaaggacatcaccccaagaaatgtgaagttcaagttcatcctgaacacagagaacaacttcaccctgacagacaaccacgacaacacagccaacatcaccgtgaagtatggccagtttgaccgggagcacaccaaggtgcacttcctgcctgtggtgatcagtgacaatggcatgcccagcaggacaggcaccagcaccctgactgtggccgtgtgcaagtgcaatgagcagggcgagttcaccttctgtgaggacatggccgcccaggtgggcgtgtccatccaggccgtggtggccatcctgctgtgcatcctgaccatcaccgtcatcaccctgctgatcttcctgcggcggcggctgaggaagcaggcccgggcccacggcaagtctgtgcctgagatccacgagcagctggtgacctatgatgaggagggcggcggggagatggacaccaccagctatgatgtgtctgtgctgaacagcgtgcggcggggcggggccaagccacccaggcctgccctggatgcccggcccagcctgtatgcccaggtgcagaagccacccaggcatgcccctggggcccacggcggccctggagagatggccgccatgattgaggtgaagaaggatgaagctgaccatgatggagatggccccccctatgacaccctgcacatctacggctatgagggcagcgagagcattgctgagagcctgagcagcctgggcacagacagcagtgacagtgatgtggactatgacttcctgaatgactggggcccccgcttcaagatgctggccgagctgtatggcagtgacccccgggaggagctgctgtactag

SEQ ID NO: 18703 - DNA, 2373 bp, synthetic construct
  misc_feature 1..2373: note = Description of Artificial Sequence: Synthetic coding sequence
  source 1..2373: mol_type = other DNA
atgaggacctaccgctacttcctgctgctcttctgggtgggccagccctaccccaccctgagcacccccctgagcaagaggaccagcggcttccctgccaagaagagggccctggagctgagcggcaacagcaagaatgagctgaacagaagcaagaggtcctggatgtggaaccagttcttcctgctggaggagtacacaggcagtgactaccagtatgtgggcaagctgcacagcgaccaggacagaggagatggcagcctgaagtacatcctgtctggagatggagctggggacctcttcatcatcaatgaaaatactggagacatccaggccaccaagaggctggaccgggaggagaagcctgtgtacatcctgcgggcccaggccatcaacagaagaacaggccggcctgtggagcctgagagcgagttcatcatcaagatccatgacatcaatgacaatgagcccatcttcaccaaggaggtgtacacagccaccgtgcctgagatgtctgatgtgggcacctttgtggtgcaggtgacagccacagatgctgatgaccccacctacggcaacagcgccaaggtggtgtacagcatcctgcagggccagccctacttctctgtggagagcgagaccggcatcatcaagacagccctgctgaacatggacagagaaaatcgggagcagtaccaggtggtgatccaggccaaggacatgggcggccagatgggcggcctgagcggcaccaccaccgtgaacatcaccctgacagatgtgaatgacaaccccccacgcttcccccagagcacctaccagttcaagaccccagagagcagccccccaggcacccccatcggccgcatcaaggccagtgatgctgatgtgggagaaaatgctgagattgagtacagcatcacagatggagagggcctggacatgtttgatgtgatcacagaccaggagacccaggagggcatcatcaccgtgaagaagctgctggactttgagaagaagaaggtgtacaccctgaaggtggaggccagcaacccctacgtggagccccgcttcctgtacctgggccccttcaaggacagcgccaccgtgcgcatcgtggtggaggatgtggatgagccccctgtgttcagcaagctggcctacatcctgcagatccgggaggatgcccagatcaacaccaccatcggctctgtgacagcccaggaccctgatgctgccaggaaccctgtgaagtacagcgtggacagacacacagacatggaccgcatcttcaacattgattctggaaatggcagcatcttcaccagcaagctgctggaccgggagaccctgctgtggcacaacatcaccgtgattgccacagagatcaacaaccccaagcagagcagccgggtgcccctgtacatcaaggtgctggatgtgaatgacaatgcccctgagtttgctgagttctatgagacctttgtgtgtgagaaggccaaggctgaccagctgatccagaccctgcatgctgtggacaaggatgacccctacagcggccaccagttctccttcagcctggcccctgaggccgccagcggcagcaacttcaccatccaggacaacaaggacaacacagctggcatcctgaccaggaagaatggctacaacagacatgagatgagcacctacctgctgcctgtggtgatcagtgacaatgactaccctgtgcagagcagcactggaacagtgacagtgcgggtgtgtgcctgtgaccaccacggcaacatgcagagctgccacgccgaggccctgatccaccccaccggcctgagcactggagccctggtggccatcctgctgtgcatcgtcatcctgctggtgacagtggtgctgtttgctgccctgcggcggcagaggaagaaggagcccctcatcatcagcaaggaggacatccgggacaacatcgtgtcctacaatgatgaaggaggaggagaggaggacacccaggcctttgacatcggcaccctgaggaaccctgaggccatcgaggacaacaagctgcggcgggacatcgtgcctgaggccctcttcctgcccaggaggacccccacagcccgggacaacacagatgtgcgggacttcatcaaccagaggctgaaggaaaatgacacagaccccacagccccaccctatgacagcctggccacctacgcctatgagggcactggatctgtggccgacagcctgagcagcctggagagcgtgaccacagatgctgaccaggactatgactacctgagtgactggggcccccgcttcaagaagctggccgacatgtatggaggagtggacagcgacaaggacagctag

SEQ ID NO: 18704 - DNA, 576 bp, synthetic construct
  misc_feature 1..576: note = Description of Artificial Sequence: Synthetic coding sequence
  source 1..576: mol_type = other DNA
atgggcggcagcggcagccggctgagcaaggagctgctggccgagtaccaggacctgaccttcctgaccaagcaggagatcctgctggcccaccggcgcttctgtgagctgctgccccaggagcagaggtctgtggagagcagcctgcgggcccaggtgccctttgagcagatcctgagcctgcctgagctgaaggccaaccccttcaaggagcgcatctgcagggtcttcagcaccagccctgccaaggacagcctgagctttgaggacttcctggacctgctgagcgtcttcagtgacacagccaccccagacatcaagagccactacgccttccgcatctttgattttgatgatgatggcaccctgaaccgggaggacctgagccggctggtgaactgcctgaccggggagggggaggacacccggctgagcgccagcgagatgaagcagctgattgacaacatcctggaggagagtgacatcgacagagatggcaccatcaacctgtctgagttccagcacgtgatcagccgcagcccagactttgccagcagcttcaagatcgtgctgtag

SEQ ID NO: 18705 - DNA, 237 bp, synthetic construct
  misc_feature 1..237: note = Description of Artificial Sequence: Synthetic coding sequence
  source 1..237: mol_type = other DNA
atgtctgaggtgctgccctatggagatgagaagctgagcccctatggagatggaggagatgtgggccagatcttcagctgccgcctgcaggacaccaacaacttcttcggggccggccagaacaagaggcctcccaagctgggccagatcggccgcagcaagagggtggtgattgaagatgacagaattgatgatgtgctgaagaacatgacagacaaggcccctcctggggtgtag

SEQ ID NO: 18706 - DNA, 1563 bp, synthetic construct
  misc_feature 1..1563: note = Description of Artificial Sequence: Synthetic coding sequence
  source 1..1563: mol_type = other DNA
atggagggcggccctgctgtgtgctgccaggaccccagggctgagctggtggagcgggtggccgccattgatgtgacccacctggaggaggctgatggcggccctgagcccaccagaaatggagtggaccccccaccccgggcccgggccgccagcgtcatccctggcagcaccagccggctgctgcctgcccggcccagcctgagcgccaggaagctgagcctgcaggagaggcctgctggcagctacctggaggcccaggccggcccctatgccactggacctgccagccacatcagcccccgggcctggaggcggcccaccatcgagagccaccacgtggccatcagtgatgctgaggactgtgtgcagctgaaccagtacaagctgcagagcgagatcggcaagggggcctatggagtggtgcggctggcctacaatgaaagtgaggacagacactacgccatgaaggtgctgagcaagaagaagctgctgaagcagtatggcttcccccggcggcccccaccccggggcagccaggccgcccagggcggccctgccaagcagctgctgcccctggagcgggtgtaccaggagatcgccatcctgaagaagctggaccacgtgaatgtggtgaagctgattgaggtgctggatgatcctgctgaggacaacctgtacctggccctgcagaaccaggcccagaacatccagctggacagcaccaacatcgccaagccccacagcctgctgcccagcgagcagcaggacagcggcagcacctgggccgcccggtctgtgtttgacctgctgaggaaaggacctgtgatggaggtgccctgtgacaagcccttcagcgaggagcaggcccggctgtacctgagagatgtgatcctgggcctggagtacctgcactgccagaagatcgtgcaccgggacatcaagcccagcaacctgctgctgggagatgatggccacgtgaagattgctgactttggagtgagcaaccagtttgagggcaatgatgcccagctgagcagcacagctggcaccccagccttcatggcccctgaggccatcagtgacagcggccagagcttcagcggcaaggccctggatgtgtgggccactggagtgaccctgtactgctttgtgtatggcaagtgccccttcattgatgacttcatcctggccctgcacaggaagatcaagaatgaacctgtggtgtttcctgaggagcctgagatcagcgaggagctgaaggacctgatcctgaagatgctggacaagaaccctgagacccgcatcggcgtgcctgacatcaagctgcacccctgggtgaccaagaatggagaggagcccctgcccagcgaggaggagcactgcagcgtggtggaggtgacagaggaggaggtgaagaacagcgtgcggctcatccccagctggaccaccgtcatcctggtgaagtccatgctgaggaagaggagctttggaaacccctttgagccccaggcccggcgggaggagaggtccatgtctgcccctggcaacctgctggtgtag

SEQ ID NO: 18707 - DNA, 1518 bp, synthetic construct
  misc_feature 1..1518: note = Description of Artificial Sequence: Synthetic coding sequence
  source 1..1518: mol_type = other DNA
atggagggcggccctgctgtgtgctgccaggaccccagggctgagctggtggagcgggtggccgccattgatgtgacccacctggaggaggctgatggcggccctgagcccaccagaaatggagtggaccccccaccccgggcccgggccgccagcgtcatccctggcagcaccagccggctgctgcctgcccggcccagcctgagcgccaggaagctgagcctgcaggagaggcctgctggcagctacctggaggcccaggccggcccctatgccactggacctgccagccacatcagcccccgggcctggaggcggcccaccatcgagagccaccacgtggccatcagtgatgctgaggactgtgtgcagctgaaccagtacaagctgcagagcgagatcggcaagggggcctatggagtggtgcggctggcctacaatgaaagtgaggacagacactacgccatgaaggtgctgagcaagaagaagctgctgaagcagtatggcttcccccggcggcccccaccccggggcagccaggccgcccagggcggccctgccaagcagctgctgcccctggagcgggtgtaccaggagatcgccatcctgaagaagctggaccacgtgaatgtggtgaagctgattgaggtgctggatgatcctgctgaggacaacctgtacctggtgtttgacctgctgaggaaaggacctgtgatggaggtgccctgtgacaagcccttcagcgaggagcaggcccggctgtacctgagagatgtgatcctgggcctggagtacctgcactgccagaagatcgtgcaccgggacatcaagcccagcaacctgctgctgggagatgatggccacgtgaagattgctgactttggagtgagcaaccagtttgagggcaatgatgcccagctgagcagcacagctggcaccccagccttcatggcccctgaggccatcagtgacagcggccagagcttcagcggcaaggccctggatgtgtgggccactggagtgaccctgtactgctttgtgtatggcaagtgccccttcattgatgacttcatcctggccctgcacaggaagatcaagaatgaacctgtggtgtttcctgaggagcctgagatcagcgaggagctgaaggacctgatcctgaagatgctggacaagaaccctgagacccgcatcggcgtgcctgacatcaagctgcacccctgggtgaccaagaatggagaggagcccctgcccagcgaggaggagcactgcagcgtggtggaggtgacagaggaggaggtgaagaacagcgtgcggctcatccccagctggaccaccgtcatcctggtgaagtccatgctgaggaagaggagctttggaaacccctttgagccccaggcccggcgggaggagaggtccatgtctgcccctggcaacctgctggtgaaggagggctttggagagggcggcaagagccctgagctgcccggggtgcaggaggatgaagctgccagctag

SEQ ID NO: 18708 - DNA, 1599 bp, synthetic construct
  misc_feature 1..1599: note = Description of Artificial Sequence: Synthetic coding sequence
  source 1..1599: mol_type = other DNA
atgcagtttgggaagctgtggtgtggctgcagcggggagttccccacccggctgcggcggaggacccccctgacagaggccatggagggcggccctgctgtgtgctgccaggaccccagggctgagctggtggagcgggtggccgccattgatgtgacccacctggaggaggctgatggcggccctgagcccaccagaaatggagtggaccccccaccccgggcccgggccgccagcgtcatccctggcagcaccagccggctgctgcctgcccggcccagcctgagcgccaggaagctgagcctgcaggagaggcctgctggcagctacctggaggcccaggccggcccctatgccaccggccctgccagccacatcagcccccgggcctggaggcggcccaccatcgagagccaccacgtggccatcagtgatgctgaggactgtgtgcagctgaaccagtacaagctgcagagcgagattggaaaaggagcctacggcgtggtgcggctggcctacaatgaaagtgaagatagacactacgccatgaaggtgctgagcaagaagaagctgctgaagcagtatggcttcccccggcggcccccaccccggggcagccaggccgcccagggcggccctgccaagcagctgctgcccctggagcgggtgtaccaggagatcgccatcctgaagaagctggaccacgtgaatgtggtgaagctgattgaggtgctggatgatcctgctgaggacaacctgtacctggtgtttgacctgctgaggaagggccctgtgatggaggtgccctgtgacaagcccttcagcgaggagcaggcccggctgtacctgagagatgtgatcctgggcctggagtacctgcactgccagaagatcgtgcaccgggacatcaagcccagcaacctgctgctgggagatgatggccacgtgaagattgctgactttggagtgagcaaccagtttgagggcaatgatgcccagctgagcagcacagctggcaccccagccttcatggcccctgaggccatcagtgacagcggccagagcttcagcggcaaggccctggatgtgtgggccaccggggtgaccctgtactgctttgtgtatggaaaatgtcccttcattgatgacttcatcctggccctgcacaggaagatcaagaatgaacctgtggtgtttcctgaggagcctgagatcagcgaggagctgaaggacctgatcctgaagatgctggacaagaaccctgagaccagaattggagtgcctgacatcaagctgcacccctgggtgaccaagaatggagaggagcccctgcccagcgaggaggagcactgcagcgtggtggaggtgacagaggaggaggtgaagaacagcgtgcggctcatccccagctggaccaccgtcatcctggtgaagtccatgctgaggaagaggagctttggaaacccctttgagccccaggcccggcgggaggagaggtccatgtctgcccctggcaacctgctggtgaaggagggctttggagagggcggcaagagccctgagctgcccggggtgcaggaggatgaggccgccagctag

SEQ ID NO: 18709 - DNA, 1632 bp, synthetic construct
  misc_feature 1..1632: note = Description of Artificial Sequence: Synthetic coding sequence
  source 1..1632: mol_type = other DNA
atggagggcggccctgctgtgtgctgccaggaccccagggctgagctggtggagcgggtggccgccattgatgtgacccacctggaggaggctgatggcggccctgagcccaccagaaatggagtggaccccccaccccgggcccgggccgccagcgtcatccctggcagcaccagccggctgctgcctgcccggcccagcctgagcgccaggaagctgagcctgcaggagaggcctgctggcagctacctggaggcccaggccggcccctatgccactggacctgccagccacatcagcccccgggcctggaggcggcccaccatcgagagccaccacgtggccatcagtgatgctgaggactgtgtgcagctgaaccagtacaagctgcagagcgagatcggcaagggggcctatggagtggtgcggctggcctacaatgaaagtgaggacagacactacgccatgaaggtgctgagcaagaagaagctgctgaagcagtatggcttcccccggcggcccccaccccggggcagccaggccgcccagggcggccctgccaagcagctgctgcccctggagcgggtgtaccaggagatcgccatcctgaagaagctggaccacgtgaatgtggtgaagctgattgaggtgctggatgatcctgctgaggacaacctgtacctggccctgcagaaccaggcccagaacatccagctggacagcaccaacatcgccaagccccacagcctgctgcccagcgagcagcaggacagcggcagcacctgggccgcccggtctgtgtttgacctgctgaggaaaggacctgtgatggaggtgccctgtgacaagcccttcagcgaggagcaggcccggctgtacctgagagatgtgatcctgggcctggagtacctgcactgccagaagatcgtgcaccgggacatcaagcccagcaacctgctgctgggagatgatggccacgtgaagattgctgactttggagtgagcaaccagtttgagggcaatgatgcccagctgagcagcacagctggcaccccagccttcatggcccctgaggccatcagtgacagcggccagagcttcagcggcaaggccctggatgtgtgggccactggagtgaccctgtactgctttgtgtatggcaagtgccccttcattgatgacttcatcctggccctgcacaggaagatcaagaatgaacctgtggtgtttcctgaggagcctgagatcagcgaggagctgaaggacctgatcctgaagatgctggacaagaaccctgagacccgcatcggcgtgcctgacatcaagctgcacccctgggtgaccaagaatggagaggagcccctgcccagcgaggaggagcactgcagcgtggtggaggtgacagaggaggaggtgaagaacagcgtgcggctcatccccagctggaccaccgtcatcctggtgaagtccatgctgaggaagaggagctttggaaacccctttgagccccaggcccggcgggaggagaggtccatgtctgcccctggcaacctgctggtgaaggagggctttggagagggcggcaagagccctgagctgcccggggtgcaggaggatgaagctgccagctag

SEQ ID NO: 18710 - DNA, 1695 bp, synthetic construct
  misc_feature 1..1695: note = Description of Artificial Sequence: Synthetic coding sequence
  source 1..1695: mol_type = other DNA
atggatgactttgagaggagaagagagctgcggcggcagaagcgggaggagatgaggctggaggccgagagaattgcctaccagagaaatgatgatgatgaggaggaggccgcccgggagaggagaagaagagcccggcaggagcggctgcggcagaagcaggaggaggagagcctgggccaggtgacagaccaggtggaggtgaatgcccagaacagcgtgcctgatgaggaggccaagaccaccaccaccaacacccaggtggagggagatgatgaggccgccttcctggagcggctggcccggcgggaggagcggcggcagaagaggctgcaggaggccctggagcggcagaaggagtttgaccccaccatcacagatgccagcctgagcctgcccagcaggaggatgcagaatgacacagcagaaaatgagaccacagagaaggaggagaagtctgagagccggcaggagagatatgaaattgaggagacagaaacagtgaccaagagctaccagaagaatgactggagagatgctgaggagaacaagaaggaggacaaggagaaggaggaggaggaggaggagaagcccaagaggggcagcattggagagaaccagggcgaggagaagggcaccaaggtgcaggccaagcgggagaagctgcaggaggacaagcccaccttcaagaaggaggagatcaaggatgagaagatcaagaaggacaaggagcccaaggaggaggtgaagagcttcatggacaggaagaagggcttcacagaggtgaagagccagaatggagagttcatgacccacaagctgaagcacacagagaacaccttcagcaggcctgggggccgggcctctgtggacaccaaggaggccgagggcgccccccaggtggaggccggcaagaggctggaggagctgcggaggagaagaggagaaacagaaagtgaggagtttgagaagctgaagcagaagcagcaggaggccgccctggagctggaggagctgaagaagaagcgggaggagaggaggaaggtgctggaggaggaggagcagaggaggaagcaggaggaggccgacaggaagctgcgggaggaggaggagaagaggcggctgaaggaggagattgaaagaagaagagctgaggccgctgagaagaggcagaagatgccagaagatggcctgagtgatgacaagaagcccttcaagtgcttcacccccaagggcagcagcctgaagattgaggagagagctgagttcctgaacaagtctgtgcagaagagcagcggcgtgaagagcacccaccaggccgccatcgtgtccaagattgacagccggctggagcagtacaccagcgccatcgagggcaccaagagcgccaagcccaccaagccagctgccagtgacctgcctgtgcctgctgagggcgtgaggaacatcaagtccatgtgggagaagggaaatgtgttcagcagccccacagctgctggcacccccaacaaggagacagctggcctgaaggtgggcgtgagcagccgcatcaatgagtggctgaccaagaccccagatggcaacaagagccctgcccccaagcccagcgacctgcggcctggagatgtgagcagcaagaggaacctgtgggagaagcagagcgtggacaaggtgaccagccccaccaaggtgtag

SEQ ID NO: 18711 - DNA, 2382 bp, synthetic construct
  misc_feature 1..2382: note = Description of Artificial Sequence: Synthetic coding sequence
  source 1..2382: mol_type = other DNA
atggatgactttgagaggagaagagagctgcggcggcagaagcgggaggagatgaggctggaggccgagagaattgcctaccagagaaatgatgatgatgaggaggaggccgcccgggagaggagaagaagagcccggcaggagcggctgcggcagaagcaggaggaggagagcctgggccaggtgacagaccaggtggaggtgaatgcccagaacagcgtgcctgatgaggaggccaagaccaccaccaccaacacccaggtggagggagatgatgaggccgccttcctggagcggctggcccggcgggaggagcggcggcagaagaggctgcaggaggccctggagcggcagaaggagtttgaccccaccatcacagatgccagcctgagcctgcccagcaggaggatgcagaatgacacagcagaaaatgagaccacagagaaggaggagaagtctgagagccggcaggagagatatgaaattgaggagacagaaacagtgaccaagagctaccagaagaatgactggagagatgctgaggagaacaagaaggaggacaaggagaaggaggaggaggaggaggagaagcccaagaggggcagcattggagagaaccaggtggaggtgatggtggaggagaagaccacagagagccaggaggagaccgtggtgatgagcctgaagaatggccagatcagcagcgaggagcccaagcaggaggaggagcgggagcagggcagtgatgagatcagccaccacgagaagatggaggaggaggacaaggagagagctgaggccgagcgggcccggctggaggccgaggagcgggagcgcatcaaggccgagcaggacaagaagattgctgatgagcgggccagaattgaagctgaggagaaggccgccgcccaggagcgggagcggcgggaggccgaggagcgggagaggatgagggaggaggagaagagagctgctgaggagcggcagaggatcaaggaggaggagaagagagctgctgaggagcggcagaggatcaaggaggaggagaagagagctgctgaggagcggcagaggatcaaggaggaggagaagagagctgctgaggagcggcagagggcccgggcagaggaggaggagaaggccaaggtggaggagcagaagaggaacaagcagctggaggagaagaagcacgccatgcaggagaccaagatcaagggggagaaggtggagcagaagattgagggcaagtgggtgaatgagaagaaggcccaggaggacaagctgcagacagctgtgctgaagaagcagggcgaggagaagggcaccaaggtgcaggccaagcgggagaagctgcaggaggacaagcccaccttcaagaaggaggagatcaaggatgagaagatcaagaaggacaaggagcccaaggaggaggtgaagagcttcatggacaggaagaagggcttcacagaggtgaagagccagaatggagagttcatgacccacaagctgaagcacacagagaacaccttcagcaggcctgggggccgggcctctgtggacaccaaggaggccgagggcgccccccaggtggaggccggcaagaggctggaggagctgcggcggcggcggggggagacagagagcgaggagtttgagaagctgaagcagaagcagcaggaggccgccctggagctggaggagctgaagaagaagcgggaggagaggaggaaggtgctggaggaggaggagcagaggaggaagcaggaggaggccgacaggaagctgcgggaggaggaggagaagaggcggctgaaggaggagattgaaagaagaagagctgaggccgctgagaagaggcagaagatgccagaagatggcctgagtgatgacaagaagcccttcaagtgcttcacccccaagggcagcagcctgaagattgaggagcgggcagagttcctgaacaagtctgtgcagaagagcagtggagtgaagagcacccaccaggccgccatcgtgtccaagattgacagccggctggagcagtacaccagcgccatcgagggcaccaagagcgccaagcccaccaagccagctgccagtgacctgcctgtgcctgctgagggcgtgaggaacatcaagtccatgtgggagaagggaaatgtgttcagcagccccacagctgctggcacccccaacaaggagacagctggcctgaaggtgggcgtgagcagccgcatcaatgagtggctgaccaagaccccagatggcaacaagagccctgcccccaagcccagcgacctgcggcctggagatgtgagcagcaagaggaacctgtgggagaagcagagcgtggacaaggtgaccagccccaccaaggtgtag

SEQ ID NO: 18712 - DNA, 1617 bp, synthetic construct
  misc_feature 1..1617: note = Description of Artificial Sequence: Synthetic coding sequence
  source 1..1617: mol_type = other DNA
atggatgactttgagaggagaagagagctgcggcggcagaagcgggaggagatgaggctggaggccgagagaattgcctaccagagaaatgatgatgatgaggaggaggccgcccgggagaggagaagaagagcccggcaggagcggctgcggcagaagcaggaggaggagagcctgggccaggtgacagaccaggtggaggtgaatgcccagaacagcgtgcctgatgaggaggccaagaccaccaccaccaacacccaggtggagggagatgatgaggccgccttcctggagcggctggcccggcgggaggagcggcggcagaagaggctgcaggaggccctggagcggcagaaggagtttgaccccaccatcacagatgccagcctgagcctgcccagcaggaggatgcagaatgacacagcagaaaatgagaccacagagaaggaggagaagtctgagagccggcaggagagatatgaaattgaggagacagaaacagtgaccaagagctaccagaagaatgactggagagatgctgaggagaacaagaaggaggacaaggagaaggaggaggaggaggaggagaagcccaagaggggcagcattggagagaaccagatcaaggatgagaagatcaagaaggacaaggagcccaaggaggaggtgaagagcttcatggacaggaagaagggcttcacagaggtgaagagccagaatggagagttcatgacccacaagctgaagcacacagagaacaccttcagcaggcctgggggccgggcctctgtggacaccaaggaggccgagggcgccccccaggtggaggccggcaagaggctggaggagctgcggaggagaagaggagaaacagaaagtgaggagtttgagaagctgaagcagaagcagcaggaggccgccctggagctggaggagctgaagaagaagcgggaggagaggaggaaggtgctggaggaggaggagcagaggaggaagcaggaggaggccgacaggaagctgcgggaggaggaggagaagaggcggctgaaggaggagattgaaagaagaagagctgaggccgctgagaagaggcagaagatgccagaagatggcctgagtgatgacaagaagcccttcaagtgcttcacccccaagggcagcagcctgaagattgaggagagagctgagttcctgaacaagtctgtgcagaagagcagcggcgtgaagagcacccaccaggccgccatcgtgtccaagattgacagccggctggagcagtacaccagcgccatcgagggcaccaagagcgccaagcccaccaagccagctgccagtgacctgcctgtgcctgctgagggcgtgaggaacatcaagtccatgtgggagaagggaaatgtgttcagcagccccacagctgctggcacccccaacaaggagacagctggcctgaaggtgggcgtgagcagccgcatcaatgagtggctgaccaagaccccagatggcaacaagagccctgcccccaagcccagcgacctgcggcctggagatgtgagcagcaagaggaacctgtgggagaagcagagcgtggacaaggtgaccagccccaccaaggtgtag

SEQ ID NO: 18713 - DNA, 1677 bp, synthetic construct
  misc_feature 1..1677: note = Description of Artificial Sequence: Synthetic coding sequence
  source 1..1677: mol_type = other DNA
atgctgggcggcagcggcagccacggccgccgcagcctggccgccctgagccagatcgcctaccagagaaatgatgatgatgaggaggaggccgcccgggagaggagaagaagagcccggcaggagcggctgcggcagaagcaggaggaggagagcctgggccaggtgacagaccaggtggaggtgaatgcccagaacagcgtgcctgatgaggaggccaagaccaccaccaccaacacccaggtggagggagatgatgaggccgccttcctggagcggctggcccggcgggaggagcggcggcagaagaggctgcaggaggccctggagcggcagaaggagtttgaccccaccatcacagatgccagcctgagcctgcccagcaggaggatgcagaatgacacagcagaaaatgagaccacagagaaggaggagaagtctgagagccggcaggagagatatgaaattgaggagacagaaacagtgaccaagagctaccagaagaatgactggagagatgctgaggagaacaagaaggaggacaaggagaaggaggaggaggaggaggagaagcccaagaggggcagcattggagagaaccagggcgaggagaagggcaccaaggtgcaggccaagcgggagaagctgcaggaggacaagcccaccttcaagaaggaggagatcaaggatgagaagatcaagaaggacaaggagcccaaggaggaggtgaagagcttcatggacaggaagaagggcttcacagaggtgaagagccagaatggagagttcatgacccacaagctgaagcacacagagaacaccttcagcaggcctgggggccgggcctctgtggacaccaaggaggccgagggcgccccccaggtggaggccggcaagaggctggaggagctgcggaggagaagaggagaaacagaaagtgaggagtttgagaagctgaagcagaagcagcaggaggccgccctggagctggaggagctgaagaagaagcgggaggagaggaggaaggtgctggaggaggaggagcagaggaggaagcaggaggaggccgacaggaagctgcgggaggaggaggagaagaggcggctgaaggaggagattgaaagaagaagagctgaggccgctgagaagaggcagaagatgccagaagatggcctgagtgatgacaagaagcccttcaagtgcttcacccccaagggcagcagcctgaagattgaggagagagctgagttcctgaacaagtctgtgcagaagagcagcggcgtgaagagcacccaccaggccgccatcgtgtccaagattgacagccggctggagcagtacaccagcgccatcgagggcaccaagagcgccaagcccaccaagccagctgccagtgacctgcctgtgcctgctgagggcgtgaggaacatcaagtccatgtgggagaagggaaatgtgttcagcagccccacagctgctggcacccccaacaaggagacagctggcctgaaggtgggcgtgagcagccgcatcaatgagtggctgaccaagaccccagatggcaacaagagccctgcccccaagcccagcgacctgcggcctggagatgtgagcagcaagaggaacctgtgggagaagcagagcgtggacaaggtgaccagccccaccaaggtgtag

SEQ ID NO: 18714 - DNA, 1617 bp, synthetic construct; identical to SEQ ID NO: 18712
  misc_feature 1..1617: note = Description of Artificial Sequence: Synthetic coding sequence
  source 1..1617: mol_type = other DNA

SEQ ID NO: 18715 - DNA, 1692 bp, synthetic construct
  misc_feature 1..1692: note = Description of Artificial Sequence: Synthetic coding sequence
  source 1..1692: mol_type = other DNA
atggatgactttgagaggagaagagagctgcggcggcagaagcgggaggagatgaggctggaggccgagagaattgcctaccagagaaatgatgatgatgaggaggaggccgcccgggagaggagaagaagagcccggcaggagcggctgcggcagaagcaggaggaggagagcctgggccaggtgacagaccaggtggaggtgaatgcccagaacagcgtgcctgatgaggaggccaagaccaccaccaccaacacccaggtggagggagatgatgaggccgccttcctggagcggctggcccggcgggaggagcggcggcagaagaggctgcaggaggccctggagcggcagaaggagtttgaccccaccatcacagatgccagcctgagcctgcccagcaggaggatgcagaatgacacagcagaaaatgagaccacagagaaggaggagaagtctgagagccggcaggagagatatgaaattgaggagacagaaacagtgaccaagagctaccagaagaatgactggagagatgctgaggagaacaagaaggaggacaaggagaaggaggaggaggaggaggagaagcccaagaggggcagcattggagagaaccagggcgaggagaagggcaccaaggtgcaggccaagcgggagaagctgcaggaggacaagcccaccttcaagaaggaggagatcaaggatgagaagatcaagaaggacaaggagcccaaggaggaggtgaagagcttcatggacaggaagaagggcttcacagaggtgaagagccagaatggagagttcatgacccacaagctgaagcacacagagaacaccttcagcaggcctgggggccgggcctctgtggacaccaaggaggccgagggcgccccccaggtggaggccggcaagaggctggaggagctgcggaggagaagaggagaaacagaaagtgaggagtttgagaagctgaagcagaagcagcaggaggccgccctggagctggaggagctgaagaagaagcgggaggagaggaggaaggtgctggaggaggaggagcagaggaggaagcaggaggaggccgacaggaagctgcgggaggaggaggagaagaggcggctgaaggaggagattgaaagaagaagagctgaggccgctgagaagaggcagaagatgccagaagatggcctgagtgatgacaagaagcccttcaagtgcttcacccccaagggcagcagcctgaagattgaggagagagctgagttcctgaacaagtctgtgcagaagtctggagtgaagagcacccaccaggccgccatcgtgtccaagattgacagccggctggagcagtacaccagcgccatcgagggcaccaagagcgccaagcccaccaagccagctgccagtgacctgcctgtgcctgctgagggcgtgaggaacatcaagtccatgtgggagaagggaaatgtgttcagcagccccacagctgctggcacccccaacaaggagacagctggcctgaaggtgggcgtgagcagccgcatcaatgagtggctgaccaagaccccagatggcaacaagagccctgcccccaagcccagcgacctgcggcctggagatgtgagcagcaagaggaacctgtgggagaagcagagcgtggacaaggtgaccagccccaccaaggtgtag

SEQ ID NO: 18716 - DNA, 1599 bp, synthetic construct
  misc_feature 1..1599: note = Description of Artificial Sequence: Synthetic coding sequence
  source 1..1599: mol_type = other DNA
atgctgggcggcagcggcagccacggccgccgcagcctggccgccctgagccagatcgcctaccagagaaatgatgatgatgaggaggaggccgcccgggagaggagaagaagagcccggcaggagcggctgcggcagaagcaggaggaggagagcctgggccaggtgacagaccaggtggaggtgaatgcccagaacagcgtgcctgatgaggaggccaagaccaccaccaccaacacccaggtggagggagatgatgaggccgccttcctggagcggctggcccggcgggaggagcggcggcagaagaggctgcaggaggccctggagcggcagaaggagtttgaccccaccatcacagatgccagcctgagcctgcccagcaggaggatgcagaatgacacagcagaaaatgagaccacagagaaggaggagaagtctgagagccggcaggagagatatgaaattgaggagacagaaacagtgaccaagagctaccagaagaatgactggagagatgctgaggagaacaagaaggaggacaaggagaaggaggaggaggaggaggagaagcccaagaggggcagcattggagagaaccagatcaaggatgagaagatcaagaaggacaaggagcccaaggaggaggtgaagagcttcatggacaggaagaagggcttcacagaggtgaagagccagaatggagagttcatgacccacaagctgaagcacacagagaacaccttcagcaggcctgggggccgggcctctgtggacaccaaggaggccgagggcgccccccaggtggaggccggcaagaggctggaggagctgcggaggagaagaggagaaacagaaagtgaggagtttgagaagctgaagcagaagcagcaggaggccgccctggagctggaggagctgaagaagaagcgggaggagaggaggaaggtgctggaggaggaggagcagaggaggaagcaggaggaggccgacaggaagctgcgggaggaggaggagaagaggcggctgaaggaggagattgaaagaagaagagctgaggccgctgagaagaggcagaagatgccagaagatggcctgagtgatgacaagaagcccttcaagtgcttcacccccaagggcagcagcctgaagattgaggagagagctgagttcctgaacaagtctgtgcagaagagcagcggcgtgaagagcacccaccaggccgccatcgtgtccaagattgacagccggctggagcagtacaccagcgccatcgagggcaccaagagcgccaagcccaccaagccagctgccagtgacctgcctgtgcctgctgagggcgtgaggaacatcaagtccatgtgggagaagggaaatgtgttcagcagccccacagctgctggcacccccaacaaggagacagctggcctgaaggtgggcgtgagcagccgcatcaatgagtggctgaccaagaccccagatggcaacaagagccctgcccccaagcccagcgacctgcggcctggagatgtgagcagcaagaggaacctgtgggagaagcagagcgtggacaaggtgaccagccccaccaaggtgtag

SEQ ID NO: 18717 - DNA, 528 bp, synthetic construct
  misc_feature 1..528: note = Description of Artificial Sequence: Synthetic coding sequence
  source 1..528: mol_type = other DNA
atgccagaagatggcctgagtgatgacaagaagcccttcaagtgcttcacccccaagggcagcagcctgaagattgaggagagagctgagttcctgaacaagtctgtgcagaagtctggagtgaagagcacccaccaggccgccatcgtgtccaagattgacagccggctggagcagtacaccagcgccatcgagggcaccaagagcgccaagcccaccaagccagctgccagtgacctgcctgtgcctgctgagggcgtgaggaacatcaagtccatgtgggagaagggaaatgtgttcagcagccccacagctgctggcacccccaacaaggagacagctggcctgaaggtgggcgtgagcagccgcatcaatgagtggctgaccaagaccccagatggcaacaagagccctgcccccaagcccagcctgaccttctgcagcagcctgtttggcctgtggctgattggcaacctgctgctgctgcccagcttcctgcccctgctgcctgagtgggtgttcctgtag

SEQ ID NO: 18718 - DNA, 219 bp, synthetic construct
  misc_feature 1..219: note = Description of Artificial Sequence: Synthetic coding sequence
  source 1..219: mol_type = other DNA
atggatgactttgagaggagaagagagctgcggcggcagaagcgggaggagatgaggctggaggccgagagaattgcctaccagagaaatgatgatgatgaggaggaggccgcccgggagaggagaagaagagcccggcaggagcggctgcggcagaagcaggaggaggagagcctgggccaggtgacagaccaggtggaggtgaatgcccagaactag

SEQ ID NO: 18719 - DNA, 1380 bp, synthetic construct
  misc_feature 1..1380: note = Description of Artificial Sequence: Synthetic coding sequence
  source 1..1380: mol_type = other DNA
atggatgactttgagaggagaagagagctgcggcggcagaagcgggaggagatgaggctggaggccgagagaattgcctaccagagaaatgatgatgatgaggaggaggccgcccgggagaggagaagaagagcccggcaggagcggctgcggcagaagcaggaggaggagagcctgggccaggtgacagaccaggtggaggtgaatgcccagaacagcgtgcctgatgaggaggccaagaccaccaccaccaacacccaggtggagggagatgatgaggccgccttcctggagcggctggcccggcgggaggagcggcggcagaagaggctgcaggaggccctggagcggcagaaggagtttgaccccaccatcacagatgccagcctgagcctgcccagcaggaggatgcagaatgacacagcagaaaatgagaccacagagaaggaggagaagtctgagagccggcaggagagatatgaaattgaggagacagaaacagtgaccaagagctaccagaagaatgactggagagatgctgaggagaacaagaaggaggacaaggagaaggaggaggaggaggaggagaagcccaagaggggcagcattggagagaaccagatcaaggatgagaagatcaagaaggacaaggagcccaaggaggaggtgaagagcttcatggacaggaagaagggcttcacagaggtgaagagccagaatggagagttcatgacccacaagctgaagcacacagagaacaccttcagcaggcctgggggccgggcctctgtggacaccaaggaggccgagggcgccccccaggtggaggccggcaagaggctggaggagctgcggaggagaagaggagaaacagaaagtgaggagtttgagaagctgaagcagaagcagcaggaggccgccctggagctggaggagctgaagaagaagcgggaggagaggaggaaggtgctggaggaggaggagcagaggaggaagcaggaggaggccgacaggaagctgcgggaggaggaggagaagaggcggctgaaggaggagattgaaagaagaagagctgaggccgctgagaagaggcagaagatgccagaagatggcctgagtgatgacaagaagcccttcaagtgcttcacccccaagggcagcagcctgaagattgaggagagagctgagttcctgaacaagtctgtgcagaagagcagcggcgtgaagagcacccaccaggccgccatcgtgtccaagattgacagccggctggagcagtacaccagcgccatcgagggcaccaagagcgccaagcccaccaagccagctgccagtgacctgcctgtgcctgctgagggcgtgaggaacatcaagagctag

SEQ ID NO: 18720 - DNA, 219 bp, synthetic construct; identical to SEQ ID NO: 18718
  misc_feature 1..219: note = Description of Artificial Sequence: Synthetic coding sequence
  source 1..219: mol_type = other DNA

SEQ ID NO: 18721 - DNA, 1632 bp, synthetic construct
  misc_feature 1..1632: note = Description of Artificial Sequence: Synthetic coding sequence
  source 1..1632: mol_type = other DNA
atgaccagctacatgaaggtggaccggcagtggaatgctgagatcctggagctgatcctgggcaccggccagctgagcacaggccagatcgcctaccagagaaatgatgatgatgaggaggaggccgcccgggagaggagaagaagagcccggcaggagcggctgcggcagaagcaggaggaggagagcctgggccaggtgacagaccaggtggaggtgaatgcccagaacagcgtgcctgatgaggaggccaagaccaccaccaccaacacccaggtggagggagatgatgaagctgccttcctggagcggctggcccggcgggaggagcggcggcagaagaggctgcaggaggccctggagcggcagaaggagtttgaccccaccatcacagatgccagcctgagcctgcccagcaggaggatgcagaatgacacagcagaaaatgagaccacagagaaggaggagaagtctgagagccggcaggagagatatgaaattgaggagacagagaccgtgaccaagagctaccagaagaatgactggagagatgctgaggagaacaagaaggaggacaaggagaaggaggaggaggaggaggagaagcccaagaggggcagcatcggggagaaccagatcaaggatgagaagatcaagaaggacaaggagcccaaggaggaggtgaagagcttcatggacaggaagaagggcttcacagaggtgaagagccagaatggagagttcatgacccacaagctgaagcacacagagaacaccttcagcaggcctgggggccgggcctctgtggacaccaaggaggccgagggcgccccccaggtggaggccggcaagaggctggaggagctgcggcggcggcggggggagacagagagcgaggagtttgagaagctgaagcagaagcagcaggaggccgccctggagctggaggagctgaagaagaagcgggaggagaggaggaaggtgctggaggaggaggagcagaggaggaagcaggaggaggccgacaggaagctgcgggaggaggaggagaagaggcggctgaaggaggagattgaaagaagaagagctgaggccgctgagaagaggcagaagatgccagaagatggcctgagtgatgacaagaagcccttcaagtgcttcacccccaagggcagcagcctgaagattgaggagcgggcagagttcctgaacaagtctgtgcagaagagcagtggagtgaagagcacccaccaggccgccatcgtgtccaagattgacagccggctggagcagtacaccagcgccatcgagggcaccaagagcgccaagcccaccaagccagctgccagtgacctgcctgtgcctgctgagggcgtgaggaacatcaagtccatgtgggagaagggaaatgtgttcagcagccccacagctgctggcacccccaacaaggagacagctggcctgaaggtgggcgtgagcagccgcatcaatgagtggctgaccaagaccccagatggcaacaagagccctgcccccaagcccagcgacctgcggcctggagatgtgagcagcaagaggaacctgtgggagaagcagagcgtggacaaggtgaccagccccaccaaggtgtag

SEQ ID NO: 18722 - DNA, 3975 bp, synthetic construct
  misc_feature 1..3975: note = Description of Artificial Sequence: Synthetic coding sequence
  source 1..3975: mol_type = other DNA
atggctgacagcctgtacaacatccggctgctgcgggagttcagcaatgagtacctgaacaagtgcttctacctgaccctggaggacatgctgtatgcccccctggtgctgaagcccaacgtgatggtgttcatcgccgagctgttctggtggtttgaaaatgtgaagccagactttgtgcagcccagagatgtgcaggagctgaaggatgccaagacagtgctgcaccagaagagcagccggccccctgtgcccatcagcaatgccaccaagaggagcttcctgggcagccctgctgctggcaccctggccgagctgcagccccctgtgcagctgcctgctgagggctgccaccgccactacctgcaccctgaggagcctgagtacctgggcaagggcacagctgccttcagccccagccaccccctgctgcccctgcggcagaagcagcagaagagcatccagggcgaggacatcccagaccagaggcacaggagcaacagcctgaccagggtggatggccagcccagaggagctgccatcgcctggccagagaagaagaccaggcctgccagccagcccaccccatttgccctgcaccacgccgccagctgtgaggtggaccccagcagcggggacagcatcagcctggcccggagcatcagcaaggacagcctggccagcaacatcgtgaacctgaccccccagaaccagccccaccccacagccaccaagagccacggcaagagcctgctgagcaatgtgtccattgaagatgaggaggaggagctggtggccatcgtgcgggcagatgtggtgccccagcaggccgaccctgagttcccccgggccagcccccgggccctgggcctgacagccaatgcccggagcccccagggccagctggacaccagcgagagcaagccagacagcttcttcctggagcccctgatgcctgctgtgctgaagccagccaaggagaagcaggtgatcaccaaggaggatgagcggggggagggccggcccaggagcatcgtgtcccggcggcccagcgagggcccccagcccctggtgcggaggaagatgacaggcagccgggacctgaacagaaccttcacccccatcccctgcagcgagttccccatgggcatcgaccccacagaaacaggccccctgtctgtggagacagctggggaggtgtgtggcggccccctggccctgggcggctttgaccccttcccccagggccccagcacagatggcttcttcctgcacgtgggccgggcagatgaggacacagagggccgcctgtatgtgtcctgcagcaagagccccaacagccatgacagcgagccctggaccctgctgcggcaggacagcgacagtgatgtggtggacatcgaggaggccgagcatgacttcatgggagaggcccaccctgtggtgttcagccgctacatcggggaggaggagagcgccaagctgcaggaggacatgaaggtgaaggagcacgaggacaaggatgatgccagcggccgcagcagcccctgcctgagcacagccagccagatgagctctgtgtccatggccagcggctctgtgaagatgaccagctttgctgagaggaagctgcagaggctgaacagctgtgagaccaagagcagcaccagcagcagccagaagaccaccccagatgccagcgagagctgcccagcccccctgaccacctggaggcagaagcgggagcagagccccagccagcacggcaaggaccctgccagcctgctggccagcgagctggtgcagctgcacatgcagctggaggagaagagaagagccatcgaggcccagaagaagaagatggaggccctgagcgcccggcagaggctgaagctgggcaaggccgccttcctgcacgtggtgaagaagggcaaggccgaggccgccccacccctgcggcctgagcactttgccaaggagtacagccagcacaatggagaggactgtggagatgctgtgtccaagacagaggacttcctggtgaaggaggagcagcgggaggagctgctgcacgagccccaggatgtggacaaggagagcctggcctttgcccagcagcacaaggccaaggaccctgtggccctgcacgagctggagaggaacaaggtgatctctgctgccctgctggaggacacagtgggggaggtggtggatgtgaatgaatgtgacctgagcattgagaagctgaatgagaccatcagcaccctgcagcaggccatcctgaagatcagccagcagcaggagcagctgctgatgaagagccccaccgtgcctgtgcccggcagcaagaacaacagccaggaccacaaggtgaaggcccctgtgcactttgtggagcccctgagccccaccggggtggccggccacaggaaggccccccggctgggccagggcaggaacagccgcagcggccggcctgctgagctgaaggtgcccaaggaccggccccagggcagcagccgcagcaagacccccacccccagcgtggagaccctgccccacctgcggcccttccctgccagcagccaccccaggacccccacagaccccggcctggacagcgccctggagcccagcggggacccccacggcaagtgcctgtttgacagctaccgcctgcatgatgagagcaaccagaggaccctgaccctgagcagcagcaaggatgccaacatcctgtctgagcagatgagcctgaaggaggtgctggatgcctctgtgaaggaggtgggcagcagcagcagtgatgtgtctgggaaggagagcgtgcctgtggaggagcccctgcggagccgggccagcctcatcgaggtggacctgagtgacctgaaggccccagatgaagatggagagctggtgtccctggatggcagcgctgacctggtgtctgagggggaccagaagccaggagtgggcttcttcttcaaggatgagcagaaggccgaggatgagctggccaagaagagagctgccttcctgctgaagcagcagaggaaggccgaggaggcccgggtgaggaagcagcagctggaggccgaggtggagctgaagagagatgaggcccggaggaaggccgaggaggacagagtgaggaaggaggaggagaaggcccggcgggagctgatcaagcaggagtacctgcggaggaagcagcagcagatcctggaggagcagggcctgggcaagcccaagagcaagcccaagaagccccggcccaagtctgtgcaccgggaggagagctgcagcgacagcggcaccaagtgcagcagcaccccagacaacctgagcaggacccagagcggcagcagcctgagcctggccagcgctgccaccacagagcctgagagcgtgcacagcggcggcacccccagccagagggtggagagcatggaggccctgcccatcctgagcaggaaccccagccgcagcacagaccgggactgggagacagccagcgctgccagcagcctggcctctgtggccgagtacacaggccccaagctgttcaaggagcccagcagcaagagcaacaagcccatcatccacaatgccatcagccactgctgcctggccggcaaggtgaatgagccccacaagaacagcatcctggaggagctggagaagtgtgatgccaaccactacatcatcctcttcagagatgctggctgccagttccgggccctgtactgctactacccagacacagaggagatctacaagctgaccggcaccggccccaagaacatcaccaagaagatgattgacaagctgtacaagtacagcagtgacaggaagcagttcaacctgatcccagccaagaccatgtctgtgtctgtggatgccctgaccatccacaaccacctgtggcagcccaagaggcctgctgtgcccaagaaggcccagaccaggaagtag

SEQ ID NO: 18723 - DNA, 4809 bp, synthetic construct
  misc_feature 1..4809: note = Description of Artificial Sequence: Synthetic coding sequence
  source 1..4809: mol_type = other DNA
atggtggatgccagcggccgggctgctgctgagggctggaggaagatggaggcccccccagatggagctgctgacctggtgcccctggacagatatgatgctgcccgggccaagattgctgccaacctgcagtggatctgtgccaaggcctacggccgggacaacatccctgaggacctgcgggaccccttctacgtggaccagtatgagcaggagcacatcaagccccctgtgatcaagctgctgctgagcagcgagctgtactgccgggtgtgcagcctcatcctgaagggggaccaggtggccgccctgcagggccaccagagcgtcatccaggccctgagcaggaagggcatctacgtgatggagagtgatgacacccctgtgacagaaagtgacctgagccgggcccccatcaagatgtctgcccacatggccatggtggatgccctgatgatggcctacacagtggagatgatcagcattgagaaggtggtggcctctgtgaagcgcttcagcaccttcagcgccagcaaggagctgccctatgacctggaggatgccatggtgttctggatcaacaaggtgaacctgaagatgagggagatcacagagaaggaggtgaagctgaagcagcagctgctggagagccctgcccaccagaaggtgcgctaccgccgggagcacctgagcgcccggcagagcccctacttccccctgctggaggacctgatgagagatggcagtgatggagctgccctgctggccgtcatccactactactgcccagagcagatgaagctggatgacatctgcctgaaggaggtgacctccatggctgacagcctgtacaacatccggctgctgcgggagttcagcaatgagtacctgaacaagtgcttctacctgaccctggaggacatgctgtatgcccccctggtgctgaagcccaacgtgatggtgttcatcgccgagctgttctggtggtttgaaaatgtgaagccagactttgtgcagcccagagatgtgcaggagctgaaggatgccaagacagtgctgcaccagaagagcagccggccccctgtgcccatcagcaatgccaccaagaggagcttcctgggcagccctgctgctggcaccctggccgagctgcagccccctgtgcagctgcctgctgagggctgccaccgccactacctgcaccctgaggagcctgagtacctgggcaagggcacagctgccttcagccccagccaccccctgctgcccctgcggcagaagcagcagaagagcatccagggcgaggacatcccagaccagaggcacaggagcaacagcctgaccagggtggatggccagcccagaggagctgccatcgcctggccagagaagaagaccaggcctgccagccagcccaccccatttgccctgcaccacgccgccagctgtgaggtggaccccagcagcggggacagcatcagcctggcccggagcatcagcaaggacagcctggccagcaacatcgtgaacctgaccccccagaaccagccccaccccacagccaccaagagccacggcaagagcctgctgagcaatgtgtccattgaagatgaggaggaggagctggtggccatcgtgcgggcagatgtggtgccccagcaggccgaccctgagttcccccgggccagcccccgggccctgggcctgacagccaatgcccggagcccccagggccagctggacaccagcgagagcaagccagacagcttcttcctggagcccctgatgcctgctgtgctgaagccagccaaggagaagcaggtgatcaccaaggaggatgagcggggggagggccggcccaggagcatcgtgtcccggcggcccagcgagggcccccagcccctggtgcggaggaagatgacaggcagccgggacctgaacagaaccttcacccccatcccctgcagcgagttccccatgggcatcgaccccacagaaacaggccccctgtctgtggagacagctggggaggtgtgtggcggccccctggccctgggcggctttgaccccttcccccagggccccagcacagatggcttcttcctgcacgtgggccgggcagatgaggacacagagggccgcctgtatgtgtcctgcagcaagagccccaacagccatgacagcgagccctggaccctgctgcggcaggacagcgacagtgatgtggtggacatcgaggaggccgagcatgacttcatgggagaggcccaccctgtggtgttcagccgctacatcggggaggaggagagcgccaagctgcaggaggacatgaaggtgaaggagcacgaggacaaggatgatgccagcggccgcagcagcccctgcctgagcacagccagccagatgagctctgtgtccatggccagcggctctgtgaagatgaccagctttgctgagaggaagctgcagaggctgaacagctgtgagaccaagagcagcaccagcagcagccagaagaccaccccagatgccagcgagagctgcccagcccccctgaccacctggaggcagaagcgggagcagagccccagccagcacggcaaggaccctgccagcctgctggccagcgagctggtgcagctgcacatgcagctggaggagaagagaagagccatcgaggcccagaagaagaagatggaggccctgagcgcccggcagaggctgaagctgggcaaggccgccttcctgcacgtggtgaagaagggcaaggccgaggccgccccacccctgcggcctgagcactttgccaaggagtacagccagcacaatggagaggactgtggagatgctgtgtccaagacagaggacttcctggtgaaggaggagcagcgggaggagctgctgcacgagccccaggatgtggacaaggagagcctggcctttgcccagcagcacaaggccaaggaccctgtggccctgcacgagctggagaggaacaaggtgatctctgctgccctgctggaggacacagtgggggaggtggtggatgtgaatgaatgtgacctgagcattgagaagctgaatgagaccatcagcaccctgcagcaggccatcctgaagatcagccagcagcaggagcagctgctgatgaagagccccaccgtgcctgtgcccggcagcaagaacaacagccaggaccacaaggtgaaggcccctgtgcactttgtggagcccctgagccccaccggggtggccggccacaggaaggccccccggctgggccagggcaggaacagccgcagcggccggcctgctgagctgaaggtgcccaaggaccggccccagggcagcagccgcagcaagacccccacccccagcgtggagaccctgccccacctgcggcccttccctgccagcagccaccccaggacccccacagaccccggcctggacagcgccctggagcccagcggggacccccacggcaagtgcctgtttgacagctaccgcctgcatgatgagagcaaccagaggaccctgaccctgagcagcagcaaggatgccaacatcctgtctgagcagatgagcctgaaggaggtgctggatgcctctgtgaaggaggtgggcagcagcagcagtgatgtgtctgggaaggagagcgtgcctgtggaggagcccctgcggagccgggccagcctcatcgaggtggacctgagtgacctgaaggccccagatgaagatggagagctggtgtccctggatggcagcgctgacctggtgtctgagggggaccagaagccaggagtgggcttcttcttcaaggatgagcagaaggccgaggatgagctggccaagaagagagctgccttcctgctgaagcagcagaggaaggccgaggaggcccgggtgaggaagcagcagctggaggccgaggtggagctgaagagagatgaggcccggaggaaggccgaggaggacagagtgaggaaggaggaggagaaggcccggcgggagctgatcaagcaggagtacctgcggaggaagcagcagcagatcctggaggagcagggcctgggcaagcccaagagcaagcccaagaagccccggcccaagtctgtgcaccgggaggagagctgcagcgacagcggcaccaagtgcagcagcaccccagacaacctgagcaggacccagagcggcagcagcctgagcctggccagcgctgccaccacagagcctgagagcgtgcacagcggcggcacccccagccagagggtggagagcatggaggccctgcccatcctgagcaggaaccccagccgcagcacagaccgggactgggagacagccagcgctgccagcagcctggcctctgtggccgagtacacaggccccaagctgttcaaggagcccagcagcaagagcaacaagcccatcatccacaatgccatcagccactgctgcctggccggcaaggtgaatgagccccacaagaacagcatcctggaggagctggagaagtgtgatgccaaccactacatcatcctcttcagagatgctggctgccagttccgggccctgtactgctactacccagacacagaggagatctacaagctgaccggcaccggccccaagaacatcaccaagaagatgattgacaagctgtacaagtacagcagtgacaggaagcagttcaacctgatcccagccaagaccatgtctgtgtctgtggatgccctgaccatccacaaccacctgtggcagcccaagaggcctgctgtgcccaagaaggcccagaccaggaagtag

SEQ ID NO: 18724 - DNA, 4842 bp, synthetic construct
  misc_feature 1..4842: note = Description of Artificial Sequence: Synthetic coding sequence
  source 1..4842: mol_type = other DNA
atggtggatgccagcggccgggctgctgctgagggctggaggaagatggaggcccccccagatggagctgctgacctggtgcccctggacagatatgatgctgcccgggccaagattgctgccaacctgcagtggatctgtgccaaggcctacggccgggacaacatccctgaggacctgcgggaccccttctacgtggaccagtatgagcaggagcacatcaagccccctgtgatcaagctgctgctgagcagcgagctgtactgccgggtgtgcagcctcatcctgaagggggaccaggtggccgccctgcagggccaccagagcgtcatccaggccctgagcaggaagggcatctacgtgatggagagtgatgacacccctgtgacagaaagtgacctgagccgggcccccatcaagatgtctgcccacatggccatggtggatgccctgatgatggcctacacagtggagatgatcagcattgagaaggtggtggcctctgtgaagcgcttcagcaccttcagcgccagcaaggagctgccctatgacctggaggatgccatggtgttctggatcaacaaggtgaacctgaagatgagggagatcacagagaaggaggtgaagctgaagcagcagctgctggagagccctgcccaccagaagagccccagcaagtggtactggaagctggtgcctgtgcgctacagaagagagcacctgagcgcccggcagagcccctacttccccctgctggaggacctgatgagagatggcagtgatggagctgccctgctggccgtcatccactactactgcccagagcagatgaagctggatgacatctgcctgaaggaggtgacctccatggctgacagcctgtacaacatccggctgctgcgggagttcagcaatgagtacctgaacaagtgcttctacctgaccctggaggacatgctgtatgcccccctggtgctgaagcccaacgtgatggtgttcatcgccgagctgttctggtggtttgaaaatgtgaagccagactttgtgcagcccagagatgtgcaggagctgaaggatgccaagacagtgctgcaccagaagagcagcaggcctcctgtgcccatcagcaatgccaccaagaggagcttcctgggcagccctgctgctggcaccctggccgagctgcagccccctgtgcagctgcctgctgagggctgccaccgccactacctgcaccctgaggagcctgagtacctgggcaaaggaacagctgccttcagccccagccaccccctgctgcccctgcggcagaagcagcagaagagcatccagggcgaggacatcccagaccagaggcacaggagcaacagcctgaccagggtggatggccagcccaggggggccgccatcgcctggccagagaagaagaccaggcctgccagccagcccaccccatttgccctgcaccacgccgccagctgtgaggtggaccccagcagcggggacagcatcagcctggcccggagcatcagcaaggacagcctggccagcaacatcgtgaacctgaccccccagaaccagccccaccccacagccaccaagagccacggcaagagcctgctgagcaatgtgtccattgaagatgaggaggaggagctggtggccatcgtgcgggcagatgtggtgccccagcaggccgaccctgagttcccccgggccagcccccgggccctgggcctgacagccaatgcccggagcccccagggccagctggacaccagcgagagcaagccagacagcttcttcctggagcccctgatgcctgctgtgctgaagccagccaaggagaagcaggtgatcaccaaggaggatgagcggggggagggccggcccaggagcatcgtgtccagaagacccagcgagggcccccagcccctggtgcggaggaagatgacaggcagccgggacctgaacagaaccttcacccccatcccctgcagcgagttccccatgggcatcgaccccacagagaccggccccctgtctgtggagacagctggggaggtgtgtggcggccccctggccctgggcggctttgaccccttcccccagggccccagcacagatggcttcttcctgcacgtgggccgggcagatgaggacacagagggccgcctgtatgtgtcctgcagcaagagccccaacagccatgattctgagccctggaccctgctgcggcaggacagcgacagtgatgtggtggacatcgaggaggccgagcatgacttcatgggagaggcccaccctgtggtgttcagccgctacatcggggaggaggagagcgccaagctgcaggaggacatgaaggtgaaggagcacgaggacaaggatgatgccagcggccgcagcagcccctgcctgagcacagccagccagatgagctctgtgtccatggccagcggctctgtgaagatgaccagctttgctgagaggaagctgcagaggctgaacagctgtgagaccaagagcagcaccagcagcagccagaagaccaccccagatgccagcgagagctgcccagcccccctgaccacctggaggcagaagcgggagcagagccccagccagcacggcaaggaccctgccagcctgctggccagcgagctggtgcagctgcacatgcagctggaggagaagaggcgggccatcgaggcccagaagaagaagatggaggccctgagcgcccggcagaggctgaagctgggcaaggccgccttcctgcacgtggtgaagaagggcaaggccgaggccgccccacccctgcggcctgagcactttgccaaggagtacagccagcacaacggggaggactgtggagatgctgtgtccaagacagaggacttcctggtgaaggaggagcagcgggaggagctgctgcacgagccccaggatgtggacaaggagagcctggcctttgcccagcagcacaaggccaaggaccctgtggccctgcacgagctggagaggaacaaggtgatctctgctgccctgctggaggacacagtgggggaggtggtggatgtgaatgaatgtgacctgagcattgagaagctgaatgagaccatcagcaccctgcagcaggccatcctgaagatcagccagcagcaggagcagctgctgatgaagagccccaccgtgcctgtgcccggcagcaagaacaacagccaggaccacaaggtgaaggcccctgtgcactttgtggagcccctgagccccactggagtggccggccacaggaaggccccccggctgggccagggcaggaacagccgcagcggccggcctgctgagctgaaggtgcccaaggaccggccccagggcagcagccgcagcaagacccccaccccatctgtggagaccctgccccacctgcggcccttccctgccagcagccaccccaggacccccacagatcctggcctggacagcgccctggagcccagcggggacccccacggcaagtgcctgtttgacagctaccgcctgcatgatgagagcaaccagaggaccctgaccctgagcagcagcaaggatgccaacatcctgtctgagcagatgagcctgaaggaggtgctggatgcctctgtgaaggaggtgggcagcagcagcagtgatgtgtctgggaaggagagcgtgcctgtggaggagcccctgcggagccgggccagcctgattgaggtggacctgagtgacctgaaggccccagatgaagatggagagctggtgtccctggatggcagcgctgacctggtgtctgagggggaccagaagccaggagtgggcttcttcttcaaggatgagcagaaggcagaagatgagctggccaagaagagagctgccttcctgctgaagcagcagaggaaggccgaggaggcccgggtgaggaagcagcagctggaggccgaggtggagctgaagagagatgaggcccggaggaaggccgaggaggacagagtgaggaaggaggaggagaaggcccggcgggagctgatcaagcaggagtacctgcggaggaagcagcagcagatcctggaggagcagggcctgggcaagcccaagagcaagcccaagaagccccggcccaagtctgtgcaccgggaggagagctgcagcgacagcggcaccaagtgcagcagcaccccagacaacctgagcaggacccagagcggcagcagcctgagcctggccagcgctgccaccacagagcctgagagcgtgcacagcggcggcacccccagccagagggtggagagcatggaggccctgcccatcctgagcaggaaccccagccgcagcacagaccgggactgggagacagccagcgctgccagcagcctggcctctgtggccgagtacacaggccccaagctgttcaaggagcccagcagcaagagcaacaagcccatcatccacaatgccatcagccactgctgcctggccggcaaggtgaatgagccccacaagaacagcatcctggaggagctggagaagtgtgatgccaaccactacatcatcctcttcagagatgctggctgccagttccgggccctgtactgctactacccagacacagaggagatctacaagctgactggaacaggccccaagaacatcaccaagaagatgattgacaagctgtacaagtacagcagtgacaggaagcagttcaacctgatcccagccaagaccatgtctgtgtctgtggatgccctgaccatccacaaccacctgtggcagcccaagaggcctgctgtgcccaagaaggcccagaccaggaagtag

SEQ ID NO: 18725 - DNA, 1983 bp, synthetic construct
  misc_feature 1..1983: note = Description of Artificial Sequence: Synthetic coding sequence
  source 1..1983: mol_type = other DNA
atgaggatgcccagcagcacctgggcccgcatcatgagcagctgtggctgtgatgcctgccgggtgggccccagctctgtgatgaggcccagcccccgctacccccgggcctgggtgaccaggacctgggtgcccatccccccccggcccatggccagcagcggctctgtgccccgggactgctggctgctggccgccatcgccagcctgaccctgaatgacaccctgctgcaccgggtggtgccccacggccagagcttccagaatggctacgccggcatcttccacttccagctgtggcagtttggagagtgggtggatgtggtggtggatgacctgctgcccatcaaggatggcaagctggtgtttgtgcacagcgctgagggcaatgagttctggagcgccctgctggagaaggcctatgccaaggtgaatggcagctatgaggccctgagcggcggcagcaccagcgagggctttgaggacttcaccggcggcgtgacagagtggtatgagctgaggaaggcccccagcgacctgtaccagatcatcctgaaggccctggagcggggcagcctgctgggctgcagcattgacatcagctctgtgctggacatggaggccatcaccttcaagaagctggtgaagggccacgcctacagcgtgactggagccaagcaggtgaactaccggggccaggtggtgtccctcatccgcatgaggaacccctggggcgaggtggagtggacaggagcctggagcgacagcagcagcgagtggaacaacgtggacccctatgaaagagaccagctgcgggtgaagatggaggatggagagttctggatgtccttccgggacttcatgagggagttcacccggctggagatctgcaacctgaccccagatgccctgaagagcaggaccatcaggaagtggaacaccaccctgtatgagggcacctggaggcggggcagcacagctgggggctgcaggaactacccagccaccttctgggtgaacccccagttcaagatccggctggatgaaacagatgatcctgatgattatggagaccgggagagcggctgcagctttgtgctggccctgatgcagaagcacagaagaagagagcggcgcttcggccgggacatggagaccatcggctttgctgtgtatgaggtgcccccagagctggtgggccagcctgctgtgcacctgaagagggacttcttcctggccaatgccagccgggcccggtctgagcagttcatcaacctgcgggaggtgtccacccgcttccggctgcccccaggagaatatgtggtggtgcccagcacctttgagcccaacaaggagggggactttgtgctgcgcttcttcagcgagaagtctgctggcaccgtggagctggatgaccagatccaggccaacctgcctgatgagcaggtgctgtctgaggaggagattgatgagaacttcaaggccctcttccggcagctggccggggaggacatggagatctctgtgaaggagctgcggaccatcctgaaccgcatcatcagcaagcacaaggacctgcggaccaagggcttcagcctggagagctgccgctccatggtgaacctgatggacagagatggaaatggcaagctgggcctggtggagttcaacatcctgtggaaccgcatccggaactacctgagcatcttcaggaagtttgacctggacaagagcggctccatgtctgcctatgagatgaggatggccatcgagagcgctggcttcaagctgaacaagaagctgtatgagctgatcatcacccgctacagcgagccagacctggccgtggactttgacaactttgtgtgctgcctggtgcggctggagaccatgttccgcttcttcaagaccctggacacagacctggatggagtggtgacctttgacctcttcaagtggctgcagctgaccatgtttgcctag

SEQ ID NO: 18726 - DNA, 2145 bp, synthetic construct
  misc_feature 1..2145: note = Description of Artificial Sequence: Synthetic coding sequence
  source 1..2145: mol_type = other DNA
atgtctgaggagatcatcacccctgtgtactgcaccggggtgtctgcccaggtgcagaagcagagggcccgggagctgggcctgggcagacatgaaaatgccatcaagtacctgggccaggactatgagcagctgcgggtgcgctgcctgcagagcggcaccctcttcagagatgaggccttcccccctgtgccccagagcctgggctacaaggacctgggccccaacagcagcaagacctacggcatcaagtggaagaggcccacagagctgctgagcaacccccagttcatcgtggatggagccaccaggacagacatctgccagggcgccctgggggactgctggctgctggccgccatcgccagcctgaccctgaatgacaccctgctgcaccgggtggtgccccacggccagagcttccagaatggctacgccggcatcttccacttccagctgtggcagtttggagagtgggtggatgtggtggtggatgacctgctgcccatcaaggatggcaagctggtgtttgtgcacagcgctgagggcaatgagttctggagcgccctgctggagaaggcctatgccaaggtgaatggcagctatgaggccctgagcggcggcagcaccagcgagggctttgaggacttcaccggcggcgtgacagagtggtatgagctgaggaaggcccccagcgacctgtaccagatcatcctgaaggccctggagcggggcagcctgctgggctgcagcattgacatcagctctgtgctggacatggaggccatcaccttcaagaagctggtgaagggccacgcctacagcgtgactggagccaagcaggtgaactaccggggccaggtggtgtccctcatccgcatgaggaacccctggggcgaggtggagtggacaggagcctggagcgacagcagcagcgagtggaacaacgtggacccctatgaaagagaccagctgcgggtgaagatggaggatggagagttctggatgtccttccgggacttcatgagggagttcacccggctggagatctgcaacctgaccccagatgccctgaagagcaggaccatcaggaagtggaacaccaccctgtatgagggcacctggaggcggggcagcacagctgggggctgcaggaactacccagccaccttctgggtgaacccccagttcaagatccggctggatgaaacagatgatcctgatgattatggagaccgggagagcggctgcagctttgtgctggccctgatgcagaagcacagaagaagagagcggcgcttcggccgggacatggagaccatcggctttgctgtgtatgaggtgcccccagagctggtgggccagcctgctgtgcacctgaagagggacttcttcctggccaatgccagccgggcccggtctgagcagttcatcaacctgcgggaggtgtccacccgcttccggctgcccccaggagaatatgtggtggtgcccagcacctttgagcccaacaaggagggggactttgtgctgcgcttcttcagcgagaagtctgctggcaccgtggagctggatgaccagatccaggccaacctgcctgatgagcaggtgctgtctgaggaggagattgatgagaacttcaaggccctcttccggcagctggccggggaggacatggagatctctgtgaaggagctgcggaccatcctgaaccgcatcatcagcaagcacaaggacctgcggaccaagggcttcagcctggagagctgccgctccatggtgaacctgatggacagagatggaaatggcaagctgggcctggtggagttcaacatcctgtggaaccgcatccggaactacctgagcatcttcaggaagtttgacctggacaagagcggctccatgtctgcctatgagatgaggatggccatcgagagcgctggcttcaagctgaacaagaagctgtatgagctgatcatcacccgctacagcgagccagacctggccgtggactttgacaactttgtgtgctgcctggtgcggctggagaccatgttccgcttcttcaagaccctggacacagacctggatggagtggtgacctttgacctcttcaagtggctgcagctgaccatgtttgcctag

SEQ ID NO: 18727 - DNA, 2145 bp, synthetic construct; identical to SEQ ID NO: 18726
  misc_feature 1..2145: note = Description of Artificial Sequence: Synthetic coding sequence
  source 1..2145: mol_type = other DNA

SEQ ID NO: 18728 - DNA, 489 bp, synthetic construct
  misc_feature 1..489: note = Description of Artificial Sequence: Synthetic coding sequence
  source 1..489: mol_type = other DNA
atgtctgaggagatcatcacccctgtgtactgcaccggggtgtctgcccaggtgcagaagcagagggcccgggagctgggcctgggcagacatgaaaatgccatcaagtacctgggccaggactatgagcagctgcgggtgcgctgcctgcagagcggcaccctcttcagagatgaggccttcccccctgtgccccagagcctgggctacaaggacctgggccccaacagcagcaagacctacggcatcaagtggaagaggcccacagagctgctgagcaacccccagttcatcgtggatggagccaccaggacagacatctgccagggcgccctgggggactgctggctgctggccgccatcgccagcctgaccctgaatgacaccctgctgcaccgggtggtgccccacggccagagcttccagaatggctacgccggcatcttccacttccagctgtggcagtttggagagtgggtggatgtgtag

SEQ ID NO: 18729 - DNA, 2145 bp, synthetic construct; identical to SEQ ID NO: 18726
  misc_feature 1..2145: note = Description of Artificial Sequence: Synthetic coding sequence
  source 1..2145: mol_type = other DNA

SEQ ID NO: 18730 - DNA, 459 bp, synthetic construct
  misc_feature 1..459: note = Description of Artificial Sequence: Synthetic coding sequence
  source 1..459: mol_type = other DNA
atgtctgaggagatcatcacccctgtgtactgcaccggggtgtctgcccaggtgcagaagcagagggcccgggagctgggcctgggcagacatgaaaatgccatcaagtacctgggccaggactatgagcagctgcgggtgcgctgcctgcagagcggcaccctcttcagagatgaggccttcccccctgtgccccagagcctgggctacaaggacctgggccccaacagcagcaagacctacggcatcaagtggaagaggcccacagagctgctgagcaacccccagttcatcgtggatggagccaccaggacagacatctgccagggcgccctgggggactgctggctgctggccgccatcgccagcctgaccctgaatgacaccctgctgcaccgggtggtgccccacggccagagcttccagaatggctacgccggcatcttccacttccagtag

SEQ ID NO: 18731 - DNA, 489 bp, synthetic construct; identical to SEQ ID NO: 18728
  misc_feature 1..489: note = Description of Artificial Sequence: Synthetic coding sequence
  source 1..489: mol_type = other DNA

SEQ ID NO: 18732 - DNA, 492 bp, synthetic construct
  misc_feature 1..492: note = Description of Artificial Sequence: Synthetic coding sequence
  source 1..492: mol_type = other DNA
atgtctgaggagatcatcacccctgtgtactgcaccggggtgtctgcccaggtgcagaagcagagggcccgggagctgggcctgggcagacatgaaaatgccatcaagtacctgggccaggactatgagcagctgcgggtgcgctgcctgcagagcggcaccctcttcagagatgaggccttcccccctgtgccccagagcctgggctacaaggacctgggccccaacagcagcaagacctacggcatcaagtggaagaggcccacagagctgctgagcaacccccagttcatcgtggatggagccaccaggacagacatctgccagggcgccctgggggactgctggctgctggccgccatcgccagcctgaccctgaatgacaccctgctgcaccgggtggtgccccacggccagagcttccagaatggctacgccggcatcttccacttccagctgtggcagtttggagagtgggtggatgtggtgtag

SEQ ID NO: 18733 - DNA, 576 bp, synthetic construct
  misc_feature 1..576: note = Description of Artificial Sequence: Synthetic coding sequence
  source 1..576: mol_type = other DNA
atgtctgaggagatcatcacccctgtgtactgcaccggggtgtctgcccaggtgcagaagcagagggcccgggagctgggcctgggcagacatgaaaatgccatcaagtacctgggccaggactatgagcagctgcgggtgcgctgcctgcagagcggcaccctcttcagagatgaggccttcccccctgtgccccagagcctgggctacaaggacctgggccccaacagcagcaagacctacggcatcaagtggaagaggcccacagagctgctgagcaacccccagttcatcgtggatggagccaccaggacagacatctgccagggcgccctgggggactgctggctgctggccgccatcgccagcctgaccctgaatgacaccctgctgcaccgggtggtgccccacggccagagcttccagaatggctacgccggcatcttccacttccagctgtggcagtttggagagtgggtggatgtggtggtggatgacctgctgcccatcaaggatggcaagctggtgtttgtgcacagcgctgagggcaatgagttctggagcgccctgctgtag

SEQ ID NO: 18734 - DNA, 513 bp, synthetic construct
  misc_feature 1..513: note = Description of Artificial Sequence: Synthetic coding sequence
  source 1..513: mol_type = other DNA
atgtctgaggagatcatcacccctgtgtactgcaccggggtgtctgcccaggtgcagaagcagagggcccgggagctgggcctgggcagacatgaaaatgccatcaagtacctgggccaggactatgagcagctgcgggtgcgctgcctgcagagcggcaccctcttcagagatgaggccttcccccctgtgccccagagcctgggctacaaggacctgggccccaacagcagcaagacctacggcatcaagtggaagaggcccacagagctgctgagcaacccccagttcatcgtggatggagccaccaggacagacatctgccagggcgccctgggggactgctggctgctggccgccatcgccagcctgaccctgaatgacaccctgctgcaccgggtggtgccccacggccagagcttccagaatggctacgccggcatcttccacttccagctgtggcagtttggagagtgggtggatgtggtggtggatgacctgctgcccatctag

SEQ ID NO: 18735 - DNA, 369 bp, synthetic construct
  misc_feature 1..369: note = Description of Artificial Sequence: Synthetic coding sequence
  source 1..369: mol_type = other DNA
atgtctgaggagatcatcacccctgtgtactgcaccggggtgtctgcccaggtgcagaagcagagggcccgggagctgggcctgggcagacatgaaaatgccatcaagtacctgggccaggactatgagcagctgcgggtgcgctgcctgcagagcggcaccctcttcagagatgaggccttcccccctgtgccccagagcctgggctacaaggacctgggccccaacagcagcaagacctacggcatcaagtggaagaggcccacagagctgctgagcaacccccagttcatcgtggatggagccaccaggacagacatctgccagggcgccctgggggactgctggctgctggccgccatcgcctag

SEQ ID NO: 18736 - DNA, 192 bp, synthetic construct
  misc_feature 1..192: note = Description of Artificial Sequence: Synthetic coding sequence
  source 1..192: mol_type = other DNA
atgtctgaggagatcatcacccctgtgtactgcaccggggtgtctgcccaggtgcagaagcagagggcccgggagctgggcctgggcagacatgaaaatgccatcaagtacctgggccaggactatgagcagctgcgggtgcgctgcctgcagagcggcaccctcttcagagatgaggccttccccccatag

SEQ ID NO: 18737 - DNA, 2145 bp, synthetic construct; identical to SEQ ID NO: 18726
  misc_feature 1..2145: note = Description of Artificial Sequence: Synthetic coding sequence
  source 1..2145: mol_type = other DNA

SEQ ID NO: 18738 - DNA, 2145 bp, synthetic construct; identical to SEQ ID NO: 18726
  misc_feature 1..2145: note = Description of Artificial Sequence: Synthetic coding sequence
  source 1..2145: mol_type = other DNA

SEQ ID NO: 18739 - DNA, 447 bp, synthetic construct
  misc_feature 1..447: note = Description of Artificial Sequence: Synthetic coding sequence
  source 1..447: mol_type = other DNA
atgtctgaggagatcatcacccctgtgtactgcaccggggtgtctgcccaggtgcagaagcagagggcccgggagctgggcctgggcagacatgaaaatgccatcaagtacctgggccaggactatgagcagctgcgggtgcgctgcctgcagagcggcaccctcttcagagatgaggccttcccccctgtgccccagagcctgggctacaaggacctgggccccaacagcagcaagacctacggcatcaagtggaagaggcccacagagctgctgagcaacccccagttcatcgtggatggagccaccaggacagacatctgccagggcgccctgggggactgctggctgctggccgccatcgccagcctgaccctgaatgacaccctgctgcaccgggtggtgccccacggccagagcttccagaatggctacgccggcatctag

SEQ ID NO: 18740 - DNA, 411 bp, synthetic construct
  misc_feature 1..411: note = Description of Artificial Sequence: Synthetic coding sequence
  source 1..411: mol_type = other DNA
atgtctgaggagatcatcacccctgtgtactgcaccggggtgtctgcccaggtgcagaagcagagggcccgggagctgggcctgggcagacatgaaaatgccatcaagtacctgggccaggactatgagcagctgcgggtgcgctgcctgcagagcggcaccctcttcagagatgaggccttcccccctgtgccccagagcctgggctacaaggacctgggccccaacagcagcaagacctacggcatcaagtggaagaggcccacagagctgctgagcaacccccagttcatcgtggatggagccaccaggacagacatctgccagggcgccctgggggactgctggctgctggccgccatcgccagcctgaccctgaatgacaccctgctgcaccgggtggtgccctag

SEQ ID NO: 18741 - DNA, 2103 bp, synthetic construct
  misc_feature 1..2103: note = Description of Artificial Sequence: Synthetic coding sequence
  source 1..2103: mol_type = other DNA
atggccggcattgctgccaagctggccaaggaccgggaggccgctgagggcctgggcagccatgaccgggccatcaagtacctgaaccaggactatgaggccctgagaaatgaatgtctggaggccggcaccctcttccaggaccccagcttccctgccatccccagcgccctgggcttcaaggagctgggcccctacagcagcaagacccggggcatcgagtggaagaggcccacagagatctgtgccgacccccagttcatcattggaggagccaccaggacagacatctgccagggcgccctgggggactgctggctgctggccgccatcgccagcctgaccctgaatgaggagatcctggcccgggtggtgcccctgaaccagagcttccaggagaactatgccggcatcttccacttccagttctggcagtacggggagtgggtggaggtggtggtggatgaccggctgcccaccaaggatggagagctgctgtttgtgcacagcgctgagggcagcgagttctggagcgccctgctggagaaggcctatgccaagatcaatggctgctatgaggccctgagcggcggggccaccacagagggctttgaggacttcaccggcggcattgctgagtggtatgagctgaagaagcccccacccaacctcttcaagatcatccagaaggccctgcagaagggcagcctgctgggctgcagcattgacatcaccagcgctgctgacagcgaggccatcaccttccagaagctggtgaagggccacgcctacagcgtgactggagctgaggaggtggagagcaatggcagcctgcagaagctgatccgcatccggaacccctggggcgaggtggagtggacaggccgctggaatgacaactgccccagctggaacaccattgatcctgaggagcgggagcggctgaccaggagacatgaagatggagagttctggatgtccttcagtgacttcctgcggcactacagccggctggagatctgcaacctgaccccagacaccctgaccagtgacacctacaagaagtggaagctgaccaagatggatggcaactggaggcggggcagcacagctgggggctgcaggaactaccccaacaccttctggatgaacccccagtacctgatcaagctggaggaggaggatgaagatgaagaagatggagagagcggctgcaccttcctggtgggcctcatccagaagcacagaagacggcagaggaagatgggagaggacatgcacaccatcggcttcggcatctatgaggtgcctgaggagctgagcggccagaccaacatccacctgagcaagaacttcttcctgaccaacagagcccgggagaggagtgacaccttcatcaacctgcgggaggtgctgaaccgcttcaagctgcccccaggagagtacatcctggtgcccagcacctttgagcccaacaaggatggagacttctgcatccgggtcttcagcgagaagaaggctgactaccaggccgtggatgatgaaattgaggccaacctggaggagtttgacatcagtgaagatgacattgatgatggcttcagaagactctttgcccagctggccggggaggatgctgagatcagcgcctttgagctgcagaccatcctgcggcgggtgctggccaagaggcaggacatcaagagtgatggcttcagcattgagacctgcaagatcatggtggacatgctggacagtgatggcagcggcaagctgggcctgaaggagttctacatcctgtggaccaagatccagaagtaccagaagatctaccgggagattgatgtggacagaagtggcaccatgaacagctatgagatgaggaaggccctggaggaggccggcttcaagatgccctgccagctgcaccaggtgattgtggccaggtttgctgatgaccagctgatcatcgactttgacaactttgtgcgctgcctggtgcggctggagaccctcttcaagatcttcaagcagctggaccctgagaacacaggcaccatcgagctggacctgatctcctggctgtgcttctctgtgctgtag

SEQ ID NO: 18742 - DNA, 2190 bp, synthetic construct
  misc_feature 1..2190: note = Description of Artificial Sequence: Synthetic coding sequence
  source 1..2190: mol_type = other DNA
gcccctggccctggccgggccccagctgagaggtctgctgagagcccccggcccttcagcgcccagtatggaagaagagaccgctccatggccggcattgctgccaagctggccaaggaccgggaggccgctgagggcctgggcagccatgaccgggccatcaagtacctgaaccaggactatgaggccctgagaaatgaatgtctggaggccggcaccctcttccaggaccccagcttccctgccatccccagcgccctgggcttcaaggagctgggcccctacagcagcaagacccggggcatcgagtggaagaggcccacagagatctgtgccgacccccagttcatcatcggcggggccaccaggacagacatctgccagggcgccctgggggactgctggctgctggccgccatcgccagcctgaccctgaatgaggagatcctggcccgggtggtgcccctgaaccagagcttccaggagaactatgccggcatcttccacttccagttctggcagtatggagagtgggtggaggtggtggtggatgaccggctgcccaccaaggatggagagctgctgtttgtgcacagcgctgagggcagcgagttctggagcgccctgctggagaaggcctatgccaagatcaatggctgctatgaggccctgtctggaggagccaccacagagggctttgaggacttcaccggcggcattgctgagtggtatgagctgaagaagcccccacccaacctcttcaagatcatccagaaggccctgcagaagggcagcctgctgggctgcagcattgacatcaccagcgctgctgacagcgaggccatcaccttccagaagctggtgaagggccacgcctacagcgtgactggagctgaggaggtggagagcaatggcagcctgcagaagctgatccgcatccggaacccctggggcgaggtggagtggacaggccgctggaatgacaactgccccagctggaacaccatcgaccctgaggagcgggagcggctgaccaggagacatgaagatggagagttctggatgtccttcagtgacttcctgcggcactacagccggctggagatctgcaacctgaccccagacaccctgaccagtgacacctacaagaagtggaagctgaccaagatggatggcaactggaggcggggcagcacagctgggggctgcaggaactaccccaacaccttctggatgaacccccagtacctgatcaagctggaggaggaggatgaagatgaggaggatggagagagcggctgcaccttcctggtgggcctcatccagaagcacagaagacggcagaggaagatgggagaggacatgcacaccatcggcttcggcatctatgaggtgcacccccagctgagcggccagaccaacatccacctgagcaagaacttcttcctgaccaacagagcccgggagaggagtgacaccttcatcaacctgcgggaggtgctgaaccgcttcaagctgcccccaggagagtacatcctggtgcccagcacctttgagcccaacaaggatggagacttctgcatccgggtcttcagcgagaagaaggctgactaccaggccgtggatgatgaaattgaggccaacctggaggagtttgacatcagtgaagatgacattgatgatggcttccggcggctgtttgcccagctggccggagaagatgctgagatcagcgcctttgagctgcagaccatcctgcggcgggtgctggccaagaggcaggacatcaagagtgatggcttcagcattgagacctgcaagatcatggtggacatgctggacagtgatggcagcggcaagctgggcctgaaggagttctacatcctgtggaccaagatccagaagtaccagaagatctaccgggagattgatgtggacaggagcggcaccatgaacagctatgagatgaggaaggccctggaggaggccggcttcaagatgccctgccagctgcaccaggtgattgtggccaggtttgctgatgaccagctgatcatcgactttgacaactttgtgcgctgcctggtgcggctggagaccctcttcaagatcttcaagcagctggaccctgaaaatacaggcaccatcgagctggacctgatctcctggctgtgcttctctgtgctgtag

SEQ ID NO: 18743 - DNA, 1869 bp, synthetic construct
  misc_feature 1..1869: note = Description of Artificial Sequence: Synthetic coding sequence
  source 1..1869: mol_type = other DNA
atggagatctgtgccgacccccagttcatcattggaggagccaccaggacagacatctgccagggcgccctgggggactgctggctgctggccgccatcgccagcctgaccctgaatgaggagatcctggcccgggtggtgcccctgaaccagagcttccaggagaactatgccggcatcttccacttccagttctggcagtacggggagtgggtggaggtggtggtggatgaccggctgcccaccaaggatggagagctgctgtttgtgcacagcgctgagggcagcgagttctggagcgccctgctggagaaggcctatgccaagatcaatggctgctatgaggccctgagcggcggggccaccacagagggctttgaggacttcaccggcggcattgctgagtggtatgagctgaagaagcccccacccaacctcttcaagatcatccagaaggccctgcagaagggcagcctgctgggctgcagcattgacatcaccagcgctgctgacagcgaggccatcaccttccagaagctggtgaagggccacgcctacagcgtgactggagctgaggaggtggagagcaatggcagcctgcagaagctgatccgcatccggaacccctggggcgaggtggagtggacaggccgctggaatgacaactgccccagctggaacaccattgatcctgaggagcgggagcggctgaccaggagacatgaagatggagagttctggatgtccttcagtgacttcctgcggcactacagccggctggagatctgcaacctgaccccagacaccctgaccagtgacacctacaagaagtggaagctgaccaagatggatggcaactggaggcggggcagcacagctgggggctgcaggaactaccccaacaccttctggatgaacccccagtacctgatcaagctggaggaggaggatgaagatgaagaagatggagagagcggctgcaccttcctggtgggcctcatccagaagcacagaagacggcagaggaagatgggagaggacatgcacaccatcggcttcggcatctatgaggtgcctgaggagctgagcggccagaccaacatccacctgagcaagaacttcttcctgaccaacagagcccgggagaggagtgacaccttcatcaacctgcgggaggtgctgaaccgcttcaagctgcccccaggagagtacatcctggtgcccagcacctttgagcccaacaaggatggagacttctgcatccgggtcttcagcgagaagaaggctgactaccaggccgtggatgatgaaattgaggccaacctggaggagtttgacatcagtgaagatgacattgatgatggcttcagaagactctttgcccagctggccggggaggatgctgagatcagcgcctttgagctgcagaccatcctgcggcgggtgctggccaagaggcaggacatcaagagtgatggcttcagcattgagacctgcaagatcatggtggacatgctggacagtgatggcagcggcaagctgggcctgaaggagttctacatcctgtggaccaagatccagaagtaccagaagatctaccgggagattgatgtggacagaagtggcaccatgaacagctatgagatgaggaaggccctggaggaggccggcttcaagatgccctgccagctgcaccaggtgattgtggccaggtttgctgatgaccagctgatcatcgactttgacaactttgtgcgctgcctggtgcggctggagaccctcttcaagatcttcaagcagctggaccctgagaacacaggcaccatcgagctggacctgatctcctggctgtgcttctctgtgctgtag

SEQ ID NO: 18744 - DNA, 396 bp, synthetic construct
  misc_feature 1..396: note = Description of Artificial Sequence: Synthetic coding sequence
  source 1..396: mol_type = other DNA
atggagatctgtgccgacccccagttcatcattggaggagccaccaggacagacatctgccagggcgccctgggggactgctggctgctggccgccatcgccagcctgaccctgaatgaggagatcctggcccgggtggtgcccctgaaccagagcttccaggagaactatgccggcatcttccacttccagttctggcagtacggggagtgggtggaggtggtggtggatgaccggctgcccaccaaggatggagagctgctgtttgtgcacagcgctgagggcagcgagttctggagcgccctgctggagaaggcctatgccaagatcaatggctgctatgaggccctgagcggcggggccaccacagagggctttgaggacttcaccggctag

SEQ ID NO: 18745 - DNA, 156 bp, synthetic construct
  misc_feature 1..156: note = Description of Artificial Sequence: Synthetic coding sequence
  source 1..156: mol_type = other DNA
atgaagaaccgggaggccgccagagaatgtagaaggaagaagaaggagtatgtgaagtgcctggagaacagagtggccgtgctggagaaccagaacaagaccctcatcgaggagctgaaggccctgaaggacctgtactgccacaagagtgactag

SEQ ID NO: 18746 - DNA, 984 bp, synthetic construct
  misc_feature 1..984: note = Description of Artificial Sequence: Synthetic coding sequence
  source 1..984: mol_type = other DNA
atgaccatggagagcggggctgagaaccagcagagcggagatgctgctgtgacagaagctgagaaccagcagatgacagtgcaggcccagccccagatcgccaccctggcccaggtgtccatgcctgctgcccacgccaccagcagcgcccccaccgtgaccctggtgcagctgcccaacggccagacagtgcaggtgcatggagtcatccaggccgcccagcccagcgtcatccagagcccccaggtgcagacagtgcagatcagcaccatcgccgagagcgaggacagccaggagagcgtggacagcgtgacagacagccagaagaggcgggagatcctgagccggcggcccagctacaggaagatcctgaatgacctgagcagtgatgcccctggggtgcccagaattgaggaggagaagtctgaggaggagaccagcgccccagccatcaccaccgtgacagtgcccacccccatctaccagaccagcagcggccagtacatcgccatcacccagggcggggccatccagctggccaacaacggcacagatggagtgcagggcctgcagaccctgaccatgaccaatgctgctgccacccagcccggcaccaccatcctgcagtatgcccagaccacagatggccagcagatcctggtgcccagcaaccaggtggtggtgcaggccgccagcggagatgtgcagacctaccagatcagaacagcccccaccagcaccatcgcccctggggtggtgatggccagcagccctgccctgcccacccagcctgctgaggaggccgccaggaagcgggaggtgcggctgatgaagaaccgggaggccgccagagaatgtagaaggaagaagaaggagtatgtgaagtgcctggagaacagagtggccgtgctggagaaccagaacaagaccctcatcgaggagctgaaggccctgaaggacctgtactgccacaagagtgactag

SEQ ID NO: 18747 - DNA, 693 bp, synthetic construct
  misc_feature 1..693: note = Description of Artificial Sequence: Synthetic coding sequence
  source 1..693: mol_type = other DNA
atgaccatggagagcggggctgagaaccagcagagcggagatgctgctgtgacagaagctgagaaccagcagatgacagtgcaggcccagccccagatcgccaccctggcccaggtgtccatgcctgctgcccacgccaccagcagcgcccccaccgtgaccctggtgcagctgcccaacggccagacagtgcaggtgcatggagtcatccaggccgcccagcccagcgtcatccagagcccccaggtgcagacagtgcagagcagctgcaaggacctgaagaggctcttcagcggcacccagatcagcaccatcgccgagagcgaggacagccaggagagcgtggacagcgtgacagacagccagaagaggcgggagatcctgagccggcggcccagctacaggaagatcctgaatgacctgagcagtgatgcccctggggtgcccagaattgaggaggagaagtctgaggaggagaccagcgccctgcccacccagcctgctgaggaggccgccaggaagcgggaggtgcggctgatgaagaaccgggaggccgcccgggagtgcaggaggaagaagaaggagtatgtgaagtgcctggagaacagagtggccgtgctggagaaccagaacaagaccctgattgaggagctgaaggccctgaaggacctgtactgccacaagagtgactag

SEQ ID NO: 18748 - DNA, 240 bp, synthetic construct
  misc_feature 1..240: note = Description of Artificial Sequence: Synthetic coding sequence
  source 1..240: mol_type = other DNA
atgaccatggagagcggggctgagaaccagcagagcggagatgctgctgtgacagaagctgagaaccagcagatgacagtgcaggcccagccccagatcgccaccctggcccaggtgtccatgcctgctgcccacgccaccagcagcgcccccaccgtgaccctggtgcagctgcccaacggccagacagtgcaggtgcatggagtcatccaggccgcccagcccagcgtcatccagtag

SEQ ID NO: 18749 - DNA, 984 bp, synthetic construct; identical to SEQ ID NO: 18746
  misc_feature 1..984: note = Description of Artificial Sequence: Synthetic coding sequence
  source 1..984: mol_type = other DNA

SEQ ID NO: 18750 - DNA, 1026 bp, synthetic construct
  misc_feature 1..1026: note = Description of Artificial Sequence: Synthetic coding sequence
  source 1..1026: mol_type = other DNA
atgaccatggagagcggggctgagaaccagcagagcggagatgctgctgtgacagaagctgagaaccagcagatgacagtgcaggcccagccccagatcgccaccctggcccaggtgtccatgcctgctgcccacgccaccagcagcgcccccaccgtgaccctggtgcagctgcccaacggccagacagtgcaggtgcatggagtcatccaggccgcccagcccagcgtcatccagagcccccaggtgcagacagtgcagagcagctgcaaggacctgaagaggctcttcagcggcacccagatcagcaccatcgccgagagcgaggacagccaggagagcgtggacagcgtgacagacagccagaagaggcgggagatcctgagccggcggcccagctacaggaagatcctgaatgacctgagcagtgatgcccctggggtgcccagaattgaggaggagaagtctgaggaggagaccagcgccccagccatcaccaccgtgacagtgcccacccccatctaccagaccagcagcggccagtacatcgccatcacccagggcggggccatccagctggccaacaacggcacagatggagtgcagggcctgcagaccctgaccatgaccaatgctgctgccacccagcccggcaccaccatcctgcagtatgcccagaccacagatggccagcagatcctggtgcccagcaaccaggtggtggtgcaggccgccagcggagatgtgcagacctaccagatcagaacagcccccaccagcaccatcgcccctggggtggtgatggccagcagccctgccctgcccacccagcctgctgaggaggccgccaggaagcgggaggtgcggctgatgaagaaccgggaggccgccagagaatgtagaaggaagaagaaggagtatgtgaagtgcctggagaacagagtggccgtgctggagaaccagaacaagaccctcatcgaggagctgaaggccctgaaggacctgtactgccacaagagtgactag

SEQ ID NO: 18751 - DNA, 549 bp, synthetic construct
  misc_feature 1..549: note = Description of Artificial Sequence: Synthetic coding sequence
  source 1..549: mol_type = other DNA
atgaccatggagagcggggctgagaaccagcagagcggagatgctgctgtgacagaagctgagaaccagcagatgacagtgcaggcccagccccagatcgccaccctggcccaggtgtccatgcctgctgcccacgccaccagcagcgcccccaccgtgaccctggtgcagctgcccaacggccagacagtgcaggtgcatggagtcatccaggccgcccagcccagcgtcatccagagcccccaggtgcagacagtgcagagcagctgcaaggacctgaagaggctcttcagcggcacccagatcagcaccatcgccgagagcgaggacagccaggagagcgtggacagcgtgacagacagccagaagaggcgggagatcctgagccggcggcccagctacaggaagatcctgaatgacctgagcagtgatgcccctggggtgcccagaattgaggaggagaagtctgaggaggagaccagcgccccagccatcaccaccgtgacagtgcccacccccatctaccagaccagcagcggccagtactag

SEQ ID NO: 18752 - DNA, 399 bp, synthetic construct
  misc_feature 1..399: note = Description of Artificial Sequence: Synthetic coding sequence
  source 1..399: mol_type = other DNA
atgaccatggagagcggggctgagaaccagcagagcggagatgctgctgtgacagaagctgagaaccagcagatgacagtgcaggcccagccccagatcgccaccctggcccaggtgtccatgcctgctgcccacgccaccagcagcgcccccaccgtgaccctggtgcagctgcccaacggccagacagtgcaggtgcatggagtcatccaggccgcccagcccagcgtcatccagagcccccaggtgcagacagtgcagagcagctgcaaggacctgaagaggctcttcagcggcacccagatcagcaccatcgccgagagcgaggacagccaggagagcgtggacagcgtgacagacagccagaagaggcgggagatcctgagccggcggccctag

SEQ ID NO: 18753 - DNA, 705 bp, synthetic construct
  misc_feature 1..705: note = Description of Artificial Sequence: Synthetic coding sequence
  source 1..705: mol_type = other DNA
atgaccatggagagcggggctgagaaccagcagagcggagatgctgctgtgacagaagctgagaaccagcagatgacagtgcaggcccagccccagatcgccaccctggcccaggtgtccatgcctgctgcccacgccaccagcagcgcccccaccgtgaccctggtgcagctgcccaacggccagacagtgcaggtgcatggagtcatccaggccgcccagcccagcgtcatccagagcccccaggtgcagacagtgcagatcagcaccatcgccgagagcgaggacagccaggagagcgtggacagcgtgacagacagccagaagaggcgggagatcctgagccggcggcccagctacaggaagatcctgaatgacctgagcagtgatgcccctggggtgcccagaattgaggaggagaagtctgaggaggagaccagcgccccagccatcaccaccgtgacagtgcccacccccatctaccagaccagcagcggccagtacatcgccatcacccagggcggggccatccagctggccaacaacggcacagatggagtgcagggcctgcagaccctgaccatgaccaatgctgctgccacccagcccggcaccaccatcctgcagtatgcccagaccacagatggccagcagatcctggtgcccagcaaccaggtggtggtgcagggcacccagaagctgtag

SEQ ID NO: 18754 - DNA, 462 bp, synthetic construct
  misc_feature 1..462: note = Description of Artificial Sequence: Synthetic coding sequence
  source 1..462: mol_type = other DNA
atgcctgctgcccacgccaccagcagcgcccccaccgtgaccctggtgcagctgcccaacggccagacagtgcaggtgcatggagtcatccaggccgcccagcccagcgtcatccagagcccccaggtgcagacagtgcagagcagctgcaaggacctgaagaggctcttcagcggcacccagatcagcaccatcgccgagagcgaggacagccaggagagcgtggacagcgtgacagacagccagaagaggcgggagatcctgagccggcggcccagctacaggaagatcctgaatgacctgagcagtgatgcccctggggtgcccagaattgaggaggagaagtctgaggaggagaccagcgccccagccatcaccaccgtgacagtgcccacccccatctaccagaccagcagcggccagtacacctacctgcgggacaccacctacagctgccagtag

SEQ ID NO: 18755 - DNA, 1998 bp, synthetic construct
  misc_feature 1..1998: note = Description of Artificial Sequence: Synthetic coding sequence
  source 1..1998: mol_type = other DNA
atggcccacgagatgattggcacccagatcgtgacagagcggctggtggccctgctggagagcggcacagagaaggtgctgctgattgacagccggccctttgtggagtacaacaccagccacatcctggaggccatcaacatcaactgcagcaagctgatgaagaggcggctgcagcaggacaaggtgctgatcacagagctgatccagcacagcgccaagcacaaggtggacatcgactgcagccagaaggtggtggtgtatgaccagagcagccaggatgtggccagcctgagcagtgactgcttcctgactgtgctgctgggcaagctggagaagagcttcaacagcgtgcacctgctggccggcggctttgctgagttcagccgctgcttccctggcctgtgtgagggcaagagcaccctggtgcccacctgcatcagccagccctgcctgcctgtggccaacatcggccccacccgcatcctgcccaacctgtacctgggctgccagagagatgtgctgaacaaggagctgatgcagcagaatggaattggctacgtgctgaatgccagcaacacctgccccaagccagacttcatccctgagagccacttcctgcgggtgcctgtgaatgacagcttctgtgagaagatcctgccctggctggacaagtctgtggacttcatcgagaaggccaaggccagcaatggctgtgtgctggtgcactgcctggccggcatcagccgcagcgccaccatcgccatcgcctacatcatgaagaggatggacatgagcctggatgaggcctacagatttgtgaaggagaagaggcccaccatcagccccaacttcaacttcctgggccagctgctggactatgagaagaagatcaagaaccagacaggagccagcggccccaagagcaagctgaagctgctgcacctggagaagcccaatgaacctgtgcctgctgtgtctgagggcggccagaagtctgagacccccctgagccccccctgtgccgacagcgccaccagcgaggccgccggccagaggcctgtgcacccagcctctgtgcccagcgtgcccagcgtgcagcccagcctgctggaggacagccccctggtgcaggccctgagcggcctgcacctgtctgctgaccggctggaggacagcaacaagctgaagaggagcttcagcctggacatcaagtctgtgtcctacagcgcctccatggccgccagcctgcacggcttcagcagcagtgaagatgccctggagtactacaagcccagcaccaccctggatggcaccaacaagctgtgccagttcagccctgtgcaggagctgtctgagcagaccccagagaccagcccagacaaggaggaggccagcatccccaagaagctgcagacagcccggcccagcgacagccagagcaagaggctgcacagcgtgaggaccagcagcagcggcacagcccagaggagcctgctgagccccctgcacaggagcggctctgtggaggacaactaccacaccagcttcctgtttggcctgagcaccagccagcagcacctgaccaagtctgctggcctgggcctgaagggctggcacagcgacatcctggccccccagaccagcacccccagcctgaccagctcctggtactttgccacagagagcagccacttctacagcgccagcgccatctatggaggcagcgccagctacagcgcctacagctgcagccagctgcccacctgtggggaccaggtgtacagcgtgagaagacggcagaagcccagcgacagagctgacagccgccgctcctggcatgaggagagcccctttgagaagcagttcaagagaagaagctgccagatggagtttggagagagcatcatgtctgaaaatagaagccgggaggagctgggcaaggtgggcagccagagcagcttcagcggctccatggagatcatcgaggtgtcctag

SEQ ID NO: 18756 - DNA, 939 bp, synthetic construct
  misc_feature 1..939: note = Description of Artificial Sequence: Synthetic coding sequence
  source 1..939: mol_type = other DNA
atgaggatgctgctggccctgctggccctgtctgctgcccggcccagcgccagcgctgagagccactggtgctatgaggtgcaggccgagagcagcaactacccctgcctggtgcctgtgaagtggggcggcaactgccagaaggaccggcagagccccatcaacatcgtgaccaccaaggccaaggtggacaagaagctgggccgcttcttcttcagcggctatgacaagaagcagacctggacagtgcagaacaacggccacagcgtgatgatgctgctggagaacaaggccagcatcagcggcggcggcctgcctgccccctaccaggccaagcagctgcacctgcactggagcgacctgccctacaagggcagcgagcacagcctggatggagagcactttgccatggagatgcacatcgtgcatgagaaggagaagggcaccagcagaaatgtgaaggaggcccaggaccctgaagatgaaattgctgtgctggccttcctggtggaggccggcacccaggtgaatgaaggcttccagcccctggtggaggccctgagcaacatccccaagccagagatgagcaccaccatggccgagagcagcctgctggacctgctgcccaaggaggagaagctgcggcactacttccgctacctgggcagcctgaccacccccacctgtgatgagaaggtggtgtggacagtgttccgggagcccatccagctgcaccgggagcagatcctggccttcagccagaagctgtactatgacaaggagcagacagtgtccatgaaggacaacgtgcggcccctgcagcagctgggccagaggacagtcatcaagagcggggcccctggccggcccctgccctgggccctgcctgccctgctgggccccatgctggcctgcctgctggccggcttcctgaggtag

SEQ ID NO: 18757 - DNA, 1380 bp, synthetic construct
  misc_feature 1..1380: note = Description of Artificial Sequence: Synthetic coding sequence
  source 1..1380: mol_type = other DNA
atggcccccctgtgccccagcccctggctgcccctgctgatcccagccccagcccctggcctgactgtgcagctgctgctgagcctgctgctgctggtgcctgtgcacccccagaggctgcccaggatgcaggaggacagccccctgggcggcggcagcagcggggaggatgaccccctgggggaggaggacctgcccagcgaggaggacagcccccgggaggaggaccccccaggagaggaggacctgcccggggaggaggacctgcccggggaggaggacctgcctgaggtgaagcccaagtctgaggaggagggcagcctgaagctggaggacctgcccaccgtggaggcccctggggacccccaggagccccagaacaatgcccaccgggacaaggagggagatgaccagagccactggaggtatggaggagaccccccctggccccgggtgtccccagcctgtgccggccgcttccagagccctgtggacatccggccccagctggccgccttctgcccagccctgcggcccctggagctgctgggcttccagctgccccccctgcctgagctgcggctgaggaacaacggccacagcgtgcagctgaccctgcccccaggcctggagatggccctgggccctggccgggagtaccgggccctgcagctgcacctgcactggggcgccgccggccggcccggcagcgagcacacagtggagggccaccgcttccctgctgagatccacgtggtgcacctgagcacagcctttgcccgggtggatgaggccctgggccggcctgggggcctggccgtgctggccgccttcctggaggagggcccagaagaaaattctgcctatgagcagctgctgagccggctggaggagattgctgaggagggcagcgagacccaggtgcccggcctggacatcagcgccctgctgcccagcgacttcagccgctacttccagtatgagggcagcctgaccaccccaccctgtgcccagggcgtcatctggacagtgttcaaccagacagtgatgctgagcgccaagcagctgcacaccctgagtgacaccctgtggggccctggggacagccggctgcagctgaacttccgggccacccagcccctgaatggccgggtcatcgaggccagcttccctgctggggtggacagcagccccagggctgctgagcctgtgcagctgaacagctgcctggccgccggggacatcctggccctggtgtttggcctgctgtttgctgtgacctctgtggccttcctggtgcagatgaggcggcagcaccggcggggcaccaagggcggcgtgtcctacagacctgctgaggtggccgagactggagcctag

SEQ ID NO: 18758 - DNA, 1071 bp, synthetic construct
  misc_feature 1..1071: note = Description of Artificial Sequence: Synthetic coding sequence
  source 1..1071: mol_type = other DNA
atggcccccctgtgccccagcccctggctgcccctgctgatcccagccccagcccctggcctgactgtgcagctgctgctgagcctgctgctgctggtgcctgtgcacccccagaggctgcccaggatgcaggaggacagccccctgggcggcggcagcagcggggaggatgaccccctgggggaggaggacctgcccagcgaggaggacagcccccgggaggaggaccccccaggagaggaggacctgcccggggaggaggacctgcccggggaggaggacctgcctgaggtgaagcccaagtctgaggaggagggcagcctgaagctggaggacctgcccaccgtggaggcccctggggacccccaggagccccagaacaatgcccaccgggacaaggagggagatgaccagagccactggaggtatggaggagaccccccctggccccgggtgtccccagcctgtgccggccgcttccagagccctgtggacatccggccccagctggccgccttctgcccagccctgcggcccctggagctgctgggcttccagctgccccccctgcctgagctgcggctgaggaacaacggccacagcgtgcagctgaccctgcccccaggcctggagatggccctgggccctggccgggagtaccgggccctgcagctgcacctgcactggggcgccgccggccggcccggcagcgagcacacagtggagggccaccgcttccctgctgagatccacgtggtgcacctgagcacagcctttgcccgggtggatgaggccctgggccggcctgggggcctggccgtgctggccgccttcctggaggagggcccagaagaaaattctgcctatgagcagctgctgagccggctggaggagattgctgaggagggcagcgagacccaggtgcccggcctggacatcagcgccctgctgcccagcgacttcagccgctacttccagtatgagggcagcctgaccaccccaccctgtgcccagggcgtcatctggacagtgttcaaccagacagtgatgctgagcgccaagcagagctag

SEQ ID NO: 18759 - DNA, 2775 bp, synthetic construct
  misc_feature 1..2775: note = Description of Artificial Sequence: Synthetic coding sequence
  source 1..2775: mol_type = other DNA
atgcctggccccagccctggcctgcggcgggccctgctgggcctgtgggccgccctgggcctgggcctgtttggcctgtctgctgtgtcccaggagcccttctgggccgacctgcagccccgggtggcctttgtggagcggggcggcagcctgtggctgaactgcagcaccaactgccccaggcctgagcggggcggcctggagaccagcctgcggagaaatggcacccagaggggcctgcgctggctggcccggcagctggtggacatccgggagcctgagacccagcctgtgtgcttcttccgctgtgcccggaggaccctgcaggcccggggcctcatccgcaccttccagaggccagacagagtggagctgatgcccctgcccccctggcagcctgtgggggagaacttcaccctgagctgccgggtgcctggagctggcccccgggccagcctgaccctgaccctgctgcggggggcccaggagctgatccgccgcagctttgctggggagcccccccgggcccggggagctgtgctgacagccaccgtgctggcccggcgggaggaccacggggccaacttcagctgcagagctgagctggacctgcggccccacggcctgggcctgtttgagaacagcagcgccccccgggagctgcggaccttcagcctgagcccagatgccccccggctggccgccccccggctgctggaggtgggcagcgagaggcctgtgtcctgcaccctggatggcctcttccctgccagcgaggcccgggtgtacctggccctgggggaccagaacctgagcccagatgtgaccctggagggagatgcctttgtggccacagccacagccacagccagcgctgagcaggagggcgcccggcagctggtgtgcaatgtgaccctgggcggagaaaatcgggagaccagagaaaatgtgaccatctacagcttccctgcccccctgctgaccctgtctgagcccagcgtgtctgagggccagatggtgacagtgacctgtgccgccggggcccaggccctggtgaccctggagggcgtgcctgctgctgtgcccggccagcctgcccagctgcagctgaatgccacagaaaatgatgaccggcgctccttcttctgtgatgccaccctggatgtggatggagagaccctcatcaagaacagatctgctgagctgcgggtgctgtatgccccccggctggatgacagcgactgccccaggtcctggacctggccagagggccctgagcagaccctgcgctgtgaggcccggggcaaccctgagcccagcgtgcactgtgcccggagtgatggaggagctgtgctggccctgggcctgctgggccctgtgacccgggccctgagcggcacctaccgctgcaaggccgccaatgaccagggcgaggccgtgaaggatgtgaccctgactgtggagtatgccccagccctggacagcgtgggctgcccagagcgcatcacctggctggagggcacagaggccagcctgagctgtgtggcccatggagtgcccccaccagatgtgatctgtgtgcgctctggagagctgggcgccgtcatcgagggcctgctgcgggtggcccgggagcacgccggcacctaccgctgtgaggccaccaacccccggggcagcgctgccaagaatgtggccgtgacagtggagtatggccccaggtttgaggagcccagctgccccagcaactggacctgggtggagggcagcggccgcctcttcagctgtgaggtggatggcaagccccagcccagcgtgaagtgtgtgggcagcggcggggccacagaaggagtgctgctgcccctggcccccccagaccccagcccccgggccccccgcatcccccgggtgctggcccctggcatctacgtgtgcaatgccaccaacagacatggctctgtggccaagacagtggtggtgtctgctgagagccccccagagatggatgagagcacctgccccagccaccagacctggctggagggcgctgaggccagcgccctggcctgtgccgcccggggccggcccagccctggggtgcgctgcagccgggagggcatcccctggccagagcagcagagggtgtcccgggaggatgctggcacctaccactgtgtggccaccaatgcccatggaacagacagcaggacagtgacagtgggcgtggagtacagacctgtggtggccgagctggccgccagccccccaggcggcgtgcggcctgggggcaacttcaccctgacctgcagagctgaggcctggcccccagcccagatctcctggagggcccctcctggggccctgaacatcggcctgagcagcaacaacagcaccctgtctgtggccggggccatgggcagccacggcggggagtatgaatgtgccgccaccaatgcccacggcagacatgcccggcgcatcaccgtgcgggtggccggcccctggctgtgggtggccgtgggcggggccgccggcggggccgccctgctggccgccggggccggcctggccttctacgtgcagagcacagcctgcaagaagggggagtacaacgtgcaggaggccgagagcagcggggaggccgtgtgcctgaatggagctgggggcggggccggcggcgctgctggagctgagggcggccctgaggccgccggcggcgctgctgagagccctgctgagggggaggtgtttgccatccagctgaccagcgcctag

SEQ ID NO: 18760 - DNA, 1263 bp, synthetic construct
  misc_feature 1..1263: note = Description of Artificial Sequence: Synthetic coding sequence
  source 1..1263: mol_type = other DNA
atggagagccccagcgccccaccccaccgctggtgcatcccctggcagaggctgctgctgacagccagcctgctgaccttctggaacccccccaccacagccaagctgaccatcgagagcacccccttcaacgtggccgagggcaaggaggtgctgctgctggtgcacaacctgccccagcacctgtttggctacagctggtacaagggggagcgggtggatggcaaccggcagatcatcggctacgtgattggcacccagcaggccaccccaggccctgcctacagcggccgggagatcatctacccaaatgccagcctgctgatccagaacatcatccagaacaagctgtctgtggaccacagcgaccccgtcatcctgaatgtgctgtatggcccagatgaccccaccatcagccccagctacacctactacagacctggggtgaacctgagcctgagctgccacgccgccagcaaccccccagcccagtacagctggctgattgatggcaacatccagcagcacacccaggagctgttcatcagcaacatcacagagaagaacagcggcctgtacacctgccaggccaacaacagcgccagcggccacagcaggaccaccgtgaagaccatcaccgtgtctgctgagctgcccaagcccagcatcagcagcaacaacagcaagcctgtggaggacaaggatgctgtggccttcacctgtgagcctgaggcccagaacaccacctacctgtggtgggtgaatggccagagcctgcctgtgagcccccggctgcagctgagcaatggaaacagaaccctgaccctcttcaacgtgaccagaaatgatgcccgggcctacgtgtgtggcatccagaacagcgtgtctgccaacagaagtgaccctgtgaccctggatgtgctgtatggccctgacacccccatcatcagccccccagacagcagctacctgagcggggccaacctgaacctgagctgccacagcgccagcaaccccagcccccagtacagctggaggatcaatggcatcccccagcagcacacccaggtgctcttcatcgccaagatcacccccaacaacaacggcacctacgcctgctttgtgagcaacctggccaccggcaggaacaacagcatcgtgaagagcatcaccgtgtctgccagcggcaccagccctggcctgtctgctggggccaccgtgggcatcatgattggagtgctggtgggcgtggccctgatctag

SEQ ID NO: 18761 - DNA, 2109 bp, synthetic construct
  misc_feature 1..2109: note = Description of Artificial Sequence: Synthetic coding sequence
  source 1..2109: mol_type = other DNA
atggagagccccagcgccccaccccaccgctggtgcatcccctggcagaggctgctgctgacagccagcctgctgaccttctggaacccccccaccacagccaagctgaccatcgagagcacccccttcaacgtggccgagggcaaggaggtgctgctgctggtgcacaacctgccccagcacctgtttggctacagctggtacaagggggagcgggtggatggcaaccggcagatcatcggctacgtgattggcacccagcaggccaccccaggccctgcctacagcggccgggagatcatctacccaaatgccagcctgctgatccagaacatcatccagaatgacaccggcttctacaccctgcacgtgatcaagagtgacctggtgaatgaggaggccaccggccagttccgggtgtacccagagctgcccaagcccagcatcagcagcaacaacagcaagcctgtggaggacaaggatgctgtggccttcacctgtgagcctgagacccaggatgccacctacctgtggtgggtgaacaaccagagcctgcctgtgagcccccggctgcagctgagcaatggaaacagaaccctgaccctcttcaacgtgaccagaaatgacacagccagctacaagtgtgagacccagaaccctgtgtctgcccggcggagtgacagcgtcatcctgaatgtgctgtatggcccagatgcccccaccatcagccccctgaacaccagctacagaagtggagagaacctgaacctgagctgccacgccgccagcaaccccccagcccagtacagctggtttgtgaatggcaccttccagcagagcacccaggagctgttcatccccaacatcaccgtgaacaacagcggcagctacacctgccaggcccacaacagcgacaccggcctgaacagaaccaccgtgaccaccatcaccgtgtatgcagagccccccaagcccttcatcaccagcaacaacagcaaccctgtggaggatgaagatgctgtggccctgacctgtgagcctgagatccagaacaccacctacctgtggtgggtgaacaaccagagcctgcctgtgagcccccggctgcagctgagcaatgacaacagaaccctgaccctgctgtctgtgaccagaaatgatgtgggcccctatgaatgtggcatccagaacaagctgtctgtggaccacagcgaccccgtcatcctgaatgtgctgtatggcccagatgaccccaccatcagccccagctacacctactacagacctggggtgaacctgagcctgagctgccacgccgccagcaaccccccagcccagtacagctggctgattgatggcaacatccagcagcacacccaggagctgttcatcagcaacatcacagagaagaacagcggcctgtacacctgccaggccaacaacagcgccagcggccacagcaggaccaccgtgaagaccatcaccgtgtctgctgagctgcccaagcccagcatcagcagcaacaacagcaagcctgtggaggacaaggatgctgtggccttcacctgtgagcctgaggcccagaacaccacctacctgtggtgggtgaatggccagagcctgcctgtgagcccccggctgcagctgagcaatggaaacagaaccctgaccctcttcaacgtgaccagaaatgatgcccgggcctacgtgtgtggcatccagaacagcgtgtctgccaacagaagtgaccctgtgaccctggatgtgctgtatggccctgacacccccatcatcagccccccagacagcagctacctgagcggggccaacctgaacctgagctgccacagcgccagcaaccccagcccccagtacagctggaggatcaatggcatcccccagcagcacacccaggtgctcttcatcgccaagatcacccccaacaacaacggcacctacgcctgctttgtgagcaacctggccaccggcaggaacaacagcatcgtgaagagcatcaccgtgtctgccagcggcaccagccctggcctgtctgctggggccaccgtgggcatcatgattggagtgctggtgggcgtggccctgatctag

SEQ ID NO: 18762 - DNA, 1035 bp, synthetic construct
  misc_feature 1..1035: note = Description of Artificial Sequence: Synthetic coding sequence
  source 1..1035: mol_type = other DNA
atgggccccccatctgccccaccctgccgcctgcacgtgccctggaaggaggtgctgctgacagccagcctgctgaccttctggaacccccccaccacagccaagctgaccatcgagagcacccccttcaacgtggccgagggcaaggaggtgctgctgctggcccacaacctgccccagaacagaattggctacagctggtacaagggggagcgggtggatggcaacagcctgattgtgggctacgtgattggcacccagcaggccaccccaggccctgcctacagcggccgggagaccatctacccaaatgccagcctgctgatccagaatgtgacccagaatgacaccggcttctacaccctgcaggtgatcaagagtgacctggtgaatgaggaggccaccggccagttccacgtgtacccagagctgcccaagcccagcatcagcagcaacaacagcaaccctgtggaggacaaggatgctgtggccttcacctgtgagcctgaggtgcagaacaccacctacctgtggtgggtgaatggccagagcctgcctgtgagcccccggctgcagctgagcaatggaaacatgaccctgaccctgctgtctgtgaagagaaatgatgctggcagctatgaatgtgagatccagaacccagccagcgccaacagaagtgaccctgtgaccctgaatgtgctgtatggcccagatggccccaccatcagccccagcaaggccaactacagacctggagagaacctgaacctgagctgccacgccgccagcaaccccccagcccagtacagctggttcatcaatggcaccttccagcagagcacccaggagctgttcatccccaacatcaccgtgaacaacagcggcagctacatgtgccaggcccacaacagcgccaccggcctgaacagaaccaccgtgaccatgatcaccgtgtctggcagcgcccctgtgctgtctgctgtggccaccgtgggcatcaccatcggcgtgctggcccgggtggccctgatctag

SEQ ID NO: 18763 - DNA, 1977 bp, synthetic construct
  misc_feature 1..1977: note = Description of Artificial Sequence: Synthetic coding sequence
  source 1..1977: mol_type = other DNA
atggtgccccggctgctgctgcgggcctggccccggggccctgctgtgggccctggggcccccagccggcccctgtctgctggcagcggccctggccagtacctgcagaggagcatcgtgcccaccatgcactaccaggacagcctgccccggctgcccatccccaagctggaggacaccatccgccgctacctgagcgcccagaagcccctgctgaatgatggccagttcaggaagacagagcagttctgcaagagctttgaaaatggaattggcaaggagctgcacgagcagctggtggccctggacaagcagaacaagcacaccagctacatcagcggcccctggtttgacatgtacctgagcgcccgggacagcgtggtgctgaacttcaaccccttcatggccttcaacccagaccccaagtctgagtacaatgaccagctgacccgggccaccaacatgacagtgtctgccatccgcttcctgaagaccctgcgggccggcctgctggagcctgaggtgttccacctgaacccagccaagagtgacaccatcaccttcaagaggctcatccgctttgtgcccagcagcctgtcctggtacggggcctacctggtgaatgcctaccccctggacatgagccagtacttccgcctcttcaacagcacccggctgcccaagcccagcagagatgagctgttcacagatgacaaggcccggcacctgctggtgctgaggaagggcaacttctacatctttgatgtgctggaccaggacggcaacatcgtgagccccagcgagatccaggcccacctgaagtacatcctgagtgacagcagccctgcccctgagttccccctggcctacctgaccagcgagaacagagacatctgggccgagctgcggcagaagctgatgagcagtggaaatgaggagagcctgaggaaggtggacagcgctgtgttctgcctgtgcctggatgacttccccatcaaggacctggtgcacctgagccacaacatgctgcatggagatggcaccaaccgctggtttgacaagagcttcaacctgatcatcgccaaggatggcagcacagctgtgcactttgagcacagctggggagatggagtggccgtgctgcgcttcttcaatgaggtgttcaaggacagcacccagaccccagctgtgaccccccagagccagcctgccaccacagacagcacagtgacagtgcagaagctgaactttgagctgacagatgccctgaagacaggcatcacagctgccaaggagaagtttgatgccaccatgaagaccctgaccatcgactgtgtgcagttccagagaggaggcaaggagttcctgaagaagcagaagctgagcccagatgctgtggcccagctggccttccagatggccttcctgcggcagtatggccagacagtggccacctatgagagctgcagcacagctgccttcaagcacggccgcacagagaccatccggcctgcctctgtgtacaccaagcgctgcagcgaggcctttgtgcgggagcccagccgccacagcgctggggagctgcagcagatgatggtggagtgcagcaagtaccacggccagctgaccaaggaggccgccatgggccagggctttgacagacacctgtttgccctgcggcacctggccgccgccaagggcatcatcctgcctgagctgtacctggaccctgcctacggccagatcaaccacaacgtgctgagcaccagcaccctgagcagccctgctgtgaacctgggcggctttgcccctgtggtgtctgatggcttcggcgtgggctatgctgtgcatgacaactggattggctgcaatgtgtcctcctacccaggaagaaatgcccgggagttcctgcagtgtgtggagaaggccctggaggacatgtttgatgccctggagggcaagagcatcaagagctag

SEQ ID NO: 18764 - DNA, 1077 bp, synthetic construct
  misc_feature 1..1077: note = Description of Artificial Sequence: Synthetic coding sequence
  source 1..1077: mol_type = other DNA
atgagggccacccccctggccgccccagctggcagcctgagcaggaagaagaggctggagctggatgacaacctggacacagagaggcctgtgcagaagagggcccggagcggcccccagccccggctgcccccctgcctgctgcccctgagccccccaacagccccagaccgggccacagctgtggccacagccagccggctgggcccctacgtgctgctggagcctgaggagggcggccgggcctaccaggccctgcactgccccaccggcacagagtacacctgcaaggtgtaccctgtgcaggaggccctggccgtgctggagccctatgcccggctgcccccccacaagcacgtggcccggcccacagaggtgctggccggcacccagctgctgtatgccttcttcaccaggacccatggagacatgcacagcctggtgcgcagccgccaccgcatccctgagcctgaggccgctgtgctcttccggcagatggccacagccctggcccactgccaccagcacggcctggtgctgcgggacctgaagctgtgccgctttgtgtttgctgaccgggagaggaagaagctggtgctggagaacctggaggacagctgtgtgctgaccggcccagatgacagcctgtgggacaagcacgcctgcccagcctacgtgggccctgagatcctgagcagccgggccagctacagcggcaaggccgcagatgtgtggagcctgggcgtggccctcttcaccatgctggccggccactaccccttccaggacagcgagcctgtgctgctgtttgggaagatccggcggggggcctatgccctgcctgctggcctgagcgccccagcccgctgcctggtgcgctgcctgctgcggcgggagcctgctgagcggctgacagccaccggcatcctgctgcacccctggctgcggcaggaccccatgcccctggcccccaccaggagccacctgtgggaggccgcccaggtggtgcctgatggcctgggcctggatgaggcccgggaggaggagggggaccgggaggtggtgctgtatggatag

SEQ ID NO: 18765 - DNA, 1176 bp, synthetic construct
  misc_feature 1..1176: note = Description of Artificial Sequence: Synthetic coding sequence
  source 1..1176: mol_type = other DNA
atgagcggccctgtgcccagccgggcccgggtgtacacagatgtgaacacccaccggccccgggagtactgggactatgagagccacgtggtggagtggggcaaccaggatgactaccagctggtgaggaagctgggccggggcaagtacagcgaggtgtttgaggccatcaacatcaccaacaatgagaaggtggtggtgaagatcctgaagcctgtgaagaagaagaagatcaagcgggagatcaagatcctggagaacctgcggggcggccccaacatcatcaccctggccgacatcgtgaaggaccctgtgtccaggaccccagccctggtgtttgaacatgtgaacaacacagacttcaagcagctgtaccagaccctgacagattatgacatccgcttctacatgtatgagatcctgaaggccctggactactgccacagcatgggcatcatgcacagagatgtgaagccccacaacgtgatgattgaccacgagcacaggaagctgcggctgattgactggggcctggccgagttctaccaccctggccaggagtacaacgtgcgggtggccagccgctacttcaagggccctgagctgctggtggactaccagatgtatgactacagcctggacatgtggagcctgggctgcatgctggcctccatgatcttcaggaaggagcccttcttccacggccatgacaactatgaccagctggtgagaattgccaaggtgctgggcacagaggacctgtatgactacatcgacaagtacaacatcgagctggacccccgcttcaatgacatcctgggccgccacagcaggaagcgctgggagagatttgtgcacagcgagaaccagcacctggtgtccccagaggccctggacttcctggacaagctgctgcgctatgaccaccagagccggctgacagcccgggaggccatggagcacccctacttctacacagtggtgaaggaccaggccaggatgggcagcagctccatgcctgggggcagcacccctgtgagcagcgccaacatgatgagcggcatcagctctgtgcccacccccagccccctgggccccctggccggcagccctgtgattgctgctgccaaccccctgggcatgcctgtgcctgctgctgctggggcccagcagtag

SEQ ID NO: 18766 - DNA, 1194 bp, synthetic construct
  misc_feature 1..1194: note = Description of Artificial Sequence: Synthetic coding sequence
  source 1..1194: mol_type = other DNA
atgagcggccctgtgcccagccgggcccgggtgtacacagatgtgaacacccaccggccccgggagtactgggactatgagagccacgtggtggagtggggcaaccaggatgactaccagctggtgaggaagctgggccggggcaagtacagcgaggtgtttgaggccatcaacatcaccaacaatgagaaggtggtggtgaagatcctgaagcctgtgaagaagaagaagatcaagcgggagatcaagatcctggagaacctgcggggcggccccaacatcatcaccctggccgacatcgtgaaggaccctgtgtccaggaccccagccctggtgtttgaacatgtgaacaacacagacttcaagcagctgtaccagaccctgacagattatgacatccgcttctacatgtatgagatcctgaaggccctggactactgccacagcatgggcatcatgcacagagatgtgaagccccacaacgtgatgattgaccacgagcacaggaagctgcggctgattgactggggcctggccgagttctaccaccctggccaggagtacaacgtgcgggtggccagccgctacttcaagggccctgagctgctggtggactaccagatgtatgactacagcctggacatgtggagcctgggctgcatgctggcctccatgatcttcaggaaggagcccttcttccacggccatgacaactatgaccagctggtgagaattgccaaggtgctgggcacagaggacctgtatgactacatcgacaagtacaacatcgagctggacccccgcttcaatgacatcctgggccgccacagcaggaagcgctgggagagatttgtgcacagcgagaaccagcacctggtgtccccagaggccctggacttcctggacaagctgctgcgctatgaccaccagagccggctgacagcccgggaggccatggagcacccctacttctacacagtggtgaaggaccaggccaggatgggcagcagctccatgcctgggggcagcacccctgtgagcagcgccaacatgatgagcggcatcagctctgtgcccacccccagccccctgggccccctggccggcagccctgtgattgctgctgccaaccccctgggctgcctcttccagctgcccctgcggtctgctgtgacagccctgtctgtgtcctag

SEQ ID NO: 18767 - DNA, 768 bp, synthetic construct
  misc_feature 1..768: note = Description of Artificial Sequence: Synthetic coding sequence
  source 1..768: mol_type = other DNA
atgtatgagatcctgaaggccctggactactgccacagcatgggcatcatgcacagagatgtgaagccccacaacgtgatgattgaccacgagcacaggaagctgcggctgattgactggggcctggccgagttctaccaccctggccaggagtacaacgtgcgggtggccagccgctacttcaagggccctgagctgctggtggactaccagatgtatgactacagcctggacatgtggagcctgggctgcatgctggcctccatgatcttcaggaaggagcccttcttccacggccatgacaactatgaccagctggtgagaattgccaaggtgctgggcacagaggacctgtatgactacatcgacaagtacaacatcgagctggacccccgcttcaatgacatcctgggccgccacagcaggaagcgctgggagagatttgtgcacagcgagaaccagcacctggtgtccccagaggccctggacttcctggacaagctgctgcgctatgaccaccagagccggctgacagcccgggaggccatggagcacccctacttctacacagtggtgaaggaccaggccaggatgggcagcagctccatgcctgggggcagcacccctgtgagcagcgccaacatgatgagcggcatcagctctgtgcccacccccagccccctgggccccctggccggcagccctgtgattgctgctgccaaccccctgggcatgcctgtgcctgctgctgctggggcccagcagtag

SEQ ID NO: 18768 - DNA, 1158 bp, synthetic construct
  misc_feature 1..1158: note = Description of Artificial Sequence: Synthetic coding sequence
  source 1..1158: mol_type = other DNA
atgagcggccctgtgcccagccgggcccgggtgtacacagatgtgaacacccaccggccccgggagtactgggactatgagagccacgtggtggagtggggcaaccaggatgactaccagctggtgaggaagctgggccggggcaagtacagcgaggtgtttgaggccatcaacatcaccaacaatgagaaggtggtggtgaagatcctgaagcctgtgaagaagaagaagatcaagcgggagatcaagatcctggagaacctgcggggcggccccaacatcatcaccctggccgacatcgtgaaggaccctgtgtccaggaccccagccctggtgtttgaacatgtgaacaacacagacttcaagcagctgtaccagaccctgacagattatgacatccgcttctacatgtatgagatcctgaaggccctggactactgccacagcatgggcatcatgcacagagatgtgaagccccacaacgtgatgattgaccacgagcacaggaagctgcggctgattgactggggcctggccgagttctaccaccctggccaggagtacaacgtgcgggtggccagccgctacttcaagggccctgagctgctggtggactaccagatgtatgactacagcctggacatgtggagcctgggctgcatgctggcctccatgatcttcaggaaggagcccttcttccacggccatgacaactatgaccagctggtgagaattgccaaggtgctgggcacagaggacctgtatgactacatcgacaagtacaacatcgagctggacccccgcttcaatgacatcctgggccgccacagcaggaagcgctgggagagatttgtgcacagcgagaaccagcacctggtgtccccagaggccctggacttcctggacaagctgctgcgctatgaccaccagagccggctgacagcccgggaggccatggagcacccctacttctacacagtggtgaaggaccaggccaggatgggcagcagctccatgcctgggggcagcacccctgtgagcagcgccaacatgatgtctgagatgaagttctgccgggtggcccaggccggcctggagctgctgagcagcacagtgtacccaccctggccacccaaggtgctgcggctggaggcctag

SEQ ID NO: 18769 - DNA, 1053 bp, synthetic construct
  misc_feature 1..1053: note = Description of Artificial Sequence: Synthetic coding sequence
  source 1..1053: mol_type = other DNA
atgcctggccctgctgctggcagccgggcccgggtgtatgcagaggtgaacagcctgcggagccgggagtactgggactatgaggcccacgtgcccagctggggcaaccaggatgactaccagctggtgaggaagctgggccggggcaagtacagcgaggtgtttgaggccatcaacatcaccaacaatgaaagagtggtggtgaagatcctgaagcctgtgaagaagaagaagatcaagcgggaggtgaagatcctggagaacctgcggggcggcaccaacatcatcaagctgattgacacagtgaaggaccctgtgtccaagaccccagccctggtgtttgagtacatcaacaacacagacttcaagcagctgtaccagatcctgacagactttgacatccgcttctacatgtatgagctgctgaaggccctggactactgccacagcaagggcatcatgcacagagatgtgaagccccacaacgtgatgattgaccaccagcagaagaagctgcggctgattgactggggcctggccgagttctaccacccagcccaggagtacaacgtgcgggtggccagccgctacttcaagggccctgagctgctggtggactaccagatgtatgactacagcctggacatgtggagcctgggctgcatgctggcctccatgatcttcagaagagagcccttcttccacggccaggacaactatgaccagctggtgcgcatcgccaaggtgctgggcacagaggagctgtatggctacctgaagaagtaccacatcgacctggacccccacttcaatgacatcctgggccagcacagcaggaagcgctgggagaacttcatccacagtgaaaatagacacctggtgtccccagaggccctggacctgctggacaagctgctgcgctatgaccaccagcagaggctgacagccaaggaggccatggagcacccctacttctaccctgtggtgaaggagcagagccagccctgtgccgacaatgctgtgctgagcagcggcctgacagctgccaggtag

SEQ ID NO: 18770 - DNA, 600 bp, synthetic construct
  misc_feature 1..600: note = Description of Artificial Sequence: Synthetic coding sequence
  source 1..600: mol_type = other DNA
atggaggcccgggacaagcaggtgctgcggagcctgcggctggagctgggcgctgaggtgctggtggagggcctggtgctgcagtacctgtaccaggagggcatcctgacagagaaccacatccaggagatcaatgcccagaccaccggcctgaggaagaccatgctgctgctggacatcctgcccagccggggccccaaggcctttgacaccttcctggacagcctgcaggagttcccctgggtgcgggagaagctgaagaaggcccgggaggaggccatgacagacctgcctgctggggaccggctgaccggcatccccagccacatcctgaacagcagccccagcgaccggcagatcaaccagctggcccagaggctgggccctgagtgggagcccatggtgctgagcctgggcctgagccagacagacatctaccgctgcaaggccaaccacccccacaacgtgcagagccaggtggtggaggccttcatccgctggaggcagagatttgggaagcaggccaccttccagagcctgcacaacggcctgcgggctgtggaggtggaccccagcctgctgctgcacatgctggagtag

SEQ ID NO: 18771 - DNA, 366 bp, synthetic construct
  misc_feature 1..366: note = Description of Artificial Sequence: Synthetic coding sequence
  source 1..366: mol_type = other DNA
atggaggcccgggacaagcaggtgctgcggagcctgcggctggagctgggcgctgaggtgctggtggagggcctggtgctgcagtacctgtaccaggagggcatcctgacagagaaccacatccaggagatcaatgcccagaccaccggcctgaggaagaccatgctgctgctggacatcctgcccagccggggccccaaggcctttgacaccttcctggacagcctgcaggagttcccctgggtgcgggagaagctgaagaaggcccgggaggaggccatgacagacctgcctgctgagatgaggaagctgcggcccaaggacagcgtgacctgcctggccagccagctgacctggaggttctag

SEQ ID NO: 18772 - DNA, 600 bp, synthetic construct; identical to SEQ ID NO: 18770
  misc_feature 1..600: note = Description of Artificial Sequence: Synthetic coding sequence
  source 1..600: mol_type = other DNA

SEQ ID NO: 18773 - DNA, 312 bp, synthetic construct
  misc_feature 1..312: note = Description of Artificial Sequence: Synthetic coding sequence
  source 1..312: mol_type = other DNA
atggaggcccgggacaagcaggtgctgcggagcctgcggctggagctgggcgctgaggtgctggtggagggcctggtgctgcagtacctgtaccaggagggcatcctgacagagaaccacatccaggagatcaatgcccagaccaccggcctgaggaagaccatgctgctgctggacatcctgcccagccggggccccaaggcctttgacaccttcctggacagcctgcaggagttcccctgggtgcgggagaagctgaagaaggcccgggaggaggccatgacagacctgcctgctggctgctggccctag

SEQ ID NO: 18774 - DNA, 1443 bp, synthetic construct
  misc_feature 1..1443: note = Description of Artificial Sequence: Synthetic coding sequence
  source 1..1443: mol_type = other DNA
atgtctgctgaggtgatccaccaggtggaggaggccctggacacagatgagaaggagatgctgctcttcctgtgcagagatgtggccattgatgtggtgccccccaacgtgcgggacctgctggacatcctgcgggagcggggcaagctgtctgtgggggacctggccgagctgctgtacagagtgagaagatttgacctgctgaagaggatcctgaagatggacaggaaggctgtggagacccacctgctgaggaacccccacctggtgtctgactacagagtgctgatggccgagatcggggaggacctggacaagagtgatgtgagcagcctcatcttcctgatgaaggactacatgggccggggcaagatcagcaaggagaagagcttcctggacctggtggtggagctggagaagctgaacctggtggccccagaccagctggacctgctggagaagtgcctgaagaacatccacagaattgacctgaagaccaagatccagaagtacaagcagagcgtgcagggcgccggcaccagctacagaaatgtgctgcaggccgccatccagaagagcctgaaggaccccagcaacaacttccggctgcacaacggccgcagcaaggagcagaggctgaaggagcagctgggcgcccagcaggagcctgtgaagaagagcatccaggagagcgaggccttcctgccccagagcatccctgaggagcgctacaagatgaagagcaagcccctgggcatctgcctgatcatcgactgcattggaaatgaaacagagctgctgcgggacaccttcaccagcctgggctatgaggtgcagaagttcctgcacctgtccatgcacggcatcagccagatcctgggccagtttgcctgcatgcctgagcaccgggactatgacagctttgtgtgtgtgctggtgtcccggggcggcagccagagcgtgtatggagtggaccagacccacagcggcctgcccctgcaccacatccggaggatgttcatgggagacagctgcccctacctggccggcaagcccaagatgttcttcatccagaactacgtggtgtctgagggccagctggaggacagcagcctgctggaggtggatggccctgccatgaagaatgtggagttcaaggcccagaagaggggcctgtgcaccgtgcaccgggaggccgacttcttctggagcctgtgcacagctgacatgagcctgctggagcagagccacagcagccccagcctgtacctgcagtgcctgagccagaagctgcggcaggagaggaagaggcccctgctggacctgcacatcgagctgaatggctacatgtatgactggaacagccgggtgtctgccaaggagaagtactacgtgtggctgcagcacaccctgaggaagaagctgatcctgagctacacctag

SEQ ID NO: 18775 - DNA, 1389 bp, synthetic construct
  misc_feature 1..1389: note = Description of Artificial Sequence: Synthetic coding sequence
  source 1..1389: mol_type = other DNA
atgtctgctgaggtgatccaccaggtggaggaggccctggacacagatgagaaggagatgctgctcttcctgtgcagagatgtggccattgatgtggtgccccccaacgtgcgggacctgctggacatcctgcgggagcggggcaagctgtctgtgggggacctggccgagctgctgtacagagtgagaagatttgacctgctgaagaggatcctgaagatggacaggaaggctgtggagacccacctgctgaggaacccccacctggtgtctgactacagagtgctgatggccgagatcggggaggacctggacaagagtgatgtgagcagcctcatcttcctgatgaaggactacatgggccggggcaagatcagcaaggagaagagcttcctggacctggtggtggagctggagaagctgaacctggtggccccagaccagctggacctgctggagaagtgcctgaagaacatccacagaattgacctgaagaccaagatccagaagtacaagcagagcgtgcagggcgccggcaccagctacagaaatgtgctgcaggccgccatccagaagagcctgaaggaccccagcaacaacttccggctgcacaacggccgcagcaaggagcagaggctgaaggagcagctgggcgcccagcaggagcctgtgaagaagagcatccaggagagcgaggccttcctgccccagagcatccctgaggagcgctacaagatgaagagcaagcccctgggcatctgcctgatcatcgactgcattggaaatgaaacagagctgctgcgggacaccttcaccagcctgggctatgaggtgcagaagttcctgcacctgtccatgcacggcatcagccagatcctgggccagtttgcctgcatgcctgagcaccgggactatgacagctttgtgtgtgtgctggtgtcccggggcggcagccagagcgtgtatggagtggaccagacccacagcggcctgcccctgcaccacatccggaggatgttcatgggagacagctgcccctacctggccggcaagcccaagatgttcttcatccagaactacgtggtgtctgagggccagctggaggacagcagcctgctggaggtggatggccctgccatgaagaatgtggagttcaaggcccagaagaggggcctgtgcaccgtgcaccgggaggccgacttcttctggagcctgtgcacagctgacatgagcctgctggagcagagccacagcagccccagcctgtacctgcagtgcctgagccagaagctgcggcaggagcggggcaccatccctggcagcggcatcacagagagcaaggacatgcacttcagcagcctgggctgcatcctgctggatgtgctgtag

SEQ ID NO: 18776 - DNA, 1047 bp, synthetic construct
  misc_feature 1..1047: note = Description of Artificial Sequence: Synthetic coding sequence
  source 1..1047: mol_type = other DNA
atggccgagatcggggaggacctggacaagagtgatgtgagcagcctcatcttcctgatgaaggactacatgggccggggcaagatcagcaaggagaagagcttcctggacctggtggtggagctggagaagctgaacctggtggccccagaccagctggacctgctggagaagtgcctgaagaacatccacagaattgacctgaagaccaagatccagaagtacaagcagagcgtgcagggcgccggcaccagctacagaaatgtgctgcaggccgccatccagaagagcctgaaggaccccagcaacaacttccgggaggagcctgtgaagaagagcatccaggagagcgaggccttcctgccccagagcatccctgaggagcgctacaagatgaagagcaagcccctgggcatctgcctgatcatcgactgcattggaaatgaaacagagctgctgcgggacaccttcaccagcctgggctatgaggtgcagaagttcctgcacctgtccatgcacggcatcagccagatcctgggccagtttgcctgcatgcctgagcaccgggactatgacagctttgtgtgtgtgctggtgtcccggggcggcagccagagcgtgtatggagtggaccagacccacagcggcctgcccctgcaccacatccggaggatgttcatgggagacagctgcccctacctggccggcaagcccaagatgttcttcatccagaactacgtggtgtctgagggccagctggaggacagcagcctgctggaggtggatggccctgccatgaagaatgtggagttcaaggcccagaagaggggcctgtgcaccgtgcaccgggaggccgacttcttctggagcctgtgcacagctgacatgagcctgctggagcagagccacagcagccccagcctgtacctgcagtgcctgagccagaagctgcggcaggagcggggcaccatccctggcagcggcatcacagagagcaaggacatgcacttcagcagcctgggctgcatcctgctggatgtgctgtag

SEQ ID NO: 18777 - DNA, 903 bp, synthetic construct
  misc_feature 1..903: note = Description of Artificial Sequence: Synthetic coding sequence
  source 1..903: mol_type = other DNA
atgtctgctgaggtgatccaccaggtggaggaggccctggacacagatgagaaggagatgctgctcttcctgtgcagagatgtggccattgatgtggtgccccccaacgtgcgggacctgctggacatcctgcgggagcggggcaagctgtctgtgggggacctggccgagctgctgtacagagtgagaagatttgacctgctgaagaggatcctgaagatggacaggaaggctgtggagacccacctgctgaggaacccccacctggtgtctgactacagagtgctgatggccgagatcggggaggacctggacaagagtgatgtgagcagcctcatcttcctgatgaaggactacatgggccggggcaagatcagcaaggagaagagcttcctggacctggtggtggagctggagaagctgaacctggtggccccagaccagctggacctgctggagaagtgcctgaagaacatccacagaattgacctgaagaccaagatccagaagtacaagcagagcgtgcagggcgccggcaccagctacagaaatgtgctgcaggccgccatccagaagagcctgaaggaccccagcaacaacttccggctgcacaacggccgcagcaaggagcagaggctgaaggagcagctgggcgcccagcaggagcctgtgaagaagagcatccaggagagcgaggccttcctgccccagagcatccctgaggagcgctacaagatgaagagcaagcccctgggcatctgcctgatcatcgactgcattggaaatgaaacagaaaatgcccacagctggatcttcaccctgaacagcatggccacctgcatgattggaacagctgagttcctgcccaggaggaacatcatgagcggctgcagcaccctgtag

SEQ ID NO: 18778 - DNA, 753 bp, synthetic construct
  misc_feature 1..753: note = Description of Artificial Sequence: Synthetic coding sequence
  source 1..753: mol_type = other DNA
atgtctgctgaggtgatccaccaggtggaggaggccctggacacagatgagaaggagatgctgctcttcctgtgcagagatgtggccattgatgtggtgccccccaacgtgcgggacctgctggacatcctgcgggagcggggcaagctgtctgtgggggacctggccgagctgctgtacagagtgagaagatttgacctgctgaagaggatcctgaagatggacaggaaggctgtggagacccacctgctgaggaacccccacctggtgtctgactacagagtgctgatggccgagatcggggaggacctggacaagagtgatgtgagcagcctcatcttcctgatgaaggactacatgggccggggcaagatcagcaaggagaagagcttcctggacctggtggtggagctggagaagctgaacctggtggccccagaccagctggacctgctggagaagtgcctgaagaacatccacagaattgacctgaagaccaagatccagaagtacaagcagagcggcggctggaatggcacctggatgaccaaggccagcttcagcctgtggctggagatcgccagcctgtacatcctgcacatcccagacctgcccacccccctgccctgcatcttcatgatcagcgccaagtgctgccaggccgtgctgaacatcagcgtcttcaagaaggagagcggcatctgcaccggctggcagagctatggccacagcggcgtgctgcacgtgtgctag

SEQ ID NO: 18779 - DNA, 357 bp, synthetic construct
  misc_feature 1..357: note = Description of Artificial Sequence: Synthetic coding sequence
  source 1..357: mol_type = other DNA
atgtctgctgaggtgatccaccaggtggaggaggccctggacacagatgagaaggagatgctgctcttcctgtgcagagatgtggccattgatgtggtgccccccaacgtgcgggacctgctggacatcctgcgggagcggggcaagctgtctgtgggggacctggccgagctgctgtacagagtgagaagatttgacctgctgaagaggatcctgaagatggacaggaaggctgtggagacccacctgctgaggaacccccacctggtgtctgactacagagtgctgatggccgagatcggggaggacctggacaagagtgatgtgagcagcctcatcttcctgatgaaggactag

SEQ ID NO: 18780 - DNA, 1443 bp, synthetic construct; identical to SEQ ID NO: 18774
  misc_feature 1..1443: note = Description of Artificial Sequence: Synthetic coding sequence
  source 1..1443: mol_type = other DNA

SEQ ID NO: 18781 - DNA, 189 bp, synthetic construct
  misc_feature 1..189: note = Description of Artificial Sequence: Synthetic coding sequence
  source 1..189: mol_type = other DNA
atgtctgctgaggtgatccaccaggtggaggaggccctggacacagatgagaaggagatgctgctcttcctgtgcagagatgtggccattgatgtggtgccccccaacgtgcgggacctgctggacatcctgcgggagcggggcaagctgtctgtgggggacctggccgagctgctgtacagagtgtag

SEQ ID NO: 18782 - DNA, 195 bp, synthetic construct
  misc_feature 1..195: note = Description of Artificial Sequence: Synthetic coding sequence
  source 1..195: mol_type = other DNA
atgtctgctgaggtgatccaccaggtggaggaggccctggacacagatgagaaggagatgctgctcttcctgtgcagagatgtggccattgatgtggtgccccccaacgtgcgggacctgctggacatcctgcgggagcggggcaagctgtctgtgggggacctggccgagctgctgtacagagtgagaagatag

SEQ ID NO: 18783 - DNA, 390 bp, synthetic construct
  misc_feature 1..390: note = Description of Artificial Sequence: Synthetic coding sequence
  source 1..390: mol_type = other DNA
atgtctgctgaggtgatccaccaggtggaggaggccctggacacagatgagaaggagatgctgctcttcctgtgcagagatgtggccattgatgtggtgccccccaacgtgcgggacctgctggacatcctgcgggagcggggcaagctgtctgtgggggacctggccgagctgctgtacagagtgagaagatttgacctgctgaagaggatcctgaagatggacaggaaggctgtggagacccacctgctgaggaacccccacctggtgtctgactacagagtgctgatggccgagatcggggaggacctggacaagagtgatgtgagcagcctcatcttcctgatgaaggactacatgggccggggcaagatcagcaaggagaagtag

SEQ ID NO: 18784 - DNA, 1155 bp, synthetic construct
  misc_feature 1..1155: note = Description of Artificial Sequence: Synthetic coding sequence
  source 1..1155: mol_type = other DNA
atggccgagatcggggaggacctggacaagagtgatgtgagcagcctcatcttcctgatgaaggactacatgggccggggcaagatcagcaaggagaagagcttcctggacctggtggtggagctggagaagctgaacctggtggccccagaccagctggacctgctggagaagtgcctgaagaacatccacagaattgacctgaagaccaagatccagaagtacaagcagagcgtgcagggcgccggcaccagctacagaaatgtgctgcaggccgccatccagaagagcctgaaggaccccagcaacaacttccggctgcacaacggccgcagcaaggagcagaggctgaaggagcagctgggcgcccagcaggagcctgtgaagaagagcatccaggagagcgaggccttcctgccccagagcatccctgaggagcgctacaagatgaagagcaagcccctgggcatctgcctgatcatcgactgcattggaaatgaaacagagctgctgcgggacaccttcaccagcctgggctatgaggtgcagaagttcctgcacctgtccatgcacggcatcagccagatcctgggccagtttgcctgcatgcctgagcaccgggactatgacagctttgtgtgtgtgctggtgtcccggggcggcagccagagcgtgtatggagtggaccagacccacagcggcctgcccctgcaccacatccggaggatgttcatgggagacagctgcccctacctggccggcaagcccaagatgttcttcatccagaactacgtggtgtctgagggccagctggaggacagcagcctgctggaggtggatggccctgccatgaagaatgtggagttcaaggcccagaagaggggcctgtgcaccgtgcaccgggaggccgacttcttctggagcctgtgcacagctgacatgagcctgctggagcagagccacagcagccccagcctgtacctgcagtgcctgagccagaagctgcggcaggagaggaagaggcccctgctggacctgcacatcgagctgaatggctacatgtatgactggaacagccgggtgtctgccaaggagaagtactacgtgtggctgcagcacaccctgaggaagaagctgatcctgagctacacctag

SEQ ID NO: 18785 - DNA, 666 bp, synthetic construct
  misc_feature 1..666: note = Description of Artificial Sequence: Synthetic coding sequence
  source 1..666: mol_type = other DNA
atgtctgctgaggtgatccaccaggtggaggaggccctggacacagatgagaaggagatgctgctcttcctgtgcagagatgtggccattgatgtggtgccccccaacgtgcgggacctgctggacatcctgcgggagcggggcaagctgtctgtgggggacctggccgagctgctgtacagagtgagaagatttgacctgctgaagaggatcctgaagatggacaggaaggctgtggagacccacctgctgaggaacccccacctggtgtctgactacagagtgctgatggccgagatcggggaggacctggacaagagtgatgtgagcagcctcatcttcctgatgaaggactacatgggccggggcaagatcagcaaggagaagagcttcctggacctggtggtggagctggagaagctgaacctggtggccccagaccagctggacctgctggagaagtgcctgaagaacatccacagaattgacctgaagaccaagatccagaagtacaagcagagcgtgcagggcgccggcaccagctacagaaatgtgctgcaggccgccatccagaagagcctgaaggaccccagcaacaacttcaggatgatcaccccctatgcccactgcccagacctgaagatcctgggcaactgcagcatgtag

SEQ ID NO: 18786 - DNA, 1338 bp, synthetic construct
  misc_feature 1..1338: note = Description of Artificial Sequence: Synthetic coding sequence
  source 1..1338: mol_type = other DNA
atgtctgctgaggtgatccaccaggtggaggaggccctggacacagatgagaaggagatgctgctcttcctgtgcagagatgtggccattgatgtggtgccccccaacgtgcgggacctgctggacatcctgcgggagcggggcaagctgtctgtgggggacctggccgagctgctgtacagagtgagaagatttgacctgctgaagaggatcctgaagatggacaggaaggctgtggagacccacctgctgaggaacccccacctggtgtctgactacagagtgctgatggccgagatcggggaggacctggacaagagtgatgtgagcagcctcatcttcctgatgaaggactacatgggccggggcaagatcagcaaggagaagagcttcctggacctggtggtggagctggagaagctgaacctggtggccccagaccagctggacctgctggagaagtgcctgaagaacatccacagaattgacctgaagaccaagatccagaagtacaagcagagcgtgcagggcgccggcaccagctacagaaatgtgctgcaggccgccatccagaagagcctgaaggaccccagcaacaacttccgcagcatccctgaggagcgctacaagatgaagagcaagcccctgggcatctgcctgatcatcgactgcattggaaatgaaacagagctgctgcgggacaccttcaccagcctgggctatgaggtgcagaagttcctgcacctgtccatgcacggcatcagccagatcctgggccagtttgcctgcatgcctgagcaccgggactatgacagctttgtgtgtgtgctggtgtccagaggaggcagccagagcgtgtatggagtggaccagacccacagcggcctgcccctgcaccacatccggaggatgttcatgggagacagctgcccctacctggccggcaagcccaagatgttcttcatccagaactacgtggtgtctgagggccagctggaggacagcagcctgctggaggtggatggccctgccatgaagaatgtggagttcaaggcccagaagaggggcctgtgcaccgtgcaccgggaggccgacttcttctggagcctgtgcacagctgacatgagcctgctggagcagagccacagcagccccagcctgtacctgcagtgcctgagccagaagctgcggcaggagaggaagaggcccctgctggacctgcacatcgagctgaatggctacatgtatgactggaacagccgggtgtctgccaaggagaagtactacgtgtggctgcagcacaccctgaggaagaagctgatcctgagctacacctag

SEQ ID NO: 18787 - DNA, 1152 bp, synthetic construct
  misc_feature 1..1152: note = Description of Artificial Sequence: Synthetic coding sequence
  source 1..1152: mol_type = other DNA
atggctgacaaggtgctgaaggagaagaggaagctgttcatccgctccatgggagagggcaccatcaatggcctgctggatgagctgctgcagaccagggtgctgaacaaggaggagatggagaaggtgaagcgggagaatgccaccgtgatggacaagacccgggccctgattgacagcgtcatccccaagggggcccaggcctgccagatctgcatcacctacatctgtgaagaagattcctacctggccggcaccctgggcctgtctgctgccccccaggccgtgcaggacaacccagccatgcccaccagcagcggcagcgagggcaatgtgaagctgtgcagcctggaggaggcccagaggatctggaagcagaagtctgctgagatctaccccatcatggacaagagcagcaggacccggctggccctgatcatctgcaatgaggagtttgacagcatccccaggagaactggagctgaggtggacatcaccggcatgaccatgctgctgcagaacctgggctacagcgtggatgtgaagaagaacctgacagccagtgacatgaccacagagctggaggcctttgcccacaggcctgagcacaagaccagtgacagcaccttcctggtgttcatgagccacggcatccgggagggcatctgtgggaagaagcacagcgagcaggtgcctgacatcctgcagctgaatgccatcttcaacatgctgaacaccaagaactgccccagcctgaaggacaagcccaaggtgatcatcatccaggcctgccgcggggacagccctggggtggtgtggttcaaggacagcgtgggcgtgtctggcaacctgagcctgcccaccacagaggagtttgaagatgatgccatcaagaaggcccacatcgagaaggacttcatcgccttctgcagcagcaccccagacaacgtgtcctggaggcaccccaccatgggcagcgtcttcatcggccgcctgattgagcacatgcaggagtatgcctgcagctgtgatgtggaggagatcttcaggaaggtgcgcttctcctttgagcagccagatggccgggcccagatgcccaccacagagcgggtgaccctgacccgctgcttctacctgtttcctggccactag

SEQ ID NO: 18788 - DNA, 792 bp, synthetic construct
  misc_feature 1..792: note = Description of Artificial Sequence: Synthetic coding sequence
  source 1..792: mol_type = other DNA
atggctgacaaggtgctgaaggagaagaggaagctgttcatccgctccatgggagaggccccccaggccgtgcaggacaacccagccatgcccaccagcagcggcagcgagggcaatgtgaagctgtgcagcctggaggaggcccagaggatctggaagcagaagtctgctgagatctaccccatcatggacaagagcagcaggacccggctggccctgatcatctgcaatgaggagtttgacagcatccccaggagaactggagctgaggtggacatcaccggcatgaccatgctgctgcagaacctgggctacagcgtggatgtgaagaagaacctgacagccagtgacatgaccacagagctggaggcctttgcccacaggcctgagcacaagaccagtgacagcaccttcctggtgttcatgagccacggcatccgggagggcatctgtgggaagaagcacagcgagcaggtgcctgacatcctgcagctgaatgccatcttcaacatgctgaacaccaagaactgccccagcctgaaggacaagcccaaggtgatcatcatccaggcctgccgcggggacaacgtgtcctggaggcaccccaccatgggcagcgtcttcatcggccgcctgattgagcacatgcaggagtatgcctgcagctgtgatgtggaggagatcttcaggaaggtgcgcttctcctttgagcagccagatggccgggcccagatgcccaccacagagcgggtgaccctgacccgctgcttctacctgtttcctggccactag

SEQ ID NO: 18789 - DNA, 267 bp, synthetic construct
  misc_feature 1..267: note = Description of Artificial Sequence: Synthetic coding sequence
  source 1..267: mol_type = other DNA
atggctgacaaggtgctgaaggagaagaggaagctgttcatccgctccatgggagaagataatgtgtcctggaggcaccccaccatgggctctgtgttcatcggccgcctcatcgagcacatgcaggagtatgcctgcagctgtgatgtggaggagatcttcaggaaggtgcgcttctcctttgagcagccagatggccgggcccagatgcccaccacagagcgggtgaccctgacccgctgcttctacctgtttcctggccactag

SEQ ID NO: 18790 - DNA, 1152 bp, synthetic construct; identical to SEQ ID NO: 18787
  misc_feature 1..1152: note = Description of Artificial Sequence: Synthetic coding sequence
  source 1..1152: mol_type = other DNA

SEQ ID NO: 18791 - DNA, 267 bp, synthetic construct; identical to SEQ ID NO: 18789
  misc_feature 1..267: note = Description of Artificial Sequence: Synthetic coding sequence
  source 1..267: mol_type = other DNA

SEQ ID NO: 18792 - DNA, 1215 bp, synthetic construct
  misc_feature 1..1215: note = Description of Artificial Sequence: Synthetic coding sequence
  source 1..1215: mol_type = other DNA
atggctgacaaggtgctgaaggagaagaggaagctgttcatccgctccatgggagagggcaccatcaatggcctgctggatgagctgctgcagaccagggtgctgaacaaggaggagatggagaaggtgaagcgggagaatgccaccgtgatggacaagacccgggccctgattgacagcgtcatccccaagggggcccaggcctgccagatctgcatcacctacatctgtgaagaagattcctacctggccggcaccctgggcctgtctgctgaccagaccagcggcaactacctgaacatgcaggacagccagggcgtgctgagcagcttccctgccccccaggccgtgcaggacaacccagccatgcccaccagcagcggcagcgagggcaatgtgaagctgtgcagcctggaggaggcccagaggatctggaagcagaagtctgctgagatctaccccatcatggacaagagcagcaggacccggctggccctgatcatctgcaatgaggagtttgacagcatccccaggagaactggagctgaggtggacatcaccggcatgaccatgctgctgcagaacctgggctacagcgtggatgtgaagaagaacctgacagccagtgacatgaccacagagctggaggcctttgcccacaggcctgagcacaagaccagtgacagcaccttcctggtgttcatgagccacggcatccgggagggcatctgtgggaagaagcacagcgagcaggtgcctgacatcctgcagctgaatgccatcttcaacatgctgaacaccaagaactgccccagcctgaaggacaagcccaaggtgatcatcatccaggcctgccgcggggacagccctggggtggtgtggttcaaggacagcgtgggcgtgtctggcaacctgagcctgcccaccacagaggagtttgaagatgatgccatcaagaaggcccacatcgagaaggacttcatcgccttctgcagcagcaccccagacaacgtgtcctggaggcaccccaccatgggctctgtgttcatcggccgcctcatcgagcacatgcaggagtatgcctgcagctgtgatgtggaggagatcttcaggaaggtgcgcttctcctttgagcagccagatggccgggcccagatgcccaccacagagcgggtgaccctgacccgctgcttctacctgtttcctggccactag

SEQ ID NO: 18793 - DNA, 792 bp, synthetic construct; identical to SEQ ID NO: 18788
  misc_feature 1..792: note = Description of Artificial Sequence: Synthetic coding sequence
  source 1..792: mol_type = other DNA

SEQ ID NO: 18794 - DNA, 1152 bp, synthetic construct; identical to SEQ ID NO: 18787
  misc_feature 1..1152: note = Description of Artificial Sequence: Synthetic coding sequence
  source 1..1152: mol_type = other DNA

SEQ ID NO: 18795 - DNA, 936 bp, synthetic construct
  misc_feature 1..936: note = Description of Artificial Sequence: Synthetic coding sequence
  source 1..936: mol_type = other DNA
atggctgacaaggtgctgaaggagaagaggaagctgttcatccgctccatgggagaggccccccaggccgtgcaggacaacccagccatgcccaccagcagcggcagcgagggcaatgtgaagctgtgcagcctggaggaggcccagaggatctggaagcagaagtctgctgagatctaccccatcatggacaagagcagcaggacccggctggccctgatcatctgcaatgaggagtttgacagcatccccaggagaactggagctgaggtggacatcaccggcatgaccatgctgctgcagaacctgggctacagcgtggatgtgaagaagaacctgacagccagtgacatgaccacagagctggaggcctttgcccacaggcctgagcacaagaccagtgacagcaccttcctggtgttcatgagccacggcatccgggagggcatctgtgggaagaagcacagcgagcaggtgcctgacatcctgcagctgaatgccatcttcaacatgctgaacaccaagaactgccccagcctgaaggacaagcccaaggtgatcatcatccaggcctgccgcggggacagccctggggtggtgtggttcaaggacagcgtgggcgtgtctggcaacctgagcctgcccaccacagaggagtttgaagatgatgccatcaagaaggcccacatcgagaaggacttcatcgccttctgcagcagcaccccagacaacgtgtcctggaggcaccccaccatgggcagcgtcttcatcggccgcctgattgagcacatgcaggagtatgcctgcagctgtgatgtggaggagatcttcaggaaggtgcgcttctcctttgagcagccagatggccgggcccagatgcccaccacagagcgggtgaccctgacccgctgcttctacctgtttcctggccactag

SEQ ID NO: 18796 - DNA, 906 bp, synthetic construct
  misc_feature 1..906: note = Description of Artificial Sequence: Synthetic coding sequence
  source 1..906: mol_type = other DNA
atggagaaggtgaagagagaaaatgccaccgtgatggacaagacccgggccctgattgattctgtcatccccaagggggcccaggcctgccagatctgcatcacctacatctgtgaggaggacagctacctggccggcaccctgggcctgtctgctgaccagaccagcggcaactacctgaacatgcaggacagccagggcgtgctgagcagcttccctgccccccaggccgtgcaggacaacccagccatgcccaccagcagcggcagcgagggcaatgtgaagctgtgcagcctggaggaggcccagaggatctggaagcagaagtctgctgagatctaccccatcatggacaagagcagcaggacccggctggccctgatcatctgcaatgaggagtttgacagcatccccaggagaactggagctgaggtggacatcaccggcatgaccatgctgctgcagaacctgggctacagcgtggatgtgaagaagaacctgacagccagtgacatgaccacagagctggaggcctttgcccacaggcctgagcacaagaccagtgacagcaccttcctggtgttcatgagccacggcatccgggagggcatctgtgggaagaagcacagcgagcaggtgcctgacatcctgcagctgaatgccatcttcaacatgctgaacaccaagaactgccccagcctgaaggacaagcccaaggtgatcatcatccaggcctgccgcggggacagccctggggtggtgtggttcaaggacagcgtgggcgtgtctggcaacctgagcctgcccaccacagaggagtttgaagatgatgccatcaagaaggcccacatcgagaaggacttcatcgccttctgcagcagcacccctgggaagagccagagctag

SEQ ID NO: 18797 - DNA, 333 bp, synthetic construct
  misc_feature 1..333: note = Description of Artificial Sequence: Synthetic coding sequence
  source 1..333: mol_type = other DNA
atggctgacaaggtgctgaaggagaagaggaagctgttcatccgctccatgggagagggcaccatcaatggcctgctggatgagctgctgcagaccagggtgctgaacaaggaggagatggagaaggtgaagcgggagaatgccaccgtgatggacaagacccgggccctgattgacagcgtcatccccaagggggcccaggcctgccagatctgcatcacctacatctgtgaagaagattcctacctggccggcaccctgggcctgtctgctgacctgagcaacaacggccaggtgaagccccacaccagctgcagccactacctgcagtag

SEQ ID NO: 18798 - DNA, 267 bp, synthetic construct; identical to SEQ ID NO: 18789
  misc_feature 1..267: note = Description of Artificial Sequence: Synthetic coding sequence
  source 1..267: mol_type = other DNA

SEQ ID NO: 18799 - DNA, 1215 bp, synthetic construct; identical to SEQ ID NO: 18792
  misc_feature 1..1215: note = Description of Artificial Sequence: Synthetic coding sequence
  source 1..1215: mol_type = other DNA

SEQ ID NO: 18800 - DNA, 792 bp, synthetic construct; identical to SEQ ID NO: 18788
  misc_feature 1..792: note = Description of Artificial Sequence: Synthetic coding sequence
  source 1..792: mol_type = other DNA

SEQ ID NO: 18801 - DNA, 1368 bp, synthetic construct
  misc_feature 1..1368: note = Description of Artificial Sequence: Synthetic coding sequence
  source 1..1368: mol_type = other DNA
atgaagagccagggccagcactggtacagcagcagtgacaagaactgcaaggtgtccttccgggagaagctgctgatcatcgacagcaacctgggcgtgcaggatgtggagaacctgaagttcctgtgcatcggcctggtgcccaacaagaagctggagaagagcagcagcgccagtgatgtgtttgagcacctgctggccgaggacctgctgtctgaggaggaccccttcttcctggccgagctgctgtacatcatccggcagaagaagctgctgcagcacctgaactgcaccaaggaggaggtggagcggctgctgcccacccggcagagggtgtccctcttcaggaacctgctgtatgagctgtctgagggcatcgacagcgagaacctgaaggacatgatcttcctgctgaaggacagcctgcccaagacagagatgaccagcctgtccttcctggccttcctggagaagcagggcaagattgatgaggacaacctgacctgcctggaggacctgtgcaagacagtggtgcccaagctgctgagaaatattgagaagtacaagcgggagaaggccatccagatcgtgaccccacctgtggacaaggaggccgagagctaccagggcgaggaggagctggtgtcccagacagatgtgaagaccttcctggaggccctgccccaggagagctggcagaacaagcatgctggcagcaatgagatcctgagccacgtgttccagtggctgggcttcaccgtgcacatccacaacaacgtgaccaaggtggagatggagatggtgctgcagaagcagaagtgcaacccagcccatgctgatggagactgctttgtgttctgcatcctgacccacggccgctttggagctgtgtacagcagtgatgaggccctgatccccatccgggagatcatgagccacttcaccgccctgcagtgcccccggctggccgagaagcccaagctgttcttcatccaggcctgccagggcgaggagatccagcccagcgtgtccattgaagcagatgccctgaaccctgagcaggcccccaccagcctgcaggacagcatcccagctgaggccgacttcctgctgggcctggccaccgtgcccggctacgtgtccttccgccacgtggaggagggctcctggtacatccagagcctgtgcaaccacctgaagaagctggtgcccaggcatgaggacatcctgagcatcctgacagctgtgaatgatgatgtgtcccggcgggtggacaagcagggcaccaagaagcagatgccccagcctgccttcaccctgaggaagaagctggtgtttcctgtgcccctggatgccctgagcctgtag

SEQ ID NO: 18802 - DNA, 1437 bp, synthetic construct
  misc_feature 1..1437: note = Description of Artificial Sequence: Synthetic coding sequence
  source 1..1437: mol_type = other DNA
atgaagagccagggccagcactggtacagcagcagtgacaagaactgcaaggtgtccttccgggagaagctgctgatcatcgacagcaacctgggcgtgcaggatgtggagaacctgaagttcctgtgcatcggcctggtgcccaacaagaagctggagaagagcagcagcgccagtgatgtgtttgagcacctgctggccgaggacctgctgtctgaggaggaccccttcttcctggccgagctgctgtacatcatccggcagaagaagctgctgcagcacctgaactgcaccaaggaggaggtggagcggctgctgcccacccggcagagggtgtccctcttcaggaacctgctgtatgagctgtctgagggcatcgacagcgagaacctgaaggacatgatcttcctgctgaaggacagcctgcccaagacagagatgaccagcctgtccttcctggccttcctggagaagcagggcaagattgatgaggacaacctgacctgcctggaggacctgtgcaagacagtggtgcccaagctgctgagaaatattgagaagtacaagcgggagaaggccatccagatcgtgaccccacctgtggacaaggaggccgagagctaccagggcgaggaggagctggtgtcccagacagatgtgaagaccttcctggaggccctgcccagggctgctgtgtacaggatgaacagaaaccaccggggcctgtgtgtgattgtgaacaaccacagcttcaccagcctgaaggaccggcagggcacccacaaggatgctgagatcctgagccacgtgttccagtggctgggcttcaccgtgcacatccacaacaacgtgaccaaggtggagatggagatggtgctgcagaagcagaagtgcaacccagcccatgctgatggagactgctttgtgttctgcatcctgacccacggccgctttggagctgtgtacagcagtgatgaggccctgatccccatccgggagatcatgagccacttcaccgccctgcagtgcccccggctggccgagaagcccaagctgttcttcatccaggcctgccagggcgaggagatccagcccagcgtgtccattgaagcagatgccctgaaccctgagcaggcccccaccagcctgcaggacagcatcccagctgaggccgacttcctgctgggcctggccaccgtgcccggctacgtgtccttccgccacgtggaggagggctcctggtacatccagagcctgtgcaaccacctgaagaagctggtgcccaggatgctgaagttcctggagaagaccatggagatccggggcaggaagaggacagtgtggggcgccaagcagatcagcgccaccagcctgcccacagccatcagcgcccagacccccaggcctcccatgaggcgctggagctctgtgtcctag

SEQ ID NO: 18803 - DNA, 1566 bp, synthetic construct
  misc_feature 1..1566: note = Description of Artificial Sequence: Synthetic coding sequence
  source 1..1566: mol_type = other DNA
atgaagagccagggccagcactggtacagcagcagtgacaagaactgcaaggtgtccttccgggagaagctgctgatcatcgacagcaacctgggcgtgcaggatgtggagaacctgaagttcctgtgcatcggcctggtgcccaacaagaagctggagaagagcagcagcgccagtgatgtgtttgagcacctgctggccgaggacctgctgtctgaggaggaccccttcttcctggccgagctgctgtacatcatccggcagaagaagctgctgcagcacctgaactgcaccaaggaggaggtggagcggctgctgcccacccggcagagggtgtccctcttcaggaacctgctgtatgagctgtctgagggcatcgacagcgagaacctgaaggacatgatcttcctgctgaaggacagcctgcccaagacagagatgaccagcctgtccttcctggccttcctggagaagcagggcaagattgatgaggacaacctgacctgcctggaggacctgtgcaagacagtggtgcccaagctgctgagaaatattgagaagtacaagcgggagaaggccatccagatcgtgaccccacctgtggacaaggaggccgagagctaccagggcgaggaggagctggtgtcccagacagatgtgaagaccttcctggaggccctgccccaggagagctggcagaacaagcatgctggcagcaatggaaacagagccaccaacggggcccccagcctggtgtcccggggcatgcagggcgccagcgccaacaccctgaacagcgagaccagcaccaagagagctgctgtgtacaggatgaacagaaaccaccggggcctgtgtgtgattgtgaacaaccacagcttcaccagcctgaaggaccggcagggcacccacaaggatgctgagatcctgagccacgtgttccagtggctgggcttcaccgtgcacatccacaacaacgtgaccaaggtggagatggagatggtgctgcagaagcagaagtgcaacccagcccacgcagatggagactgctttgtgttctgcatcctgacccacggccgctttggagctgtgtacagcagtgatgaggccctgatccccatccgggagatcatgagccacttcaccgccctgcagtgcccccggctggccgagaagcccaagctgttcttcatccaggcctgccagggcgaggagatccagcccagcgtgtccattgaagcagatgccctgaaccctgagcaggcccccaccagcctgcaggacagcatcccagctgaggccgacttcctgctgggcctggccaccgtgcccggctacgtgtccttcagacatgtggaggagggctcctggtacatccagagcctgtgcaaccacctgaagaagctggtgcccaggatgctgaagttcctggagaagaccatggagatccggggcaggaagaggacagtgtggggcgccaagcagatcagcgccaccagcctgcccacagccatcagcgcccagaccccccggccccccatgaggcgctggagctctgtgtcctag

SEQ ID NO: 18804 - DNA, 1569 bp, synthetic construct
  misc_feature 1..1569: note = Description of Artificial Sequence: Synthetic coding sequence
  source 1..1569: mol_type = other DNA
atgaagagccagggccagcactggtacagcagcagtgacaagaactgcaaggtgtccttccgggagaagctgctgatcatcgacagcaacctgggcgtgcaggatgtggagaacctgaagttcctgtgcatcggcctggtgcccaacaagaagctggagaagagcagcagcgccagtgatgtgtttgagcacctgctggccgaggacctgctgtctgaggaggaccccttcttcctggccgagctgctgtacatcatccggcagaagaagctgctgcagcacctgaactgcaccaaggaggaggtggagcggctgctgcccacccggcagagggtgtccctcttcaggaacctgctgtatgagctgtctgagggcatcgacagcgagaacctgaaggacatgatcttcctgctgaaggacagcctgcccaagacagagatgaccagcctgtccttcctggccttcctggagaagcagggcaagattgatgaggacaacctgacctgcctggaggacctgtgcaagacagtggtgcccaagctgctgagaaatattgagaagtacaagcgggagaaggccatccagatcgtgaccccacctgtggacaaggaggccgagagctaccagggcgaggaggagctggtgtcccagacagatgtgaagaccttcctggaggccctgccccaggagagctggcagaacaagcatgctggcagcaatggaaacagagccaccaacggggcccccagcctggtgtcccggggcatgcagggcgccagcgccaacaccctgaacagcgagaccagcaccaagagagctgctgtgtacaggatgaacagaaaccaccggggcctgtgtgtgattgtgaacaaccacagcttcaccagcctgaaggaccggcagggcacccacaaggatgctgagatcctgagccacgtgttccagtggctgggcttcaccgtgcacatccacaacaacgtgaccaaggtggagatggagatggtgctgcagaagcagaagtgcaacccagcccacgcagatggagactgctttgtgttctgcatcctgacccacggccgctttggagctgtgtacagcagtgatgaggccctgatccccatccgggagatcatgagccacttcaccgccctgcagtgcccccggctggccgagaagcccaagctgttcttcatccaggcctgccagggcgaggagatccagcccagcgtgtccattgaagcagatgccctgaaccctgagcaggcccccaccagcctgcaggacagcatcccagctgaggccgacttcctgctgggcctggccaccgtgcccggctacgtgtccttcagacatgtggaggagggctcctggtacatccagagcctgtgcaaccacctgaagaagctggtgcccaggcatgaggacatcctgagcatcctgacagctgtgaatgatgatgtgtccagaagagtggacaagcagggcaccaagaagcagatgccccagcctgccttcaccctgaggaagaagctggtgtttcctgtgcccctggatgccctgagcctgtag

SEQ ID NO: 18805 - DNA, 1440 bp, synthetic construct
  misc_feature 1..1440: note = Description of Artificial Sequence: Synthetic coding sequence
  source 1..1440: mol_type = other DNA
atgaagagccagggccagcactggtacagcagcagtgacaagaactgcaaggtgtccttccgggagaagctgctgatcatcgacagcaacctgggcgtgcaggatgtggagaacctgaagttcctgtgcatcggcctggtgcccaacaagaagctggagaagagcagcagcgccagtgatgtgtttgagcacctgctggccgaggacctgctgtctgaggaggaccccttcttcctggccgagctgctgtacatcatccggcagaagaagctgctgcagcacctgaactgcaccaaggaggaggtggagcggctgctgcccacccggcagagggtgtccctcttcaggaacctgctgtatgagctgtctgagggcatcgacagcgagaacctgaaggacatgatcttcctgctgaaggacagcctgcccaagacagagatgaccagcctgtccttcctggccttcctggagaagcagggcaagattgatgaggacaacctgacctgcctggaggacctgtgcaagacagtggtgcccaagctgctgagaaatattgagaagtacaagcgggagaaggccatccagatcgtgaccccacctgtggacaaggaggccgagagctaccagggcgaggaggagctggtgtcccagacagatgtgaagaccttcctggaggccctgcccagggctgctgtgtacaggatgaacagaaaccaccggggcctgtgtgtgattgtgaacaaccacagcttcaccagcctgaaggaccggcagggcacccacaaggatgctgagatcctgagccacgtgttccagtggctgggcttcaccgtgcacatccacaacaacgtgaccaaggtggagatggagatggtgctgcagaagcagaagtgcaacccagcccatgctgatggagactgctttgtgttctgcatcctgacccacggccgctttggagctgtgtacagcagtgatgaggccctgatccccatccgggagatcatgagccacttcaccgccctgcagtgcccccggctggccgagaagcccaagctgttcttcatccaggcctgccagggcgaggagatccagcccagcgtgtccattgaagcagatgccctgaaccctgagcaggcccccaccagcctgcaggacagcatcccagctgaggccgacttcctgctgggcctggccaccgtgcccggctacgtgtccttccgccacgtggaggagggctcctggtacatccagagcctgtgcaaccacctgaagaagctggtgcccaggcatgaggacatcctgagcatcctgacagctgtgaatgatgatgtgtcccggcgggtggacaagcagggcaccaagaagcagatgccccagcctgccttcaccctgaggaagaagctggtgtttcctgtgcccctggatgccctgagcctgtag

SEQ ID NO: 18806 - DNA, 822 bp, synthetic construct
  misc_feature 1..822: note = Description of Artificial Sequence: Synthetic coding sequence
  source 1..822: mol_type = other DNA
atgaagagccagggccagcactggtacagcagcagtgacaagaactgcaaggtgtccttccgggagaagctgctgatcatcgacagcaacctgggcgtgcaggatgtggagaacctgaagttcctgtgcatcggcctggtgcccaacaagaagctggagaagagcagcagcgccagtgatgtgtttgagcacctgctggccgaggacctgctgtctgaggaggaccccttcttcctggccgagctgctgtacatcatccggcagaagaagctgctgcagcacctgaactgcaccaaggaggaggtggagcggctgctgcccacccggcagagggtgtccctcttcaggaacctgctgtatgagctgtctgagggcatcgacagcgagaacctgaaggacatgatcttcctgctgaaggacagcctgcccaagacagagatgaccagcctgtccttcctggccttcctggagaagcagggcaagattgatgaggacaacctgacctgcctggaggacctgtgcaagacagtggtgcccaagctgctgagaaatattgagaagtacaagcgggagaaggccatccagatcgtgaccccacctgtggacaaggaggccgagagctaccagggcgaggaggagctggtgtcccagacagatgtgaagaccttcctggaggccctgccccaggagagctggcagaacaagcatgctggcagcaatgaaggcagctgtgtgcaggatgaaagtgagccccagaggcccctgtgccactgccagcagccccagctgtacctgcctgagggccagaccaggaacccctag

SEQ ID NO: 18807 - DNA, 1533 bp, synthetic construct
  misc_feature 1..1533: note = Description of Artificial Sequence: Synthetic coding sequence
  source 1..1533: mol_type = other DNA
atggctgctgctgccctgcgggaccctgcccaggtgcctgtggccgctgacctgctgacagaccacgaggagggctacgtgacctttgaagatgtggccgtgtacttcagccaggaggagtggaggctgctggatgatgcccagaggctgctgtacagaaatgtgatgctggagaacttcaccctgctggccagcctgggcctggccagcagcaagacccatgagatcacccagctggagagctgggaggagcccttcatgcctgcctgggaggtggtgaccagcgccatcccccggggctgctggcatggagctgaggccgaggaggcccctgagcagatcgcctctgtgggcctgctgagcagcaacatccagcagcaccagaagcagcactgtggggagaagcccctgaagaggcaggagggccgggtgcctgtgctgcggagctgcaaggtgcacctgtctgagaagagcctgcagagccgggaggtgggcaaggccctgctgatcagcagcggcgtgctgaagcaccaggtgacccacactggagagaagagccacaggagcagcaagagccgggaggccttccacgccggcaagaggcactacaagtgcagtgaatgtgggaaggccttcggccagaagtacctgctggtgcagcaccagaggctgcacgccggcaagaagacctatgagtgcagtgaatgtgggaagctgttccgggacatgagcaacctcttcatccaccagatcgtgcacactggagagcggccctacggctgcagcaactgtgggaagagcttcagcagaaatgcccacctgattgagcaccagagggtgcacactggagagaagcccttcacctgcagtgaatgtgggaaggccttccgccacaacagcaccctggtgcagcaccacaagatccacactggagtgcggccctatgagtgcagtgaatgtgggaagctgttctccttcaacagcagcctgatgaagcaccagaggatccacactggagagcggccctacaagtgcagtgaatgtgggaagttctacagccacaagagcaacctgatcaagcactggagggtgcacactggagagcggccctacaagtgcagcgactgtgggaagttcttcacccagtgcagcagcctgatgcagcaccagaaggtgcacactggagagaagcccttcaagtgcaatgaatgtggccgcttcttccgggagaacagcaccctggtgcgccaccagagggtgcacactggagccaagccctatgagtgcagagaatgtgggaagttcttcagccagagcagcaccctgatgcagcacaggaaggtgcacatcggggagaagcccttcaagtgcaatgaatgtggccgcctcttccgggagaacagcagcctggtgaagcaccagagggtgcacactggagccaagccctatgagtgcagagaatgtgggaagttcttccgccacaacagcagcctcttcaagcaccggcgcatccacactggagagatgcagtag

SEQ ID NO: 18808 - DNA, 729 bp, synthetic construct
  misc_feature 1..729: note = Description of Artificial Sequence: Synthetic coding sequence
  source 1..729: mol_type = other DNA
atgagcaaccccaggagcctggaggaggagaagtatgacatgtctggggcccggctggccctgatcctgtgtgtgaccaaggcccgggagggcagcgaggaggacctggatgccctggagcacatgttccggcagctgcgctttgagagcaccatgaagagggaccccacagctgagcagttccaggaggagctggagaagttccagcaggccatcgacagccgggaggaccctgtgtcctgtgcctttgtggtgctgatggcccacggccgggagggcttcctgaagggggaggatggagagatggtgaagctggagaacctgtttgaggccctgaacaacaagaactgccaggccctgcgggccaagcccaaggtgtacatcatccaggcctgccgcggggagcagagggaccctggagagaccgtgggcggagatgagatcgtgatggtgatcaaggacagcccccagaccatccccacctacacagatgccctgcacgtgtacagcacagtggagggctacatcgcctacagacatgaccagaagggcagctgcttcatccagaccctggtggatgtgttcaccaagaggaagggccacatcctggagctgctgacagaggtgaccaggaggatggccgaggccgagctggtgcaggagggcaaggccaggaagaccaaccctgagatccagagcaccctgaggaagaggctgtacctgcagtag

SEQ ID NO: 18809 - DNA, 1359 bp, synthetic construct
  misc_feature 1..1359: note = Description of Artificial Sequence: Synthetic coding sequence
  source 1..1359: mol_type = other DNA
atggccgcccccagcgctggctcctggagcaccttccagcacaaggagctgatggctgctgaccggggccgccgcatcctgggcgtgtgtggcatgcacccccaccaccaggagaccctgaagaagaacagagtggtgctggccaagcagctgctgctgtctgagctgctggagcacctgctggagaaggacatcatcaccctggagatgagggagctgatccaggccaaggtgggcagcttcagccagaatgtggagctgctgaacctgctgcccaagaggggcccccaggcctttgatgccttctgtgaggccctgcgggagaccaagcagggccacctggaggacatgctgctgaccaccctgagcggcctgcagcacgtgctgccccccctgagctgtgactatgacctgagcctgcccttccctgtgtgtgagagctgccccctgtacaagaagctgcggctgagcacagacacagtggagcacagcctggacaacaaggatggccctgtgtgcctgcaggtgaagccctgcaccccagagttctaccagacccacttccagctggcctaccgcctgcagagccggccccggggcctggccctggtgctgagcaatgtgcacttcaccggggagaaggagctggagttccgctctggaggagatgtggaccacagcaccctggtgaccctcttcaagctgctgggctatgatgtgcacgtgctgtgtgaccagacagcccaggagatgcaggagaagctgcagaactttgcccagctgcctgcccaccgggtgacagacagctgcatcgtggccctgctgagccatggagtggagggcgccatctacggcgtggatggcaagctgctgcagctgcaggaggtgttccagctgtttgacaatgccaactgccccagcctgcagaacaagcccaagatgttcttcatccaggcctgcagaggagatgaaacagaccggggcgtggaccagcaggacggcaagaaccacgccggcagccctggctgtgaggagagtgatgctgggaaggagaagctgcccaagatgaggctgcccaccaggagtgacatgatctgtggctacgcctgcctgaagggcacagctgccatgaggaacaccaagaggggctcctggtacatcgaggccctggcccaggtgttttctgagcgggcctgtgacatgcacgtggccgacatgctggtgaaggtgaatgccctgatcaaggaccgggagggctacgcccctggaacagagttccaccgctgcaaggagatgtctgagtactgcagcaccctgtgccgccacctgtacctgtttcctggccacccccccacctag

SEQ ID NO: 18810 - DNA, 327 bp, synthetic construct
  misc_feature 1..327: note = Description of Artificial Sequence: Synthetic coding sequence
  source 1..327: mol_type = other DNA
atggccgcccccagcgctggctcctggagcaccttccagcacaaggagctgatggctgctgaccggggccgccgcatcctgggcgtgtgtggcatgcacccccaccaccaggagaccctgaagaagaacagagtggtgctggccaagcagctgctgctgtctgagctgctggagcacctgctggagaaggacatcatcaccctggagatgagggagctgatccaggccaaggtgggcagcttcagccagaatgtggagctgctgaacctgctgcccaagaggggcccccaggcctttgatgccttctgtgaggccctgcacagctag

SEQ ID NO: 18811 - DNA, 942 bp, synthetic construct
  misc_feature 1..942: note = Description of Artificial Sequence: Synthetic coding sequence
  source 1..942: mol_type = other DNA
atgcacccccaccaccaggagaccctgaagaagaacagagtggtgctggccaagcagctgctgctgtctgagctgctggagcacctgctggagaaggacatcatcaccctggagatgagggagctgatccaggccaaggtgggcagcttcagccagaatgtggagctgctgaacctgctgcccaagaggggcccccaggcctttgatgccttctgtgaggccctgcgggagaccaagcagggccacctggaggacatgctgctgaccaccctgagcggcctgcagcacgtgctgccccccctgagctgtgactatgacctgagcctgcccttccctgtgtgtgagagctgccccctgtacaagaagctgcggctgagcacagacacagtggagcacagcctggacaacaaggatggccctgtgtgcctgcaggtgaagccctgcaccccagagttctaccagacccacttccagctggcctaccgcctgcagagccggccccggggcctggccctggtgctgagcaatgtgcacttcaccggggagaaggagctggagttccgctctggaggagatgtggaccacagcaccctggtgaccctcttcaagctgctgggctatgatgtgcacgtgctgtgtgaccagacagcccaggagatgcaggagaagctgcagaactttgcccagctgcctgcccaccgggtgacagacagctgcatcgtggccctgctgagccacggcgtggagggcgccatctatggagtggatggcaagctgctgcagctgcaggaggtgttccagctgtttgacaatgccaactgccccagcctgcagaacaagcccaagatgttcttcatccaggcctgccgcggggccggggccatcggcagcctgggccacctgctgctcttcaccgctgccacagccagcctggccctgtag

SEQ ID NO: 18812 - DNA, 993 bp, synthetic construct
  misc_feature 1..993: note = Description of Artificial Sequence: Synthetic coding sequence
  source 1..993: mol_type = other DNA
atgctgaagctgaagaccaagtttggctcctggcagaccctgtgcaagaggagcaatgtgtggcaggacaagtgcttcttcaagcccttcaacatcgaccagatcagccccaacaagaaggcccaccccaacatggaggccggccccccagagagcggggagagcacagatgccctgaagctgtgcccccatgaggagttcctgcggctgtgcaaggagagagctgaggagatctaccccatcaaggagaggaacaacagaacccggctggccctgatcatctgcaacacagaatttgaccacctgcccccaagaaatggagctgactttgacatcaccggcatgaaggagctgctggagggcctggactacagcgtggatgtggaggagaacctgacagcccgggacatggagagcgccctgcgggcctttgccaccaggcctgagcacaagagcagtgacagcaccttcctggtgctgatgagccacggcatcctggagggcatctgtggcaccgtgcatgatgagaagaagccagatgtgctgctgtatgacaccatcttccagatcttcaacaacagaaactgcctgagcctgaaggacaagcccaaggtgatcatcgtgcaggcctgccgcggggccaacagaggagagctgtgggtgcgggacagccctgccagcctggaggtggccagcagccagagcagcgagaacctggaggaggatgctgtgtacaagacccacgtggagaaggacttcatcgccttctgcagcagcaccccccacaacgtgtcctggagggacagcaccatgggcagcatcttcatcacccagctgatcacctgcttccagaagtacagctggtgctgccacctggaggaggtgttcaggaaggtgcagcagagctttgagaccccccgggccaaggcccagatgcccaccatcgagcggctgtccatgacccgctacttctacctgtttcctggcaactag

SEQ ID NO: 18813 - DNA, 444 bp, synthetic construct
  misc_feature 1..444: note = Description of Artificial Sequence: Synthetic coding sequence
  source 1..444: mol_type = other DNA
atggccgagggcaaccacaggaagaagcccctgaaggtgctggagagcctgggcaaggacttcctgactggagtgctggacaacctggtggagcagaatgtgctgaactggaaggaggaggagaagaagaagtactatgatgccaagacagaggacaaggtgcgggtgatggctgacagcatgcaggagaagcagaggatggccggccagatgctgctgcagaccttcttcaacatcgaccagatcagccccaacaagaaggcccaccccaacatggaggccggccccccagagagcggggagagcacagatgccctgaagctgtgcccccatgaggagttcctgcggctgtgcaaggagcgggcagaggagatctaccccatcaaggagaggaacaacagaacccggctggccctgatcatctgcaacacagaatttgattag

SEQ ID NO: 18814 - DNA, 1134 bp, synthetic construct
  misc_feature 1..1134: note = Description of Artificial Sequence: Synthetic coding sequence
  source 1..1134: mol_type = other DNA
atggccgagggcaaccacaggaagaagcccctgaaggtgctggagagcctgggcaaggacttcctgactggagtgctggacaacctggtggagcagaatgtgctgaactggaaggaggaggagaagaagaagtactatgatgccaagacagaggacaaggtgcgggtgatggctgacagcatgcaggagaagcagaggatggccggccagatgctgctgcagaccttcttcaacatcgaccagatcagccccaacaagaaggcccaccccaacatggaggccggccccccagagagcggggagagcacagatgccctgaagctgtgcccccatgaggagttcctgcggctgtgcaaggagcgggcagaggagatctaccccatcaaggagaggaacaacagaacccggctggccctgatcatctgcaacacagaatttgaccacctgcccccaagaaatggagctgactttgacatcaccggcatgaaggagctgctggagggcctggactacagcgtggatgtggaggagaacctgacagcccgggacatggagagcgccctgcgggcctttgccaccaggcctgagcacaagagcagtgacagcaccttcctggtgctgatgagccacggcatcctggagggcatctgtggcaccgtgcatgatgagaagaagccagatgtgctgctgtatgacaccatcttccagatcttcaacaacagaaactgcctgagcctgaaggacaagcccaaggtgatcatcgtgcaggcctgccgcggggccaacagaggagagctgtgggtgcgggacagccctgccagcctggaggtggccagcagccagagcagcgagaacctggaggaggatgctgtgtacaagacccacgtggagaaggacttcatcgccttctgcagcagcaccccccacaacgtgtcctggagggacagcaccatgggcagcatcttcatcacccagctgatcacctgcttccagaagtacagctggtgctgccacctggaggaggtgttcaggaaggtgcagcagagctttgagaccccccgggccaaggcccagatgcccaccatcgagcggctgtccatgacccgctacttctacctgtttcctggcaactag

SEQ ID NO: 18815 - DNA, 1305 bp, synthetic construct
  misc_feature 1..1305: note = Description of Artificial Sequence: Synthetic coding sequence
  source 1..1305: mol_type = other DNA
atggctgaagattctgggaagaagaagaggaggaagaactttgaggccatgttcaagggcatcctgcagagcggcctggacaactttgtgatcaaccacatgctgaagaacaacgtggccggccagaccagcatccagaccctggtgcccaacacagaccagaagagcacctctgtgaagaaggacaaccacaagaagaagacagtgaagatgctggagtacctgggcaaggatgtgctgcatggagtcttcaactacctggccaagcatgatgtgctgaccctgaaggaggaggagaagaagaagtactatgacaccaagattgaggacaaggccctgatcctggtggacagcctgaggaagaacagagtggcccaccagatgttcacccagaccctgctgaacatggaccagaagatcacctctgtgaagcccctgctgcagattgaagctggccccccagagagcgctgagagcaccaacatcctgaagctgtgcccccgggaggagttcctgcggctgtgcaagaagaaccatgatgagatctaccccatcaagaagagagaagatagaagaaggctggccctgatcatctgcaacaccaagtttgaccacctgcctgccagaaatggagcccactatgacatcgtgggcatgaagaggctgctgcagggcctgggctacacagtggtggatgagaagaacctgacagcccgggacatggagagcgtgctgcgggcctttgctgcccggcctgagcacaagagcagtgacagcaccttcctggtgctgatgagccacggcatcctggagggcatctgtggcacagcccacaagaagaagaagccagatgtgctgctgtatgacaccatcttccagatcttcaacaacagaaactgcctgagcctgaaggacaagcccaaggtgatcatcgtgcaggcctgccgcggggagaagcacggggagctgtgggtgcgggacagccctgccagcctggccctgatcagcagccagagcagcgagaacctggaggccgacagcgtgtgcaagatccacgaggagaaggacttcatcgccttctgcagcagcaccccccacaacgtgtcctggagggacaggacccggggcagcatcttcatcacagagctgatcacctgcttccagaagtacagctgctgctgccacctgatggagatcttcaggaaggtgcagaagagctttgaggtgccccaggccaaggcccagatgcccaccatcgagcgggccaccctgacccgggacttctacctgtttcctggcaactag

SEQ ID NO: 18816 - DNA, 402 bp, synthetic construct
  misc_feature 1..402: note = Description of Artificial Sequence: Synthetic coding sequence
  source 1..402: mol_type = other DNA
atgctgaagaacaacgtggccggccagaccagcatccagaccctggtgcccaacacagaccagaagagcacctctgtgaagaaggacaaccacaagaagaagacagtgaagatgctggagtacctgggcaaggatgtgctgcacggcgtcttcaactacctggccaagcatgatgtgctgaccctgaaggaggaggagaagaagaagtactatgacaccaagattgaggacaaggccctgatcctggtggacagcctgaggaagaacagagtggcccaccagatgttcacccagaccctgctgaacatggaccagaagatcacctctgtgaagcacctgagcaacaagaaggagcggggcccccagaccccaggcagccaccacatgcagtacaaggtgtag

SEQ ID NO: 18817 - DNA, 1344 bp, synthetic construct
  misc_feature 1..1344: note = Description of Artificial Sequence: Synthetic coding sequence
  source 1..1344: mol_type = other DNA
atggctgctgtgccccgggtggagggcgtcttcatcttcctgattgaggacagcggcaagaagaagaggaggaagaactttgaggccatgttcaagggcatcctgcagagcggcctggacaacttcgtcatcaaccacatgctgaagaacaacgtggccggccagaccagcatccagaccctggtgcccaacacagaccagaagagcacctctgtgaagaaggacaaccacaagaagaagacagtgaagatgctggagtacctgggcaaggatgtgctgcacggcgtcttcaactacctggccaagcatgatgtgctgaccctgaaggaggaggagaagaagaagtactatgacaccaagattgaggacaaggccctgatcctggtggacagcctgaggaagaacagagtggcccaccagatgttcacccagaccctgctgaacatggaccagaagatcacctctgtgaagcccctgctgcagatcgaggccggccccccagagagcgctgagagcaccaacatcctgaagctgtgcccccgggaggagttcctgcggctgtgcaagaagaaccatgatgagatctaccccatcaagaagcgggaggacagaagaaggctggccctgatcatctgcaacaccaagtttgaccacctgcctgccagaaatggagcccactatgacatcgtgggcatgaagaggctgctgcagggcctgggctacacagtggtggatgagaagaacctgacagcccgggacatggagagcgtgctgcgggcctttgctgcccggcctgagcacaagagcagtgacagcaccttcctggtgctgatgagccacggcatcctggagggcatctgtggcacagcccacaagaagaagaagccagatgtgctgctgtatgacaccatcttccagatcttcaacaacagaaactgcctgagcctgaaggacaagcccaaggtgatcatcgtgcaggcctgccgcggggagaagcatggagagctgtgggtgcgggacagccctgccagcctggccctgatcagcagccagagcagcgagaacctggaggccgacagcgtgtgcaagatccacgaggagaaggacttcatcgccttctgcagcagcaccccccacaacgtgtcctggagggacaggacccggggcagcatcttcatcacagagctgatcacctgcttccagaagtacagctgctgctgccacctgatggagatcttcaggaaggtgcagaagagctttgaggtgccccaggccaaggcccagatgcccaccatcgagcgggccaccctgacccgggacttctacctgtttcctggcaactag

SEQ ID NO: 18818 - DNA, 879 bp, synthetic construct
  misc_feature 1..879: note = Description of Artificial Sequence: Synthetic coding sequence
  source 1..879: mol_type = other DNA
atggccgccctgctgcagattgaagctggccccccagagagcgctgagagcaccaacatcctgaagctgtgcccccgggaggagttcctgcggctgtgcaagaagaaccatgatgagatctaccccatcaagaagagagaagatagaagaaggctggccctgatcatctgcaacaccaagtttgaccacctgcctgccagaaatggagcccactatgacatcgtgggcatgaagaggctgctgcagggcctgggctacacagtggtggatgagaagaacctgacagcccgggacatggagagcgtgctgcgggcctttgctgcccggcctgagcacaagagcagtgacagcaccttcctggtgctgatgagccacggcatcctggagggcatctgtggcacagcccacaagaagaagaagccagatgtgctgctgtatgacaccatcttccagatcttcaacaacagaaactgcctgagcctgaaggacaagcccaaggtgatcatcgtgcaggcctgccgcggggagaagcacggggagctgtgggtgcgggacagccctgccagcctggccctgatcagcagccagagcagcgagaacctggaggccgacagcgtgtgcaagatccacgaggagaaggacttcatcgccttctgcagcagcaccccccacaacgtgtcctggagggacaggacccggggcagcatcttcatcacagagctgatcacctgcttccagaagtacagctgctgctgccacctgatggagatcttcaggaaggtgcagaagagctttgaggtgccccaggccaaggcccagatgcccaccatcgagcgggccaccctgacccgggacttctacctgtttcctggcaactag

SEQ ID NO: 18819 - DNA, 1131 bp, synthetic construct
  misc_feature 1..1131: note = Description of Artificial Sequence: Synthetic coding sequence
  source 1..1131: mol_type = other DNA
atggccgaggacaaccacaagaagaagacagtgaagatgctggagtacctgggcaaggatgtgctgcatggagtcttcaactacctggccaagcatgatgtgctgaccctgaaggaggaggagaagaagaagtactatgacaccaagattgaggacaaggccctgatcctggtggacagcctgaggaagaacagagtggcccaccagatgttcacccagaccctgctgaacatggaccagaagatcacctctgtgaagcccctgctgcagattgaagctggccccccagagagcgctgagagcaccaacatcctgaagctgtgcccccgggaggagttcctgcggctgtgcaagaagaaccatgatgagatctaccccatcaagaagagagaagatagaagaaggctggccctgatcatctgcaacaccaagtttgaccacctgcctgccagaaatggagcccactatgacatcgtgggcatgaagaggctgctgcagggcctgggctacacagtggtggatgagaagaacctgacagcccgggacatggagagcgtgctgcgggcctttgctgcccggcctgagcacaagagcagtgacagcaccttcctggtgctgatgagccacggcatcctggagggcatctgtggcacagcccacaagaagaagaagccagatgtgctgctgtatgacaccatcttccagatcttcaacaacagaaactgcctgagcctgaaggacaagcccaaggtgatcatcgtgcaggcctgccgcggggagaagcacggggagctgtgggtgcgggacagccctgccagcctggccctgatcagcagccagagcagcgagaacctggaggccgacagcgtgtgcaagatccacgaggagaaggacttcatcgccttctgcagcagcaccccccacaacgtgtcctggagggacaggacccggggcagcatcttcatcacagagctgatcacctgcttccagaagtacagctgctgctgccacctgatggagatcttcaggaaggtgcagaagagctttgaggtgccccaggccaaggcccagatgcccaccatcgagcgggccaccctgacccgggacttctacctgtttcctggcaactag

SEQ ID NO: 18820 - DNA, 1344 bp, synthetic construct; identical to SEQ ID NO: 18817
  misc_feature 1..1344: note = Description of Artificial Sequence: Synthetic coding sequence
  source 1..1344: mol_type = other DNA

SEQ ID NO: 18821 - DNA, 879 bp, synthetic construct; identical to SEQ ID NO: 18818
  misc_feature 1..879: note = Description of Artificial Sequence: Synthetic coding sequence
  source 1..879: mol_type = other DNA

SEQ ID NO: 18822 - DNA, 882 bp, synthetic construct
  misc_feature 1..882: note = Description of Artificial Sequence: Synthetic coding sequence
  source 1..882: mol_type = other DNA
atgagcagcgccagcggcctgcggcggggccaccctgctggaggagaggagaacatgacagaaacagatgccttctacaagcgggagatgtttgatcctgctgagaagtacaagatggaccacagaagaagaggcatcgccctgatcttcaaccacgagcgcttcttctggcacctgaccctgcctgagcggcggggcacctgtgccgaccgggacaacctgacccggcgcttcagtgacctgggctttgaggtgaagtgcttcaatgacctgaaggccgaggagctgctgctgaagatccacgaggtgtccacagtgtcccatgctgatgctgactgctttgtgtgtgtgttcctgagccatggagagggcaaccacatctatgcctatgatgccaagattgagatccagaccctgaccggcctcttcaagggggacaagtgccacagcctggtgggcaagcccaagatcttcatcatccaggcctgccggggcaaccagcatgatgtgcctgtgatccccctggatgtggtggacaaccagacagagaagctggacaccaacatcacagaggtggatgctgcctctgtgtacaccctgcctgctggagctgacttcctgatgtgctacagcgtggccgagggctactacagccaccgggagaccgtgaatggctcctggtacatccaggacctgtgtgagatgctgggcaagtatggcagcagcctggagttcacagagctgctgaccctggtgaacaggaaggtgtcccagaggagagtggacttctgcaaggaccccagcgccatcggcaagaagcaggtgccctgctttgcctccatgctgaccaagaagctgcacttcttccccaagagcaactag

SEQ ID NO: 18823 - DNA, 615 bp, synthetic construct
  misc_feature 1..615: note = Description of Artificial Sequence: Synthetic coding sequence
  source 1..615: mol_type = other DNA
atgagcagcgccagcggcctgcggcggggccaccctgctgtgtccacagtgtcccatgctgatgctgactgctttgtgtgtgtgttcctgagccacggggagggcaaccacatctatgcctatgatgccaagattgagatccagaccctgaccggcctcttcaagggggacaagtgccacagcctggtgggcaagcccaagatcttcatcatccaggcctgccggggcaaccagcatgatgtgcctgtgatccccctggatgtggtggacaaccagacagagaagctggacaccaacatcacagaggtggatgctgcctctgtgtacaccctgcctgctggagctgacttcctgatgtgctacagcgtggccgagggctactacagccaccgggagaccgtgaatggctcctggtacatccaggacctgtgtgagatgctgggcaagtatggcagcagcctggagttcacagagctgctgaccctggtgaacaggaaggtgtcccagaggagagtggacttctgcaaggaccccagcgccatcggcaagaagcaggtgccctgctttgcctccatgctgaccaagaagctgcacttcttccccaagagcaactag

SEQ ID NO: 18824 - DNA, 912 bp, synthetic construct
  misc_feature 1..912: note = Description of Artificial Sequence: Synthetic coding sequence
  source 1..912: mol_type = other DNA
atggctgatgaccagggctgcatcgaggagcagggcgtggaggacagcgccaatgaagattctgtggatgccaagccagacaggagcagctttgtgcccagcctcttcagcaagaagaagaagaatgtgaccatgaggagcatcaagaccacccgggacagagtgcccacctaccagtacaacatgaactttgagaagctgggcaagtgcatcatcatcaacaacaagaactttgacaaggtgacaggcatgggcgtgagaaatggaacagacaaggatgctgaggccctcttcaagtgcttccgcagcctgggctttgatgtgattgtgtacaatgactgcagctgtgccaagatgcaggacctgctgaagaaggccagcgaggaggaccacaccaatgctgcctgctttgcctgcatcctgctgagccacggggaggagaatgtcatctacggcaaggatggagtgacccccatcaaggacctgacagcccacttccggggggaccgctgcaagaccctgctggagaagcccaagctgttcttcatccaggcctgccggggcacagagctggatgatggcatccaggccgacagcggccccatcaatgacacagatgccaacccccgctacaagatccctgtggaggccgacttcctgtttgcctacagcacagtgcccggctactacagctggaggagccctggccggggctcctggtttgtgcaggccctgtgcagcatcctggaggagcacggcaaggacctggagatcatgcagatcctgaccagggtgaatgacagagtggcccggcactttgagagccagagtgatgacccccacttccacgagaagaagcagatcccctgtgtggtgtccatgctgaccaaggagctgtacttcagccagtag

SEQ ID NO: 18825 - DNA, 912 bp, synthetic construct; identical to SEQ ID NO: 18824
  misc_feature 1..912: note = Description of Artificial Sequence: Synthetic coding sequence
  source 1..912: mol_type = other DNA

SEQ ID NO: 18826 - DNA, 663 bp, synthetic construct
  misc_feature 1..663: note = Description of Artificial Sequence: Synthetic coding sequence
  source 1..663: mol_type = other DNA
atggctgatgaccagggctgcatcgaggagcagggcgtggaggacagcgccaatgaagattctgtggatgccaagccagacaggagcagctttgtgcccagcctcttcagcaagaagaagaagaatgtgaccatgaggagcatcaagaccacccgggacagagtgcccacctaccagtacaacatgaactttgagaagctgggcaagtgcatcatcatcaacaacaagaactttgacaaggtgacaggcatgggcgtgagaaatggaacagacaaggatgctgaggccctcttcaagtgcttccgcagcctgggctttgatgtgattgtgtacaatgactgcagcgtgacccaggccggcgtgcagaggcgggacctgggccgcctgcagcccccaccaccccgcttcaagcagtacagctgcctgagcctgctgagctcctgggactacagacatgccccaccccggctggccaacttctgcatcttccggcgggagggcttccgccacgtgggccaggccggcctgaagctgctggccagcagtgacccccccaccagcggcagccagagcgctggcatcactggagtgtccctgcacacccagccccagatcatgaaggtgtccctgcggcactgcaacaccttcatctgctttgcctag

SEQ ID NO: 18827 - DNA, 912 bp, synthetic construct; identical to SEQ ID NO: 18824
  misc_feature 1..912: note = Description of Artificial Sequence: Synthetic coding sequence
  source 1..912: mol_type = other DNA

SEQ ID NO: 18828 - DNA, 663 bp, synthetic construct
  misc_feature 1..663: note = Description of Artificial Sequence: Synthetic coding sequence
  source 1..663: mol_type = other DNA
atggctgatgaccagggctgcatcgaggagcagggcgtggaggacagcgccaatgaagattctgtggatgccaagccagacaggagcagctttgtgcccagcctcttcagcaagaagaagaagaatgtgaccatgaggagcatcaagaccacccgggacagagtgcccacctaccagtacaacatgaactttgagaagctgggcaagtgcatcatcatcaacaacaagaactttgacaaggtgacaggcatgggcgtgagaaatggaacagacaaggatgctgaggccctcttcaagtgcttccgcagcctgggctttgatgtgattgtgtacaatgactgcagcttcacccaggccggcgtgcagaggcgggacctgggccgcctgcagcccccaccaccccgcttcaagcagtacagctgcctgagcctgctgagctcctgggactacagacatgccccaccccggctggccaacttctgcatcttccggcgggagggcttccgccacgtgggccaggccggcctgaagctgctggccagcagtgacccccccaccagcggcagccagagcgctggcatcactggagtgtccctgcacacccagccccagatcatgaaggtgtccctgcggcactgcaacaccttcatctgctttgcctag

SEQ ID NO: 18829 - DNA, 1011 bp, synthetic construct
  misc_feature 1..1011: note = Description of Artificial Sequence: Synthetic coding sequence
  source 1..1011: mol_type = other DNA
atggactgtgtgggctggcccccaggcaggaagtggcacctggagaagaacaccagctgtggcggcagcagcggcatctgtgccagctatgtgacccagatggctgatgaccagggctgcatcgaggagcagggcgtggaggacagcgccaatgaagacagcgtggatgccaagccagacaggagcagctttgtgcccagcctcttcagcaagaagaagaagaatgtgaccatgaggagcatcaagaccacccgggacagagtgcccacctaccagtacaacatgaactttgagaagctgggcaagtgcatcatcatcaacaacaagaactttgacaaggtgacaggcatgggcgtgagaaatggaacagacaaggatgctgaggccctcttcaagtgcttccgcagcctgggctttgatgtgattgtgtacaatgactgcagctgtgccaagatgcaggacctgctgaagaaggccagcgaggaggaccacaccaatgctgcctgctttgcctgcatcctgctgagccatggagaggagaatgtcatctacggcaaggatggagtgacccccatcaaggacctgacagcccacttccggggggaccgctgcaagaccctgctggagaagcccaagctgttcttcatccaggcctgccggggcacagagctggatgatggcatccaggccgacagcggccccatcaatgacacagatgccaacccccgctacaagatccctgtggaggccgacttcctgtttgcctacagcacagtgcccggctactacagctggaggagccctggccggggctcctggtttgtgcaggccctgtgcagcatcctggaggagcacggcaaggacctggagatcatgcagatcctgaccagggtgaatgacagagtggcccggcactttgagagccagagtgatgacccccacttccacgagaagaagcagatcccctgtgtggtgtccatgctgaccaaggagctgtacttcagccagtag

SEQ ID NO: 18830 - DNA, 762 bp, synthetic construct
  misc_feature 1..762: note = Description of Artificial Sequence: Synthetic coding sequence
  source 1..762: mol_type = other DNA
atggctgatgaccagggctgcatcgaggagcagggcgtggaggacagcgccaatgaagattctgtggatgccaagccagacaggagcagctttgtgcccagcctcttcagcaagaagaagaagaatgtgaccatgaggagcatcaagaccacccgggacagagtgcccacctaccagtacaacatgaactttgagaagctgggcaagtgcatcatcatcaacaacaagaactttgacaaggtgacaggcatgggcgtgagaaatggaacagacaaggatgctgaggccctcttcaagtgcttccgcagcctgggctttgatgtgattgtgtacaatgactgcagctgtgccaagatgcaggacctgctgaagaaggccagcgaggaggaccacaccaatgctgcctgctttgcctgcatcctgctgagccacggggaggagaacatggagagctgcagcgtgacccaggccggcgtgcagaggcgggacctgggccgcctgcagcccccaccaccccggctggccgagggccccagcctgatgatggccagccggcccacccggggccccagcatgacccagatgctgatcctggacaccaggagccagtggaagctgaccagcagcagccccatcccccgcttccaggccatcacccggggcggggcccaggaggaggcccctggcctgtgcaagcccagcgcccccagctggaggagcacagagaagacctggaagagctgccgcagcagccctggatag

SEQ ID NO: 18831 - DNA, 669 bp, synthetic construct
  misc_feature 1..669: note = Description of Artificial Sequence: Synthetic coding sequence
  source 1..669: mol_type = other DNA
atggctgatgaccagggctgcatcgaggagcagggcgtggaggacagcgccaatgaagattctgtggatgccaagccagacaggagcagctttgtgcccagcctcttcagcaagaagaagaagaatgtgaccatgaggagcatcaagaccacccgggacagagtgcccacctaccagtacaacatgaactttgagaagctgggcaagtgcatcatcatcaacaacaagaactttgacaaggtgacaggcatgggcgtgagaaatggaacagacaaggatgctgaggccctcttcaagtgcttccgcagcctgggctttgatgtgattgtgtacaatgactgcagctgtgccaagatgcaggacctgctgaagaaggccagcgaggaggaccacaccaatgctgcctgctttgcctgcatcctgctgagccacggggaggagaatgtcatctacggcaaggatggagtgacccccatcaaggacctgacagcccacttccggggggaccgctgcaagaccctgctggagaagcccaagctgttcttcatccaggcctgccggggcacagagctggatgatggcatccaggccgacagcggccccatcaatgacacagatgccaacccccgctacaagatccctgtggaggccgacttcctgtttgcctag

SEQ ID NO: 18832 - DNA, 795 bp, synthetic construct
  misc_feature 1..795: note = Description of Artificial Sequence: Synthetic coding sequence
  source 1..795: mol_type = other DNA
atggctgatgaccagggctgcatcgaggagcagggcgtggaggacagcgccaatgaagattctgtggatgccaagccagacaggagcagctttgtgcccagcctcttcagcaagaagaagaagaatgtgaccatgaggagcatcaagaccacccgggacagagtgcccacctaccagtacaacatgaactttgagaagctgggcaagtgcatcatcatcaacaacaagaactttgacaaggtgacaggcatgggcgtgagaaatggaacagacaaggatgctgaggccctcttcaagtgcttccgcagcctgggctttgatgtgattgtgtacaatgactgcagctgtgccaagatgcaggacctgctgaagaaggccagcgaggaggaccacaccaatgctgcctgctttgcctgcatcctcttcttcatccaggcctgccggggcacagagctggatgatggcatccaggccgacagcggccccatcaatgacacagatgccaacccccgctacaagatccctgtggaggccgacttcctgtttgcctacagcacagtgcccggctactacagctggaggagccctggccggggctcctggtttgtgcaggccctgtgcagcatcctggaggagcacggcaaggacctggagatcatgcagatcctgaccagggtgaatgacagagtggcccggcactttgagagccagagtgatgacccccacttccacgagaagaagcagatcccctgtgtggtgtccatgctgaccaaggagctgtacttcagccagtag

SEQ ID NO: 18833 - DNA, 837 bp, synthetic construct
  misc_feature 1..837: note = Description of Artificial Sequence: Synthetic coding sequence
  source 1..837: mol_type = other DNA
atgcagaggggcctcttcagtgatggagacaccagcaagaagaagaagaatgtgaccatgaggagcatcaagaccacccgggacagagtgcccacctaccagtacaacatgaactttgagaagctgggcaagtgcatcatcatcaacaacaagaactttgacaaggtgacaggcatgggcgtgagaaatggaacagacaaggatgctgaggccctcttcaagtgcttccgcagcctgggctttgatgtgattgtgtacaatgactgcagctgtgccaagatgcaggacctgctgaagaaggccagcgaggaggaccacaccaatgctgcctgctttgcctgcatcctgctgagccatggagaggagaatgtcatctacggcaaggatggagtgacccccatcaaggacctgacagcccacttccggggggaccgctgcaagaccctgctggagaagcccaagctgttcttcatccaggcctgccggggcacagagctggatgatggcatccaggccgacagcggccccatcaatgacacagatgccaacccccgctacaagatccctgtggaggccgacttcctgtttgcctacagcacagtgcccggctactacagctggaggagccctggccggggctcctggtttgtgcaggccctgtgcagcatcctggaggagcacggcaaggacctggagatcatgcagatcctgaccagggtgaatgacagagtggcccggcactttgagagccagagtgatgacccccacttccacgagaagaagcagatcccctgtgtggtgtccatgctgaccaaggagctgtacttcagccagtag

SEQ ID NO: 18834 - DNA, 1188 bp, synthetic construct
  misc_feature 1..1188: note = Description of Artificial Sequence: Synthetic coding sequence
  source 1..1188: mol_type = other DNA
atggacttcagcaggaacctgtatgacatcggggagcagctggacagcgaggacctggccagcctgaagttcctgagcctggactacatcccccagaggaagcaggagcccatcaaggatgccctgatgctgttccagaggctgcaggagaagaggatgctggaggagagcaacctgtccttcctgaaggagctgctcttccgcatcaaccggctggacctgctgatcacctacctgaacaccaggaaggaggagatggagcgggagctgcagaccccaggccgggcccagatcagcgcctacagagtgatgctgtaccagatcagcgaggaggtgagccgctctgagctgcgctccttcaagttcctgctgcaggaggagatcagcaagtgcaagctggatgatgacatgaacctgctggacatcttcatcgagatggagaagagggtcatcctgggggagggcaagctggacatcctgaagagggtgtgtgcccagatcaacaagagcctgctgaagatcatcaatgactatgaggagttcagcaaaggagccctgaccaccacctttgaggagctgcactttgagatcaagccccatgatgactgcaccgtggagcagatctatgagatcctgaagatctaccagctgatggaccacagcaacatggactgcttcatctgctgcatcctgagccatggagacaagggcatcatctacggcacagatggccaggaggcccccatctatgagctgaccagccagttcaccggcctgaagtgccccagcctggccggcaagcccaaggtgttcttcatccaggcctgccagggcgacaactaccagaagggcatccctgtggagacagattctgaggagcagccctacctggagatggacctgagcagcccccagacccgctacatcccagatgaagctgacttcctgctgggcatggccaccgtgaacaactgtgtgtcctacagaaatcctgctgagggcacctggtacatccagagcctgtgccagagcctgcgggagcgctgccccagaggagatgacatcctgaccatcctgacagaggtgaactatgaggtgagcaacaaggatgacaagaagaacatgggcaagcagatgccccagcccaccttcaccctgaggaagaagctggtgttccccagcgactag

SEQ ID NO: 18835 - DNA, 1491 bp, synthetic construct
  misc_feature 1..1491: note = Description of Artificial Sequence: Synthetic coding sequence
  source 1..1491: mol_type = other DNA
atggacttcagcaggaacctgtatgacatcggggagcagctggacagcgaggacctggccagcctgaagttcctgagcctggactacatcccccagaggaagcaggagcccatcaaggatgccctgatgctgttccagaggctgcaggagaagaggatgctggaggagagcaacctgtccttcctgaaggagctgctcttccgcatcaaccggctggacctgctgatcacctacctgaacaccaggaaggaggagatggagcgggagctgcagaccccaggccgggcccagatcagcgcctaccgcttccacttctgcaggatgtcctgggccgaggccaacagccagtgccagacccagagcgtgcccttctggaggagagtggaccacctgctgatccgggtgatgctgtaccagatcagcgaggaggtgagccgctctgagctgcgctccttcaagttcctgctgcaggaggagatcagcaagtgcaagctggatgatgacatgaacctgctggacatcttcatcgagatggagaagagggtcatcctgggggagggcaagctggacatcctgaagagggtgtgtgcccagatcaacaagagcctgctgaagatcatcaatgactatgaggagttcagcaaaggagaggagctgtgtggggtgatgaccatcagtgacagcccccgggagcaggacagcgagagccagaccctggacaaggtgtaccagatgaagagcaagccccggggctactgcctgatcatcaacaaccacaactttgccaaggcccgggagaaggtgcccaagctgcacagcatccgggacagaaatggcacccacctggatgctggggccctgaccaccacctttgaggagctgcactttgagatcaagccccatgatgactgcaccgtggagcagatctatgagatcctgaagatctaccagctgatggaccacagcaacatggactgcttcatctgctgcatcctgagccacggggacaagggcatcatctatggaacagatggccaggaggcccccatctatgagctgaccagccagttcaccggcctgaagtgccccagcctggccggcaagcccaaggtgttcttcatccaggcctgccagggcgacaactaccagaagggcatccctgtggagacagacagcgaggagcagccctacctggagatggacctgagcagcccccagacccgctacatcccagatgaggccgacttcctgctgggcatggccaccgtgaacaactgtgtgtcctacagaaatcctgctgagggcacctggtacatccagagcctgtgccagagcctgcgggagcgctgccccagaggagatgacatcctgaccatcctgacagaggtgaactatgaggtgagcaacaaggatgacaagaagaacatgggcaagcagatgccccagcccaccttcaccctgaggaagaagctggtgttccccagcgactag

SEQ ID NO: 18836 - DNA, 1395 bp, synthetic construct
  misc_feature 1..1395: note = Description of Artificial Sequence: Synthetic coding sequence
  source 1..1395: mol_type = other DNA
atggacttcagcaggaacctgtatgacatcggggagcagctggacagcgaggacctggccagcctgaagttcctgagcctggactacatcccccagaggaagcaggagcccatcaaggatgccctgatgctgttccagaggctgcaggagaagaggatgctggaggagagcaacctgtccttcctgaaggagctgctcttccgcatcaaccggctggacctgctgatcacctacctgaacaccaggaaggaggagatggagcgggagctgcagaccccaggccgggcccagatcagcgcctacagagtgatgctgtaccagatcagcgaggaggtgagccgctctgagctgcgctccttcaagttcctgctgcaggaggagatcagcaagtgcaagctggatgatgacatgaacctgctggacatcttcatcgagatggagaagagggtcatcctgggggagggcaagctggacatcctgaagagggtgtgtgcccagatcaacaagagcctgctgaagatcatcaatgactatgaggagttcagcaaaggagaggagctgtgtggggtgatgaccatcagtgacagcccccgggagcaggacagcgagagccagaccctggacaaggtgtaccagatgaagagcaagccccggggctactgcctgatcatcaacaaccacaactttgccaaggcccgggagaaggtgcccaagctgcacagcatccgggacagaaatggcacccacctggatgctggggccctgaccaccacctttgaggagctgcactttgagatcaagccccatgatgactgcaccgtggagcagatctatgagatcctgaagatctaccagctgatggaccacagcaacatggactgcttcatctgctgcatcctgagccacggggacaagggcatcatctatggaacagatggccaggaggcccccatctatgagctgaccagccagttcaccggcctgaagtgccccagcctggccggcaagcccaaggtgttcttcatccaggcctgccagggcgacaactaccagaagggcatccctgtggagacagacagcgaggagcagccctacctggagatggacctgagcagcccccagacccgctacatcccagatgaggccgacttcctgctgggcatggccaccgtgaacaactgtgtgtcctacagaaatcctgctgagggcacctggtacatccagagcctgtgccagagcctgcgggagcgctgccccagaggagatgacatcctgaccatcctgacagaggtgaactatgaggtgagcaacaaggatgacaagaagaacatgggcaagcagatgccccagcccaccttcaccctgaggaagaagctggtgttccccagcgactag

SEQ ID NO: 18837 - DNA, 1617 bp, synthetic construct
  misc_feature 1..1617: note = Description of Artificial Sequence: Synthetic coding sequence
  source 1..1617: mol_type = other DNA
atggagggcggcagaagagcccgggtggtgattgagagcaagaggaacttcttcctgggcgccttccccacccccttccctgctgagcacgtggagctgggccgcctgggggacagcgagacagccatggtgcctggaaaaggaggagctgactacatcctgctgcccttcaagaagatggacttcagcaggaacctgtatgacattggagagcagctggacagcgaggacctggccagcctgaagttcctgagcctggactacatcccccagaggaagcaggagcccatcaaggatgccctgatgctgttccagaggctgcaggagaagaggatgctggaggagagcaacctgtccttcctgaaggagctgctcttccgcatcaaccggctggacctgctgatcacctacctgaacaccaggaaggaggagatggagcgggagctgcagaccccaggccgggcccagatcagcgcctacagagtgatgctgtaccagatcagcgaggaggtgagccgctctgagctgcggagcttcaagttcctgctgcaggaggagatcagcaagtgcaagctggatgatgacatgaacctgctggacatcttcatcgagatggagaagagggtcatcctgggggagggcaagctggacatcctgaagagggtgtgtgcccagatcaacaagagcctgctgaagatcatcaatgactatgaggagttcagcaaggagaggagcagcagcctggagggcagcccagatgagttcagcaatggagaggagctgtgtggggtgatgaccatcagtgacagcccccgggagcaggacagcgagagccagaccctggacaaggtgtaccagatgaagagcaagccccggggctactgcctgatcatcaacaaccacaactttgccaaggcccgggagaaggtgcccaagctgcacagcatccgggacagaaatggcacccacctggatgctggggccctgaccaccacctttgaggagctgcactttgagatcaagccccatgatgactgcaccgtggagcagatctatgagatcctgaagatctaccagctgatggaccacagcaacatggactgcttcatctgctgcatcctgagccacggggacaagggcatcatctatggaacagatggccaggaggcccccatctatgagctgaccagccagttcaccggcctgaagtgccccagcctggccggcaagcccaaggtgttcttcatccaggcctgccagggcgacaactaccagaagggcatccctgtggagacagacagcgaggagcagccctacctggagatggacctgagcagcccccagacccgctacatcccagatgaggccgacttcctgctgggcatggccaccgtgaacaactgtgtgtcctacagaaatcctgctgagggcacctggtacatccagagcctgtgccagagcctgcgggagcgctgccccagaggagatgacatcctgaccatcctgacagaggtgaactatgaggtgagcaacaaggatgacaagaagaacatgggcaagcagatgccccagcccaccttcaccctgaggaagaagctggtgttccccagcgactag

SEQ ID NO: 18838 - DNA, 708 bp, synthetic construct
  misc_feature 1..708: note = Description of Artificial Sequence: Synthetic coding sequence
  source 1..708: mol_type = other DNA
atggacttcagcaggaacctgtatgacatcggggagcagctggacagcgaggacctggccagcctgaagttcctgagcctggactacatcccccagaggaagcaggagcccatcaaggatgccctgatgctgttccagaggctgcaggagaagaggatgctggaggagagcaacctgtccttcctgaaggagctgctcttccgcatcaaccggctggacctgctgatcacctacctgaacaccaggaaggaggagatggagcgggagctgcagaccccaggccgggcccagatcagcgcctacagagtgatgctgtaccagatcagcgaggaggtgagccgctctgagctgcgctccttcaagttcctgctgcaggaggagatcagcaagtgcaagctggatgatgacatgaacctgctggacatcttcatcgagatggagaagagggtcatcctgggggagggcaagctggacatcctgaagagggtgtgtgcccagatcaacaagagcctgctgaagatcatcaatgactatgaggagttcagcaaggagaggagcagcagcctggagggcagcccagatgagttcagcaatgactttggccagagcctgcccaatgagaagcagaccagcggcatcctgagtgaccaccagcagagccagttctgcaagagcactggagagagcgcccagaccagccagcactag

SEQ ID NO: 18839 - DNA, 708 bp, synthetic construct; identical to SEQ ID NO: 18838
  misc_feature 1..708: note = Description of Artificial Sequence: Synthetic coding sequence
  source 1..708: mol_type = other DNA

SEQ ID NO: 18840 - DNA, 837 bp, synthetic construct
  misc_feature 1..837: note = Description of Artificial Sequence: Synthetic coding sequence
  source 1..837: mol_type = other DNA
atggacttcagcaggaacctgtatgacatcggggagcagctggacagcgaggacctggccagcctgaagttcctgagcctggactacatcccccagaggaagcaggagcccatcaaggatgccctgatgctgttccagaggctgcaggagaagaggatgctggaggagagcaacctgtccttcctgaaggagctgctcttccgcatcaaccggctggacctgctgatcacctacctgaacaccaggaaggaggagatggagcgggagctgcagaccccaggccgggcccagatcagcgcctacagagtgatgctgtaccagatcagcgaggaggtgagccgctctgagctgcgctccttcaagttcctgctgcaggaggagatcagcaagtgcaagctggatgatgacatgaacctgctggacatcttcatcgagatggagaagagggtcatcctgggggagggcaagctggacatcctgaagagggtgtgtgcccagatcaacaagagcctgctgaagatcatcaatgactatgaggagttcagcaaaggagaggagctgtgtggggtgatgaccatcagtgacagcccccgggagcaggacagcgagagccagaccctggacaaggtgtaccagatgaagagcaagccccggggctactgcctgatcatcaacaaccacaactttgccaaggcccgggagaaggtgcccaagctgcacagcatccgggacagaaatggcacccacctggatgctggcagccacagcgtggcccaggccggcgtgcagtggtgtgacctgagcagcctgcagcccccaccaccctggttcaagtag

SEQ ID NO: 18841 - DNA, 1395 bp, synthetic construct; identical to SEQ ID NO: 18836
  misc_feature 1..1395: note = Description of Artificial Sequence: Synthetic coding sequence
  source 1..1395: mol_type = other DNA

SEQ ID NO: 18842 - DNA, 663 bp, synthetic construct
  misc_feature 1..663: note = Description of Artificial Sequence: Synthetic coding sequence
  source 1..663: mol_type = other DNA
atggacttcagcaggaacctgtatgacatcggggagcagctggacagcgaggacctggccagcctgaagttcctgagcctggactacatcccccagaggaagcaggagcccatcaaggatgccctgatgctgttccagaggctgcaggagaagaggatgctggaggagagcaacctgtccttcctgaaggagctgctcttccgcatcaaccggctggacctgctgatcacctacctgaacaccaggaaggaggagatggagcgggagctgcagaccccaggccgggcccagatcagcgcctacagagtgatgctgtaccagatcagcgaggaggtgagccgctctgagctgcgctccttcaagttcctgctgcaggaggagatcagcaagtgcaagctggatgatgacatgaacctgctggacatcttcatcgagatggagaagagggtcatcctgggggagggcaagctggacatcctgaagagggtgtgtgcccagatcaacaagagcctgctgaagatcatcaatgactatgaggagttcagcaaggactttggccagagcctgcccaatgagaagcagaccagcggcatcctgagtgaccaccagcagagccagttctgcaagagcactggagagagcgcccagaccagccagcactag

SEQ ID NO: 18843 - DNA, 597 bp, synthetic construct
  misc_feature 1..597: note = Description of Artificial Sequence: Synthetic coding sequence
  source 1..597: mol_type = other DNA
atggacttcagcaggaacctgtatgacatcggggagcagctggacagcgaggacctggccagcctgaagttcctgagcctggactacatcccccagaggaagcaggagcccatcaaggatgccctgatgctgttccagaggctgcaggagaagaggatgctggaggagagcaacctgtccttcctgaaggagctgctcttccgcatcaaccggctggacctgctgatcacctacctgaacaccaggaaggaggagatggagcgggagctgcagaccccaggccgggcccagatcagcgcctacagagtgatgctgtaccagatcagcgaggaggtgagccgctctgagctgcgctccttcaagttcctgctgcaggaggagatcagcaagtgcaagctggatgatgacatgaacctgctggacatcttcatcgagatggagaagagggtcatcctgggggagggcaagctggacatcctgaagagggtgtgtgcccagatcaacaagagcctgctgaagatcatcaatgactatgaggagttcagcaaggagaggagcagcagcctggagggcagcccagatgagttcagcaactag

SEQ ID NO: 18844 - DNA, 351 bp, synthetic construct
  misc_feature 1..351: note = Description of Artificial Sequence: Synthetic coding sequence
  source 1..351: mol_type = other DNA
atggacttcagcaggaacctgtatgacatcggggagcagctggacagcgaggacctggccagcctgaagttcctgagcctggactacatcccccagaggaagcaggagcccatcaaggatgccctgatgctgttccagaggctgcaggagaagaggatgctggaggagagcaacctgtccttcctgaaggagctgctcttccgcatcaaccggctggacctgctgatcacctacctgaacaccaggaaggaggagatggagcgggagctgcagaccccaggccgggcccagatcagcgcctacagagtgatgctgtaccagatcagcgaggaggtgagccgctctgagtag

SEQ ID NO: 18845 - DNA, 1440 bp, synthetic construct
  misc_feature 1..1440: note = Description of Artificial Sequence: Synthetic coding sequence
  source 1..1440: mol_type = other DNA
atggacttcagcaggaacctgtatgacatcggggagcagctggacagcgaggacctggccagcctgaagttcctgagcctggactacatcccccagaggaagcaggagcccatcaaggatgccctgatgctgttccagaggctgcaggagaagaggatgctggaggagagcaacctgtccttcctgaaggagctgctcttccgcatcaaccggctggacctgctgatcacctacctgaacaccaggaaggaggagatggagcgggagctgcagaccccaggccgggcccagatcagcgcctacagagtgatgctgtaccagatcagcgaggaggtgagccgctctgagctgcgctccttcaagttcctgctgcaggaggagatcagcaagtgcaagctggatgatgacatgaacctgctggacatcttcatcgagatggagaagagggtcatcctgggggagggcaagctggacatcctgaagagggtgtgtgcccagatcaacaagagcctgctgaagatcatcaatgactatgaggagttcagcaaggagaggagcagcagcctggagggcagcccagatgagttcagcaatggagaggagctgtgtggggtgatgaccatcagtgacagcccccgggagcaggacagcgagagccagaccctggacaaggtgtaccagatgaagagcaagccccggggctactgcctgatcatcaacaaccacaactttgccaaggcccgggagaaggtgcccaagctgcacagcatccgggacagaaatggcacccacctggatgctggggccctgaccaccacctttgaggagctgcactttgagatcaagccccatgatgactgcaccgtggagcagatctatgagatcctgaagatctaccagctgatggaccacagcaacatggactgcttcatctgctgcatcctgagccatggagacaagggcatcatctacggcacagatggccaggaggcccccatctatgagctgaccagccagttcaccggcctgaagtgccccagcctggccggcaagcccaaggtgttcttcatccaggcctgccagggcgacaactaccagaagggcatccctgtggagacagattctgaggagcagccctacctggagatggacctgagcagcccccagacccgctacatcccagatgaagctgacttcctgctgggcatggccaccgtgaacaactgtgtgtcctacagaaatcctgctgagggcacctggtacatccagagcctgtgccagagcctgcgggagcgctgccccagaggagatgacatcctgaccatcctgacagaggtgaactatgaggtgagcaacaaggatgacaagaagaacatgggcaagcagatgccccagcccaccttcaccctgaggaagaagctggtgttccccagcgactag

SEQ ID NO: 18846 - DNA, 375 bp, synthetic construct
  misc_feature 1..375: note = Description of Artificial Sequence: Synthetic coding sequence
  source 1..375: mol_type = other DNA
atggacttcagcaggaacctgtatgacatcggggagcagctggacagcgaggacctggccagcctgaagttcctgagcctggactacatcccccagaggaagcaggagcccatcaaggatgccctgatgctgttccagaggctgcaggagaagaggatgctggaggagagcaacctgtccttcctgaaggagctgctcttccgcatcaaccggctggacctgctgatcacctacctgaacaccaggaaggaggagatggagcgggagctgcagaccccaggccgggcccagatcagcgcctacagagtgatgctgtaccagatcagcgaggaggtgagccgctctgagctgcgctccttcaagttcctgctgtag

SEQ ID NO: 18847 - DNA, 630 bp, synthetic construct
  misc_feature 1..630: note = Description of Artificial Sequence: Synthetic coding sequence
  source 1..630: mol_type = other DNA
atggacttcagcaggaacctgtatgacatcggggagcagctggacagcgaggacctggccagcctgaagttcctgagcctggactacatcccccagaggaagcaggagcccatcaaggatgccctgatgctgttccagaggctgcaggagaagaggatgctggaggagagcaacctgtccttcctgaaggagctgctcttccgcatcaaccggctggacctgctgatcacctacctgaacaccaggaaggaggagatggagcgggagctgcagaccccaggccgggcccagatcagcgcctacagagtgatgctgtaccagatcagcgaggaggtgagccgctctgagctgcgctccttcaagttcctgctgcaggaggagatcagcaagtgcaagctggatgatgacatgaacctgctggacatcttcatcgagatggagaagagggtcatcctgggggagggcaagctggacatcctgaagagggtgtgtgcccagatcaacaagagcctgctgaagatcatcaatgactatgaggagttcagcaaggactttggccagagcctgcccaatgagaagcagaccagcggcatcctgagtgaccaccagcagagccagttctgcaagtag

SEQ ID NO: 18848 - DNA, 1251 bp, synthetic construct
  misc_feature 1..1251: note = Description of Artificial Sequence: Synthetic coding sequence
  source 1..1251: mol_type = other DNA
atggatgaggccgaccggcggctgctgcggcgctgccgcctgcggctggtggaggagctgcaggtggaccagctgtgggatgccctgctgagccgggagctgttccggccccacatgattgaggacatccagagagctggcagcggcagcagaagagaccaggcccggcagctgatcatcgacctggagacccggggcagccaggccctgcccctcttcatcagctgcctggaggacaccggccaggacatgctggccagcttcctgcggaccaaccggcaggccgccaagctgagcaagcccaccctggagaacctgacccctgtggtgctgcggcctgagatcaggaagccagaggtgctgcggcctgagacccccaggcctgtggacatcggcagcggcggctttggagatgtgggcgccctggagagcctgcggggaaatgctgacctggcctacatcctgtccatggagccctgtggccactgcctgatcatcaacaacgtgaacttctgccgggagagcggcctgcggaccaggacaggcagcaacatcgactgtgagaagctgcggcggcgcttcagcagcctgcacttcatggtggaggtgaagggggacctgacagccaagaagatggtgctggccctgctggagctggcccagcaggaccacggggccctggactgctgcgtggtggtgatcctgagccacggctgccaggccagccacctgcagtttcctggagctgtgtatggaacagatggctgccctgtgtctgtggagaagatcgtgaacatcttcaacggcaccagctgccccagcctgggcggcaagcccaagctgttcttcatccaggcctgtggcggggagcagaaggaccacggctttgaggtggccagcaccagcccagaagatgagagccctggcagcaaccctgagccagatgccacccccttccaggagggcctgcggacctttgaccagctggatgccatcagcagcctgcccacccccagcgacatctttgtgtcctacagcaccttccctggctttgtgtcctggagggaccccaagagcggctcctggtacgtggagaccctggatgacatctttgagcagtgggcccacagcgaggacctgcagagcctgctgctgcgggtggccaatgctgtgtctgtgaagggcatctacaagcagatgcctggctgcttcaacttcctgaggaagaagctgttcttcaagaccagctag

SEQ ID NO: 18849 - DNA, 801 bp, synthetic construct
  misc_feature 1..801: note = Description of Artificial Sequence: Synthetic coding sequence
  source 1..801: mol_type = other DNA
atggatgaggccgaccggcggctgctgcggcgctgccgcctgcggctggtggaggagctgcaggtggaccagctgtgggatgccctgctgagccgggagctgttccggccccacatgattgaggacatccagagagctggcagcggcagcagaagagaccaggcccggcagctgatcatcgacctggagacccggggcagccaggccctgcccctcttcatcagctgcctggaggacaccggccaggacatgctggccagcttcctgcggaccaaccggcaggccgccaagctgagcaagcccaccctggagaacctgacccctgtggtgctgcggcctgagatcaggaagccagaggtgctgcggcctgagacccccaggcctgtggacatcggcagcggcggctttggagatgtggagcagaaggaccacggctttgaggtggccagcaccagcccagaagatgagagccctggcagcaaccctgagccagatgccacccccttccaggagggcctgcggacctttgaccagctggatgccatcagcagcctgcccacccccagcgacatctttgtgtcctacagcaccttccctggctttgtgtcctggagggaccccaagagcggctcctggtacgtggagaccctggatgacatctttgagcagtgggcccacagcgaggacctgcagagcctgctgctgcgggtggccaatgctgtgtctgtgaagggcatctacaagcagatgcctggctgcttcaacttcctgaggaagaagctgttcttcaagaccagctag

SEQ ID NO: 18850 - DNA, 603 bp, synthetic construct
  misc_feature 1..603: note = Description of Artificial Sequence: Synthetic coding sequence
  source 1..603: mol_type = other DNA
atggagccctgtggccactgcctgatcatcaacaacgtgaacttctgccgggagagcggcctgcggaccaggacaggcagcaacatcgactgtgagaagctgcggcggcgcttcagcagcctgcacttcatggtggaggtgaagggggacctgacagccaagaagatggtgctggccctgctggagctggcccagcaggaccacggggccctggactgctgcgtggtggtgatcctgagccacggctgccaggccagccacctgcagtttcctggagctgtgtatggaacagatggctgccctgtgtctgtggagaagatcgtgaacatcttcaacggcaccagctgccccagcctgggcggcaagcccaagctgttcttcatccaggcctgtggcggcggctttgtgtcctggagggaccccaagagcggctcctggtacgtggagaccctggatgacatctttgagcagtgggcccacagcgaggacctgcagagcctgctgctgcgggtggccaatgctgtgtctgtgaagggcatctacaagcagatgcctggctgcttcaacttcctgaggaagaagctgttcttcaagaccagctag

SEQ ID NO: 18851 - DNA, 1002 bp, synthetic construct
  misc_feature 1..1002: note = Description of Artificial Sequence: Synthetic coding sequence
  source 1..1002: mol_type = other DNA
atgctggccagcttcctgcggaccaaccggcaggccgccaagctgagcaagcccaccctggagaacctgacccctgtggtgctgcggcctgagatcaggaagccagaggtgctgcggcctgagacccccaggcctgtggacatcggcagcggcggctttggagatgtgggcgccctggagagcctgcggggaaatgctgacctggcctacatcctgtccatggagccctgtggccactgcctgatcatcaacaacgtgaacttctgccgggagagcggcctgcggaccaggacaggcagcaacatcgactgtgagaagctgcggcggcgcttcagcagcctgcacttcatggtggaggtgaagggggacctgacagccaagaagatggtgctggccctgctggagctggcccagcaggaccatggagccctggactgctgcgtggtggtgatcctgagccacggctgccaggccagccacctgcagtttcctggagctgtgtatggaacagatggctgccctgtgtctgtggagaagatcgtgaacatcttcaacggcaccagctgccccagcctgggcggcaagcccaagctgttcttcatccaggcctgtggcggggagcagaaggaccacggctttgaggtggccagcaccagcccagaagatgagagccctggcagcaaccctgagccagatgccacccccttccaggagggcctgcggacctttgaccagctggatgccatcagcagcctgcccacccccagcgacatctttgtgtcctacagcaccttccctggctttgtgtcctggagggaccccaagagcggctcctggtacgtggagaccctggatgacatctttgagcagtgggcccacagcgaggacctgcagagcctgctgctgcgggtggccaatgctgtgtctgtgaagggcatctacaagcagatgcctggctgcttcaacttcctgaggaagaagctgttcttcaagaccagctag

SEQ ID NO: 18852 - DNA, 765 bp, synthetic construct
  misc_feature 1..765: note = Description of Artificial Sequence: Synthetic coding sequence
  source 1..765: mol_type = other DNA
atggatgaggccgaccggcggctgctgcggcgctgccgcctgcggctggtggaggagctgcaggtggaccagctgtgggatgccctgctgagccgggagctgttccggccccacatgattgaggacatccagagagctggcagcggcagcagaagagaccaggcccggcagctgatcatcgacctggagacccggggcagccaggccctgcccctcttcatcagctgcctggaggacaccggccaggacatgctggccagcttcctgcggaccaaccggcaggccgccaagctgagcaagcccaccctggagaacctgacccctgtggtgctgcggcctgagatcaggaagccagaggtgctgcggcctgagacccccaggcctgtggacatcggcagcggcggctttggagatgtgggcgccctggagagcctgcggggaaatgctgacctggcctacatcctgtccatggagccctgtggccactgcctgatcatcaacaacgtgaacttctgccgggagagcggcctgcggaccaggacaggcagcaacatcgactgtgagaagctgcggcggcgcttcagcagcctgcacttcatggtggaggtgaagggggacctgacagccaaggccagccacctgcagtttcctggagctgtgtatggaacagatggctgccctgtgtctgtggagaagatcgtgaacatcttcaacggcaccagctgccccagcctgggcggcaagcccaagctgttcttcatctag

SEQ ID NO: 18853 - DNA, 801 bp, synthetic construct
  misc_feature 1..801: note = Description of Artificial Sequence: Synthetic coding sequence
  source 1..801: mol_type = other DNA
atgctggccagcttcctgcggaccaaccggcaggccgccaagctgagcaagcccaccctggagaacctgacccctgtggtgctgcggcctgagatcaggaagccagaggtgctgcggcctgagacccccaggcctgtggacatcggcagcggcggctttggagatgtgggcgccctggagagcctgcggggaaatgctgacctggcctacatcctgtccatggagccctgtggccactgcctgatcatcaacaacgtgaacttctgccgggagagcggcctgcggaccaggacaggcagcaacatcgactgtgagaagctgcggcggcgcttcagcagcctgcacttcatggtggaggtgaagggggacctgacagccaagaagatggtgctggccctgctggagctggcccagcaggaccatggagccctggactgctgcgtggtggtgatcctgagccacggctgccaggccagccacctgcagtttcctggagctgtgtatggaacagatggctgccctgtgtctgtggagaagatcgtgaacatcttcaacggcaccagctgccccagcctgggcggcaagcccaagctgttcttcatccaggcctgtggcggggagcagaaggaccacggctttgaggtggccagcaccagcccagaagatgagagccctggcagcaaccctgagccagatgccacccccttccaggagggcctgcggacctttgaccagctggatgccatcagcagcctgcccacccccagcgacatctttgtgtcctacagcaccttcccctag

SEQ ID NO: 18854 - DNA, 1266 bp, synthetic construct
  misc_feature 1..1266: note = Description of Artificial Sequence: Synthetic coding sequence
  source 1..1266: mol_type = other DNA
atggatgaggccgaccggcggctgctgcggcgctgccgcctgcggctggtggaggagctgcaggtggaccagctgtgggatgccctgctgagccgggagctgttccggccccacatgattgaggacatccagagagctggcagcggcagcagaagagaccaggcccggcagctgatcatcgacctggagacccggggcagccaggccctgcccctcttcatcagctgcctggaggacaccggccaggacatgctggccagcttcctgcggaccaaccggcaggccgccaagctgagcaagcccaccctggagaacctgacccctgtggtgctgcggcctgagatcaggaagccagaggtgctgcggcctgagacccccaggcctgtggacatcggcagcggcggctttggagatgtgggcgccctggagagcctgcggggaaatgctgacctggcctacatcctgtccatggagccctgtggccactgcctgatcatcaacaacgtgaacttctgccgggagagcggcctgcggaccaggacaggcagcaacatcgactgtgagaagctgcggcggcgcttcagcagcctgcacttcatggtggaggtgaagggggacctgacagccaagaagatggtgctggccctgctggagctggcccagcaggaccacggggccctggactgctgcgtggtggtgatcctgagccacggctgccaggccagccacctgcagtttcctggagctgtgtatggaacagatggctgccctgtgtctgtggagaagatcgtgaacatcttcaacggcaccagctgccccagcctgggcggcaagcccaagctgttcttcatccaggcctgtggcggggagcagaaggaccacggctttgaggtggccagcaccagcccagaagatgagagccctggcagcaaccctgagccagatgccacccccttccaggagggcctgcggacctttgaccagctggatgccatcagcagcctgcccacccccagcgacatctttgtgtcctacagcaccttccctggctttgtgtcctggagggaccccaagagcggctcctggtacgtggagaccctggatgacatctttgagcagtgggcccacagcgaggacctgcagagcctgctgctgcgggtgtctgctgccttcctgtgcaagggggagggccgcctgctgcggggctctgtgtcctcctggggctggggctttggagtgtcccgggccggccccaaccagggctag

SEQ ID NO: 18855 - DNA, 2721 bp, synthetic construct
  misc_feature 1..2721: note = Description of Artificial Sequence: Synthetic coding sequence
  source 1..2721: mol_type = other DNA
atgacagctgtgcacgccggcaacatcaacttcaagtgggaccccaagagcctggagatccgcaccctggccgtggagcggctgctggagcccctggtgacccaggtgaccaccctggtgaacaccaacagcaagggccccagcaacaagaagaggggccgcagcaagaaggcccacgtgctggccgcctctgtggagcaggccacagagaacttcctggagaagggggacaagatcgccaaggagagccagttcctgaaggaggagctggtggccgctgtggaggatgtgaggaagcagggcgacctgatgaaggctgctgctggggagtttgctgatgacccctgcagctctgtgaagaggggcaacatggtgcgggccgcccgggccctgctgtctgctgtgacccggctgctgatcctggccgacatggctgatgtgtacaagctgctggtgcagctgaaggtggtggaggatggcatcctgaagctgagaaatgctggaaatgagcaggacctgggcatccagtacaaggccctgaagccagaggtggacaagctgaacatcatggccgccaagaggcagcaggagctgaaggatgtgggccaccgggaccagatggctgctgcccggggcatcctgcagaagaatgtgcccatcctgtacacagccagccaggcctgcctgcagcacccagatgtggccgcctacaaggccaacagagacctgatctacaagcagctgcagcaggccgtgacaggcatcagcaatgctgcccaggccacagccagtgatgatgccagccagcaccagggcggcggcggcggggagctggcctatgccctgaacaactttgacaagcagatcatcgtggaccccctgtccttcagcgaggagcgcttccggcccagcctggaggagcggctggagagcatcatcagcggggccgccctgatggctgacagcagctgcaccagagatgacagaagagaaagaattgtggccgagtgcaatgctgtgcggcaggccctgcaggacctgctgtctgagtacatgggaaatgccggcaggaaggagaggagtgatgccctgaacagcgccatcgacaagatgaccaagaagacccgggacctgcggcggcagctgaggaaggctgtgatggaccacgtgtctgacagcttcctggagaccaacgtgcccctgctggtgctgattgaagctgccaagaatggaaatgagaaggaggtgaaggagtatgcccaggtgttccgggagcacgccaacaagctgattgaggtggccaacctggcctgcagcatcagcaacaatgaggagggcgtgaagctggtgaggatgtctgccagccagctggaggccctgtgcccccaggtgatcaatgctgccctggccctggccgccaagccccagagcaagctggcccaggagaacatggacctcttcaaggagcagtgggagaagcaggtgcgggtgctgacagatgctgtggatgacatcaccagcattgatgacttcctggccgtgtctgagaaccacatcctggaggatgtgaacaagtgtgtgattgccctgcaggagaaggatgtggatggcctggacagaacagctggggccatccggggccgggccgcccgggtcatccacgtggtgaccagcgagatggacaactatgagcccggggtgtacacagagaaggtgctggaggccaccaagctgctgagcaacacagtgatgccccgcttcacagagcaggtggaggccgctgtggaggccctgagcagtgaccctgcccagcccatggatgaaaatgagttcattgatgccagccggctggtgtatgatggcatccgggacatcaggaaggctgtgctgatgatccgcaccccagaggagctggatgacagcgactttgaaacagaggactttgatgtgcgcagcaggacctctgtgcagacagaagatgaccagctgattgctggccagagcgcccgggccatcatggcccagctgccccaggagcagaaggccaagattgctgagcaggtggccagcttccaggaggagaagagcaagctggatgctgaggtgtccaagtgggatgacagcggaaatgacatcatcgtgctggccaagcagatgtgcatgatcatgatggagatgacagacttcacccggggcaagggccccctgaagaacaccagtgatgtgatctctgctgccaagaagattgctgaggccggcagcaggatggacaagctgggccgcaccatcgctgaccactgcccagacagcgcctgcaagcaggacctgctggcctacctgcagagaattgccctgtactgccaccagctgaacatctgcagcaaggtgaaggccgaggtgcagaacctgggcggggagctggtggtgtctggagtggacagcgccatgagcctcatccaggccgccaagaacctgatgaatgctgtggtgcagacagtgaaggccagctatgtggccagcaccaagtaccagaagagccagggcatggccagcctgaacctgcctgctgtgtcctggaagatgaaggcccctgagaagaagcccctggtgaagcgggagaagcaggatgagacccagaccaagatcaagagggccagccagaagaagcacgtgaaccctgtgcaggccctgtctgagttcaaggccatggacagcatctag

SEQ ID NO: 18856 - DNA, 2412 bp, synthetic construct
  misc_feature 1..2412: note = Description of Artificial Sequence: Synthetic coding sequence
  source 1..2412: mol_type = other DNA
atgaaggctgctgctggggagtttgctgatgacccctgcagctctgtgaagaggggcaacatggtgcgggccgcccgggccctgctgtctgctgtgacccggctgctgatcctggccgacatggctgatgtgtacaagctgctggtgcagctgaaggtggtggaggatggcatcctgaagctgagaaatgctggaaatgagcaggacctgggcatccagtacaaggccctgaagccagaggtggacaagctgaacatcatggccgccaagaggcagcaggagctgaaggatgtgggccaccgggaccagatggccgccgcccggggcatcctgcagaagaatgtgcccatcctgtacacagccagccaggcctgcctgcagcacccagatgtggccgcctacaaggccaacagagacctgatctacaagcagctgcagcaggccgtgacaggcatcagcaatgctgcccaggccacagccagtgatgatgccagccagcaccagggcggcggcggcggggagctggcctatgccctgaacaactttgacaagcagatcatcgtggaccccctgtccttcagcgaggagcgcttccggcccagcctggaggagcggctggagagcatcatctctggagctgccctgatggctgacagcagctgcaccagagatgaccggcgggagcgcatcgtggctgaatgtaatgctgtgcggcaggccctgcaggacctgctgtctgagtacatgggaaatgccggcaggaaggagaggagtgatgccctgaacagcgccatcgacaagatgaccaagaagacccgggacctgcggcggcagctgaggaaggctgtgatggaccacgtgtctgacagcttcctggagaccaacgtgcccctgctggtgctgattgaggccgccaagaatggaaatgagaaggaggtgaaggagtatgcccaggtgttccgggagcacgccaacaagctgattgaggtggccaacctggcctgcagcatcagcaacaatgaggagggcgtgaagctggtgaggatgtctgccagccagctggaggccctgtgcccccaggtgatcaatgctgccctggccctggccgccaagccccagagcaagctggcccaggagaacatggacctcttcaaggagcagtgggagaagcaggtgcgggtgctgacagatgctgtggatgacatcaccagcattgatgacttcctggccgtgtctgagaaccacatcctggaggatgtgaacaagtgtgtgattgccctgcaggagaaggatgtggatggcctggacagaacagctggggccatccggggccgggccgcccgggtcatccacgtggtgaccagcgagatggacaactatgagcccggggtgtacacagagaaggtgctggaggccaccaagctgctgagcaacacagtgatgccccgcttcacagagcaggtggaggccgctgtggaggccctgagcagtgaccctgcccagcccatggatgaaaatgagttcattgatgccagccggctggtgtatgatggcatccgggacatcaggaaggctgtgctgatgatccgcaccccagaggagctggatgacagcgactttgaaacagaagattttgatgtgcgcagcaggacctctgtgcagacagaagatgaccagctgattgctggccagagcgcccgggccatcatggcccagctgccccaggagcagaaggccaagattgctgagcaggtggccagcttccaggaggagaagagcaagctggatgctgaggtgtccaagtgggatgattctggaaatgacatcatcgtgctggccaagcagatgtgcatgatcatgatggagatgacagacttcacccggggcaagggccccctgaagaacaccagtgatgtgatctctgctgccaagaagattgctgaggccggcagcaggatggacaagctgggccgcaccatcgctgaccactgcccagattctgcctgcaagcaggacctgctggcctacctgcagagaattgccctgtactgccaccagctgaacatctgcagcaaggtgaaggccgaggtgcagaacctgggcggggagctggtggtgtctggagtggacagcgccatgagcctcatccaggccgccaagaacctgatgaatgctgtggtgcagacagtgaaggccagctatgtggccagcaccaagtaccagaagagccagggcatggccagcctgaacctgcctgctgtgtcctggaagatgaaggcccctgagaagaagcccctggtgaagcgggagaagcaggatgagacccagaccaagatcaagagggccagccagaagaagcacgtgaaccctgtgcaggccctgtctgagttcaaggccatggacagcatctag

SEQ ID NO: 18857 - DNA, 357 bp, synthetic construct
  misc_feature 1..357: note = Description of Artificial Sequence: Synthetic coding sequence
  source 1..357: mol_type = other DNA
atgacagctgtgcacgccggcaacatcaacttcaagtgggaccccaagagcctggagatccgcaccctggccgtggagcggctgctggagcccctggtgacccaggtgaccaccctggtgaacaccaacagcaagggccccagcaacaagaagaggggccgcagcaagaaggcccacgtgctggccgcctctgtggagcaggccacagagaacttcctggagaagggggacaagatcgccaaggagagccagttcctgaaggaggagctggtggccgctgtggaggatgtgaggaagcagggcgacctgatgaaggctgctgctggggagtttgctgatgacccctgcagcagctag

SEQ ID NO: 18858 - DNA, 420 bp, synthetic construct
  misc_feature 1..420: note = Description of Artificial Sequence: Synthetic coding sequence
  source 1..420: mol_type = other DNA
atgacagctgtgcacgccggcaacatcaacttcaagtgggaccccaagagcctggagatccgcaccctggccgtggagcggctgctggagcccctggtgacccaggtgaccaccctggtgaacaccaacagcaagggccccagcaacaagaagaggggccgcagcaagaaggcccacgtgctggccgcctctgtggagcaggccacagagaacttcctggagaagggggacaagatcgccaaggagagccagttcctgaaggaggagctggtggccgctgtggaggatgtgaggaagcagggcgacctgatgaaggctgctgctggggagtttgctgatgacccctgcagctctgtgaagaggggcaacatggtgcgggccgcccgggccctgctgtctgctgtgacccggctgctgtag

SEQ ID NO: 18859 - DNA, 648 bp, synthetic construct
  misc_feature 1..648: note = Description of Artificial Sequence: Synthetic coding sequence
  source 1..648: mol_type = other DNA
atgacagctgtgcacgccggcaacatcaacttcaagtgggaccccaagagcctggagatccgcaccctggccgtggagcggctgctggagcccctggtgacccaggtgaccaccctggtgaacaccaacagcaagggccccagcaacaagaagaggggccgcagcaagaaggcccacgtgctggccgcctctgtggagcaggccacagagaacttcctggagaagggggacaagatcgccaaggagagccagttcctgaaggaggagctggtggccgctgtggaggatgtgaggaagcagggcgacctgatgaaggctgctgctggggagtttgctgatgacccctgcagctctgtgaagaggggcaacatggtgcgggccgcccgggccctgctgtctgctgtgacccggctgctgatcctggccgacatggctgatgtgtacaagctgctggtgcagctgaaggtggtggaggatggcatcctgaagctgagaaatgctggaaatgagcaggacctgggcatccagtacaaggccctgaagccagaggtggacaagctgaacatcatggccgccaagaggcagcaggagctgaaggatgtgggccaccgggaccagatggctgctgcccggggcatcctgcagtag

SEQ ID NO: 18860 - DNA, 306 bp, synthetic construct
  misc_feature 1..306: note = Description of Artificial Sequence: Synthetic coding sequence
  source 1..306: mol_type = other DNA
atgacagctgtgcacgccggcaacatcaacttcaagtgggaccccaagagcctggagatccgcaccctggccgtggagcggctgctggagcccctggtgacccaggtgaccaccctggtgaacaccaacagcaagggccccagcaacaagaagaggggccgcagcaagaaggcccacgtgctggccgcctctgtggagcaggccacagagaacttcctggagaagggggacaagatcgccaaggagagccagttcctgaaggaggagctggtggccgctgtggaggatgtgaggaagcagggctag

SEQ ID NO: 18861 - DNA, 372 bp, synthetic construct
  misc_feature 1..372: note = Description of Artificial Sequence: Synthetic coding sequence
  source 1..372: mol_type = other DNA
atgacagctgtgcacgccggcaacatcaacttcaagtgggaccccaagagcctggagatccgcaccctggccgtggagcggctgctggagcccctggtgacccaggtgaccaccctggtgaacaccaacagcaagggccccagcaacaagaagaggggccgcagcaagaaggcccacgtgctggccgcctctgtggagcaggccacagagaacttcctggagaagggggacaagatcgccaaggagagccagttcctgaaggaggagctggtggccgctgtggaggatgtgaggaagcagggcgacctgatgaaggctgctgctggggagtttgctgatgacccctgcagctctgtgaagaggggcaactag

SEQ ID NO: 18862 - DNA, 471 bp, synthetic construct
  misc_feature 1..471: note = Description of Artificial Sequence: Synthetic coding sequence
  source 1..471: mol_type = other DNA
atgacagctgtgcacgccggcaacatcaacttcaagtgggaccccaagagcctggagatccgcaccctggccgtggagcggctgctggagcccctggtgacccaggtgaccaccctggtgaacaccaacagcaagggccccagcaacaagaagaggggccgcagcaagaaggcccacgtgctggccgcctctgtggagcaggccacagagaacttcctggagaagggggacaagatcgccaaggagagccagttcctgaaggaggagctggtggccgctgtggaggatgtgaggaagcagggcgacctgatgaaggctgctgctggggagtttgctgatgacccctgcagctctgtgaagaggggcaacatggtgcgggccgcccgggccctgctgtctgctgtgacccggctgctgatcctggccgacatggctgatgtgtacaagctgctggtgcagctgaaggtgtag

SEQ ID NO: 18863 - DNA, 285 bp, synthetic construct
  misc_feature 1..285: note = Description of Artificial Sequence: Synthetic coding sequence
  source 1..285: mol_type = other DNA
atgacagctgtgcacgccggcaacatcaacttcaagtgggaccccaagagcctggagatccgcaccctggccgtggagcggctgctggagcccctggtgacccaggtgaccaccctggtgaacaccaacagcaagggccccagcaacaagaagaggggccgcagcaagaaggcccacgtgctggccgcctctgtggagcaggccacagagaacttcctggagaagggggacaagatcgccaaggagagccagttcctgaaggaggagctggtggccgctgtgtag

SEQ ID NO: 18864 - DNA, 2790 bp, synthetic construct
  misc_feature 1..2790: note = Description of Artificial Sequence: Synthetic coding sequence
  source 1..2790: mol_type = other DNA
atgacagctgtgcacgccggcaacatcaacttcaagtgggaccccaagagcctggagatccgcaccctggccgtggagcggctgctggagcccctggtgacccaggtgaccaccctggtgaacaccaacagcaagggccccagcaacaagaagaggggccgcagcaagaaggcccacgtgctggccgcctctgtggagcaggccacagagaacttcctggagaagggggacaagatcgccaaggagagccagttcctgaaggaggagctggtggccgctgtggaggatgtgaggaagcagggcgacctgatgaaggctgctgctggggagtttgctgatgacccctgcagctctgtgaagaggggcaacatggtgcgggccgcccgggccctgctgtctgctgtgacccggctgctgatcctggccgacatggctgatgtgtacaagctgctggtgcagctgaaggtggtggaggatggcatcctgaagctgagaaatgctggaaatgagcaggacctgggcatccagtacaaggccctgaagccagaggtggacaagctgaacatcatggccgccaagaggcagcaggagctgaaggatgtgggccaccgggaccagatggctgctgcccggggcatcctgcagaagaatgtgcccatcctgtacacagccagccaggcctgcctgcagcacccagatgtggccgcctacaaggccaacagagacctgatctacaagcagctgcagcaggccgtgacaggcatcagcaatgctgcccaggccacagccagtgatgatgccagccagcaccagggcggcggcggcggggagctggcctatgccctgaacaactttgacaagcagatcatcgtggaccccctgtccttcagcgaggagcgcttccggcccagcctggaggagcggctggagagcatcatcagcggggccgccctgatggctgacagcagctgcaccagagatgacagaagagaaagaattgtggccgagtgcaatgctgtgcggcaggccctgcaggacctgctgtctgagtacatgggaaatgccggcaggaaggagaggagtgatgccctgaacagcgccatcgacaagatgaccaagaagacccgggacctgcggcggcagctgaggaaggctgtgatggaccacgtgtctgacagcttcctggagaccaacgtgcccctgctggtgctgattgaagctgccaagaatggaaatgagaaggaggtgaaggagtatgcccaggtgttccgggagcacgccaacaagctgattgaggtggccaacctggcctgcagcatcagcaacaatgaggagggcgtgaagctggtgaggatgtctgccagccagctggaggccctgtgcccccaggtgatcaatgctgccctggccctggccgccaagccccagagcaagctggcccaggagaacatggacctcttcaaggagcagtgggagaagcaggtgcgggtgctgacagatgctgtggatgacatcaccagcattgatgacttcctggccgtgtctgagaaccacatcctggaggatgtgaacaagtgtgtgattgccctgcaggagaaggatgtggatggcctggacagaacagctggggccatccggggccgggccgcccgggtcatccacgtggtgaccagcgagatggacaactatgagcccggggtgtacacagagaaggtgctggaggccaccaagctgctgagcaacacagtgatgccccgcttcacagagcaggtggaggccgctgtggaggccctgagcagtgaccctgcccagcccatggatgaaaatgagttcattgatgccagccggctggtgtatgatggcatccgggacatcaggaaggctgtgctgatgatccgcaccccagaggagctggatgacagcgactttgaaacagaggactttgatgtgcgcagcaggacctctgtgcagacagaagatgaccagctgattgctggccagagcgcccgggccatcatggcccagctgccccaggagcagaaggccaagattgctgagcaggtggccagcttccaggaggagaagagcaagctggatgctgaggtgtccaagtgggatgacagcggaaatgacatcatcgtgctggccaagcagatgtgcatgatcatgatggagatgacagacttcacccggggcaagggccccctgaagaacaccagtgatgtgatctctgctgccaagaagattgctgaggccggcagcaggatggacaagctgggccgcaccatcgctgaccactgcccagacagcgcctgcaagcaggacctgctggcctacctgcagagaattgccctgtactgccaccagctgaacatctgcagcaaggtgaaggccgaggtgcagaacctgggcggggagctggtggtgtctggcaactgtgacacctgtggggccctgcagggcctgaagggctggcccccacccctgtgtgccacccactgggtggacagcgccatgagcctcatccaggccgccaagaacctgatgaatgctgtggtgcagacagtgaaggccagctatgtggccagcaccaagtaccagaagagccagggcatggccagcctgaacctgcctgctgtgtcctggaagatgaaggcccctgagaagaagcccctggtgaagcgggagaagcaggatgagacccagaccaagatcaagagggccagccagaagaagcacgtgaaccctgtgcaggccctgtctgagttcaaggccatggacagcatctag

SEQ ID NO: 18865 - DNA, 1611 bp, synthetic construct
  misc_feature 1..1611: note = Description of Artificial Sequence: Synthetic coding sequence
  source 1..1611: mol_type = other DNA
atgaccaagaagacccgggacctgcggcggcagctgaggaaggctgtgatggaccacgtgtctgacagcttcctggagaccaacgtgcccctgctggtgctgattgaagctgccaagaatggaaatgagaaggaggtgaaggagtatgcccaggtgttccgggagcacgccaacaagctgattgaggtggccaacctggcctgcagcatcagcaacaatgaggagggcgtgaagctggtgaggatgtctgccagccagctggaggccctgtgcccccaggtgatcaatgctgccctggccctggccgccaagccccagagcaagctggcccaggagaacatggacctcttcaaggagcagtgggagaagcaggtgcgggtgctgacagatgctgtggatgacatcaccagcattgatgacttcctggccgtgtctgagaaccacatcctggaggatgtgaacaagtgtgtgattgccctgcaggagaaggatgtggatggcctggacagaacagctggggccatccggggccgggccgcccgggtcatccacgtggtgaccagcgagatggacaactatgagcccggggtgtacacagagaaggtgctggaggccaccaagctgctgagcaacacagtgatgccccgcttcacagagcaggtggaggccgctgtggaggccctgagcagtgaccctgcccagcccatggatgaaaatgagttcattgatgccagccggctggtgtatgatggcatccgggacatcaggaaggctgtgctgatgatccgcaccccagaggagctggatgacagcgactttgaaacagaggactttgatgtgcgcagcaggacctctgtgcagacagaagatgaccagctgattgctggccagagcgcccgggccatcatggcccagctgccccaggagcagaaggccaagattgctgagcaggtggccagcttccaggaggagaagagcaagctggatgctgaggtgtccaagtgggatgacagcggaaatgacatcatcgtgctggccaagcagatgtgcatgatcatgatggagatgacagacttcacccggggcaagggccccctgaagaacaccagtgatgtgatctctgctgccaagaagattgctgaggccggcagcaggatggacaagctgggccgcaccatcgctgaccactgcccagacagcgcctgcaagcaggacctgctggcctacctgcagagaattgccctgtactgccaccagctgaacatctgcagcaaggtgaaggccgaggtgcagaacctgggcggggagctggtggtgtctggagtggacagcgccatgagcctcatccaggccgccaagaacctgatgaatgctgtggtgcagacagtgaaggccagctatgtggccagcaccaagtaccagaagagccagggcatggccagcctgaacctgcctgctgtgtcctggaagatgaaggcccctgagaagaagcccctggtgaagcgggagaagcaggatgagacccagaccaagatcaagagggccagccagaagaagcacgtgaaccctgtgcaggccctgtctgagttcaaggccatggacagcatctag

SEQ ID NO: 18866 - DNA, 2676 bp, synthetic construct
  misc_feature 1..2676: note = Description of Artificial Sequence: Synthetic coding sequence
  source 1..2676: mol_type = other DNA
atgacagctgtgcacgccggcaacatcaacttcaagtgggaccccaagagcctggagatccgcaccctggccgtggagcggctgctggagcccctggtgacccaggtgaccaccctggtgaacaccaacagcaagggccccagcaacaagaagaggggccgcagcaagaaggcccacgtgctggccgcctctgtggagcaggccacagagaacttcctggagaagggggacaagatcgccaaggagagccagttcctgaaggaggagctggtggccgctgtggaggatgtgaggaagcagggcgacctgatgaaggctgctgctggggagtttgctgatgacccctgcagctctgtgaagaggggcaacatggtgcgggccgcccgggccctgctgtctgctgtgacccggctgctgaaggtggtggaggatggcatcctgaagctgagaaatgctggaaatgagcaggacctgggcatccagtacaaggccctgaagccagaggtggacaagctgaacatcatggccgccaagaggcagcaggagctgaaggatgtgggccaccgggaccagatggccgccgcccggggcatcctgcagaagaatgtgcccatcctgtacacagccagccaggcctgcctgcagcacccagatgtggccgcctacaaggccaacagagacctgatctacaagcagctgcagcaggccgtgacaggcatcagcaatgctgcccaggccacagccagtgatgatgccagccagcaccagggcggcggcggcggggagctggcctatgccctgaacaactttgacaagcagatcatcgtggaccccctgtccttcagcgaggagcgcttccggcccagcctggaggagcggctggagagcatcatctctggagctgccctgatggctgacagcagctgcaccagagatgaccggcgggagcgcatcgtggctgaatgtaatgctgtgcggcaggccctgcaggacctgctgtctgagtacatgggaaatgccggcaggaaggagaggagtgatgccctgaacagcgccatcgacaagatgaccaagaagacccgggacctgcggcggcagctgaggaaggctgtgatggaccacgtgtctgacagcttcctggagaccaacgtgcccctgctggtgctgattgaggccgccaagaatggaaatgagaaggaggtgaaggagtatgcccaggtgttccgggagcacgccaacaagctgattgaggtggccaacctggcctgcagcatcagcaacaatgaggagggcgtgaagctggtgaggatgtctgccagccagctggaggccctgtgcccccaggtgatcaatgctgccctggccctggccgccaagccccagagcaagctggcccaggagaacatggacctcttcaaggagcagtgggagaagcaggtgcgggtgctgacagatgctgtggatgacatcaccagcattgatgacttcctggccgtgtctgagaaccacatcctggaggatgtgaacaagtgtgtgattgccctgcaggagaaggatgtggatggcctggacagaacagctggggccatccggggccgggccgcccgggtcatccacgtggtgaccagcgagatggacaactatgagcccggggtgtacacagagaaggtgctggaggccaccaagctgctgagcaacacagtgatgccccgcttcacagagcaggtggaggccgctgtggaggccctgagcagtgaccctgcccagcccatggatgaaaatgagttcattgatgccagccggctggtgtatgatggcatccgggacatcaggaaggctgtgctgatgatccgcaccccagaggagctggatgacagcgactttgaaacagaagattttgatgtgcgcagcaggacctctgtgcagacagaagatgaccagctgattgctggccagagcgcccgggccatcatggcccagctgccccaggagcagaaggccaagattgctgagcaggtggccagcttccaggaggagaagagcaagctggatgctgaggtgtccaagtgggatgattctggaaatgacatcatcgtgctggccaagcagatgtgcatgatcatgatggagatgacagacttcacccggggcaagggccccctgaagaacaccagtgatgtgatctctgctgccaagaagattgctgaggccggcagcaggatggacaagctgggccgcaccatcgctgaccactgcccagattctgcctgcaagcaggacctgctggcctacctgcagagaattgccctgtactgccaccagctgaacatctgcagcaaggtgaaggccgaggtgcagaacctgggcggggagctggtggtgtctggagtggacagcgccatgagcctcatccaggccgccaagaacctgatgaatgctgtggtgcagacagtgaaggccagctatgtggccagcaccaagtaccagaagagccagggcatggccagcctgaacctgcctgctgtgtcctggaagatgaaggcccctgagaagaagcccctggtgaagcgggagaagcaggatgagacccagaccaagatcaagagggccagccagaagaagcacgtgaaccctgtgcaggccctgtctgagttcaaggccatggacagcatctag

SEQ ID NO: 18867 - DNA, 2346 bp, synthetic construct
  misc_feature 1..2346: note = Description of Artificial Sequence: Synthetic coding sequence
  source 1..2346: mol_type = other DNA
atggccacccaggccgacctgatggagctggacatggccatggagccagacaggaaggctgctgtgagccactggcagcagcagagctacctggacagcggcatccacagcggggccaccaccacagcccccagcctgtctggaaaaggaaatcctgaggaggaggatgtggacaccagccaggtgctgtatgagtgggagcagggcttcagccagagcttcacccaggagcaggtggccgacattgatggccagtatgccatgacccgggcccagagggtgcgggccgccatgtttcctgagaccctggatgagggcatgcagatccccagcacccagtttgatgctgcccaccccaccaacgtgcagaggctggccgagcccagccagatgctgaagcatgctgtggtgaacctgatcaactaccaggatgatgctgagctggccacccgggccatccctgagctgaccaagctgctgaatgatgaggaccaggtggtggtgaacaaggctgctgtgatggtgcaccagctgagcaagaaggaggccagcagacatgccatcatgaggagcccccagatggtgtctgccatcgtgaggaccatgcagaacaccaatgatgtggagacagcccgctgcacagctggcaccctgcacaacctgagccaccaccgggagggcctgctggccatcttcaagagcggcggcatcccagccctggtgaagatgctgggcagccctgtggacagcgtgctcttctacgccatcaccaccctgcacaacctgctgctgcaccaggagggcgccaagatggctgtgcggctggccggcggcctgcagaagatggtggccctgctgaacaagaccaacgtgaagttcctggccatcaccacagactgcctgcagatcctggcctacggcaaccaggagagcaagctgatcatcctggccagcggcggcccccaggccctggtgaacatcatgaggacctacacctatgagaagctgctgtggaccaccagccgggtgctgaaggtgctgtctgtgtgcagcagcaacaagccagccatcgtggaggccggcggcatgcaggccctgggcctgcacctgacagaccccagccagaggctggtgcagaactgcctgtggaccctgaggaacctgagtgatgctgccaccaagcaggagggcatggagggcctgctgggcaccctggtgcagctgctgggcagtgatgacatcaacgtggtgacctgtgccgccggcatcctgagcaacctgacctgcaacaactacaagaacaagatgatggtgtgccaggtgggcggcatcgaggccctggtgaggacagtgctgcgggccggggaccgggaggacatcacagagcccgccatctgtgccctgcggcacctgaccagccgccaccaggaggccgagatggcccagaatgctgtgcggctgcactacggcctgcctgtggtggtgaagctgctgcacccccccagccactggcccctcatcaaggccaccgtgggcctcatccggaacctggccctgtgcccagccaaccacgcccccctgcgggagcagggcgccatcccccggctggtgcagctgctggtgcgggcccaccaggacacccagaggaggacctccatgggcggcacccagcagcagtttgtggagggcgtgaggatggaggagatcgtggagggctgcaccggggccctgcacatcctggccagagatgtgcacaaccgcatcgtcatccggggcctgaacaccatccccctgtttgtgcagctgctgtacagccccatcgagaacatccagagggtggccgccggcgtgctgtgtgagctggcccaggacaaggaggccgctgaggccattgaagctgagggcgccacagcccccctgacagagctgctgcacagcagaaatgaaggagtggccacctatgctgctgctgtgctcttcaggatgtctgaggacaagccccaggactacaagaagaggctgtctgtggagctgaccagcagcctcttcagaacagagcccatggcctggaatgaaacagctgacctgggcctggacatcggggcccagggcgagcccctgggctaccggcaggatgaccccagctaccgctccttccacagcggcggctacggccaggatgccctgggcatggaccccatgatggagcacgagatgggcggccaccaccctggagctgactaccctgtggatggcctgcctgacctgggccacgcccaggacctgatggatggcctgcccccaggggacagcaaccagctggcctggtttgacacagacctgtag

SEQ ID NO: 18868 - DNA, 2346 bp, synthetic construct; identical to SEQ ID NO: 18867
  misc_feature 1..2346: note = Description of Artificial Sequence: Synthetic coding sequence
  source 1..2346: mol_type = other DNA

SEQ ID NO: 18869 - DNA, 2346 bp, synthetic construct; identical to SEQ ID NO: 18867
  misc_feature 1..2346: note = Description of Artificial Sequence: Synthetic coding sequence
  source 1..2346: mol_type = other DNA

SEQ ID NO: 18870 - DNA, 2346 bp, synthetic construct; identical to SEQ ID NO: 18867
  misc_feature 1..2346: note = Description of Artificial Sequence: Synthetic coding sequence
  source 1..2346: mol_type = other DNA

SEQ ID NO: 18871 - DNA, 453 bp, synthetic construct
  misc_feature 1..453: note = Description of Artificial Sequence: Synthetic coding sequence
  source 1..453: mol_type = other DNA
atggccacccaggccgacctgatggagctggacatggccatggagccagacaggaaggctgctgtgagccactggcagcagcagagctacctggacagcggcatccacagcggggccaccaccacagcccccagcctgtctggaaaaggaaatcctgaggaggaggatgtggacaccagccaggtgctgtatgagtgggagcagggcttcagccagagcttcacccaggagcaggtggccgacattgatggccagtatgccatgacccgggcccagagggtgcgggccgccatgtttcctgagaccctggatgagggcatgcagatccccagcacccagtttgatgctgcccaccccaccaacgtgcagaggctggccgagcccagccagatgctgaagcatgctgtggtgaacctgatcaactaccaggatgatgctgagctggccacctag

SEQ ID NO: 18872 - DNA, 42 bp, synthetic construct; identical to SEQ ID NO: 9896
  misc_feature 1..42: note = Description of Artificial Sequence: Synthetic coding sequence
  source 1..42: mol_type = other DNA

SEQ ID NO: 18873 - DNA, 303 bp, synthetic construct
  misc_feature 1..303: note = Description of Artificial Sequence: Synthetic coding sequence
  source 1..303: mol_type = other DNA
atggccacccaggccgacctgatggagctggacatggccatggagccagacaggaaggctgctgtgagccactggcagcagcagagctacctggacagcggcatccacagcggggccaccaccacagcccccagcctgtctggaaaaggaaatcctgaggaggaggatgtggacaccagccaggtgctgtatgagtgggagcagggcttcagccagagcttcacccaggagcaggtggccgacattgatggccagtatgccatgacccgggcccagagggtgcgggccgccatgttcccctag

SEQ ID NO: 18874 - DNA, 327 bp, synthetic construct
  misc_feature 1..327: note = Description of Artificial Sequence: Synthetic coding sequence
  source 1..327: mol_type = other DNA
atggccacccaggccgacctgatggagctggacatggccatggagccagacaggaaggctgctgtgagccactggcagcagcagagctacctggacagcggcatccacagcggggccaccaccacagcccccagcctgtctggaaaaggaaatcctgaggaggaggatgtggacaccagccaggtgctgtatgagtgggagcagggcttcagccagagcttcacccaggagcaggtggccgacattgatggccagtatgccatgacccgggcccagagggtgcgggccgccatgtttcctgagaccctggatgagggcatgcagtag

SEQ ID NO: 18875 - DNA, 2325 bp, synthetic construct
  misc_feature 1..2325: note = Description of Artificial Sequence: Synthetic coding sequence
  source 1..2325: mol_type = other DNA
atggagctggacatggccatggagccagacaggaaggctgctgtgagccactggcagcagcagagctacctggacagcggcatccacagcggggccaccaccacagcccccagcctgagcggcaagggcaaccctgaggaggaggatgtggacaccagccaggtgctgtatgagtgggagcagggcttcagccagagcttcacccaggagcaggtggccgacattgatggccagtatgccatgacccgggcccagagggtgcgggccgccatgtttcctgagaccctggatgagggcatgcagatccccagcacccagtttgatgctgcccaccccaccaacgtgcagaggctggccgagcccagccagatgctgaagcatgctgtggtgaacctgatcaactaccaggatgatgctgagctggccacccgggccatccctgagctgaccaagctgctgaatgatgaggaccaggtggtggtgaacaaggctgctgtgatggtgcaccagctgagcaagaaggaggccagcagacatgccatcatgaggagcccccagatggtgtctgccatcgtgaggaccatgcagaacaccaatgatgtggagacagcccgctgcacagctggcaccctgcacaacctgagccaccaccgggagggcctgctggccatcttcaagagcggcggcatcccagccctggtgaagatgctgggcagccctgtggacagcgtgctcttctacgccatcaccaccctgcacaacctgctgctgcaccaggagggcgccaagatggctgtgcggctggccggcggcctgcagaagatggtggccctgctgaacaagaccaacgtgaagttcctggccatcaccacagactgcctgcagatcctggcctacggcaaccaggagagcaagctgatcatcctggccagcggcggcccccaggccctggtgaacatcatgaggacctacacctatgagaagctgctgtggaccaccagccgggtgctgaaggtgctgtctgtgtgcagcagcaacaagccagccatcgtggaggccggcggcatgcaggccctgggcctgcacctgacagaccccagccagaggctggtgcagaactgcctgtggaccctgaggaacctgagtgatgctgccaccaagcaggagggcatggagggcctgctgggcaccctggtgcagctgctgggcagtgatgacatcaacgtggtgacctgtgccgccggcatcctgagcaacctgacctgcaacaactacaagaacaagatgatggtgtgccaggtgggcggcatcgaggccctggtgaggacagtgctgcgggccggggaccgggaggacatcacagagcccgccatctgtgccctgcggcacctgaccagccgccaccaggaggccgagatggcccagaatgctgtgcggctgcactacggcctgcctgtggtggtgaagctgctgcacccccccagccactggcccctcatcaaggccaccgtgggcctcatccggaacctggccctgtgcccagccaaccacgcccccctgcgggagcagggcgccatcccccggctggtgcagctgctggtgcgggcccaccaggacacccagaggaggacctccatgggcggcacccagcagcagtttgtggagggcgtgaggatggaggagatcgtggagggctgcacaggagccctgcacatcctggccagagatgtgcacaacagaattgtcatccggggcctgaacaccatccccctgtttgtgcagctgctgtacagccccatcgagaacatccagagggtggccgccggcgtgctgtgtgagctggcccaggacaaggaggccgctgaggccatcgaggccgagggcgccacagcccccctgacagagctgctgcacagcagaaatgaaggagtggccacctacgccgctgctgtgctcttcaggatgtctgaggacaagccccaggactacaagaagaggctgtctgtggagctgaccagcagcctcttcagaacagagcccatggcctggaatgaaacagctgacctgggcctggacattggagcccagggcgagcccctgggctaccggcaggatgaccccagctaccgctccttccacagcggcggctacggccaggatgccctgggcatggaccccatgatggagcacgagatgggcggccaccaccctggagctgactaccctgtggatggcctgcctgacctgggccacgcccaggacctgatggatggcctgcccccaggggacagcaaccagctggcctggtttgacacagacctgtag

SEQ ID NO: 18876 - DNA, 1020 bp, synthetic construct
  misc_feature 1..1020: note = Description of Artificial Sequence: Synthetic coding sequence
  source 1..1020: mol_type = other DNA
atgtggcagctgtgggccagcctgtgctgcctgctggtgctggccaatgcccggagccggcccagcttccaccccctgagtgatgagctggtgaactacgtgaacaagaggaacaccacctggcaggccggccacaacttctacaacgtggacatgagctacctgaagaggctgtgtggcaccttcctgggcggccccaagccaccccagagggtgatgttcacagaggacctgaagctgcctgccagctttgatgcccgggagcagtggccccagtgccccaccatcaaggagatccgggaccagggcagctgtggcagctgctgggcctttggagctgtggaggccatcagtgaccgcatctgcatccacaccaatgcccacgtgtctgtggaggtgtctgctgaggacctgctgacctgctgcggctccatgtgtggagatggctgcaatggaggctacccagctgaggcctggaacttctggaccaggaagggcctggtgtctgggggcctgtatgagagccacgtgggctgccggccctacagcatccccccctgtgagcaccacgtgaatggcagccggcccccctgcacaggagagggggacacccccaagtgcagcaagatctgtgagcccggctacagccccacctacaagcaggacaagcactacggctacaacagctacagcgtgagcaacagcgagaaggacatcatggccgagatctacaagaatggacctgtggagggcgccttctctgtgtacagcgacttcctgctgtacaagagcggcgtgtaccagcacgtgactggagagatgatgggcggccacgccatccgcatcctgggctggggcgtggagaatggcaccccctactggctggtggccaacagctggaacacagactggggagacaatggcttcttcaagatcctgcggggccaggaccactgcggcattgaaagtgaggtggtggccggcatccccaggacagaccagtactgggagaagatctag

SEQ ID NO: 18877 - DNA, 1020 bp, synthetic construct; identical to SEQ ID NO: 18876
  misc_feature 1..1020: note = Description of Artificial Sequence: Synthetic coding sequence
  source 1..1020: mol_type = other DNA

SEQ ID NO: 18878 - DNA, 333 bp, synthetic construct
  misc_feature 1..333: note = Description of Artificial Sequence: Synthetic coding sequence
  source 1..333: mol_type = other DNA
atgtggcagctgtgggccagcctgtgctgcctgctggtgctggccaatgcccggagccggcccagcttccaccccctgagtgatgagctggtgaactacgtgaacaagaggaacaccacctggcaggccggccacaacttctacaacgtggacatgagctacctgaagaggctgtgtggcaccttcctgggcggccccaagccaccccagagggtgatgttcacagaggacctgaagctgcctgccagctttgatgcccgggagcagtggccccagtgccccaccatcaaggagatccgggaccagggcagctgtggcagctgctggctgtag

SEQ ID NO: 18879 - DNA, 1020 bp, synthetic construct; identical to SEQ ID NO: 18876
  misc_feature 1..1020: note = Description of Artificial Sequence: Synthetic coding sequence
  source 1..1020: mol_type = other DNA

SEQ ID NO: 18880 - DNA, 1020 bp, synthetic construct; identical to SEQ ID NO: 18876
  misc_feature 1..1020: note = Description of Artificial Sequence: Synthetic coding sequence
  source 1..1020: mol_type = other DNA

SEQ ID NO: 18881 - DNA, 1020 bp, synthetic construct; identical to SEQ ID NO: 18876
  misc_feature 1..1020: note = Description of Artificial Sequence: Synthetic coding sequence
  source 1..1020: mol_type = other DNA

SEQ ID NO: 18882 - DNA, 1020 bp, synthetic construct; identical to SEQ ID NO: 18876
  misc_feature 1..1020: note = Description of Artificial Sequence: Synthetic coding sequence
  source 1..1020: mol_type = other DNA

SEQ ID NO: 18883 - DNA, 1020 bp, synthetic construct; identical to SEQ ID NO: 18876
  misc_feature 1..1020: note = Description of Artificial Sequence: Synthetic coding sequence
  source 1..1020: mol_type = other DNA

SEQ ID NO: 18884 - DNA, 1020 bp, synthetic construct; identical to SEQ ID NO: 18876
  misc_feature 1..1020: note = Description of Artificial Sequence: Synthetic coding sequence
  source 1..1020: mol_type = other DNA

SEQ ID NO: 18885 - DNA, 831 bp, synthetic construct
  misc_feature 1..831: note = Description of Artificial Sequence: Synthetic coding sequence
  source 1..831: mol_type = other DNA
atggacatgaacagaagagccagctgcctgctgcctgacctgtgtggccagggctggggctggaggctcttccctgccagctgtgcctacctgggctctgtgccctggagggtgtggggcctgggcggcctgctggcccccctggccgctgctgggggcggcagcaccagcggcctgggccacctgggcagcacccagtggagcggggagctggtggtgctgctgtctgaggtgttcatccggggctgcctcttcagctgcaatggaggctacccagctgaggcctggaacttctggaccaggaagggcctggtgtctgggggcctgtatgagagccacgtgggctgccggccctacagcatccccccctgtgagcaccacgtgaatggcagcaggcctccctgcaccggggagggggacacccccaagtgcagcaagatctgtgagcccggctacagccccacctacaagcaggacaagcactacggctacaacagctacagcgtgagcaacagcgagaaggacatcatggccgagatctacaagaatggacctgtggagggcgccttctctgtgtacagcgacttcctgctgtacaagtctggagtgtaccagcacgtgactggagagatgatgggcggccacgccatccgcatcctgggctggggcgtggagaatggcaccccctactggctggtggccaacagctggaacacagactggggagacaatggcttcttcaagatcctgcggggccaggaccactgcggcatcgagagcgaggtggtggccggcatccccaggacagaccagtactgggagaagatctag

SEQ ID NO: 18886 - DNA, 738 bp, synthetic construct
  misc_feature 1..738: note = Description of Artificial Sequence: Synthetic coding sequence
  source 1..738: mol_type = other DNA
atgcctggggccggccccctgagcatcccctgcaggatgtcctgggcctttggagctgtggaggccatcagtgaccgcatctgcatccacaccaatgcccacgtgtctgtggaggtgtctgctgaggacctgctgacctgctgcggctccatgtgtggagatggctgcaatggaggctacccagctgaggcctggaacttctggaccaggaagggcctggtgtctgggggcctgtatgagagccacgtgggctgccggccctacagcatccccccctgtgagcaccacgtgaatggcagccggcccccctgcacaggagagggggacacccccaagtgcagcaagatctgtgagcccggctacagccccacctacaagcaggacaagcactacggctacaacagctacagcgtgagcaacagcgagaaggacatcatggccgagatctacaagaatggacctgtggagggcgccttctctgtgtacagcgacttcctgctgtacaagagcggcgtgtaccagcacgtgactggagagatgatgggcggccacgccatccgcatcctgggctggggcgtggagaatggcaccccctactggctggtggccaacagctggaacacagactggggagacaatggcttcttcaagatcctgcggggccaggaccactgcggcattgaaagtgaggtggtggccggcatccccaggacagaccagtactgggagaagatctag

SEQ ID NO: 18887 - DNA, 1239 bp, synthetic construct
  misc_feature 1..1239: note = Description of Artificial Sequence: Synthetic coding sequence
  source 1..1239: mol_type = other DNA
atgcagcccagcagcctgctgcccctggccctgtgcctgctggccgccccagccagcgccctggtgcgcatccccctgcacaagttcaccagcatccggaggaccatgtctgaggtgggcggctctgtggaggacctgattgccaagggccctgtgtccaagtacagccaggccgtgcctgctgtgacagagggccccatccctgaggtgctgaagaactacatggatgcccagtactacggggagattggaattggcaccccaccccagtgcttcaccgtggtgtttgacaccggcagcagcaacctgtgggtgcccagcatccactgcaagctgctggacatcgcctgctggatccaccacaagtacaacagcgacaagagcagcacctacgtgaagaatggcaccagctttgacatccactacggcagcggcagcctgagcggctacctgagccaggacacagtgtctgtgccctgccagagcgccagcagcgccagcgccctgggcggcgtgaaggtggagcggcaggtgtttggagaggccaccaagcagcccggcatcaccttcatcgccgccaagtttgatggcatcctgggcatggcctacccccgcatctctgtgaacaacgtgctgcctgtgtttgacaacctgatgcagcagaagctggtggaccagaacatcttctccttctacctgagccgggaccctgatgcccagcctggaggagagctgatgctgggcggcacagacagcaagtactacaagggcagcctgagctacctgaatgtgaccaggaaggcctactggcaggtgcacctggaccaggtggaggtggccagcggcctgaccctgtgcaaggagggctgtgaggccatcgtggacaccggcaccagcctgatggtgggccctgtggatgaggtgcgggagctgcagaaggccatcggggctgtgcccctcatccagggcgagtacatgatcccctgtgagaaggtgtccaccctgcctgccatcaccctgaagctgggcggcaagggctacaagctgagccctgaggactacaccctgaaggtgtcccaggccggcaagaccctgtgcctgagcggcttcatgggcatggacatccccccaccttctggccccctgtggatcctgggagatgtgttcatcggccgctactacacagtgtttgaccgggacaacaacagagtgggctttgctgaggccgcccggctgtag

SEQ ID NO: 18888 - DNA, 1002 bp, synthetic construct
  misc_feature 1..1002: note = Description of Artificial Sequence: Synthetic coding sequence
  source 1..1002: mol_type = other DNA
atgaaccccaccctcatcctggccgccttctgcctgggcatcgccagcgccaccctgacctttgaccacagcctggaggcccagtggaccaagtggaaggccatgcacaaccggctgtatggcatgaatgaggagggctggaggagagctgtgtgggagaagaacatgaagatgattgagctgcacaaccaggagtaccgggagggcaagcacagcttcaccatggccatgaatgccttcggggacatgaccagcgaggagttccggcaggtgatgaatggcttccagaacaggaagcccaggaagggcaaggtgttccaggagcccctcttctatgaggcccccaggtctgtggactggagggagaagggctacgtgacccctgtgaagaaccagggccagtgtggcagctgctgggccttcagcgccaccggggccctggagggccagatgttcaggaagacaggccgcctcatcagcctgtctgagcagaacctggtggactgcagcggcccccagggcaatgaaggctgcaatggaggcctgatggactatgccttccagtatgtgcaggacaatggaggcctggacagcgaggagagctacccctatgaggccacagaggagagctgcaagtacaaccccaagtacagcgtggccaatgacaccggctttgtggacatccccaagcaggagaaggccctgatgaaggctgtggccaccgtgggccccatctctgtggccattgatgctggccacgagagcttcctgttctacaaggagggcatctactttgagccagactgcagcagcgaggacatggaccacggcgtgctggtggtgggctacggctttgagagcacagaaagtgacaacaacaagtactggctggtgaagaacagctggggcgaggagtggggcatgggcggctacgtgaagatggccaaggacagaagaaaccactgcggcatcgccagcgctgccagctaccccaccgtgtag

SEQ ID NO: 18889 - DNA, 678 bp, synthetic construct
  misc_feature 1..678: note = Description of Artificial Sequence: Synthetic coding sequence
  source 1..678: mol_type = other DNA
atgaaccccaccctcatcctggccgccttctgcctgggcatcgccagcgccaccctgacctttgaccacagcctggaggcccagtggaccaagtggaaggccatgcacaaccggctgtatggcatgaatgaggagggctggaggagagctgtgtgggagaagaacatgaagatgattgagctgcacaaccaggagtaccgggagggcaagcacagcttcaccatggccatgaatgccttcggggacatgaccagcgaggagttccggcaggtgatgaatggcttccagaacaggaagcccaggaagggcaaggtgttccaggagcccctcttctatgaggcccccaggtctgtggactggagggagaagggctacgtgacccctgtgaagaaccagggccagtgtggcagctgctgggccttcagcgccaccggggccctggagggccagatgttcaggaagacaggccgcctcatcagcctgtctgagcagaacctggtggactgcagcggcccccagggcaatgaaggctgcaatggaggcctgatggactatgccttccagtatgtgcaggacaatggaggcctggacagcgaggagagctacccctatgaggccaccgtgtctggggccccctgccaccacagcagcagcgccttcggccgctggaccctgtag

SEQ ID NO: 18890 - DNA, 1002 bp, synthetic construct; identical to SEQ ID NO: 18888
  misc_feature 1..1002: note = Description of Artificial Sequence: Synthetic coding sequence
  source 1..1002: mol_type = other DNA

SEQ ID NO: 18891 - DNA, 120 bp, synthetic construct
  misc_feature 1..120: note = Description of Artificial Sequence: Synthetic coding sequence
  source 1..120: mol_type = other DNA
atgaaccccaccctcatcctggccgccttctgcctgggcatcgccagcgccaccctgacctttgaccacagcctggaggcccagtggaccaagtggaaggccatgcacaaccggctgtag

SEQ ID NO: 18892 - DNA, 444 bp, synthetic construct
  misc_feature 1..444: note = Description of Artificial Sequence: Synthetic coding sequence
  source 1..444: mol_type = other DNA
atggctgatgagctgtctgagaagcaggtgtatgatgcccacaccaaggagattgacctggtgaacagagaccccaagcacctgaatgatgatgtggtgaagattgactttgaagatgtgattgctgagcctgagggcacccacagctttgatggcatctggaaggccagcttcaccaccttcaccgtgaccaagtactggttctaccgcctgctgagcgccctgtttggcatccccatggccctgatctggggcatctactttgccatcctgtccttcctgcacatctgggccgtggtgccctgcatcaagagcttcctgattgagatccagtgcatcagccgggtgtacagcatctacgtgcacacagtgtgtgaccccctgtttgaagctgtgggcaagatcttcagcaatgtgcgcatcaacctgcagaaggagatctag

SEQ ID NO: 18893 - DNA, 444 bp, synthetic construct; identical to SEQ ID NO: 18892
  misc_feature 1..444: note = Description of Artificial Sequence: Synthetic coding sequence
  source 1..444: mol_type = other DNA

SEQ ID NO: 18894 - DNA, 537 bp, synthetic construct
  misc_feature 1..537: note = Description of Artificial Sequence: Synthetic coding sequence
  source 1..537: mol_type = other DNA
atgtctgggggcaagtatgtggacagcgagggccacctgtacacagtgcccatccgggagcagggcaacatctacaagcccaacaacaaggccatggctgatgagctgtctgagaagcaggtgtatgatgcccacaccaaggagattgacctggtgaacagagaccccaagcacctgaatgatgatgtggtgaagattgactttgaagatgtgattgctgagcctgagggcacccacagctttgatggcatctggaaggccagcttcaccaccttcaccgtgaccaagtactggttctaccgcctgctgagcgccctgtttggcatccccatggccctgatctggggcatctactttgccatcctgtccttcctgcacatctgggccgtggtgccctgcatcaagagcttcctgattgagatccagtgcatcagccgggtgtacagcatctacgtgcacacagtgtgtgaccccctgtttgaggccgtgggcaagatcttcagcaatgtgcgcatcaacctgcagaaggagatctag

SEQ ID NO: 18895 - DNA, 345 bp, synthetic construct
  misc_feature 1..345: note = Description of Artificial Sequence: Synthetic coding sequence
  source 1..345: mol_type = other DNA
atggccggcggcaaggccggcaaggacagcggcaaggccaaggccaaggctgtgagccgcagccagagagctggcctgcagtttcctgtgggccgcatccaccgccacctgaagaccaggaccaccagccacggccgggtgggcgccacagctgctgtgtacagcgctgccatcctggagtacctgacagctgaggtgctggagctggccggaaatgccagcaaggacctgaaggtgaagaggatcacccccaggcacctgcagctggccatcagaggagatgaggagctggacagcctcatcaaggccaccatcgccggcggggagaagaggcgctgcagctag

SEQ ID NO: 18896 - DNA, 339 bp, synthetic construct
  misc_feature 1..339: note = Description of Artificial Sequence: Synthetic coding sequence
  source 1..339: mol_type = other DNA
atgggcctggagacagagaaggcagatgtgcagctgttcatggatgatgacagctacagccaccacagcggcctggagtatgctgaccctgagaagtttgctgacagcgaccaggaccgggacccccaccggctgaacagccacctgaaggacttcaatgccttctgcaaggacctgcccaatggaagtgccttctctgctgacaacatggaggagtgtgaccgctgctaccactgcagcatcgtgtatgaaagaaggaccatgctgctcttctgccagcctgccacagagcccggcctgaacacctggaccccaggcctggagatcggcatcctgtag

SEQ ID NO: 18897 - DNA, 342 bp, synthetic construct
  misc_feature 1..342: note = Description of Artificial Sequence: Synthetic coding sequence
  source 1..342: mol_type = other DNA
atgggcctggagacagagaaggcagatgtgcagctgttcatggatgatgacagctacagccaccacagcggcctggagtatgctgaccctgagaagtttgctgacagcgaccaggaccgggacccccaccggctgaacagccacctgaagctgggctttgaagatgtgattgctgagcctgtgaccacccacagctttgacaaggtgtggatctgcagccacgccctgtttgagatcagcaaatatgtgatgtacaagttcctgactgtgttcctggccatccccctggccttcatcgccggcatcctgtttgccaccctgagctgcctgcacatctggtag

SEQ ID NO: 18898 - DNA, 1038 bp, synthetic construct
  misc_feature 1..1038: note = Description of Artificial Sequence: Synthetic coding sequence
  source 1..1038: mol_type = other DNA
atgcagaggctggtggcctgggaccctgcctgcctgcccctgcccccacctcctccagccttcaagtccatggaggtggccaacttctactatgaagctgactgcctggccgccgcctacggcggcaaggccgccccagctgcccctcctgctgcccggcccggcccccggcccccagctggggagctgggcagcatcggggaccacgagcgggccatcgacttcagcccctacctggagcccctgggcgccccccaggccccagccccagccacagccacagacacctttgaagctgcccccccagccccagccccagccccagccagcagcggccagcaccacgacttcctgagtgacctcttcagtgatgattatggaggcaagaactgcaagaagccagcagaatatggctacgtgtccctgggccgcctgggcgccgccaagggggccctgcaccctggctgctttgcccccctgcaccccccacctcctcctcctcctcctcctgctgagctgaaggccgagcccggctttgagcctgctgactgcaagaggaaggaggaggccggggcccctgggggcggggccggcatggctgctggcttcccctatgccctgcgggcctacctgggctaccaggccgtgcccagcggcagcagcggcagcctgagcaccagcagcagcagcagccccccaggcacccccagccctgcagatgccaaggccccacccacagcctgctacgccggggccgccccagcccccagccaggtgaagagcaaggccaagaagacagtggacaagcacagtgatgagtacaagatcagaagagagaggaacaacattgctgtgaggaagagccgggacaaggccaagatgaggaacctggagacccagcacaaggtgctggagctgacagcagaaaatgaaaggctgcagaagaaggtggagcagctgagccgggagctgagcaccctgaggaacctcttcaagcagctgcctgagcccctgctggccagcagcggccactgctag

SEQ ID NO: 18899 - DNA, 2184 bp, synthetic construct
  misc_feature 1..2184: note = Description of Artificial Sequence: Synthetic coding sequence
  source 1..2184: mol_type = other DNA
atggagggagatgctgtggaggccatcgtggaggagagcgagaccttcatcaagggcaaggagaggaagacctaccagaggcggcgggagggcggccaggaggaggatgcctgccacctgccccagaaccagacagatggaggagaggtggtgcaggatgtgaacagctctgtgcagatggtgatgatggagcagctggaccccaccctgctgcagatgaagacagaggtgatggagggcaccgtggcccctgaggccgaggccgctgtggatgacacccagatcatcaccctgcaggtggtgaacatggaggagcagcccatcaacatcggggagctgcagctggtgcaggtgcctgtgcctgtgacagtgcctgtggccaccacctctgtggaggagctgcagggcgcctatgaaaatgaggtgtccaaggagggcctggccgagagcgagcccatgatctgccacaccctgcccctgcctgagggcttccaggtggtgaaggtgggcgccaacggggaggtggagaccctggagcagggcgagctgcccccccaggaggaccccagctggcagaaggaccctgactaccagcccccagccaagaagaccaagaagaccaagaagagcaagctgcgctacacagaggagggcaaggatgtggatgtgtctgtgtatgactttgaggaggagcagcaggagggcctgctgtctgaggtgaatgctgagaaggtggtgggcaacatgaagccacccaagcccaccaagatcaagaagaagggcgtgaagaagaccttccagtgtgagctgtgcagctacacctgccccaggaggagcaacctggacagacacatgaagagccacacagatgagcggccccacaagtgccacctgtgtggccgggccttcagaacagtgaccctgctgaggaaccacctgaacacccacacaggcacccggccccacaagtgcccagactgtgacatggcctttgtgaccagcggggagctggtgcgccaccggcgctacaagcacacccatgagaagcccttcaagtgcagcatgtgtgactatgcctctgtggaggtgtccaagctgaagaggcacatccgcagccacactggagagcggcccttccagtgcagcctgtgcagctatgccagccgggacacctacaagctgaagaggcacatgaggacccacagcggggagaagccctatgagtgctacatctgccacgcccgcttcacccagagcggcaccatgaagatgcacatcctgcagaagcacacagaaaatgtggccaagttccactgcccccactgtgacaccgtcatcgccaggaagagtgacctgggcgtgcacctgaggaagcagcacagctacatcgagcagggcaagaagtgccgctactgtgatgctgtgttccacgagagatatgccctgatccagcaccagaagagccacaagaatgagaagcgcttcaagtgtgaccagtgtgactatgcctgccggcaggagcggcacatgatcatgcacaagaggacccacactggagagaagccctatgcctgcagccactgtgacaagaccttccggcagaagcagctgctggacatgcacttcaagcgctaccatgaccccaactttgtgcctgctgcctttgtgtgcagcaaatgtgggaagaccttcaccaggaggaacaccatggcccggcatgctgacaactgtgccggcccagatggagtggagggggagaatggaggagagaccaagaagagcaagaggggcaggaagaggaagatgaggagcaagaaggaggacagcagtgacagtgaaaatgctgagccagacctggatgacaatgaagatgaggaggagcctgctgtggagattgagcctgagcctgagccccagcctgtgaccccagcccctcctccagccaagaagagaagaggccggcccccaggccgcaccaaccagcccaagcagaaccagcccacagccatcatccaggtggaggaccagaacacaggagccatcgagaacatcatcgtggaggtgaagaaggagccagatgctgagcctgctgagggggaggaggaggaggcccagcctgctgccacagatgccccaaatggagacctgaccccagagatgatcctgtccatgatggacagatag

SEQ ID NO: 18900 - DNA, 1200 bp, synthetic construct
  misc_feature 1..1200: note = Description of Artificial Sequence: Synthetic coding sequence
  source 1..1200: mol_type = other DNA
atggcctttgtgaccagcggggagctggtgcgccaccggcgctacaagcacacccatgagaagcccttcaagtgcagcatgtgtgactatgcctctgtggaggtgtccaagctgaagaggcacatccgcagccacactggagagcggcccttccagtgcagcctgtgcagctatgccagccgggacacctacaagctgaagaggcacatgaggacccacagcggggagaagccctatgagtgctacatctgccacgcccgcttcacccagagcggcaccatgaagatgcacatcctgcagaagcacacagaaaatgtggccaagttccactgcccccactgtgacaccgtcatcgccaggaagagtgacctgggcgtgcacctgaggaagcagcacagctacatcgagcagggcaagaagtgccgctactgtgatgctgtgttccacgagagatatgccctgatccagcaccagaagagccacaagaatgagaagcgcttcaagtgtgaccagtgtgactatgcctgccggcaggagcggcacatgatcatgcacaagaggacccacactggagagaagccctatgcctgcagccactgtgacaagaccttccggcagaagcagctgctggacatgcacttcaagcgctaccatgaccccaactttgtgcctgctgcctttgtgtgcagcaaatgtgggaagaccttcaccaggaggaacaccatggcccggcatgctgacaactgtgccggcccagatggagtggagggggagaatggaggagagaccaagaagagcaagaggggcaggaagaggaagatgaggagcaagaaggaggacagcagtgacagtgaaaatgctgagccagacctggatgacaatgaagatgaggaggagcctgctgtggagattgagcctgagcctgagccccagcctgtgaccccagcccctcctccagccaagaagagaagaggccggcccccaggccgcaccaaccagcccaagcagaaccagcccacagccatcatccaggtggaggaccagaacacaggagccatcgagaacatcatcgtggaggtgaagaaggagccagatgctgagcctgctgagggggaggaggaggaggcccagcctgctgccacagatgccccaaatggagacctgaccccagagatgatcctgtccatgatggacagatag

SEQ ID NO: 18901 - DNA, 1128 bp, synthetic construct
  misc_feature 1..1128: note = Description of Artificial Sequence: Synthetic coding sequence
  source 1..1128: mol_type = other DNA
atggagcgggccagctgcctgctgctgctgctgctgcccctggtgcacgtgtctgccaccaccccagagccctgtgagctggatgatgaggacttccgctgtgtgtgcaacttcagcgagccccagcctgactggagcgaggccttccagtgtgtgtctgctgtggaggtggagatccatgctgggggcctgaacctggagcccttcctgaagagggtggatgctgatgctgacccccggcagtatgctgacacagtgaaggccctgcgggtgcggcggctgactgtgggcgccgcccaggtgcctgcccagctgctggtgggcgccctgcgggtgctggcctacagccggctgaaggagctgaccctggaggacctgaagatcaccggcaccatgccacccctgcccctggaggccaccggcctggccctgagcagcctgcggctgagaaatgtgtcctgggccaccggccgctcctggctggccgagctgcagcagtggctgaagccaggcctgaaggtgctgagcatcgcccaggcccacagccctgccttcagctgtgagcaggtgcgggccttccctgccctgaccagcctggacctgagtgacaaccctggcctgggggagcggggcctgatggccgccctgtgcccccacaagtttcctgccatccagaacctggccctgaggaacacaggcatggagacccccaccggggtgtgtgccgccctggccgctgctggggtgcagccccacagcctggacctgagccacaacagcctgcgggccaccgtgaaccccagcgccccccgctgcatgtggagcagcgccctgaacagcctgaacctgagctttgctggcctggagcaggtgcccaagggcctgcctgccaagctgcgggtgctggacctgagctgcaaccggctgaacagagccccccagccagatgagctgcctgaggtggacaacctgaccctggatggcaaccccttcctggtgcccggcacagccctgccccatgagggctccatgaacagcggcgtggtgcctgcctgtgcccggagcaccctgtctgtgggcgtgtctggcaccctggtgctgctgcagggcgcccggggctttgcctag

SEQ ID NO: 18902 - DNA, 1128 bp, synthetic construct; identical to SEQ ID NO: 18901
  misc_feature 1..1128: note = Description of Artificial Sequence: Synthetic coding sequence
  source 1..1128: mol_type = other DNA

SEQ ID NO: 18903 - DNA, 402 bp, synthetic construct
  misc_feature 1..402: note = Description of Artificial Sequence: Synthetic coding sequence
  source 1..402: mol_type = other DNA
atgtccttcccctgcaagtttgtggccagcttcctgctgatcttcaacgtgagcagcaaaggagctgtgtccaaggagatcaccaatgccctggagacctggggcgccctgggccaggacatcaacctggacatccccagcttccagatgtctgatgacattgatgacatcaagtgggagaagaccagtgacaagaagaagatcgcccagttcaggaaggagaaggagaccttcaaggagaaggacacctacaagctgttcaagaatggcaccctgaagatcaagcacctgaagacagatgaccaggacatctacaaggtgtccatctatgacaccaagggcaagaatgtgctggagaagatctttgacctgaagatccagggcaaatgttccttcccctag

SEQ ID NO: 18904 - DNA, 1056 bp, synthetic construct
  misc_feature 1..1056: note = Description of Artificial Sequence: Synthetic coding sequence
  source 1..1056: mol_type = other DNA
atgtccttcccctgcaagtttgtggccagcttcctgctgatcttcaacgtgagcagcaaaggagctgtgtccaaggagatcaccaatgccctggagacctggggcgccctgggccaggacatcaacctggacatccccagcttccagatgtctgatgacattgatgacatcaagtgggagaagaccagtgacaagaagaagatcgcccagttcaggaaggagaaggagaccttcaaggagaaggacacctacaagctgttcaagaatggcaccctgaagatcaagcacctgaagacagatgaccaggacatctacaaggtgtccatctatgacaccaagggcaagaatgtgctggagaagatctttgacctgaagatccaggagcgggtgtccaagcccaagatctcctggacctgcatcaacaccaccctgacctgtgaggtgatgaatggaacagatcctgagctgaacctgtaccaggacggcaagcacctgaagctgagccagagggtcatcacccacaagtggaccaccagcctgagcgccaagttcaagtgcacagctggcaacaaggtgtccaaggagagctctgtggagcctgtgtcctgcccagagaagggcctggacatctacctgatcatcggcatctgtggcggcggcagcctgctgatggtgtttgtggccctgctggtgttctacatcaccaagaggaagaagcagaggagcagaagaaatgatgaggagctggagacccgggcccaccgggtggccacagaggagcggggcaggaagccccaccagatcccagccagcaccccccagaacccagccaccagccagcaccccccacctcctcctggccacaggagccaggcccccagccacaggcctcctcctcctggccaccgggtgcagcaccagccccagaagaggcccccagcccccagcggcacccaggtgcaccagcagaagggcccccccctgccccggccccgggtgcagcccaagccccctcatggagctgctgagaacagcctgagccccagcagcaactag

SEQ ID NO: 18905 - DNA, 2544 bp, synthetic construct
  misc_feature 1..2544: note = Description of Artificial Sequence: Synthetic coding sequence
  source 1..2544: mol_type = other DNA
atgcacctgctgggcccctggctgctgctgctggtgctggagtacctggccttcagtgacagcagcaagtgggtgtttgagcaccctgagaccctgtatgcctgggagggcgcctgtgtgtggatcccctgcacctaccgggccctggatggagacctggagagcttcatcctcttccacaaccctgagtacaacaagaacaccagcaagtttgatggcacccggctgtatgagagcaccaaggatggcaaggtgcccagcgagcagaagagggtgcagttcctgggggacaagaacaagaactgcaccctgagcatccaccctgtgcacctgaatgacagcggccagctgggcctgaggatggagagcaagacagagaagtggatggagcgcatccacctgaatgtgtctgagcggcccttccccccccacatccagctgcccccagagatccaggagagccaggaggtgaccctgacctgcctgctgaacttcagctgctacggctaccccatccagctgcagtggctgctggagggcgtgcccatgaggcaggccgctgtgaccagcaccagcctgaccatcaagtctgtgttcaccaggtctgagctgaagttcagcccccagtggagccaccacggcaagatcgtgacctgccagctgcaggatgctgatggcaagttcctgagcaatgacacagtgcagctgaatgtgaagcacacccccaagctggagatcaaggtgacccccagtgatgccatcgtgcgggagggggacagcgtgaccatgacctgtgaggtgagcagcagcaaccctgagtacaccaccgtgtcctggctgaaggatggcaccagcctgaagaagcagaacaccttcaccctgaacctgcgggaggtgaccaaggaccagagcggcaagtactgctgccaggtgtccaatgatgtgggccctggccgctctgaggaggtgttcctgcaggtgcagtatgcccctgagcccagcacagtgcagatcctgcacagccctgctgtggagggcagccaggtggagttcctgtgcatgagcctggccaaccccctgcccaccaactacacctggtaccacaacgggaaggagatgcagggccgcacagaggagaaggtgcacatccccaagatcctgccctggcatgctggcacctacagctgtgtggccgagaacatcctgggcaccggccagaggggccctggagctgagctggatgtgcagtacccacccaagaaggtgaccaccgtcatccagaaccccatgcccatccgggagggggacacagtgaccctgagctgcaactacaacagcagcaaccccagcgtgaccaggtatgagtggaagccccatggagcctgggaggagcccagcctgggcgtgctgaagatccagaatgtgggctgggacaacaccaccatcgcctgtgccgcctgcaacagctggtgctcctgggccagccctgtggccctgaatgtgcagtatgcccccagagatgtgcgggtgaggaagatcaagcccctgtctgagatccacagcggcaacagcgtgtccctgcagtgtgacttcagcagcagccaccccaaggaggtgcagttcttctgggagaagaatggccgcctgctgggcaaggagagccagctgaactttgacagcatcagcccagaagatgctggcagctacagctgctgggtgaacaacagcatcggccagacagccagcaaggcctggaccctggaggtgctgtatgccccccggcggctgcgggtgtccatgagccctggggaccaggtgatggagggcaagagcgccaccctgacctgtgagagtgatgccaacccccctgtgagccactacacctggtttgactggaacaaccagagcctgccctaccacagccagaagctgcggctggagcctgtgaaggtgcagcacagcggggcctactggtgccagggcaccaacagcgtgggcaagggccgcagccccctgagcaccctgactgtgtactacagccctgagaccatcggccggcgggtggccgtgggcctgggcagctgcctggccatcctgatcctggccatctgtggcctgaagctgcagaggcgctggaagaggacccagagccagcagggcctgcaggagaacagcagcggccagagcttctttgtgaggaacaagaaggtgcggcgggcccccctgtctgagggcccccacagcctgggctgctacaaccccatgatggaggatggcatctcctacaccaccctgcgcttccctgagatgaacatccccaggactggagatgctgagagcagcgagatgcagaggcctcctccagactgtgatgacacagtgacctacagcgccctgcacaagaggcaggtgggggactatgaaaatgtcatcccagacttcccagaagatgagggcatccactacagcgagctgatccagtttggagtgggggagcggccccaggcccaggagaatgtggactatgtgatcctgaagcactag

SEQ ID NO: 18906 - DNA, 1989 bp, synthetic construct
  misc_feature 1..1989: note = Description of Artificial Sequence: Synthetic coding sequence
  source 1..1989: mol_type = other DNA
atggagagcaagacagagaagtggatggagcgcatccacctgaatgtgtctgagcggcccttccccccccacatccagctgcccccagagatccaggagagccaggaggtgaccctgacctgcctgctgaacttcagctgctacggctaccccatccagctgcagtggctgctggagggcgtgcccatgaggcaggccgctgtgaccagcaccagcctgaccatcaagtctgtgttcaccaggtctgagctgaagttcagcccccagtggagccaccacggcaagatcgtgacctgccagctgcaggatgctgatggcaagttcctgagcaatgacacagtgcagctgaatgtgaagcacacccccaagctggagatcaaggtgacccccagtgatgccatcgtgcgggagggggacagcgtgaccatgacctgtgaggtgagcagcagcaaccctgagtacaccaccgtgtcctggctgaaggatggcaccagcctgaagaagcagaacaccttcaccctgaacctgcgggaggtgaccaaggaccagagcggcaagtactgctgccaggtgtccaatgatgtgggccctggccgctctgaggaggtgttcctgcaggtgcagtatgcccctgagcccagcacagtgcagatcctgcacagccctgctgtggagggcagccaggtggagttcctgtgcatgagcctggccaaccccctgcccaccaactacacctggtaccacaacgggaaggagatgcagggccgcacagaggagaaggtgcacatccccaagatcctgccctggcatgctggcacctacagctgtgtggccgagaacatcctgggcaccggccagaggggccctggagctgagctggatgtgcagtacccacccaagaaggtgaccaccgtcatccagaaccccatgcccatccgggagggggacacagtgaccctgagctgcaactacaacagcagcaaccccagcgtgaccaggtatgagtggaagccccatggagcctgggaggagcccagcctgggcgtgctgaagatccagaatgtgggctgggacaacaccaccatcgcctgtgccgcctgcaacagctggtgctcctgggccagccctgtggccctgaatgtgcagtatgcccccagagatgtgcgggtgaggaagatcaagcccctgtctgagatccacagcggcaacagcgtgtccctgcagtgtgacttcagcagcagccaccccaaggaggtgcagttcttctgggagaagaatggccgcctgctgggcaaggagagccagctgaactttgacagcatcagcccagaagatgctggcagctacagctgctgggtgaacaacagcatcggccagacagccagcaaggcctggaccctggaggtgctgtatgccccccggcggctgcgggtgtccatgagccctggggaccaggtgatggagggcaagagcgccaccctgacctgtgagagtgatgccaacccccctgtgagccactacacctggtttgactggaacaaccagagcctgccctaccacagccagaagctgcggctggagcctgtgaaggtgcagcacagcggggcctactggtgccagggcaccaacagcgtgggcaagggccgcagccccctgagcaccctgactgtgtactacagccctgagaccatcggccggcgggtggccgtgggcctgggcagctgcctggccatcctgatcctggccatctgtggcctgaagctgcagaggagagatgctgagagcagcgagatgcagaggcctcctccagactgtgatgacacagtgacctacagcgccctgcacaagaggcaggtgggggactatgaaaatgtcatcccagacttcccagaagatgagggcatccactacagcgagctgatccagtttggagtgggggagcggccccaggcccaggagaatgtggactatgtgatcctgaagcactag

SEQ ID NO: 18907 - DNA, 2013 bp, synthetic construct
  misc_feature 1..2013: note = Description of Artificial Sequence: Synthetic coding sequence
  source 1..2013: mol_type = other DNA
atgcacctgctgggcccctggctgctgctgctggtgctggagtacctggccttcagtgacagcagcaagtgggtgtttgagcaccctgagaccctgtatgcctgggagggcgcctgtgtgtggatcccctgcacctaccgggccctggatggagacctggagagcttcatcctcttccacaaccctgagtacaacaagaacaccagcaagtttgatggcacccggctgtatgagagcaccaaggatggcaaggtgcccagcgagcagaagagggtgcagttcctgggggacaagaacaagaactgcaccctgagcatccaccctgtgcacctgaatgacagcggccagctgggcctgaggatggagagcaagacagagaagtggatggagcgcatccacctgaatgtgtctgagcggcccttccccccccacatccagctgcccccagagatccaggagagccaggaggtgaccctgacctgcctgctgaacttcagctgctacggctaccccatccagctgcagtggctgctggagggcgtgcccatgaggcaggccgctgtgaccagcaccagcctgaccatcaagtctgtgttcaccaggtctgagctgaagttcagcccccagtggagccaccacggcaagatcgtgacctgccagctgcaggatgctgatggcaagttcctgagcaatgacacagtgcagctgaatgtgaagcacccccccaagaaggtgaccaccgtcatccagaaccccatgcccatccgggagggggacacagtgaccctgagctgcaactacaacagcagcaaccccagcgtgaccaggtatgagtggaagccccacggggcctgggaggagcccagcctgggcgtgctgaagatccagaatgtgggctgggacaacaccaccatcgcctgtgccgcctgcaacagctggtgctcctgggccagccctgtggccctgaatgtgcagtatgcccccagagatgtgcgggtgaggaagatcaagcccctgtctgagatccacagcggcaacagcgtgtccctgcagtgtgacttcagcagcagccaccccaaggaggtgcagttcttctgggagaagaatggccgcctgctgggcaaggagagccagctgaactttgacagcatcagcccagaagatgctggcagctacagctgctgggtgaacaacagcatcggccagacagccagcaaggcctggaccctggaggtgctgtatgccccccggcggctgcgggtgtccatgagccctggggaccaggtgatggagggcaagagcgccaccctgacctgtgagagtgatgccaacccccctgtgagccactacacctggtttgactggaacaaccagagcctgccctaccacagccagaagctgcggctggagcctgtgaaggtgcagcacagcggggcctactggtgccagggcaccaacagcgtgggcaagggccgcagccccctgagcaccctgactgtgtactacagccctgagaccatcggcagaagagtggccgtgggcctgggcagctgcctggccatcctgatcctggccatctgtggcctgaagctgcagaggcgctggaagaggacccagagccagcagggcctgcaggagaacagcagcggccagagcttctttgtgaggaacaagaaggtgagaagagcccccctgtctgagggcccccacagcctgggctgctacaaccccatgatggaggatggcatctcctacaccaccctgcgcttccctgagatgaacatccccaggactggagatgctgagagcagcgagatgcagaggcctcctccagactgtgatgacacagtgacctacagcgccctgcacaagaggcaggtgggggactatgaaaatgtcatcccagacttcccagaagatgagggcatccactacagcgagctgatccagtttggagtgggggagcggccccaggcccaggagaatgtggactatgtgatcctgaagcactag

SEQ ID NO: 18908 - DNA, 2028 bp, synthetic construct
  misc_feature 1..2028: note = Description of Artificial Sequence: Synthetic coding sequence
  source 1..2028: mol_type = other DNA
atgagcctgtggctgctggagggcgtgcccatgaggcaggccgctgtgaccagcaccagcctgaccatcaagtctgtgttcaccaggtctgagctgaagttcagcccccagtggagccaccacggcaagatcgtgacctgccagctgcaggatgctgatggcaagttcctgagcaatgacacagtgcagctgaatgtgaagcacacccccaagctggagatcaaggtgacccccagtgatgccatcgtgcgggagggggacagcgtgaccatgacctgtgaggtgagcagcagcaaccctgagtacaccaccgtgtcctggctgaaggatggcaccagcctgaagaagcagaacaccttcaccctgaacctgcgggaggtgaccaaggaccagagcggcaagtactgctgccaggtgtccaatgatgtgggccctggccgctctgaggaggtgttcctgcaggtgcagtatgcccctgagcccagcacagtgcagatcctgcacagccctgctgtggagggcagccaggtggagttcctgtgcatgagcctggccaaccccctgcccaccaactacacctggtaccacaacgggaaggagatgcagggccgcacagaggagaaggtgcacatccccaagatcctgccctggcatgctggcacctacagctgtgtggccgagaacatcctgggcaccggccagaggggccctggagctgagctggatgtgcagtacccacccaagaaggtgaccaccgtcatccagaaccccatgcccatccgggagggggacacagtgaccctgagctgcaactacaacagcagcaaccccagcgtgaccaggtatgagtggaagccccatggagcctgggaggagcccagcctgggcgtgctgaagatccagaatgtgggctgggacaacaccaccatcgcctgtgccgcctgcaacagctggtgctcctgggccagccctgtggccctgaatgtgcagtatgcccccagagatgtgcgggtgaggaagatcaagcccctgtctgagatccacagcggcaacagcgtgtccctgcagtgtgacttcagcagcagccaccccaaggaggtgcagttcttctgggagaagaatggccgcctgctgggcaaggagagccagctgaactttgacagcatcagcccagaagatgctggcagctacagctgctgggtgaacaacagcatcggccagacagccagcaaggcctggaccctggaggtgctgtatgccccccggcggctgcgggtgtccatgagccctggggaccaggtgatggagggcaagagcgccaccctgacctgtgagagtgatgccaacccccctgtgagccactacacctggtttgactggaacaaccagagcctgccctaccacagccagaagctgcggctggagcctgtgaaggtgcagcacagcggggcctactggtgccagggcaccaacagcgtgggcaagggccgcagccccctgagcaccctgactgtgtactacagccctgagaccatcggccggcgggtggccgtgggcctgggcagctgcctggccatcctgatcctggccatctgtggcctgaagctgcagaggcgctggaagaggacccagagccagcagggcctgcaggagaacagcagcggccagagcttctttgtgaggaacaagaaggtgcggcgggcccccctgtctgagggcccccacagcctgggctgctacaaccccatgatggaggatggcatctcctacaccaccctgcgcttccctgagatgaacatccccaggactggagatgctgagagcagcgagatgcagaggcctcctccagactgtgatgacacagtgacctacagcgccctgcacaagaggcaggtgggggactatgaaaatgtcatcccagacttcccagaagatgagggcatccactacagcgagctgatccagtttggagtgggggagcggccccaggcccaggagaatgtggactatgtgatcctgaagcactag

SEQ ID NO: 18909 - DNA, 2280 bp, synthetic construct
  misc_feature 1..2280: note = Description of Artificial Sequence: Synthetic coding sequence
  source 1..2280: mol_type = other DNA
atgcacctgctgggcccctggctgctgctgctggtgctggagtacctggccttcagtgacagcagcaagtgggtgtttgagcaccctgagaccctgtatgcctgggagggcgcctgtgtgtggatcccctgcacctaccgggccctggatggagacctggagagcttcatcctcttccacaaccctgagtacaacaagaacaccagcaagtttgatggcacccggctgtatgagagcaccaaggatggcaaggtgcccagcgagcagaagagggtgcagttcctgggggacaagaacaagaactgcaccctgagcatccaccctgtgcacctgaatgacagcggccagctgggcctgaggatggagagcaagacagagaagtggatggagcgcatccacctgaatgtgtctgagcggcccttccccccccacatccagctgcccccagagatccaggagagccaggaggtgaccctgacctgcctgctgaacttcagctgctacggctaccccatccagctgcagtggctgctggagggcgtgcccatgaggcaggccgctgtgaccagcaccagcctgaccatcaagtctgtgttcaccaggtctgagctgaagttcagcccccagtggagccaccacggcaagatcgtgacctgccagctgcaggatgctgatggcaagttcctgagcaatgacacagtgcagctgaatgtgaagcacacccccaagctggagatcaaggtgacccccagtgatgccatcgtgcgggagggggacagcgtgaccatgacctgtgaggtgagcagcagcaaccctgagtacaccaccgtgtcctggctgaaggatggcaccagcctgaagaagcagaacaccttcaccctgaacctgcgggaggtgaccaaggaccagagcggcaagtactgctgccaggtgtccaatgatgtgggccctggccgctctgaggaggtgttcctgcaggtgcagtacccacccaagaaggtgaccaccgtcatccagaaccccatgcccatccgggagggggacacagtgaccctgagctgcaactacaacagcagcaaccccagcgtgaccaggtatgagtggaagccccatggagcctgggaggagcccagcctgggcgtgctgaagatccagaatgtgggctgggacaacaccaccatcgcctgtgccgcctgcaacagctggtgctcctgggccagccctgtggccctgaatgtgcagtatgcccccagagatgtgcgggtgaggaagatcaagcccctgtctgagatccacagcggcaacagcgtgtccctgcagtgtgacttcagcagcagccaccccaaggaggtgcagttcttctgggagaagaatggccgcctgctgggcaaggagagccagctgaactttgacagcatcagcccagaagatgctggcagctacagctgctgggtgaacaacagcatcggccagacagccagcaaggcctggaccctggaggtgctgtatgccccccggcggctgcgggtgtccatgagccctggggaccaggtgatggagggcaagagcgccaccctgacctgtgagagtgatgccaacccccctgtgagccactacacctggtttgactggaacaaccagagcctgccctaccacagccagaagctgcggctggagcctgtgaaggtgcagcacagcggggcctactggtgccagggcaccaacagcgtgggcaagggccgcagccccctgagcaccctgactgtgtactacagccctgagaccatcggccggcgggtggccgtgggcctgggcagctgcctggccatcctgatcctggccatctgtggcctgaagctgcagaggcgctggaagaggacccagagccagcagggcctgcaggagaacagcagcggccagagcttctttgtgaggaacaagaaggtgcggcgggcccccctgtctgagggcccccacagcctgggctgctacaaccccatgatggaggatggcatctcctacaccaccctgcgcttccctgagatgaacatccccaggactggagatgctgagagcagcgagatgcagaggcctcctccagactgtgatgacacagtgacctacagcgccctgcacaagaggcaggtgggggactatgaaaatgtcatcccagacttcccagaagatgagggcatccactacagcgagctgatccagtttggagtgggggagcggccccaggcccaggagaatgtggactatgtgatcctgaagcactag

SEQ ID NO: 18910 - DNA, 2256 bp, synthetic construct
  misc_feature 1..2256: note = Description of Artificial Sequence: Synthetic coding sequence
  source 1..2256: mol_type = other DNA
atgcacctgctgggcccctggctgctgctgctggtgctggagtacctggccttcagtgacagcagcaagtgggtgtttgagcaccctgagaccctgtatgcctgggagggcgcctgtgtgtggatcccctgcacctaccgggccctggatggagacctggagagcttcatcctcttccacaaccctgagtacaacaagaacaccagcaagtttgatggcacccggctgtatgagagcaccaaggatggcaaggtgcccagcgagcagaagagggtgcagttcctgggggacaagaacaagaactgcaccctgagcatccaccctgtgcacctgaatgacagcggccagctgggcctgaggatggagagcaagacagagaagtggatggagcgcatccacctgaatgtgtctgagcggcccttccccccccacatccagctgcccccagagatccaggagagccaggaggtgaccctgacctgcctgctgaacttcagctgctacggctaccccatccagctgcagtggctgctggagggcgtgcccatgaggcaggccgctgtgaccagcaccagcctgaccatcaagtctgtgttcaccaggtctgagctgaagttcagcccccagtggagccaccacggcaagatcgtgacctgccagctgcaggatgctgatggcaagttcctgagcaatgacacagtgcagctgaatgtgaagcacacccccaagctggagatcaaggtgacccccagtgatgccatcgtgcgggagggggacagcgtgaccatgacctgtgaggtgagcagcagcaaccctgagtacaccaccgtgtcctggctgaaggatggcaccagcctgaagaagcagaacaccttcaccctgaacctgcgggaggtgaccaaggaccagagcggcaagtactgctgccaggtgtccaatgatgtgggccctggccgctctgaggaggtgttcctgcaggtgcagtatgcccctgagcccagcacagtgcagatcctgcacagccctgctgtggagggcagccaggtggagttcctgtgcatgagcctggccaaccccctgcccaccaactacacctggtaccacaacgggaaggagatgcagggccgcacagaggagaaggtgcacatccccaagatcctgccctggcatgctggcacctacagctgtgtggccgagaacatcctgggcaccggccagaggggccctggagctgagctggatgtgcagtacccacccaagaaggtgaccaccgtcatccagaaccccatgcccatccgggagggggacacagtgaccctgagctgcaactacaacagcagcaaccccagcgtgaccaggtatgagtggaagccccatggagcctgggaggagcccagcctgggcgtgctgaagatccagaatgtgggctgggacaacaccaccatcgcctgtgccgcctgcaacagctggtgctcctgggccagccctgtggccctgaatgtgcagtatgcccccagagatgtgcgggtgaggaagatcaagcccctgtctgagatccacagcggcaacagcgtgtccctgcagtgtgacttcagcagcagccaccccaaggaggtgcagttcttctgggagaagaatggccgcctgctgggcaaggagagccagctgaactttgacagcatcagcccagaagatgctggcagctacagctgctgggtgaacaacagcatcggccagacagccagcaaggcctggaccctggaggtgctgtatgccccccggcggctgcgggtgtccatgagccctggggaccaggtgatggagggcaagagcgccaccctgacctgtgagagtgatgccaacccccctgtgagccactacacctggtttgactggaacaaccagagcctgccctaccacagccagaagctgcggctggagcctgtgaaggtgcagcacagcggggcctactggtgccagggcaccaacagcgtgggcaagggccgcagccccctgagcaccctgactgtgtactacagccctgagaccatcggccggcgggtggccgtgggcctgggcagctgcctggccatcctgatcctggccatctgtggcctgaagctgcagaggcgctggaagaggacccagagccagcagggcctgcaggagaacagcagcggccagagcttctttgtgaggaacaagaagcgctgccgggtgctgagagatgctgagaccagccctggcctgaggtag

SEQ ID NO: 18911 - DNA, 783 bp, synthetic construct
  misc_feature 1..783: note = Description of Artificial Sequence: Synthetic coding sequence
  source 1..783: mol_type = other DNA
atggcccggccccacccctggtggctgtgtgtgctgggcaccctggtgggcctgagcgccaccccagcccccaagagctgcccagagcggcactactgggcccagggcaagctgtgctgccagatgtgtgagcccggcaccttcctggtgaaggactgtgaccagcacaggaaggccgcccagtgtgacccctgcatccctggggtgtccttctccccagaccaccacacccggccccactgtgagagctgccgccactgcaacagcggcctgctggtgaggaactgcaccatcacagccaatgcagaatgtgcctgcagaaatggctggcagtgccgggacaaggagtgcacagaatgtgaccccctgcccaaccccagcctgacagcccggagcagccaggccctgagcccccacccccagcccacccacctgccctacgtgtctgagatgctggaggccaggacagctggccacatgcagaccctggccgacttccggcagctgcctgcccggaccctgagcacccactggccaccccagaggagcctgtgcagcagtgacttcatccgcatcctggtgatcttcagcggcatgttcctggtgttcaccctggccggggccctcttcctgcaccagaggaggaagtaccgcagcaacaagggggagagccctgtggagcctgctgagccctgccactacagctgcccccgggaggaggagggcagcaccatccccatccaggaggactacaggaagccagagcccgcctgcagcccctag

SEQ ID NO: 18912 - DNA, 1158 bp, synthetic construct
  misc_feature 1..1158: note = Description of Artificial Sequence: Synthetic coding sequence
  source 1..1158: mol_type = other DNA
atgctggtgcggcggggggcccgggccggccccaggatgccccggggctggacagccctgtgcctgctgagcctgctgcccagcggcttcatgagcctggacaacaacggcacagccaccccagagctgcccacccagggcaccttcagcaatgtgtccaccaacgtgtcctaccaggagaccaccacccccagcaccctgggcagcaccagcctgcaccctgtgtcccagcacggcaatgaggccaccaccaacatcacagagaccaccgtgaagttcaccagcaccagcgtcatcacctctgtgtatggcaacaccaacagctctgtgcagagccagaccagcgtcatcagcacagtgttcaccaccccagccaacgtgtccaccccagagaccaccctgaagcccagcctgagccctggaaatgtgtctgacctgagcaccaccagcaccagcctggccaccagccccaccaagccctacaccagcagcagccccatcctgagtgacatcaaggccgagatcaagtgcagcggcatccgggaggtgaagctgacccagggcatctgcctggagcagaacaagaccagcagctgtgccgagttcaagaaggacagaggagagggcctggcccgggtgctgtgtggggaggagcaggctgatgctgatgctggggcccaggtgtgcagcctgctgctggcccagagcgaggtgcggccccagtgcctgctgctggtgctggccaacagaacagagatcagcagcaagctgcagctgatgaagaagcaccagagcgacctgaagaagctgggcatcctggacttcacagagcaggatgtggccagccaccagagctacagccagaagaccctcatcgccctggtgaccagcggggccctgctggccgtgctgggcatcaccggctacttcctgatgaacagaagatcctggagccccaccggggagcggctgggggaggacccctactacacagaaaatggaggcggccagggctacagcagcggccctggcaccagccctgaggcccagggcaaggcctctgtgaacagaggagcccaggagaatggcaccggccaggccaccagcagaaatggccacagcgcccggcagcacgtggtggccgacacagagctgtag

SEQ ID NO: 18913 - DNA, 987 bp, synthetic construct
  misc_feature 1..987: note = Description of Artificial Sequence: Synthetic coding sequence
  source 1..987: mol_type = other DNA
atgctggtgcggcggggggcccgggccggccccaggatgccccggggctggacagccctgtgcctgctgagcctgctgcccagcggcttcatgagcctggacaacaacggcacagccaccccagagctgcccacccagggcaccttcagcaatgtgtccaccaacgtgtcctaccaggagaccaccacccccagcaccctgggcagcaccagcctgcaccctgtgtcccagcacggcaatgaggccaccaccaacatcacagagaccaccgtgaagttcaccagcaccagcgtcatcacctctgtgtatggcaacaccaacagctctgtgcagagccagaccagcgtcatcagcacagtgttcaccaccccagccaacgtgtccaccccagagaccaccctgaagcccagcctgagccctggaaatgtgtctgacctgagcaccaccagcaccagcctggccaccagccccaccaagccctacaccagcagcagccccatcctgagtgacatcaaggccgagatcaagtgcagcggcatccgggaggtgaagctgacccagggcatctgcctggagcagaacaagaccagcagctgtgccgagttcaagaaggacagaggagagggcctggcccgggtgctgtgtggggaggagcaggctgatgctgatgctggggcccaggtgtgcagcctgctgctggcccagagcgaggtgcggccccagtgcctgctgctggtgctggccaacagaacagagatcagcagcaagctgcagctgatgaagaagcaccagagcgacctgaagaagctgggcatcctggacttcacagagcaggatgtggccagccaccagagctacagccagaagaccctcatcgccctggtgaccagcggggccctgctggccgtgctgggcatcaccggctacttcctgatgaacagaagatcctggagccccaccggggagcggctggagctggagccctag

SEQ ID NO: 18914 - DNA, 684 bp, synthetic construct
  misc_feature 1..684: note = Description of Artificial Sequence: Synthetic coding sequence
  source 1..684: mol_type = other DNA
atggactttggacctggccgcctcttccgcttcttctcctactgtgtggtggcccacatccagctggccgtgttcttcttctctgtgggcatcctggagacccgcatcctgctggctgatggagctgagttcaagaaggacagaggagagggcctggcccgggtgctgtgtggggaggagcaggctgatgctgatgctggggcccaggtgtgcagcctgctgctggcccagagcgaggtgcggccccagtgcctgctgctggtgctggccaacagaacagagatcagcagcaagctgcagctgatgaagaagcaccagagcgacctgaagaagctgggcatcctggacttcacagagcaggatgtggccagccaccagagctacagccagaagaccctcatcgccctggtgaccagcggggccctgctggccgtgctgggcatcaccggctacttcctgatgaacagaagatcctggagccccaccggggagcggctgggggaggacccctactacacagaaaatggaggcggccagggctacagcagcggccctggcaccagccctgaggcccagggcaaggcctctgtgaacagaggagcccaggagaatggcaccggccaggccaccagcagaaatggccacagcgcccggcagcacgtggtggccgacacagagctgtag

SEQ ID NO: 18915 - DNA, 1068 bp, synthetic construct
  misc_feature 1..1068: note = Description of Artificial Sequence: Synthetic coding sequence
  source 1..1068: mol_type = other DNA
atgagcctggacaacaacggcacagccaccccagagctgcccacccagggcaccttcagcaatgtgtccaccaacgtgtcctaccaggagaccaccacccccagcaccctgggcagcaccagcctgcaccctgtgtcccagcacggcaatgaggccaccaccaacatcacagagaccaccgtgaagttcaccagcaccagcgtcatcacctctgtgtatggcaacaccaacagctctgtgcagagccagaccagcgtcatcagcacagtgttcaccaccccagccaacgtgtccaccccagagaccaccctgaagcccagcctgagccctggaaatgtgtctgacctgagcaccaccagcaccagcctggccaccagccccaccaagccctacaccagcagcagccccatcctgagtgacatcaaggccgagatcaagtgcagcggcatccgggaggtgaagctgacccagggcatctgcctggagcagaacaagaccagcagctgtgccgagttcaagaaggacagaggagagggcctggcccgggtgctgtgtggggaggagcaggctgatgctgatgctggggcccaggtgtgcagcctgctgctggcccagagcgaggtgcggccccagtgcctgctgctggtgctggccaacagaacagagatcagcagcaagctgcagctgatgaagaagcaccagagcgacctgaagaagctgggcatcctggacttcacagagcaggatgtggccagccaccagagctacagccagaagaccctcatcgccctggtgaccagcggggccctgctggccgtgctgggcatcaccggctacttcctgatgaacagaagatcctggagccccaccggggagcggctgggggaggacccctactacacagaaaatggaggcggccagggctacagcagcggccctggcaccagccctgaggcccagggcaaggcctctgtgaacagaggagcccaggagaatggcaccggccaggccaccagcagaaatggccacagcgcccggcagcacgtggtggccgacacagagctgtag

SEQ ID NO: 18916 - DNA, 753 bp, synthetic construct
  misc_feature 1..753: note = Description of Artificial Sequence: Synthetic coding sequence
  source 1..753: mol_type = other DNA
atgttcctgcagatgtaccccaccaagaagctgcagcacctggtgcccctggaggtgcctgcctgcaccctgtgcctgaacatggccatgaggccccagcagaccagccaggccgagatcaagtgcagcggcatccgggaggtgaagctgacccagggcatctgcctggagcagaacaagaccagcagctgtgccgagttcaagaaggacagaggagagggcctggcccgggtgctgtgtggggaggagcaggctgatgctgatgctggggcccaggtgtgcagcctgctgctggcccagagcgaggtgcggccccagtgcctgctgctggtgctggccaacagaacagagatcagcagcaagctgcagctgatgaagaagcaccagagcgacctgaagaagctgggcatcctggacttcacagagcaggatgtggccagccaccagagctacagccagaagaccctgattgccctggtgaccagcggggccctgctggccgtgctgggcatcaccggctacttcctgatgaacagaagatcctggagccccactggagagcggctgggggaggacccctactacacagaaaatggaggcggccagggctacagcagcggccctggcaccagccctgaggcccagggcaaggcctctgtgaacagaggagcccaggagaatggaacaggccaggccaccagcagaaatggccacagcgcccggcagcacgtggtggccgacacagagctgtag

SEQ ID NO: 18917 - DNA, 516 bp, synthetic construct
  misc_feature 1..516: note = Description of Artificial Sequence: Synthetic coding sequence
  source 1..516: mol_type = other DNA
atggagcacagcaccttcctgagcggcctggtgctggccaccctgctgagccaggtgagccccttcaagatccccatcgaggagctggaggacagagtgtttgtgaactgcaacaccagcatcacctgggtggagggcaccgtgggcaccctgctgagtgacatcacccggctggacctgggcaagaggatcctggacccccggggcatctaccgctgcaatggaacagacatctacaaggacaaggagagcacagtgcaggtgcactacaggatgtgccagagctgtgtggagctggaccctgccaccgtggccggcatcatcgtgacagatgtgattgccaccctgctgctggccctgggcgtcttctgctttgctggccacgagaccggccgcctgagcggggctgctgacacccaggccctgctgagaaatgaccaggtgtaccagcccctgcgggacagagatgatgcccagtacagccacctgggcggcaactgggccaggaacaagtag

SEQ ID NO: 18918 - DNA, 384 bp, synthetic construct
  misc_feature 1..384: note = Description of Artificial Sequence: Synthetic coding sequence
  source 1..384: mol_type = other DNA
atggagcacagcaccttcctgagcggcctggtgctggccaccctgctgagccaggtgagccccttcaagatccccatcgaggagctggaggacagagtgtttgtgaactgcaacaccagcatcacctgggtggagggcaccgtgggcaccctgctgagtgacatcacccggctggacctgggcaagaggatcctggacccccggggcatctaccgctgcaatggaacagacatctacaaggacaaggagagcacagtgcaggtgcactacagaacagctgacacccaggccctgctgagaaatgaccaggtgtaccagcccctgcgggacagagatgatgcccagtacagccacctgggcggcaactgggccaggaacaagtag

SEQ ID NO: 18919 - DNA, 1377 bp, synthetic construct
  misc_feature 1..1377: note = Description of Artificial Sequence: Synthetic coding sequence
  source 1..1377: mol_type = other DNA
atgaacagaggagtgcccttccgccacctgctgctggtgctgcagctggccctgctgcctgctgccacccagggcaagaaggtggtgctgggcaagaagggggacacagtggagctgacctgcacagccagccagaagaagagcatccagttccactggaagaacagcaaccagatcaagatcctgggcaaccagggcagcttcctgaccaagggccccagcaagctgaatgacagagctgacagcagaagaagcctgtgggaccagggcaacttccccctcatcatcaagaacctgaagattgaggacagcgacacctacatctgtgaggtggaggaccagaaggaggaggtgcagctgctggtgtttggcctgacagccaacagcgacacccacctgctgcagggccagagcctgaccctgaccctggagagccccccaggcagcagccccagcgtgcagtgccgcagcccccggggcaagaacatccagggcggcaagaccctgtctgtgtcccagctggagctgcaggacagcggcacctggacctgcaccgtgctgcagaaccagaagaaggtggagttcaagattgatattgtggtgctggccttccagaaggccagcagcatcgtgtacaagaaggagggggagcaggtggagttctccttccccctggccttcaccgtggagaagctgactggaagtggagagctgtggtggcaggccgagcgggccagcagcagcaagtcctggatcacctttgacctgaagaacaaggaggtgtctgtgaagagggtgacccaggaccccaagctgcagatgggcaagaagctgcccctgcacctgaccctgccccaggccctgccccagtatgccggcagcggcaacctgaccctggccctggaggccaagacaggcaagctgcaccaggaggtgaacctggtggtgatgagggccacccagctgcagaagaacctgacctgtgaggtgtggggccccaccagccccaagctgatgctgagcctgaagctggagaacaaggaggccaaggtgtccaagcgggagaaggctgtgtgggtgctgaaccctgaggccggcatgtggcagtgcctgctgagtgacagcggccaggtgctgctggagagcaacatcaaggtgctgcccacctggagcacccctgtgcagcccatggccctgattgtgctgggcggcgtggccggcctgctgctcttcatcggcctgggcatcttcttctgtgtgcgctgccgccacagaagacggcaggccgagaggatgagccagatcaagaggctgctgtctgagaagaagacctgccagtgcccccaccgcttccagaagacctgcagccccatctag

SEQ ID NO: 18920 - DNA, 723 bp, synthetic construct
  misc_feature 1..723: note = Description of Artificial Sequence: Synthetic coding sequence
  source 1..723: mol_type = other DNA
atgattgagacctacaaccagaccagccccaggtctgctgccaccggcctgcccatctccatgaagatcttcatgtacctgctgactgtgttcctgatcacccagatgattggcagcgccctgtttgctgtgtacctgcaccggcggctggacaagattgaagatgaaagaaacctgcatgaagattttgtgttcatgaagaccatccagcgctgcaacacaggagagaggagcctgagcctgctgaactgtgaggagatcaagagccagtttgagggctttgtgaaggacatcatgctgaacaaggaggagaccaagaaggagaacagctttgagatgcagaaggtgctgcagtgggccgagaagggctactacaccatgagcaacaacctggtgaccctggagaatggcaagcagctgactgtgaagaggcagggcctgtactacatctatgcccaggtgaccttctgcagcaaccgggaggccagcagccaggcccccttcatcgccagcctgtgcctgaagagccctggccgctttgagcgcatcctgctgcgggccgccaacacccacagcagcgccaagccctgtggccagcagagcatccacctgggcggcgtgtttgagctgcagcccggggcctctgtgtttgtgaatgtgacagaccccagccaggtgagccacggcaccggcttcaccagctttggcctgctgaagctgtag

SEQ ID NO: 18921 - DNA, 786 bp, synthetic construct
  misc_feature 1..786: note = Description of Artificial Sequence: Synthetic coding sequence
  source 1..786: mol_type = other DNA
atgattgagacctacaaccagaccagccccaggtctgctgccaccggcctgcccatctccatgaagatcttcatgtacctgctgactgtgttcctgatcacccagatgattggcagcgccctgtttgctgtgtacctgcaccggcggctggacaagattgaagatgaaagaaacctgcatgaagattttgtgttcatgaagaccatccagcgctgcaacacaggagagaggagcctgagcctgctgaactgtgaggagatcaagagccagtttgagggctttgtgaaggacatcatgctgaacaaggaggagaccaagaaggagaacagctttgagatgcagaagggggaccagaacccccagattgctgcccacgtgatcagcgaggccagcagcaagaccacctctgtgctgcagtgggccgagaagggctactacaccatgagcaacaacctggtgaccctggagaatggcaagcagctgactgtgaagaggcagggcctgtactacatctatgcccaggtgaccttctgcagcaaccgggaggccagcagccaggcccccttcatcgccagcctgtgcctgaagagccctggccgctttgagcgcatcctgctgcgggccgccaacacccacagcagcgccaagccctgtggccagcagagcatccacctgggcggcgtgtttgagctgcagcccggggcctctgtgtttgtgaatgtgacagaccccagccaggtgtcccatggaacaggcttcaccagctttggcctgctgaagctgtag

SEQ ID NO: 18922 - DNA, 612 bp, synthetic construct
  misc_feature 1..612: note = Description of Artificial Sequence: Synthetic coding sequence
  source 1..612: mol_type = other DNA
atggtgcggctgcccctgcagtgtgtgctgtggggctgcctgctgacagctgtgcaccctgagcccccaacagcctgccgggagaagcagtacctgatcaacagccagtgctgcagcctgtgccagcccggccagaagctggtgtctgactgcacagagttcacagaaacagagtgcctgccctgtggggagagcgagttcctggacacctggaaccgggagacccactgccaccagcacaagtactgtgaccccaacctgggcctgcgggtgcagcagaagggcaccagcgagacagacaccatctgcacctgtgaggagggctggcactgcaccagcgaggcctgtgagagctgtgtgctgcacaggagctgcagccctggctttggagtgaagcagatcgccaccggggtgtctgacaccatctgtgagccctgccctgtgggcttcttcagcaatgtgagcagcgcctttgagaagtgccacccctggaccaggagccctggcagcgctgagagccctggaggagacccccaccacctgcgggaccctgtgtgccaccccctgggcgccggcctgtaccagaagggcggccaggaggccaaccagtag

SEQ ID NO: 18923 - DNA, 786 bp, synthetic construct
  misc_feature 1..786: note = Description of Artificial Sequence: Synthetic coding sequence
  source 1..786: mol_type = other DNA
ggccgcagccccctgcggacccgggacagagtgctgaccaactgggaggatggcctgactgtggcctatggagctgtgaagctgatccagagcctgagcctgcagcctgtgggctggcagcagaactggggcctgagcagcccccccaccatgctgctgcccagccgggcccagagccccacagagctgcccctggcccccctggccgagcccaacacaggctgcagcagcctgctgtcctggcacagcaccagaggagagctgcacctgtgggccctgggcctgggccagatgggcggcagcaaatgtggcagccccctgagccccctggcccccaccctggaggccctgcggcggccctggtgtggccagcagggcgccggcggcacccggggcatcagcacagatcctccttctggaaaaggaggccgggcctggggccgggaccccctgccccgggagggcctgctgcggggcacagctgccccagctgctggaggagacctgaccccctgcctgagccggccccccacccccagcaggaacccccggcgcagcatcttccccaccatcttcctggcccccaccctgctgctgcagtgccggcggctgtacatggatgccaacagaagccccaggaggatggccaagagggtggccagccagtgccggcgggacagcgaggccgcccccacccaggagtgtggccacgtgggcaagcaggccgtgggccagagggcctggtgctgctgctgctgcggcgtgcgggtgcggggctggcactag

SEQ ID NO: 18924 - DNA, 834 bp, synthetic construct
  misc_feature 1..834: note = Description of Artificial Sequence: Synthetic coding sequence
  source 1..834: mol_type = other DNA
atggtgcggctgcccctgcagtgtgtgctgtggggctgcctgctgacagctgtgcaccctgagcccccaacagcctgccgggagaagcagtacctgatcaacagccagtgctgcagcctgtgccagcccggccagaagctggtgtctgactgcacagagttcacagaaacagagtgcctgccctgtggggagagcgagttcctggacacctggaaccgggagacccactgccaccagcacaagtactgtgaccccaacctgggcctgcgggtgcagcagaagggcaccagcgagacagacaccatctgcacctgtgaggagggctggcactgcaccagcgaggcctgtgagagctgtgtgctgcacaggagctgcagccctggctttggagtgaagcagatcgccaccggggtgtctgacaccatctgtgagccctgccctgtgggcttcttcagcaatgtgagcagcgcctttgagaagtgccacccctggaccagctgtgagaccaaggacctggtggtgcagcaggccggcaccaacaagacagatgtggtgtgtggcccccaggaccggctgcgggccctggtggtgatccccatcatcttcggcatcctgtttgccatcctgctggtgctggtgttcatcaagaaggtggccaagaagcccaccaacaaggccccccaccccaagcaggagccccaggagatcaacttcccagatgacctgcccggcagcaacacagctgcccctgtgcaggagaccctgcacggctgccagcctgtgacccaggaggatggcaaggagagccgcatctctgtgcaggagcggcagtag

SEQ ID NO: 18925 - DNA, 1086 bp, synthetic construct
  misc_feature 1..1086: note = Description of Artificial Sequence: Synthetic coding sequence
  source 1..1086: mol_type = other DNA
atggacaagttctggtggcacgccgcctggggcctgtgcctggtgcccctgagcctggcccagattgacctgaacatcacctgccgctttgctggggtcttccacgtggagaagaatggccgctacagcatcagcaggacagaagctgctgacctgtgcaaggccttcaacagcaccctgcccaccatggcccagatggagaaggccctgagcatcggctttgagacctgccgctatggcttcatcgagggccacgtggtgatcccccgcatccaccccaacagcatctgtgccgccaacaacacaggagtgtacatcctgaccagcaacaccagccagtatgacacctactgcttcaatgccagcgcccccccagaggaggactgcacctctgtgacagacctgcccaatgcctttgatggccccatcaccatcaccatcgtgaacagagatggcaccaggtatgtgcagaagggggagtaccgcaccaaccctgaggacatctaccccagcaaccccacagatgatgatgtgagcagcggcagcagcagcgagaggagcagcaccagcggcggctacatcttctacaccttcagcacagtgcaccccatcccagatgaggacagcccctggatcacagacagcacagaccgcatcccagccacccgggaccaggacaccttccaccccagcggcggcagccacaccacccacggcagcgagagtgatggccacagccacggcagccaggagggcggggccaacaccaccagcggccccatccgcaccccccagatccctgagtggctgatcatcctggccagcctgctggccctggccctgatcctggccgtgtgcatcgctgtgaacagcagaagaagatgtggccagaagaagaagctggtgatcaacagcggaaatggagctgtggaggacaggaagcccagcggcctgaatggagaggccagcaagagccaggagatggtgcacctggtgaacaaggagagcagcgagaccccagaccagttcatgacagcagatgagaccaggaacctgcagaatgtggacatgaagattggagtgtag

SEQ ID NO: 18926 - DNA, 420 bp, synthetic construct
  misc_feature 1..420: note = Description of Artificial Sequence: Synthetic coding sequence
  source 1..420: mol_type = other DNA
atggacaagttctggtggcacgccgcctggggcctgtgcctggtgcccctgagcctggcccagattgacctgaacatcacctgccgctttgctggggtcttccacgtggagaagaatggccgctacagcatcagcaggacagaagctgctgacctgtgcaaggccttcaacagcaccctgcccaccatggcccagatggagaaggccctgagcatcggctttgagacctgcagcctgcactgcagccagcagagcaagaaggtgtgggccgaggagaaggccagtgaccagcagtggcagtggagctgtggcggccagaaggccaagtggacccagaggcggggccagcaggtgtctggaaatggagccttcggggagcagggcgtggtgaggaacagcaggcctgtgtatgacagctag

SEQ ID NO: 18927 - DNA, 1023 bp, synthetic construct
  misc_feature 1..1023: note = Description of Artificial Sequence: Synthetic coding sequence
  source 1..1023: mol_type = other DNA
atggacaagttctggtggcacgccgcctggggcctgtgcctggtgcccctgagcctggcccagattgacctgaacatcacctgccgctttgctggggtcttccacgtggagaagaatggccgctacagcatcagcaggacagaagctgctgacctgtgcaaggccttcaacagcaccctgcccaccatggcccagatggagaaggccctgagcatcggctttgagacctgccgctatggcttcatcgagggccacgtggtgatcccccgcatccaccccaacagcatctgtgccgccaacaacacaggagtgtacatcctgaccagcaacaccagccagtatgacacctactgcttcaatgccagcgcccccccagaggaggactgcacctctgtgacagacctgcccaatgcctttgatggccccatcaccatcaccatcgtgaacagagatggcaccaggtatgtgcagaagggggagtaccgcaccaaccctgaggacatctaccccagcaaccccacagatgatgatgtgagcagcggcagcagcagcgagaggagcagcaccagcggcggctacatcttctacaccttcagcacagtgcaccccatcccagatgaggacagcccctggatcacagacagcacagaccgcatcccagccaccaggcacagccacggcagccaggagggcggggccaacaccaccagcggccccatccgcaccccccagatccctgagtggctgatcatcctggccagcctgctggccctggccctgatcctggccgtgtgcatcgctgtgaacagcagaagaagatgtggccagaagaagaagctggtgatcaacagcggaaatggagctgtggaggacaggaagcccagcggcctgaatggagaggccagcaagagccaggagatggtgcacctggtgaacaaggagagcagcgagaccccagaccagttcatgacagcagatgagaccaggaacctgcagaatgtggacatgaagattggagtgtag

SEQ ID NO: 18928 - DNA, 1191 bp, synthetic construct
  misc_feature 1..1191: note = Description of Artificial Sequence: Synthetic coding sequence
  source 1..1191: mol_type = other DNA
atggacaagttctggtggcacgccgcctggggcctgtgcctggtgcccctgagcctggcccagattgacctgaacatcacctgccgctttgctggggtcttccacgtggagaagaatggccgctacagcatcagcaggacagaagctgctgacctgtgcaaggccttcaacagcaccctgcccaccatggcccagatggagaaggccctgagcatcggctttgagacctgccgctatggcttcatcgagggccacgtggtgatcccccgcatccaccccaacagcatctgtgccgccaacaacacaggagtgtacatcctgaccagcaacaccagccagtatgacacctactgcttcaatgccagcgcccccccagaggaggactgcacctctgtgacagacctgcccaatgcctttgatggccccatcaccatcaccatcgtgaacagagatggcaccaggtatgtgcagaagggggagtaccgcaccaaccctgaggacatctaccccagcaaccccacagatgatgatgtgagcagcggcagcagcagcgagaggagcagcaccagcggcggctacatcttctacaccttcagcacagtgcaccccatcccagatgaggacagcccctggatcacagacagcacagaccgcatcccagccaccaacatggacagcagccacagcatcaccctgcagcccacagccaaccccaacacaggcctggtggaggacctggacagaacaggccccctgtccatgaccacccggcgggaccaggacaccttccaccccagcggcggcagccacaccacccacggcagcgagagtgatggccacagccacggcagccaggagggcggggccaacaccaccagcggccccatccgcaccccccagatccctgagtggctgatcatcctggccagcctgctggccctggccctgatcctggccgtgtgcatcgctgtgaacagcagaagaagatgtggccagaagaagaagctggtgatcaacagcggaaatggagctgtggaggacaggaagcccagcggcctgaatggagaggccagcaagagccaggagatggtgcacctggtgaacaaggagagcagcgagaccccagaccagttcatgacagcagatgagaccaggaacctgcagaatgtggacatgaagattggagtgtag

SEQ ID NO: 18929 - DNA, 2100 bp, synthetic construct
  misc_feature 1..2100: note = Description of Artificial Sequence: Synthetic coding sequence
  source 1..2100: mol_type = other DNA
atggacaagttctggtggcacgccgcctggggcctgtgcctggtgcccctgagcctggcccagattgacctgaacatcacctgccgctttgctggggtcttccacgtggagaagaatggccgctacagcatcagcaggacagaagctgctgacctgtgcaaggccttcaacagcaccctgcccaccatggcccagatggagaaggccctgagcatcggctttgagacctgccgctatggcttcatcgagggccacgtggtgatcccccgcatccaccccaacagcatctgtgccgccaacaacacaggagtgtacatcctgaccagcaacaccagccagtatgacacctactgcttcaatgccagcgcccccccagaggaggactgcacctctgtgacagacctgcccaatgcctttgatggccccatcaccatcaccatcgtgaacagagatggcaccaggtatgtgcagaagggggagtaccgcaccaaccctgaggacatctaccccagcaaccccacagatgatgatgtgagcagcggcagcagcagcgagaggagcagcaccagcggcggctacatcttctacaccttcagcacagtgcaccccatcccagatgaggacagcccctggatcacagacagcacagaccgcatcccagccaccagcaccagcagcaacaccatctctgctggctgggagcccaatgaggagaatgaagatgagcgggacagacacctgtccttcagcggcagcggcattgatgatgatgaggacttcatcagcagcaccatcagcaccaccccccgggcctttgaccacaccaagcagaaccaggactggacccagtggaaccccagccacagcaaccctgaggtgctgctgcagaccaccaccaggatgacagatgtggacagaaatggcaccacagcctatgagggcaactggaaccctgaggcccaccccccactcatccaccacgagcaccacgaggaggaggagaccccccacagcaccagcaccatccaggccacccccagcagcaccacagaggagacagccacccagaaggagcagtggtttggaaaccgctggcatgagggctaccggcagacccccaaggaggacagccacagcaccactggaacagctgctgccagcgcccacaccagccaccccatgcagggccgcaccacccccagccctgaggacagctcctggacagacttcttcaaccccatcagccaccccatgggccggggccaccaggccggccgcaggatggacatggacagcagccacagcatcaccctgcagcccacagccaaccccaacacaggcctggtggaggacctggacagaacaggccccctgtccatgaccacccagcagagcaacagccagagcttcagcaccagccatgagggcctggaggaggacaaggaccaccccaccaccagcaccctgaccagcagcaacagaaatgatgtgactggaggaagaagagaccccaaccacagcgagggcagcaccaccctgctggagggctacaccagccactacccccacaccaaggagagcaggaccttcatccctgtgaccagcgccaagacaggcagctttggagtgacagctgtgacagtgggggacagcaacagcaatgtgaacagaagcctgagcggggaccaggacaccttccaccccagcggcggcagccacaccacccacggcagcgagagtgatggccacagccacggcagccaggagggcggggccaacaccaccagcggccccatccgcaccccccagatccctgagtggctgatcatcctggccagcctgctggccctggccctgatcctggccgtgtgcatcgctgtgaacagcagaagaagatgtggccagaagaagaagctggtgatcaacagcggaaatggagctgtggaggacaggaagcccagcggcctgaatggagaggccagcaagagccaggagatggtgcacctggtgaacaaggagagcagcgagaccccagaccagttcatgacagcagatgagaccaggaacctgcagaatgtggacatgaagattggagtgtag

SEQ ID NO: 18930 - DNA, 243 bp, synthetic construct
  misc_feature 1..243: note = Description of Artificial Sequence: Synthetic coding sequence
  source 1..243: mol_type = other DNA
atggacaagttctggtggcacgccgcctggggcctgtgcctggtgcccctgagcctggcccagattgacctgaacatcacctgccgctttgctggggtcttccacgtggagaagaatggccgctacagcatcagcaggacagaagctgctgacctgtgcaaggccttcaacagcaccctgcccaccatggcccagatggagaaggccctgagcatcggctttgagacctgcagcagcacctag

SEQ ID NO: 18931 - DNA, 2229 bp, synthetic construct
  misc_feature 1..2229: note = Description of Artificial Sequence: Synthetic coding sequence
  source 1..2229: mol_type = other DNA
atggacaagttctggtggcacgccgcctggggcctgtgcctggtgcccctgagcctggcccagattgacctgaacatcacctgccgctttgctggggtcttccacgtggagaagaatggccgctacagcatcagcaggacagaagctgctgacctgtgcaaggccttcaacagcaccctgcccaccatggcccagatggagaaggccctgagcatcggctttgagacctgccgctatggcttcatcgagggccacgtggtgatcccccgcatccaccccaacagcatctgtgccgccaacaacacaggagtgtacatcctgaccagcaacaccagccagtatgacacctactgcttcaatgccagcgcccccccagaggaggactgcacctctgtgacagacctgcccaatgcctttgatggccccatcaccatcaccatcgtgaacagagatggcaccaggtatgtgcagaagggggagtaccgcaccaaccctgaggacatctaccccagcaaccccacagatgatgatgtgagcagcggcagcagcagcgagaggagcagcaccagcggcggctacatcttctacaccttcagcacagtgcaccccatcccagatgaggacagcccctggatcacagacagcacagaccgcatcccagccaccaccctgatgagcaccagcgccacagccacagaaacagccaccaagaggcaggagacctgggactggttctcctggctgttcctgcccagcgagagcaagaaccacctgcacaccaccacccagatggccggcaccagcagcaacaccatctctgctggctgggagcccaatgaagaaaatgaagatgagcgggacagacacctgtccttcagcggcagcggcattgatgatgatgaggacttcatcagcagcaccatcagcaccaccccccgggcctttgaccacaccaagcagaaccaggactggacccagtggaaccccagccacagcaaccctgaggtgctgctgcagaccaccaccaggatgacagatgtggacagaaatggcaccacagcctatgagggcaactggaaccctgaggcccaccccccactcatccaccacgagcaccacgaggaggaggagaccccccacagcaccagcaccatccaggccacccccagcagcaccacagaggagacagccacccagaaggagcagtggtttggaaaccgctggcatgagggctaccggcagacccccaaggaggacagccacagcaccaccggcacagctgctgccagcgcccacaccagccaccccatgcagggccgcaccacccccagccctgaggacagctcctggacagacttcttcaaccccatcagccaccccatgggccggggccaccaggccggccgcaggatggacatggacagcagccacagcatcaccctgcagcccacagccaaccccaacacaggcctggtggaggacctggacagaacaggccccctgtccatgaccacccagcagagcaacagccagagcttcagcaccagccatgagggcctggaggaggacaaggaccaccccaccaccagcaccctgaccagcagcaacagaaatgatgtgactggaggccggcgggaccccaaccacagcgagggcagcaccaccctgctggagggctacaccagccactacccccacaccaaggagagcaggaccttcatccctgtgaccagcgccaagacaggcagctttggagtgacagctgtgacagtgggggacagcaacagcaatgtgaacagaagcctgagcggggaccaggacaccttccaccccagcggcggcagccacaccacccacggcagcgagagtgatggccacagccacggcagccaggagggcggggccaacaccaccagcggccccatccgcaccccccagatccctgagtggctgatcatcctggccagcctgctggccctggccctgatcctggccgtgtgcatcgctgtgaacagcagaagaagatgtggccagaagaagaagctggtgatcaacagcggaaatggagctgtggaggacaggaagcccagcggcctgaatggagaggccagcaagagccaggagatggtgcacctggtgaacaaggagagcagcgagaccccagaccagttcatgacagcagatgagaccaggaacctgcagaatgtggacatgaagattggagtgtag

SEQ ID NO: 18932 - DNA, 2145 bp, synthetic construct
  misc_feature 1..2145: note = Description of Artificial Sequence: Synthetic coding sequence
  source 1..2145: mol_type = other DNA
atggacaagttctggtggcacgccgcctggggcctgtgcctggtgcccctgagcctggcccagattgacctgaacatcacctgccgctttgctggggtcttccacgtggagaagaatggccgctacagcatcagcaggacagaagctgctgacctgtgcaaggccttcaacagcaccctgcccaccatggcccagatggagaaggccctgagcatcggctttgagacctgccgctatggcttcatcgagggccacgtggtgatcccccgcatccaccccaacagcatctgtgccgccaacaacacaggagtgtacatcctgaccagcaacaccagccagtatgacacctactgcttcaatgccagcgcccccccagaggaggactgcacctctgtgacagacctgcccaatgcctttgatggccccatcaccatcaccatcgtgaacagagatggcaccaggtatgtgcagaagggggagtaccgcaccaaccctgaggacatctaccccagcaaccccacagatgatgatgtgagcagcggcagcagcagcgagaggagcagcaccagcggcggctacatcttctacaccttcagcacagtgcaccccatcccagatgaggacagcccctggatcacagacagcacagaccgcatcccagccaccaccctgatgagcaccagcgccacagccacagaaacagccaccaagaggcaggagacctgggactggttctcctggctgttcctgcccagcgagagcaagaaccacctgcacaccaccacccagatggccggcaccagcagcaacaccatctctgctggctgggagcccaatgaagaaaatgaagatgagcgggacagacacctgtccttcagcggcagcggcattgatgatgatgaggacttcatcagcagcaccatcagcaccaccccccgggcctttgaccacaccaagcagaaccaggactggacccagtggaaccccagccacagcaaccctgaggtgctgctgcagaccaccaccaggatgacagcagatgtggacagaaatggcaccacagcctatgagggcaactggaaccctgaggcccaccccccactcatccaccacgagcaccacgaggaggaggagaccccccacagcaccagcaccatccaggccacccccagcagcaccacagaggagacagccacccagaaggagcagtggtttggaaaccgctggcatgagggctaccggcagacccccaaggaggacagccacagcaccactggaacagctgctgccagcgcccacaccagccaccccatgcagggccgcaccacccccagccctgaggacagctcctggacagacttcttcaaccccatcagccaccccatgggccggggccaccaggccggccgcaggatggacatggacagcagccacagcatcaccctgcagcccacagccaaccccaacacaggcctggtggaggacctggacagaacaggccccctgtccatgaccaccaggaacagaaatgatgtgactggaggccggcgggaccccaaccacagcgagggcagcaccaccctgctggagggctacaccagccactacccccacaccaaggagagcaggaccttcatccctgtgaccagcgccaagacaggcagctttggagtgacagctgtgacagtgggggacagcaacagcaatgtgaacagaagcctgagcggggaccaggacaccttccaccccagcggcggcagccacaccacccacggcagcgagagtgatggccacagccacggcagccaggagggcggggccaacaccaccagcggccccatccgcaccccccagatccctgagtggctgatcatcctggccagcctgctggccctggccctgatcctggccgtgtgcatcgctgtgaacagcagaagaagatgtggccagaagaagaagctggtgatcaacagcggaaatggagctgtggaggacaggaagcccagcggcctgaatggagaggccagcaagagccaggagatggtgcacctggtgaacaaggagagcagcgagaccccagaccagttcatgacagcagatgagaccaggaacctgcagaatgtggacatgaagattggagtgtag

SEQ ID NO: 18933 - DNA, 1482 bp, synthetic construct
  misc_feature 1..1482: note = Description of Artificial Sequence: Synthetic coding sequence
  source 1..1482: mol_type = other DNA
atggacaagttctggtggcacgccgcctggggcctgtgcctggtgcccctgagcctggcccagattgacctgaacatcacctgccgctttgctggggtcttccacgtggagaagaatggccgctacagcatcagcaggacagaagctgctgacctgtgcaaggccttcaacagcaccctgcccaccatggcccagatggagaaggccctgagcatcggctttgagacctgccgctatggcttcatcgagggccacgtggtgatcccccgcatccaccccaacagcatctgtgccgccaacaacacaggagtgtacatcctgaccagcaacaccagccagtatgacacctactgcttcaatgccagcgcccccccagaggaggactgcacctctgtgacagacctgcccaatgcctttgatggccccatcaccatcaccatcgtgaacagagatggcaccaggtatgtgcagaagggggagtaccgcaccaaccctgaggacatctaccccagcaaccccacagatgatgatgtgagcagcggcagcagcagcgagaggagcagcaccagcggcggctacatcttctacaccttcagcacagtgcaccccatcccagatgaggacagcccctggatcacagacagcacagaccgcatcccagccaccaacatggacagcagccacagcatcaccctgcagcccacagccaaccccaacacaggcctggtggaggacctggacagaacaggccccctgtccatgaccacccagcagagcaacagccagagcttcagcaccagccatgagggcctggaggaggacaaggaccaccccaccaccagcaccctgaccagcagcaacagaaatgatgtgactggaggaagaagagaccccaaccacagcgagggcagcaccaccctgctggagggctacaccagccactacccccacaccaaggagagcaggaccttcatccctgtgaccagcgccaagacaggcagctttggagtgacagctgtgacagtgggggacagcaacagcaatgtgaacagaagcctgagcggggaccaggacaccttccaccccagcggcggcagccacaccacccacggcagcgagagtgatggccacagccacggcagccaggagggcggggccaacaccaccagcggccccatccgcaccccccagatccctgagtggctgatcatcctggccagcctgctggccctggccctgatcctggccgtgtgcatcgctgtgaacagcagaagaagatgtggccagaagaagaagctggtgatcaacagcggaaatggagctgtggaggacaggaagcccagcggcctgaatggagaggccagcaagagccaggagatggtgcacctggtgaacaaggagagcagcgagaccccagaccagttcatgacagcagatgagaccaggaacctgcagaatgtggacatgaagattggagtgtag

SEQ ID NO: 18934 - DNA, 1290 bp, synthetic construct
  misc_feature 1..1290: note = Description of Artificial Sequence: Synthetic coding sequence
  source 1..1290: mol_type = other DNA
atggacaagttctggtggcacgccgcctggggcctgtgcctggtgcccctgagcctggcccagattgacctgaacatcacctgccgctttgctggggtcttccacgtggagaagaatggccgctacagcatcagcaggacagaagctgctgacctgtgcaaggccttcaacagcaccctgcccaccatggcccagatggagaaggccctgagcatcggctttgagacctgccgctatggcttcatcgagggccacgtggtgatcccccgcatccaccccaacagcatctgtgccgccaacaacacaggagtgtacatcctgaccagcaacaccagccagtatgacacctactgcttcaatgccagcgcccccccagaggaggactgcacctctgtgacagacctgcccaatgcctttgatggccccatcaccatcaccatcgtgaacagagatggcaccaggtatgtgcagaagggggagtaccgcaccaaccctgaggacatctaccccagcaaccccacagatgatgatgtgagcagcggcagcagcagcgagaggagcagcaccagcggcggctacatcttctacaccttcagcacagtgcaccccatcccagatgaggacagcccctggatcacagacagcacagaccgcatcccagccaccaacagaaatgatgtgactggaggaagaagagaccccaaccacagcgagggcagcaccaccctgctggagggctacaccagccactacccccacaccaaggagagcaggaccttcatccctgtgaccagcgccaagacaggcagctttggagtgacagctgtgacagtgggggacagcaacagcaatgtgaacagaagcctgagcggggaccaggacaccttccaccccagcggcggcagccacaccacccacggcagcgagagtgatggccacagccacggcagccaggagggcggggccaacaccaccagcggccccatccgcaccccccagatccctgagtggctgatcatcctggccagcctgctggccctggccctgatcctggccgtgtgcatcgctgtgaacagcagaagaagatgtggccagaagaagaagctggtgatcaacagcggaaatggagctgtggaggacaggaagcccagcggcctgaatggagaggccagcaagagccaggagatggtgcacctggtgaacaaggagagcagcgagaccccagaccagttcatgacagcagatgagaccaggaacctgcagaatgtggacatgaagattggagtgtag

SEQ ID NO: 18935 - DNA, 2025 bp, synthetic construct
  misc_feature 1..2025: note = Description of Artificial Sequence: Synthetic coding sequence
  source 1..2025: mol_type = other DNA
atggacaagttctggtggcacgccgcctggggcctgtgcctggtgcccctgagcctggcccagattgacctgaacatcacctgccgctttgctggggtcttccacgtggagaagaatggccgctacagcatcagcaggacagaagctgctgacctgtgcaaggccttcaacagcaccctgcccaccatggcccagatggagaaggccctgagcatcggctttgagacctgccgctatggcttcatcgagggccacgtggtgatcccccgcatccaccccaacagcatctgtgccgccaacaacacaggagtgtacatcctgaccagcaacaccagccagtatgacacctactgcttcaatgccagcgcccccccagaggaggactgcacctctgtgacagacctgcccaatgcctttgatggccccatcaccatcaccatcgtgaacagagatggcaccaggtatgtgcagaagggggagtaccgcaccaaccctgaggacatctaccccagcaaccccacagatgatgatgtgagcagcggcagcagcagcgagaggagcagcaccagcggcggctacatcttctacaccttcagcacagtgcaccccatcccagatgaggacagcccctggatcacagacagcacagaccgcatcccagccaccaccctgatgagcaccagcgccacagccacagaaacagccaccaagaggcaggagacctgggactggttctcctggctgttcctgcccagcgagagcaagaaccacctgcacaccaccacccagatggccggcaccagcagcaacaccatctctgctggctgggagcccaatgaagaaaatgaagatgagcgggacagacacctgtccttcagcggcagcggcattgatgatgatgaggacttcatcagcagcaccatcagcaccaccccccgggcctttgaccacaccaagcagaaccaggactggacccagtggaaccccagccacagcaaccctgaggtgctgctgcagaccaccaccaggatgacagatgtggacagaaatggcaccacagcctatgagggcaactggaaccctgaggcccaccccccactcatccaccacgagcaccacgaggaggaggagaccccccacagcaccagcaccatccaggccacccccagcagcaccacagaggagacagccacccagaaggagcagtggtttggaaaccgctggcatgagggctaccggcagacccccaaggaggacagccacagcaccaccggcacagctgctgccagcgcccacaccagccaccccatgcagggccgcaccacccccagccctgaggacagctcctggacagacttcttcaaccccatcagccaccccatgggccggggccaccaggccggccgcaggatggacatggacagcagccacagcatcaccctgcagcccacagccaaccccaacacaggcctggtggaggacctggacagaacaggccccctgtccatgaccacccagcagagcaacagccagagcttcagcaccagccatgagggcctggaggaggacaaggaccaccccaccaccagcaccctgaccagcagccgggaccaggacaccttccaccccagcggcggcagccacaccacccacggcagcgagagtgatggccacagccacggcagccaggagggcggggccaacaccaccagcggccccatccgcaccccccagatccctgagtggctgatcatcctggccagcctgctggccctggccctgatcctggccgtgtgcatcgctgtgaacagcagaagaagatgtggccagaagaagaagctggtgatcaacagcggaaatggagctgtggaggacaggaagcccagcggcctgaatggagaggccagcaagagccaggagatggtgcacctggtgaacaaggagagcagcgagaccccagaccagttcatgacagcagatgagaccaggaacctgcagaatgtggacatgaagattggagtgtag

SEQ ID NO: 18936 - DNA, 2100 bp, synthetic construct
  misc_feature 1..2100: note = Description of Artificial Sequence: Synthetic coding sequence
  source 1..2100: mol_type = other DNA
atggacaagttctggtggcacgccgcctggggcctgtgcctggtgcccctgagcctggcccagattgacctgaacatcacctgccgctttgctggggtcttccacgtggagaagaatggccgctacagcatcagcaggacagaagctgctgacctgtgcaaggccttcaacagcaccctgcccaccatggcccagatggagaaggccctgagcatcggctttgagacctgccgctatggcttcatcgagggccacgtggtgatcccccgcatccaccccaacagcatctgtgccgccaacaacacaggagtgtacatcctgaccagcaacaccagccagtatgacacctactgcttcaatgccagcgcccccccagaggaggactgcacctctgtgacagacctgcccaatgcctttgatggccccatcaccatcaccatcgtgaacagagatggcaccaggtatgtgcagaagggggagtaccgcaccaaccctgaggacatctaccccagcaaccccacagatgatgatgtgagcagcggcagcagcagcgagaggagcagcaccagcggcggctacatcttctacaccttcagcacagtgcaccccatcccagatgaggacagcccctggatcacagacagcacagaccgcatcccagccaccaccctgatgagcaccagcgccacagccacagaaacagccaccaagaggcaggagacctgggactggttctcctggctgttcctgcccagcgagagcaagaaccacctgcacaccaccacccagatggccggcaccagcagcaacaccatctctgctggctgggagcccaatgaagaaaatgaagatgagcgggacagacacctgtccttcagcggcagcggcattgatgatgatgaggacttcatcagcagcaccatcagcaccaccccccgggcctttgaccacaccaagcagaaccaggactggacccagtggaaccccagccacagcaaccctgaggtgctgctgcagaccaccaccaggatgacagatgtggacagaaatggcaccacagcctatgagggcaactggaaccctgaggcccaccccccactcatccaccacgagcaccacgaggaggaggagaccccccacagcaccagcaccacagccagcgcccacaccagccaccccatgcagggccgcaccacccccagccctgaggacagctcctggacagacttcttcaaccccatcagccaccccatgggccggggccaccaggccggccgcaggatggacatggacagcagccacagcatcaccctgcagcccacagccaaccccaacacaggcctggtggaggacctggacagaacaggccccctgtccatgaccacccagcagagcaacagccagagcttcagcaccagccatgagggcctggaggaggacaaggaccaccccaccaccagcaccctgaccagcagcaacagaaatgatgtgactggaggaagaagagaccccaaccacagcgagggcagcaccaccctgctggagggctacaccagccactacccccacaccaaggagagcaggaccttcatccctgtgaccagcgccaagacaggcagctttggagtgacagctgtgacagtgggggacagcaacagcaatgtgaacagaagcctgagcggggaccaggacaccttccaccccagcggcggcagccacaccacccacggcagcgagagtgatggccacagccacggcagccaggagggcggggccaacaccaccagcggccccatccgcaccccccagatccctgagtggctgatcatcctggccagcctgctggccctggccctgatcctggccgtgtgcatcgctgtgaacagcagaagaagatgtggccagaagaagaagctggtgatcaacagcggaaatggagctgtggaggacaggaagcccagcggcctgaatggagaggccagcaagagccaggagatggtgcacctggtgaacaaggagagcagcgagaccccagaccagttcatgacagcagatgagaccaggaacctgcagaatgtggacatgaagattggagtgtag

SEQ ID NO: 18937 - DNA, 237 bp, synthetic construct
  misc_feature 1..237: note = Description of Artificial Sequence: Synthetic coding sequence
  source 1..237: mol_type = other DNA
atggacaagttctggtggcacgccgcctggggcctgtgcctggtgcccctgagcctggcccagattgacctgaacatcacctgccgctttgctggggtcttccacgtggagaagaatggccgctacagcatcagcaggacagaagctgctgacctgtgcaaggccttcaacagcaccctgcccaccatggcccagatggagaaggccctgagcatcggctttgagacctgcaggtag

SEQ ID NO: 18938 - DNA, 885 bp, synthetic construct
  misc_feature 1..885: note = Description of Artificial Sequence: Synthetic coding sequence
  source 1..885: mol_type = other DNA
tgagacaagttctggtggcacgccgcctggggcctgtgcctggtgcccctgagcctggcccagattgacctgaacatcacctgccgctttgctggggtcttccacgtggagaagaatggccgctacagcatcagcaggacagaagctgctgacctgtgcaaggccttcaacagcaccctgcccaccatggcccagatggagaaggccctgagcatcggctttgagacctgccgctatggcttcatcgagggccacgtggtgatcccccgcatccaccccaacagcatctgtgccgccaacaacacaggagtgtacatcctgaccagcaacaccagccagtatgacacctactgcttcaatgccagcgcccccccagaggaggactgcacctctgtgacagacctgcccaatgcctttgatggccccatcaccatcaccatcgtgaacagagatggcaccaggtatgtgcagaagggggagtaccgcaccaaccctgaggacatctaccccagcaaccccacagatgatgatgtgagcagcggcagcagcagcgagaggagcagcaccagcggcggctacatcttctacaccttcagcacagtgcaccccatcccagatgaggacagcccctggatcacagacagcacagaccgcatcccagccacccgggaccaggacaccttccaccccagcggcggcagccacaccacccacggcagcgagagtgatggccacagccacggcagccaggagggcggggccaacaccaccagcggccccatccgcaccccccagatccctgagtggctgatcatcctggccagcctgctggccctggccctgatcctggccgtgtgcatcgctgtgaacagccgccgctcctag

SEQ ID NO: 18939 - DNA, 918 bp, synthetic construct
  misc_feature 1..918: note = Description of Artificial Sequence: Synthetic coding sequence
  source 1..918: mol_type = other DNA
atgtggcccctggtggccgccctgctgctgggcagcgcctgctgcggcagcgcccagctgctcttcaacaagaccaagtctgtggagttcaccttctgcaatgacacagtggtgatcccctgctttgtgaccaacatggaggcccagaacaccacagaggtgtatgtgaagtggaagttcaagggccgggacatctacacctttgatggagccctgaacaagagcacagtgcccacagacttcagcagcgccaagattgaggtgtcccagctgctgaagggagatgccagcctgaagatggacaagagtgatgctgtgagccacactggaaactacacctgtgaggtgacagagctgacccgggagggggagaccatcatcgagctgaagtacagagtggtgtcctggttcagccccaatgaaaacatcctgattgtcatcttccccatctttgccatcctgctcttctggggccagtttggcatcaagaccctgaagtacagaagtggcggcatggatgagaagaccatcgccctgctggtggccggcctggtgatcaccgtgattgtgattgtgggcgccatcctgtttgtgcctggagagtacagcctgaagaatgccaccggcctgggcctgattgtgaccagcacaggcatcctgatcctgctgcactactacgtgttcagcacagccatcggcctgaccagctttgtgattgccatcctggtgatccaggtgattgcctacatcctggccgtggtgggcctgagcctgtgcatcgccgcctgcatccccatgcacggccccctgctgatcagcggcctgagcatcctggccctggcccagctgctgggcctggtgtacatgaagtttgtggccagcaaccagaagaccatccagcccccaagaaacaactag

SEQ ID NO: 18940 - DNA, 972 bp, synthetic construct
  misc_feature 1..972: note = Description of Artificial Sequence: Synthetic coding sequence
  source 1..972: mol_type = other DNA
atgtggcccctggtggccgccctgctgctgggcagcgcctgctgcggcagcgcccagctgctcttcaacaagaccaagtctgtggagttcaccttctgcaatgacacagtggtgatcccctgctttgtgaccaacatggaggcccagaacaccacagaggtgtatgtgaagtggaagttcaagggccgggacatctacacctttgatggagccctgaacaagagcacagtgcccacagacttcagcagcgccaagattgaggtgtcccagctgctgaagggagatgccagcctgaagatggacaagagtgatgctgtgagccacactggaaactacacctgtgaggtgacagagctgacccgggagggggagaccatcatcgagctgaagtacagagtggtgtcctggttcagccccaatgaaaacatcctgattgtcatcttccccatctttgccatcctgctcttctggggccagtttggcatcaagaccctgaagtacagaagtggcggcatggatgagaagaccatcgccctgctggtggccggcctggtgatcaccgtgattgtgattgtgggcgccatcctgtttgtgcctggagagtacagcctgaagaatgccaccggcctgggcctgattgtgaccagcacaggcatcctgatcctgctgcactactacgtgttcagcacagccatcggcctgaccagctttgtgattgccatcctggtgatccaggtgattgcctacatcctggccgtggtgggcctgagcctgtgcatcgccgcctgcatccccatgcacggccccctgctgatcagcggcctgagcatcctggccctggcccagctgctgggcctggtgtacatgaagtttgtggccagcaaccagaagaccatccagccccccaggaaggctgtggaggagcccctgaatgccttcaaggagagcaagggcatgatgaatgatgaatag

SEQ ID NO: 18941 - DNA, 1488 bp, synthetic construct
  misc_feature 1..1488: note = Description of Artificial Sequence: Synthetic coding sequence
  source 1..1488: mol_type = other DNA
atgcccatgggcagcctgcagcccctggccaccctgtacctgctgggcatgctggtggccagctgcctgggccgcctgtcctggtatgaccctgacttccaggcccggctgaccaggagcaacagcaagtgccagggccagctggaggtgtacctgaaggatggctggcacatggtgtgcagccagagctggggccgcagcagcaagcagtgggaggaccccagccaggccagcaaggtgtgccagaggctgaactgtggggtgcccctgagcctgggccccttcctggtgacctacaccccccagagcagcatcatctgctacggccagctgggcagcttcagcaactgcagccacagcagaaatgacatgtgccacagcctgggcctgacctgcctggagccccagaagaccaccccacccaccacccggcccccacccaccaccaccccagagcccacagccccaccccggctgcagctggtggcccagagcggcggccagcactgtgccggcgtggtggagttctacagcggcagcctgggcggcaccatctcctatgaggcccaggacaagacccaggacctggagaacttcctgtgcaacaacctgcagtgtggcagcttcctgaagcacctgcctgagacagaggccggccgggcccaggaccccggggagccccgggagcaccagcccctgcccatccagtggaagatccagaacagcagctgcaccagcctggagcactgcttcaggaagatcaagccccagaagagcggccgggtgctggccctgctgtgcagcggcttccagcccaaggtgcagagccggctggtgggcggcagcagcatctgtgagggcaccgtggaggtgcggcagggcgcccagtgggccgccctgtgtgacagcagcagcgcccggagcagcctgcgctgggaggaggtgtgccgggagcagcagtgtggctctgtgaacagctacagagtgctggatgctggggaccccaccagccggggcctcttctgcccccaccagaagctgagccagtgccacgagctgtgggagaggaacagctactgcaagaaggtgtttgtgacctgccaggaccccaacccagctggcctggccgccggcaccgtggccagcatcatcctggccctggtgctgctggtggtgctgctggtggtgtgtggccccctggcctacaagaagctggtgaagaagttccggcagaagaagcagaggcagtggattggccccaccggcatgaaccagaacatgtccttccacaggaaccacacagccaccgtgcgcagccatgctgagaaccccacagccagccacgtggacaatgagtacagccagccccccaggaacagccacctgagcgcctacccagccctggagggcgccctgcacaggagctccatgcagcctgacaacagcagtgacagcgactatgacctgcacggggcccagaggctgtag

SEQ ID NO: 18942 - DNA, 582 bp, synthetic construct
  misc_feature 1..582: note = Description of Artificial Sequence: Synthetic coding sequence
  source 1..582: mol_type = other DNA
atgcctgaggagggcagcggctgcagcgtgagaagaagaccctacggctgtgtgctgcgggccgccctggtgcccctggtggccggcctggtgatctgcctggtggtgtgcatccagagatttgcccaggcccagcagcagctgcccctggagagcctgggctgggatgtggccgagctgcagctgaaccacacaggcccccagcaggacccccggctgtactggcagggcggccctgccctgggccgctccttcctgcacggccctgagctggacaagggccagctgcgcatccacagagatggcatctacatggtgcacatccaggtgaccctggccatctgcagcagcaccacagccagccgccaccaccccaccaccctggccgtgggcatctgcagccctgccagccgcagcatcagcctgctgcggctgtccttccaccagggctgcaccatcgccagccagaggctgacccccctggcccggggggacaccctgtgcaccaacctgaccggcaccctgctgcccagcaggaacacagatgagaccttcttcggcgtgcagtgggtgcggccctag

SEQ ID NO: 18943 - DNA, 627 bp, synthetic construct
  misc_feature 1..627: note = Description of Artificial Sequence: Synthetic coding sequence
  source 1..627: mol_type = other DNA
atgcctgaggagggcagcggctgcagcgtgagaagaagaccctacggctgtgtgctgcgggccgccctggtgcccctggtggccggcctggtgatctgcctggtggtgtgcatccagagatttgcccaggcccagcagcagctgcccctggagagcctgggctgggatgtggccgagctgcagctgaaccacacaggcccccagcaggacccccggctgtactggcagggcggccctgccctgggccgctccttcctgcacggccctgagctggacaagggccagctgcgcatccacagagatggcatctacatggtgcacatccaggtgaccctggccatctgcagcagcaccacagccagccgccaccaccccaccaccctggccgtgggcatctgcagccctgccagccgcagcatcagcctgctgcggctgtccttccaccagggcctgtttggcttctggaactggggcctgaaggtgaagtgcttcctgcggcacctgatctggacagcccactgcttcatccccctgacccagctggtgttcatgcaggccctgcagagctggaggaaccaccactgcagccacttcacagatgaggagaacagaggagtgaacagatag

SEQ ID NO: 18944 - DNA, 1305 bp, synthetic construct
  misc_feature 1..1305: note = Description of Artificial Sequence: Synthetic coding sequence
  source 1..1305: mol_type = other DNA
atgtctgcagatggagctgaggctgatggcagcacccaggtgacagtggaggagcctgtgcagcagcccagcgtggtggacagagtggcctccatgcccctcatcagcagcacctgtgacatggtgtctgctgcctatgccagcaccaaggagagctacccccacatcaagacagtgtgtgatgctgctgagaagggcgtgaggaccctgacagctgctgctgtgtctggggcccagcccatcctgagcaagctggagccccagatcgccagcgcctctgaatatgcccaccggggcctggacaagctggaggagaacctgcccatcctgcagcagcccacagagaaggtgctggccgacaccaaggagctggtgagcagcaaggtgtctggggcccaggagatggtgagcagcgccaaggacacagtggccacccagctgtctgaggccgtggatgccaccagaggagctgtgcagagcggcgtggacaagaccaagtctgtggtgactggaggagtgcagagcgtgatgggcagccggctgggccagatggtgctgtctggagtggacacagtgctgggcaagtctgaggagtgggccgacaaccacctgcccctgacagatgctgagctggcccgcatcgccaccagcctggatggctttgatgtggcctctgtgcagcagcagaggcaggagcagagctactttgtgcggctgggcagcctgtctgagcggctgcggcagcacgcctatgagcacagcctgggcaagctgcgggccaccaagcagagggcccaggaggccctgctgcagctgagccaggtgctgagcctgatggagaccgtgaagcagggcgtggaccagaagctggtggagggccaggagaagctgcaccagatgtggctgtcctggaaccagaagcagctgcagggccctgagaaggagccccccaagccagagcaggtggagagccgggccctgaccatgttccgggacatcgcccagcagctgcaggccacctgcaccagcctgggcagcagcatccagggcctgcccaccaacgtgaaggaccaggtgcagcaggcccggcggcaggtggaggacctgcaggccaccttcagcagcatccacagcttccaggacctgagcagcagcatcctggcccagagccgggagcgggtggccagcgcccgggaggccctggaccacatggtggagtatgtggcccagaacacccctgtgacctggctggtgggcccctttgcccctggcatcacagagaaggcccctgaggagaagaagtag

SEQ ID NO: 18945 - DNA, 567 bp, synthetic construct
  misc_feature 1..567: note = Description of Artificial Sequence: Synthetic coding sequence
  source 1..567: mol_type = other DNA
atgcctgggggccctggggtgctgcaggccctgcctgccaccatcttcctgctcttcctgctgtctgctgtgtacctgggccctggctgccaggccctgtggatgcacaaggtgcctgccagcctgatggtgtccctgggggaggatgcccacttccagtgcccccacaacagcagcaacaatgccaacgtgacctggtggagggtgctgcacggcaactacacctggcccccagagttcctgggccctggagaggaccccaatgagcccccaccccggcccttcctggacatgggagagggcaccaagaaccgcatcatcacagctgagggcatcatcctgctcttctgtgctgtggtgcccggcaccctgctgctcttcaggaagcgctggcagaatgagaagctgggcctggatgctggagatgaatatgaagatgagaacctgtatgagggcctgaacctggatgactgcagcatgtatgaggacatcagccggggcctgcagggcacctaccaggatgtgggcagcctgaacattggagatgtgcagctggagaagccctag

SEQ ID NO: 18946 - DNA, 867 bp, synthetic construct
  misc_feature 1..867: note = Description of Artificial Sequence: Synthetic coding sequence
  source 1..867: mol_type = other DNA
atgggccacacccggcggcagggcaccagccccagcaaatgtccctacctgaacttcttccagctgctggtgctggccggcctgagccacttctgcagcggggtcatccacgtgaccaaggaggtgaaggaggtggccaccctgagctgtggccacaacgtgtctgtggaggagctggcccagacccgcatctactggcagaaggagaagaagatggtgctgaccatgatgtctggggacatgaacatctggccagagtacaagaacagaaccatctttgacatcaccaacaacctgagcatcgtcatcctggccctgcggcccagtgatgagggcacctatgaatgtgtggtgctgaagtatgagaaggatgccttcaagcgggagcacctggccgaggtgaccctgtctgtgaaggctgacttccccacccccagcatcagtgactttgagatccccaccagcaacatccgccgcatcatctgcagcaccagcggcggcttccctgagccccacctgtcctggctggagaatggagaggagctgaatgccatcaacaccaccgtgtcccaggaccctgagacagagctgtatgctgtgagcagcaagctggacttcaacatgaccaccaaccacagcttcatgtgcctgatcaagtatggccacctgcgggtgaaccagaccttcaactggaacaccaccaagcaggagcacttcccagacaacctgctgcccagctgggccatcaccctcatctctgtgaatggcatcttcgtcatctgctgcctgacctactgctttgccccccgctgccgggagaggagaagaaatgaaaggctgcggcgggagagcgtgcggcctgtgtag

SEQ ID NO: 18947 - DNA, 489 bp, synthetic construct
  misc_feature 1..489: note = Description of Artificial Sequence: Synthetic coding sequence
  source 1..489: mol_type = other DNA
atgggccacacccggcggcagggcaccagccccagcaaatgtccctacctgaacttcttccagctgctggtgctggccggcctgagccacttctgcagcggggtcatccacgtgaccaaggaggtgaaggaggtggccaccctgagctgtggccacaacgtgtctgtggaggagctggcccagacccgcatctactggcagaaggagaagaagatggtgctgaccatgatgtctggggacatgaacatctggccagagtacaagaacagaaccatctttgacatcaccaacaacctgagcatcgtcatcctggccctgcggcccagtgatgagggcacctatgaatgtgtggtgctgaagtatgagaaggatgccttcaagcgggagcacctggccgaggtgaccctgtctgtgaagggctttgccccccgctgccgggagaggagaagaaatgaaaggctgcggcgggagagcgtgcggcctgtgtag

SEQ ID NO: 18948 - DNA, 771 bp, synthetic construct
  misc_feature 1..771: note = Description of Artificial Sequence: Synthetic coding sequence
  source 1..771: mol_type = other DNA
atgggccacacccggcggcagggcaccagccccagcaaatgtccctacctgaacttcttccagctgctggtgctggccggcctgagccacttctgcagcggggtcatccacgtgaccaaggaggtgaaggaggtggccaccctgagctgtggccacaacgtgtctgtggaggagctggcccagacccgcatctactggcagaaggagaagaagatggtgctgaccatgatgtctggggacatgaacatctggccagagtacaagaacagaaccatctttgacatcaccaacaacctgagcatcgtcatcctggccctgcggcccagtgatgagggcacctatgaatgtgtggtgctgaagtatgagaaggatgccttcaagcgggagcacctggccgaggtgaccctgtctgtgaaggctgacttccccacccccagcatcagtgactttgagatccccaccagcaacatccgccgcatcatctgcagcaccagcggcggcttccctgagccccacctgtcctggctggagaatggagaggagctgaatgccatcaacaccaccgtgtcccaggaccctgagacagagctgtatgctgtgagcagcaagctggacttcaacatgaccaccaaccacagcttcatgtgcctgatcaagtatggccacctgcgggtgaaccagaccttcaactggaacaccagctttgccccccgctgccgggagaggagaagaaatgaaaggctgcggcgggagagcgtgcggcctgtgtag

SEQ ID NO: 18949 - DNA, 867 bp, synthetic construct; identical to SEQ ID NO: 18946
  misc_feature 1..867: note = Description of Artificial Sequence: Synthetic coding sequence
  source 1..867: mol_type = other DNA

SEQ ID NO: 18950 - DNA, 456 bp, synthetic construct
  misc_feature 1..456: note = Description of Artificial Sequence: Synthetic coding sequence
  source 1..456: mol_type = other DNA
atgagcatccccttcagcaacacccactaccgcatcccccagggcttcggcaacctgctggagggcctgacccgggagatcctgcgggagcagcctgacaacatcccagcctttgctgctgcctactttgagagcctgctggagaagcgggagaagaccaactttgatcctgctgagtggggcagcaaggtggaggaccgcttctacaacaaccacgcctttgaggagcaggagcccccagagaagagtgaccccaagcaggaggagagccagatcagcggcaaggaggaggagacctctgtgaccatcctggacagcagcgaggaggacaaggagaaggaggaggtggccgctgtgaagatccaggccgccttccggggccacatcgcccgggaggaggccaagaagatgaagaccaacagcctgcagaatgaggagaaggaggagaacaagtag

SEQ ID NO: 18951 - DNA, 729 bp, synthetic construct
  misc_feature 1..729: note = Description of Artificial Sequence: Synthetic coding sequence
  source 1..729: mol_type = other DNA
atgggcagcgcctgcatcaaggtgaccaagtacttcctgttcctgttcaacctgatcttcttcatcctgggcgctgtgatcctgggcttcggcgtgtggatcctggccgacaagagcagcttcatctctgtgctgcagaccagcagcagcagcctgaggatgggcgcctacgtgttcatcggcgtgggcgctgtgaccatgctgatgggcttcctgggctgcattggagctgtgaatgaggtgcgctgcctgctgggcctgctgaagcaggagatgggcggcatcgtgacagagctgatccgggactacaacagcagccgggaggacagcctgcaggatgcctgggactatgtgcaggcccaggtgaagtgctgcggctgggtgtccttctacaactggacagacaatgctgagctgatgaacagacctgaggtgacctacccctgcagctgtgaggtgaagggggaggaggacaacagcctgtctgtgaggaagggcttctgtgaggcccctggcaacagaacccagagcggcaaccaccctgaggactggcctgtgtaccaggagggctgcatggagaaggtgcaggcctggctgcaggagaacctgggcatcatcctgggcgtgggcgtgggcgtggccatcatcgagctgctgggcatggtgctgagcatctgcctgtgccgccacgtgcacagcgaggactacagcaaggtgcccaagtactag

SEQ ID NO: 18952 - DNA, 207 bp, synthetic construct
  misc_feature 1..207: note = Description of Artificial Sequence: Synthetic coding sequence
  source 1..207: mol_type = other DNA
atgggcagcgcctgcatcaaggtgaccaagtacttcctgttcctgttcaacctgatcttcttcatcctgggcgctgtgatcctgggcttcggcgtgtggatcctggccgacaagagcagcttcatctctgtgctgcagaccagcagcagcagcctgaggatgggcgcctacgtgttcatcggcgtgggcgctgtgaccatgctgtag

SEQ ID NO: 18953 - DNA, 117 bp, synthetic construct
  misc_feature 1..117: note = Description of Artificial Sequence: Synthetic coding sequence
  source 1..117: mol_type = other DNA
atgggcagcgcctgcatcaaggtgaccaagtacttcctgttcctgttcaacctgatcttcttcatcctgggcgctgtgatcctgggcttcggcgtgtggatcctggccgacaagtag

SEQ ID NO: 18954 - DNA, 318 bp, synthetic construct
  misc_feature 1..318: note = Description of Artificial Sequence: Synthetic coding sequence
  source 1..318: mol_type = other DNA
atgggcagcgcctgcatcaaggtgaccaagtacttcctgttcctgttcaacctgatcttcttcatcctgggcgctgtgatcctgggcttcggcgtgtggatcctggccgacaagagcagcttcatctctgtgctgcagaccagcagcagcagcctgaggatgggcgcctacgtgttcatcggcgtgggcgctgtgaccatgctgatgggcttcctgggctgcattggagctgtgaatgaggtgcgctgcctgctgggcctgtactttgccttcctgctgctgatcctgattgcccaggtgacagctggggccctgtag

SEQ ID NO: 18955 - DNA, 327 bp, synthetic construct
  misc_feature 1..327: note = Description of Artificial Sequence: Synthetic coding sequence
  source 1..327: mol_type = other DNA
atgggcagcgcctgcatcaaggtgaccaagtacttcctgttcctgttcaacctgatcttcttcatcctgggcgctgtgatcctgggcttcggcgtgtggatcctggccgacaagagcagcttcatctctgtgctgcagaccagcagcagcagcctgaggatgggcgcctacgtgttcatcggcgtgggcgctgtgaccatgctgatgggcttcctgggctgcattggagctgtgaatgaggtgcgctgcctgctgggcctgtactttgccttcctgctgctgatcctgattgcccaggtgacagctggggccctcttctacttctag

SEQ ID NO: 18956 - DNA, 708 bp, synthetic construct
  misc_feature 1..708: note = Description of Artificial Sequence: Synthetic coding sequence
  source 1..708: mol_type = other DNA
atggccctgcctgtgacagccctgctgctgcccctggccctgctgctgcacgccgcccggcccagccagttccgggtgagccccctggacaggacctggaacctgggggagaccgtggagctgaagtgccaggtgctgctgagcaaccccaccagcggctgctcctggctgttccagcccagaggagctgctgccagccccaccttcctgctgtacctgagccagaacaagcccaaggctgctgagggcctggacacccagcgcttcagcggcaagaggctgggggacacctttgtgctgaccctgagtgacttccggcgggagaatgaaggctactacttctgcagcgccctgagcaacagcatcatgtacttcagccactttgtgcctgtgttcctgcctgccaagcccaccaccaccccagcccccaggcctcccaccccagcccccaccatcgccagccagcccctgagcctgcggcctgaggcctgcaggcctgctgctgggggcgctgtgcacacccggggcctggactttgcctgtgacatctacatctgggcccccctggccggcacctgtggggtgctgctgctgagcctggtgatcaccctgtactgcaaccacaggaacagaagaagagtgtgcaagtgccccaggcctgtggtgaagagcggggacaagcccagcctgagcgcccgctacgtgtag

SEQ ID NO: 18957 - DNA, 597 bp, synthetic construct
  misc_feature 1..597: note = Description of Artificial Sequence: Synthetic coding sequence
  source 1..597: mol_type = other DNA
atggccctgcctgtgacagccctgctgctgcccctggccctgctgctgcacgccgcccggcccagccagttccgggtgagccccctggacaggacctggaacctgggggagaccgtggagctgaagtgccaggtgctgctgagcaaccccaccagcggctgctcctggctgttccagcccagaggagctgctgccagccccaccttcctgctgtacctgagccagaacaagcccaaggctgctgagggcctggacacccagcgcttcagcggcaagaggctgggggacacctttgtgctgaccctgagtgacttccggcgggagaatgaaggctactacttctgcagcgccctgagcaacagcatcatgtacttcagccactttgtgcctgtgttcctgcctgccaagcccaccaccaccccagcccccaggcctcccaccccagcccccaccatcgccagccagcccctgagcctgcggcctgaggcctgcaggcctgctgctgggggcgccggcaacagaagaagagtgtgcaagtgccccaggcctgtggtgaagagcggggacaagcccagcctgagcgcccgctacgtgtag

SEQ ID NO: 18958 - DNA, 708 bp, synthetic construct; identical to SEQ ID NO: 18956
  misc_feature 1..708: note = Description of Artificial Sequence: Synthetic coding sequence
  source 1..708: mol_type = other DNA

SEQ ID NO: 18959 - DNA, 597 bp, synthetic construct
  misc_feature 1..597: note = Description of Artificial Sequence: Synthetic coding sequence
  source 1..597: mol_type = other DNA
atggccctgcctgtgacagccctgctgctgcccctggccctgctgctgcacgccgcccggcccagccagttccgggtgagccccctggacaggacctggaacctgggggagaccgtggagctgaagtgccaggtgctgctgagcaaccccaccagcggctgctcctggctgttccagcccagaggagctgctgccagccccaccttcctgctgtacctgagccagaacaagcccaaggctgctgagggcctggacacccagcgcttcagcggcaagaggctgggggacacctttgtgctgaccctgagtgacttccggcgggagaatgaaggctactacttctgcagcgccctgagcaacagcatcatgtacttcagccactttgtgcctgtgttcctgcctgtgcacacccggggcctggactttgcctgtgacatctacatctgggcccccctggccggcacctgtggggtgctgctgctgagcctggtgatcaccctgtactgcaaccacaggaacagaagaagagtgtgcaagtgccccaggcctgtggtgaagagcggggacaagcccagcctgagcgcccgctacgtgtag

SEQ ID NO: 18960 - DNA, 663 bp, synthetic construct
  misc_feature 1..663: note = Description of Artificial Sequence: Synthetic coding sequence
  source 1..663: mol_type = other DNA
atggccctgcctgtgacagccctgctgctgcccctggccctgctgctgcacgccgcccggcccagccagttccgggtgagccccctggacaggacctggaacctgggggagaccgtggagctgaagtgccaggtgctgctgagcaaccccaccagcggctgctcctggctgttccagcccagaggagctgctgccagccccaccttcctgctgtacctgagccagaacaagcccaaggctgctgagggcctggacaccctgagtgacttcagaagagaaaatgaaggctactacttctgcagcgccctgagcaacagcatcatgtacttcagccactttgtgcctgtgttcctgcctgccaagcccaccaccaccccagccccccggccccccaccccagcccccaccatcgccagccagcccctgagcctgcggcctgaggcctgcaggcctgctgctggaggagctgtgcacacccggggcctggactttgcctgtgacatctacatctgggcccccctggccggcacctgtggggtgctgctgctgagcctggtgatcaccctgtactgcaaccacaggaacagaagaagagtgtgcaagtgccccaggcctgtggtgaagagcggggacaagcccagcctgagcgcccgctacgtgtag

SEQ ID NO: 18961 - DNA, 597 bp, synthetic construct; identical to SEQ ID NO: 18957
  misc_feature 1..597: note = Description of Artificial Sequence: Synthetic coding sequence
  source 1..597: mol_type = other DNA

SEQ ID NO: 18962 - DNA, 831 bp, synthetic construct
  misc_feature 1..831: note = Description of Artificial Sequence: Synthetic coding sequence
  source 1..831: mol_type = other DNA
atgaggaaccaggcccctggccggcccaagggggccaccttccccccaagaagacccaccggcagccgggccccacccctggcccctgagctgcgggccaagcagaggcctggagagcgggtgatggccctgcctgtgacagccctgctgctgcccctggccctgctgctgcatgctgcccggcccagccagttccgggtgagccccctggacaggacctggaacctgggggagaccgtggagctgaagtgccaggtgctgctgagcaaccccaccagcggctgctcctggctgttccagcccagaggagctgctgccagccccaccttcctgctgtacctgagccagaacaagcccaaggctgctgagggcctggacacccagcgcttcagcggcaagaggctgggggacacctttgtgctgaccctgagtgacttcagaagagaaaatgaaggctactacttctgcagcgccctgagcaacagcatcatgtacttcagccactttgtgcctgtgttcctgcctgccaagcccaccaccaccccagccccccggccccccaccccagcccccaccatcgccagccagcccctgagcctgcggcctgaggcctgcaggcctgctgctggaggagctgtgcacacccggggcctggactttgcctgtgacatctacatctgggcccccctggccggcacctgtggggtgctgctgctgagcctggtgatcaccctgtactgcaaccacaggaacagaagaagagtgtgcaagtgccccaggcctgtggtgaagagcggggacaagcccagcctgagcgcccgctacgtgtag

SEQ ID NO: 18963 - DNA, 240 bp, synthetic construct
  misc_feature 1..240: note = Description of Artificial Sequence: Synthetic coding sequence
  source 1..240: mol_type = other DNA
atgagccacaagcagatctactacagcgacaagtatgatgatgaggagtttgagtacagacatgtgatgctgcccaaggacatcgccaagctggtgcccaagacccacctgatgtctgagagcgagtggaggaacctgggcgtgcagcagagccagggctgggtgcactacatgatccacgagcctgagccccacatcctgctcttccggcggcccctgcccaagaagcccaagaagtag

SEQ ID NO: 18964 - DNA, 204 bp, synthetic construct
  misc_feature 1..204: note = Description of Artificial Sequence: Synthetic coding sequence
  source 1..204: mol_type = other DNA
atgagccacaagcagatctactacagcgacaagtatgatgatgaggagtttgagtacagacatgtgatgctgcccaaggacatcgccaagctggtgcccaagacccacctgatgtctgagagcgagtggaggaacctgggcgtgcagcagagccagggctgggtgcactacatgatccacgagcccggccagtgcaccggctag

SEQ ID NO: 18965 - DNA, 192 bp, synthetic construct
  misc_feature 1..192: note = Description of Artificial Sequence: Synthetic coding sequence
  source 1..192: mol_type = other DNA
atgaggaccaggcatgtgatgctgcccaaggacatcgccaagctggtgcccaagacccacctgatgtctgagagcgagtggaggaacctgggcgtgcagcagagccagggctgggtgcactacatgatccacgagcctgagccccacatcctgctcttccggcggcccctgcccaagaagcccaagaagtag

SEQ ID NO: 18966 - DNA, 240 bp, synthetic construct
  misc_feature 1..240: note = Description of Artificial Sequence: Synthetic coding sequence
  source 1..240: mol_type = other DNA
atggcccacaagcagatctactacagcgacaagtactttgatgagcactatgagtacagacatgtgatgctgccccgggagctgagcaagcaggtgcccaagacccacctgatgtctgaggaggagtggaggcggctgggcgtgcagcagagcctgggctgggtgcactacatgatccacgagcctgagccccacatcctgctcttccggcggcccctgcccaaggaccagcagaagtag

SEQ ID NO: 18967 - DNA, 1533 bp, synthetic construct
  misc_feature 1..1533: note = Description of Artificial Sequence: Synthetic coding sequence
  source 1..1533: mol_type = other DNA
atgcaccccctgcagtgtgtgctgcaggtgcagaggagcctgggctggggccccctggcctctgtgtcctggctgagcctgaggatgtgccgggcccacagcagcctgagcagcaccatgtgccccagccctgagcggcaggaggatggagccaggaaggacttcagcagccggctggccgccggccccaccttccagcacttcctgaagagcgccagcgccccccaggagaagctgagcagcgaggtggaggaccccccaccctacctgatgatggatgagctgctgggccggcagaggaaggtgtacctggagacctacggctgccagatgaatgtgaatgacacagagatcgcctggagcatcctgcagaagagcggctacctgcggaccagcaacctgcaggaggctgatgtgatcctgctggtgacctgcagcatccgggagaaggccgagcagaccatctggaaccggctgcaccagctgaaggccctgaagacccggcggcccaggagccgggtgcccctgcgcatcggcatcctgggctgcatggccgagcggctgaaggaggagatcctgaaccgggagaagatggtggacatcctggccggcccagatgcctacagagacctgccccggctgctggccgtggccgagagcggccagcaggccgccaacgtgctgctgagcctggatgagacctatgcagatgtgatgcctgtgcagaccagcgccagcgccaccagcgcctttgtgtccatcatgaggggctgtgacaacatgtgcagctactgcatcgtgcccttcacccggggccgggagaggagccggcccatcgccagcatcctggaggaggtgaagaagctgtctgagcaggtgctgcagctgatccacgagcgggacaacatctgcaagcagatccacctgcctgcccagagcggcagcagccgggtgctggaggccatgagaagaggctacagccgggaggcctacgtggagctggtgcaccacatccgggagagcatccctggggtgtccctgagcagtgacttcatcgccggcttctgtggggagacagaagaagatcatgtgcagacagtgtccctgctgcgggaggtgcagtacaacatgggcttcctgtttgcctacagcatgaggcagaagacccgggcctaccaccggctgaaggatgatgtgcctgaggaggtgaagctgcggcggctggaggagctgatcaccatcttccgggaggaggccaccaaggccaaccagacctctgtgggctgcacccagctggtgctggtggagggcctgagcaagaggtctgccacagacctgtgtggcagaaatgatggcaacctgaaggtgatcttcccagatgctgagatggaggatgtgaacaaccctggcctgcgggtgcgggcccagcccggggactatgtgctggtgaagatcaccagcgccagcagccagaccctgcggggccacgtgctgtgcaggaccaccctgcgggacagcagcgcctactgctag

SEQ ID NO: 18968 - DNA, 1764 bp, synthetic construct
  misc_feature 1..1764: note = Description of Artificial Sequence: Synthetic coding sequence
  source 1..1764: mol_type = other DNA
atgcaccccctgcagtgtgtgctgcaggtgcagaggagcctgggctggggccccctggcctctgtgtcctggctgagcctgaggatgtgccgggcccacagcagcctgagcagcaccatgtgccccagccctgagcggcaggaggatggagccaggaaggacttcagcagccggctggccgccggccccaccttccagcacttcctgaagagcgccagcgccccccaggagaagctgagcagcgaggtggaggaccccccaccctacctgatgatggatgagctgctgggccggcagaggaaggtgtacctggagacctacggctgccagatgaatgtgaatgacacagagatcgcctggagcatcctgcagaagagcggctacctgcggaccagcaacctgcaggaggctgatgtgatcctgctggtgacctgcagcatccgggagaaggccgagcagaccatctggaaccggctgcaccagctgaaggccctgaagacccggcggcccaggagccgggtgcccctgcgcatcggcatcctgggctgcatggccgagcggctgaaggaggagatcctgaaccgggagaagatggtggacatcctggccggcccagatgcctacagagacctgccccggctgctggccgtggccgagagcggccagcaggccgccaacgtgctgctgagcctggatgagacctatgcagatgtgatgcctgtgcagaccagcgccagcgccaccagcgcctttgtgtccatcatgaggggctgtgacaacatgtgcagctactgcatcgtgcccttcacccggggccgggagaggagccggcccatcgccagcatcctggaggaggtgaagaagctgtctgagcagggcctgaaggaggtgaccctgctgggccagaatgtgaacagcttccgggacaacagcgaggtgcagttcaacagcgctgtgcccaccaacctgagccggggcttcaccaccaactacaagaccaagcagggcggcctgcgctttgcccacctgctggaccaggtgtcccgggtggaccctgagatgaggatccgcttcaccagcccccaccccaaggacttcccagatgaggtgctgcagctgattcatgagcgggacaacatctgcaagcagatccacctgcctgcccagagcggcagcagccgggtgctggaggccatgaggcggggctacagccgggaggcctacgtggagctggtgcaccacatccgggagagcatccctggggtgtccctgagcagtgacttcatcgccggcttctgtggggagacagaggaggaccacgtgcagacagtgtccctgctgcgggaggtgcagtacaacatgggcttcctgtttgcctacagcatgaggcagaagacccgggcctaccaccggctgaaggatgatgtgcctgaggaggtgaagctgcggcggctggaggagctgatcaccatcttccgggaggaggccaccaaggccaaccagacctctgtgggctgcacccagctggtgctggtggagggcctgagcaagaggtctgccacagacctgtgtggcagaaatgatggcaacctgaaggtgatcttcccagatgctgagatggaggatgtgaacaaccctggcctgcgggtgcgggcccagcccggggactatgtgctggtgaagatcaccagcgccagcagccagaccctgcggggccacgtgctgtgcaggaccaccctgcgggacagcagcgcctactgctag

SEQ ID NO: 18969 - DNA, 1806 bp, synthetic construct
  misc_feature 1..1806: note = Description of Artificial Sequence: Synthetic coding sequence
  source 1..1806: mol_type = other DNA
atgcaccccctgcagtgtgtgctgcaggtgcagaggagcctgggctggggccccctggcctctgtgtcctggctgagcctgaggatgtgccgggcccacagcagcctgagcagcaccatgtgccccagccctgagcggcaggaggatggagccaggaaggacttcagcagccggctggccgccggccccaccttccagcacttcctgaagagcgccagcgccccccaggagaagctgagcagcgaggtggaggaccccccaccctacctgatgatggatgagctgctgggccggcagaggaaggtgtacctggagacctacggctgccagatgaatgtgaatgacacagagatcgcctggagcatcctgcagaagagcggctacctgcggaccagcaacctgcaggaggctgatgtgatcctgctggtgacctgcagcatccgggagaaggccgagcagaccatctggaaccggctgcaccagctgaaggccctgaagacccggcggcccaggagccgggtgcccctgcgcatcggcatcctgggctgcatggccgagcggctgaaggaggagatcctgaaccgggagaagatggtggacatcctggccggcccagatgcctacagagacctgccccggctgctggccgtggccgagagcggccagcaggccgccaacgtgctgctgagcctggatgagacctatgcagatgtgatgcctgtgcagaccagcgccagcgccaccagcgcctttgtgtccatcatgaggggctgtgacaacatgtgcagctactgcatcgtgcccttcacccggggccgggagaggagccggcccatcgccagcatcctggaggaggtgaagaagctgtctgagcaggtgttcctgccccccaggcctcccaaggtgctgggcctgcagggcctgaaggaggtgaccctgctgggccagaatgtgaacagcttccgggacaacagcgaggtgcagttcaacagcgctgtgcccaccaacctgagccggggcttcaccaccaactacaagaccaagcagggcggcctgcgctttgcccacctgctggaccaggtgtcccgggtggaccctgagatgaggatccgcttcaccagcccccaccccaaggacttcccagatgaggtgctgcagctgattcatgagcgggacaacatctgcaagcagatccacctgcctgcccagagcggcagcagccgggtgctggaggccatgaggcggggctacagccgggaggcctacgtggagctggtgcaccacatccgggagagcatccctggggtgtccctgagcagtgacttcatcgccggcttctgtggggagacagaggaggaccacgtgcagacagtgtccctgctgcgggaggtgcagtacaacatgggcttcctgtttgcctacagcatgaggcagaagacccgggcctaccaccggctgaaggatgatgtgcctgaggaggtgaagctgcggcggctggaggagctgatcaccatcttccgggaggaggccaccaaggccaaccagacctctgtgggctgcacccagctggtgctggtggagggcctgagcaagaggtctgccacagacctgtgtggcagaaatgatggcaacctgaaggtgatcttcccagatgctgagatggaggatgtgaacaaccctggcctgcgggtgcgggcccagcccggggactatgtgctggtgaagatcaccagcgccagcagccagaccctgcggggccacgtgctgtgcaggaccaccctgcgggacagcagcgcctactgctag

SEQ ID NO: 18970 - DNA, 984 bp, synthetic construct
  misc_feature 1..984: note = Description of Artificial Sequence: Synthetic coding sequence
  source 1..984: mol_type = other DNA
atgaatgtgaatgacacagagatcgcctggagcatcctgcagaagagcggctacctgcggaccagcaacctgcaggaggctgatgtgatcctgctggtgacctgcagcatccgggagaaggccgagcagaccatctggaaccggctgcaccagctgaaggccctgaagacccggcggcccaggagccgggtgcccctgcgcatcggcatcctgggctgcatggccgagcggctgaaggaggagatcctgaaccgggagaagatggtggacatcctggccggcccagatgcctacagagacctgccccggctgctggccgtggccgagagcggccagcaggccgccaacgtgctgctgagcctggatgagacctatgcagatgtgatgcctgtgcagaccagcgccagcgccaccagcgcctttgtgtacagccgggaggcctacgtggagctggtgcaccacatccgggagagcatccctggggtgtccctgagcagtgacttcatcgccggcttctgtggggagacagaggaggaccacgtgcagacagtgtccctgctgcgggaggtgcagtacaacatgggcttcctgtttgcctacagcatgaggcagaagacccgggcctaccaccggctgaaggatgatgtgcctgaggaggtgaagctgcggcggctggaggagctgatcaccatcttccgggaggaggccaccaaggccaaccagacctctgtgggctgcacccagctggtgctggtggagggcctgagcaagaggtctgccacagacctgtgtggcagaaatgatggcaacctgaaggtgatcttcccagatgctgagatggaggatgtgaacaaccctggcctgcgggtgcgggcccagcccggggactatgtgctggtgaagatcaccagcgccagcagccagaccctgcggggccacgtgctgtgcaggaccaccctgcgggacagcagcgcctactgctag

SEQ ID NO: 18971 - DNA, 1494 bp, synthetic construct
  misc_feature 1..1494: note = Description of Artificial Sequence: Synthetic coding sequence
  source 1..1494: mol_type = other DNA
atgatggatgagctgctgggccggcagaggaaggtgtacctggagacctacggctgccagatgaatgtgaatgacacagagatcgcctggagcatcctgcagaagagcggctacctgcggaccagcaacctgcaggaggctgatgtgatcctgctggtgacctgcagcatccgggagaaggccgagcagaccatctggaaccggctgcaccagctgaaggccctgaagacccggcggcccaggagccgggtgcccctgcgcatcggcatcctgggctgcatggccgagcggctgaaggaggagatcctgaaccgggagaagatggtggacatcctggccggcccagatgcctacagagacctgccccggctgctggccgtggccgagagcggccagcaggccgccaacgtgctgctgagcctggatgagacctatgcagatgtgatgcctgtgcagaccagcgccagcgccaccagcgcctttgtgtccatcatgaggggctgtgacaacatgtgcagctactgcatcgtgcccttcacccggggccgggagaggagccggcccatcgccagcatcctggaggaggtgaagaagctgtctgagcagggcctgaaggaggtgaccctgctgggccagaatgtgaacagcttccgggacaacagcgaggtgcagttcaacagcgctgtgcccaccaacctgagccggggcttcaccaccaactacaagaccaagcagggcggcctgcgctttgcccacctgctggaccaggtgtcccgggtggaccctgagatgaggatccgcttcaccagcccccaccccaaggacttcccagatgaggtgctgcagctgattcatgagcgggacaacatctgcaagcagatccacctgcctgcccagagcggcagcagccgggtgctggaggccatgaggcggggctacagccgggaggcctacgtggagctggtgcaccacatccgggagagcatccctggggtgtccctgagcagtgacttcatcgccggcttctgtggggagacagaggaggaccacgtgcagacagtgtccctgctgcgggaggtgcagtacaacatgggcttcctgtttgcctacagcatgaggcagaagacccgggcctaccaccggctgaaggatgatgtgcctgaggaggtgaagctgcggcggctggaggagctgatcaccatcttccgggaggaggccaccaaggccaaccagacctctgtgggctgcacccagctggtgctggtggagggcctgagcaagaggtctgccacagacctgtgtggcagaaatgatggcaacctgaaggtgatcttcccagatgctgagatggaggatgtgaacaaccctggcctgcgggtgcgggcccagcccggggactatgtgctggtgaagatcaccagcgccagcagccagaccctgcggggccacgtgctgtgcaggaccaccctgcgggacagcagcgcctactgctag

SEQ ID NO: 18972 - DNA, 1281 bp, synthetic construct
  misc_feature 1..1281: note = Description of Artificial Sequence: Synthetic coding sequence
  source 1..1281: mol_type = other DNA
atgcaccccctgcagtgtgtgctgcaggtgcagaggagcctgggctggggccccctggcctctgtgtcctggctgagcctgaggatgtgccgggcccacagcagcctgagcagcaccatgtgccccagccctgagcggcaggaggatggagccaggaaggacttcagcagccggctggccgccggccccaccttccagcacttcctgaagagcgccagcgccccccaggagaagctgagcagcgaggtggaggaccccccaccctacctgatgatggatgagctgctgggccggcagaggaaggtgtacctggagacctacggctgccagatgaatgtgaatgacacagagatcgcctggagcatcctgcagaagagcggctacctgcggaccagcaacctgcaggaggctgatgtgatcctgctggtgacctgcagcatccgggagaaggccgagcagaccatctggaaccggctgcaccagctgaaggccctgaagacccggcggcccaggagccgggtgcccctgcgcatcggcatcctgggctgcatggccgagcggctgaaggaggagatcctgaaccgggagaagatggtggacatcctggccggcccagatgcctacagagacctgccccggctgctggccgtggccgagagcggccagcaggccgccaacgtgctgctgagcctggatgagacctatgcagatgtgatgcctgtgcagaccagcgccagcgccaccagcgcctttgtgtccatcatgaggggctgtgacaacatgtgcagctactgcatcgtgcccttcacccggggccgggagaggagccggcccatcgccagcatcctggaggaggtgaagaagctgtctgagcagggcctgaaggaggtgaccctgctgggccagaatgtgaacagcttccgggacaacagcgaggtgcagttcaacagcgctgtgcccaccaacctgagccggggcttcaccaccaactacaagaccaagcagggcggcctgcgctttgcccacctgctggaccaggtgtcccgggtggaccctgagatgaggatccgcttcaccagcccccaccccaaggacttcccagatgaggtgctgcagctgattcatgagcgggacaacatctgcaagcagatccacctgcctgcccagagcggcagcagccgggtgctggaggccatgaggcggggctacagccgggaggcctacgtggagctggtgcaccacatccgggagagcatccctgaggacaccggcatctcctag

SEQ ID NO: 18973 - DNA, 1122 bp, synthetic construct
  misc_feature 1..1122: note = Description of Artificial Sequence: Synthetic coding sequence
  source 1..1122: mol_type = other DNA
ggggatggccagaacctcttcaccaaggatgtgaccgtcatcgagggggaggtggccaccatcagctgccaggtgaacaagagtgatgattctgtcatccagctgctgaaccccaaccggcagaccatctacttccgggacttccggcccctgaaggacagccgcttccagctgctgaacttcagcagcagcgagctgaaggtgtccctgaccaacgtgtccatcagtgatgagggccgctacttctgccagctgtacacagatcctccccaggagagctacaccaccatcaccgtgctggtgccccccaggaacctgatgattgacatccagaaggacacagctgtggagggggaggagattgaggtgaactgcacagccatggccagcaagccagccaccaccatccgctggttcaagggcaacacagagctgaagggcaagtctgaggtggaggagtggagcgacatgtacacagtgaccagccagctgatgctgaaggtgcacaaggaggatgatggagtgcctgtgatctgccaggtggagcaccctgctgtgactggaaacctgcagacccagcgctacctggaggtgcagtacaagccccaggtgcacatccagatgacctaccccctgcagggcctgacccgggagggagatgccctggagctgacctgtgaggccatcggcaagccccagcctgtgatggtgacctgggtgcgggtggatgatgagatgccccagcacgctgtgctgagcggccccaacctcttcatcaacaacctgaacaagacagacaatggcacctaccgctgtgaggccagcaacatcgtgggcaaggcccacagcgactacatgctgtatgtgtatgacagccgggccggggaggagggcagcatccgggctgtggaccacgccgtcatcggcggcgtggtggccgtggtggtgtttgccatgctgtgcctgctgatcatcctgggccgctactttgcccggcacaagggcacctacttcacccatgaggccaagggagcagatgatgctgctgatgctgacacagccatcatcaatgctgagggcggccagaacaacagcgaggagaagaaggagtacttcatctag

SEQ ID NO: 18974 - DNA, 1329 bp, synthetic construct
  misc_feature 1..1329: note = Description of Artificial Sequence: Synthetic coding sequence
  source 1..1329: mol_type = other DNA
atggcctctgtggtgctgcccagcggcagccagtgtgccgctgctgctgctgctgctgcccctcctggcctgcggctgcggctgctgctgctgctcttctctgctgctgccctgatccccactggagatggccagaacctcttcaccaaggatgtgacagtgattgaaggagaggtggccaccatcagctgccaggtgaacaagagtgatgacagcgtcatccagctgctgaaccccaaccggcagaccatctacttccgggacttccggcccctgaaggacagccgcttccagctgctgaacttcagcagcagcgagctgaaggtgtccctgaccaacgtgtccatcagtgatgagggccgctacttctgccagctgtacacagaccccccccaggagagctacaccaccatcaccgtgctggtgcccccaagaaacctgatgattgacatccagaaggacacagctgtggagggggaggagattgaggtgaactgcacagccatggccagcaagccagccaccaccatccgctggttcaagggcaacacagagctgaagggcaagtctgaggtggaggagtggagcgacatgtacacagtgaccagccagctgatgctgaaggtgcacaaggaggatgatggagtgcctgtgatctgccaggtggagcaccctgctgtgacaggcaacctgcagacccagcgctacctggaggtgcagtacaagccccaggtgcacatccagatgacctaccccctgcagggcctgacccgggagggagatgccctggagctgacctgtgaggccatcggcaagccccagcctgtgatggtgacctgggtgcgggtggatgatgagatgccccagcacgctgtgctgagcggccccaacctcttcatcaacaacctgaacaagacagacaatggcacctaccgctgtgaggccagcaacatcgtgggcaaggcccacagcgactacatgctgtatgtgtatgacccccccaccaccatccccccacccaccaccaccaccaccaccaccaccaccaccaccaccaccatcctgaccatcatcacagacagcagagctggggaggagggcagcatccgggctgtggaccatgctgtgattggaggagtggtggccgtggtggtgtttgccatgctgtgcctgctgatcatcctgggccgctactttgcccggcacaagggcacctacttcacccatgaggccaagggagcagatgatgctgctgatgctgacacagccatcatcaatgctgagggcggccagaacaacagcgaggagaagaaggagtacttcatctag

SEQ ID NO: 18975 - DNA, 384 bp, synthetic construct
  misc_feature 1..384: note = Description of Artificial Sequence: Synthetic coding sequence
  source 1..384: mol_type = other DNA
atgctgtatgtgtatgacccccccaccaccatccccccacccaccaccaccaccaccaccaccaccaccaccaccaccaccatcctgaccatcatcacagacaccacagccaccacagagcctgctgtgcatgacagccgggccggggaggagggcagcatccgggctgtggaccacgccgtcatcggcggcgtggtggccgtggtggtgtttgccatgctgtgcctgctgatcatcctgggccgctactttgcccggcacaagggcacctacttcacccatgaggccaagggagcagatgatgctgctgatgctgacacagccatcatcaatgctgagggcggccagaacaacagcgaggagaagaaggagtacttcatctag

SEQ ID NO: 18976 - DNA, 1245 bp, synthetic construct
  misc_feature 1..1245: note = Description of Artificial Sequence: Synthetic coding sequence
  source 1..1245: mol_type = other DNA
atggcctctgtggtgctgcccagcggcagccagtgtgccgctgctgctgctgctgctgcccctcctggcctgcggctgcggctgctgctgctgctcttctctgctgctgccctgatccccactggagatggccagaacctcttcaccaaggatgtgacagtgattgaaggagaggtggccaccatcagctgccaggtgaacaagagtgatgacagcgtcatccagctgctgaaccccaaccggcagaccatctacttccgggacttccggcccctgaaggacagccgcttccagctgctgaacttcagcagcagcgagctgaaggtgtccctgaccaacgtgtccatcagtgatgagggccgctacttctgccagctgtacacagaccccccccaggagagctacaccaccatcaccgtgctggtgcccccaagaaacctgatgattgacatccagaaggacacagctgtggagggggaggagattgaggtgaactgcacagccatggccagcaagccagccaccaccatccgctggttcaagggcaacacagagctgaagggcaagtctgaggtggaggagtggagcgacatgtacacagtgaccagccagctgatgctgaaggtgcacaaggaggatgatggagtgcctgtgatctgccaggtggagcaccctgctgtgacaggcaacctgcagacccagcgctacctggaggtgcagtacaagccccaggtgcacatccagatgacctaccccctgcagggcctgacccgggagggagatgccctggagctgacctgtgaggccatcggcaagccccagcctgtgatggtgacctgggtgcgggtggatgatgagatgccccagcacgctgtgctgagcggccccaacctcttcatcaacaacctgaacaagacagacaatggcacctaccgctgtgaggccagcaacatcgtgggcaaggcccacagcgactacatgctgtatgtgtatgacagcagagctggggaggagggcagcatccgggctgtggaccatgctgtgattggaggagtggtggccgtggtggtgtttgccatgctgtgcctgctgatcatcctgggccgctactttgcccggcacaagggcacctacttcacccatgaggccaagggagcagatgatgctgctgatgctgacacagccatcatcaatgctgagggcggccagaacaacagcgaggagaagaaggagtacttcatctag

SEQ ID NO: 18977 - DNA, 5346 bp, synthetic construct
  misc_feature 1..5346: note = Description of Artificial Sequence: Synthetic coding sequence
  source 1..5346: mol_type = other DNA
atgaccacctaccgggccatccccagtgatggagtggacctggccgccagctgtggggcccgggtgggagatgtgctgcccggcccccacactggagactatgcccccctgggcttctgggcccagaatggctccatgagccagcccctgggggagagccctgccacagccacagccacagccacagccaccacccggcccagccccaccaccccagccatgcccaagatgggcgtgcgggcccgggtggccgactggccacccaagcgggaggccctgcgggagcacagcaaccccagccccagccaggacacagatggcaccaaggccaccaagatggcccacagcatgaggagcatccagaatggccagccccccaccagcaccccagccagcagcggcagcaaggccttccaccggctgagcagaagaagaagcaaggatgtggagttccaggacggctggcccaggagccctggccgggccttcctgcccctgcggcacaggagcagcagcgagatcaccctgtctgaatgtgatgctgaagatgctggggagcccaggggggcccggcacactggagccctgcccctcttccgggagtatggcagcaccagcagcattgatgtgcagggcatgcctgagcagagcttctttgacatcctgaatgagttccgctctgagcagccagatgcccggggctgccaggccctgacagagctgctgcgggctgaccccggcccccacctgatgggcggcggcggcggggccaagggggacagccacaacggccagcctgccaaggacagcctgctgcccctgcagcccaccaaggagaaggagaaggccaggaagaagccagcccggggcctgggcggcggggacacagtggacagcagcatcttcaggaagctgcggagcagcaagccagagggggaggccggccgcagccctggagaggctgatgagggccgcagccccccagaggccagccggccctgggtgtgccagaagagctttgcccactttgatgtgcagagcatgctgtttgacctgaatgaagctgctgccaacagagtgtctgtgtcccagaggaggaacaccaccaccggggccagcgctgccagcgctgccagcgccatggccagcctgacagccagccgggcccacagcctgggcggcctggaccctgccttcaccagcacagaggacctgaactgcaaggagaacctggagcaggacctgggagatgacaacagcaatgacctgctgctgagctgcccccacttcagaaatgaaattggaggagaatgtgaaagaaatgtgtccttcagccgggcctctgtgggcagccccagcagcggggagggccacctggccgagcccgccctgagcgcctaccgcaccaatgccagcatctctgtgctggaggtgcccaaggagcagcagaggacccagagccggccccggcagtacagcattgagcacgtggacctgggcgcccgctactaccaggactactttgtgggcaaggagcacgccaactactttggagtggatgagaagctgggccctgtggccgtgtccatcaagcgggagaagctggaggaccacaaggagcacggcccccagtaccagtaccgcatcatcttccgcacccgggagctgatcaccctgcggggcagcatcctggaggatgccacccccacagccaccaagcacggcaccggccggggcctgcccctgaaggatgccctggagtatgtgattcctgagctgaacatccactgcctgcggctggccctgaacacccccaaggtgacagagcagctgctgaagctggatgagcagggcctgtgcaggaagcacaaggtgggcatcctgtactgcaaggccggccagagcagcgaggaggagatgtacaacaatgaggaggccggccctgcctttgaggagttcctgagcctgattggagagaaggtgtgcctgaagggcttcaccaagtatgctgcccagctggatgtgaagacagacagcacaggcacccacagcctgtacaccatgtaccaggactatgagatcatgtttcatgtgtccaccctgctgccctacacccccaacaaccggcagcagctgctgaggaagaggcacatcggaaatgacatcgtgaccatcatcttccaggagcccggggccctgcccttcacccccaagaacatccgcagccacttccagcacgtgttcatcatcgtgcgggtgcacaacccctgcacagacaacgtgtgctacagcatggctgtgaccaggagcaaggatgccccacccttcggcccccccatccccagcggcaccaccttcaggaagagtgatgtgttccgggacttcctgctggccaaggtgatcaatgcagaaaatgctgcccacaagagtgacaagttccacaccatggccaccaggacccggcaggagtacctgaaggacctggccgagaactgtgtgagcaacacccccatcgacagcacaggcaagttcaacctgatcagcctgaccagcaagaagaaggagaagaccaaggcccgggccggggctgagcagcacagcgctggggccatcgcctggagggtggtggcccaggactatgcccagggcgtggagattgactgcatcctgggcatcagcaatgaatttgtggtgctgctggacctgcggaccaaggaggtggtgttcaactgctactgtggagatgtgattggctggaccccagacagcagcaccctgaagatcttctacggccgcggggaccacatcttcctgcaggccacagagggctctgtggaggacatccgggagatcgtgcagaggctgaaggtgatgaccagcggctgggagaccgtggacatgaccctgcggagaaatggcctgggccagctgggcttccacgtgaagtatgatggcaccgtggccgaggtggaggactatggctttgcctggcaggccggcctgcggcagggcagccggctggtggagatctgcaaggtggccgtggtgaccctgacccatgaccagatgattgacctgctgcggacctctgtgacagtgaaggtggtgatcatccccccatttgaagatggcaccccaagaagaggctggccagagacctatgacatgaacaccagcgagcccaagacagagcaggagagcatcacccctgggggccggcccccctaccgcagcaatgccccctggcagtggagcggccctgccagccacaacagcctgcctgccagcaagtgggccacccccaccaccccaggccacgcccagagcctgagccggcccctgaagcagacccccatcgtgcccttccgggagagccagcccctgcacagcaagaggcctgtgtccttccctgagaccccctacacagtgtccccagctggagctgacagagtgcccccctaccggcagcccagcggcagcttcagcaccccaggcagcgccacctacgtgcgctacaagcccagccctgagcgctacacagctgccccccaccccctgctgagcctggacccccacttcagccatgatggcaccagcagcggggacagcagcagcggcggcctgaccagccaggagagcaccatggagcggcagaagccagagcccctgtggcacgtgcctgcccaggcccggctgagcgccatcgccggcagcagcggcaacaagcaccccagccggcaggatgctgctgggaaggacagccccaacagacacagcaagggggagccccagtacagcagccacagcagcagcaacaccctgagcagcaatgccagcagcagccacagtgatgaccgctggtttgaccccctggaccccctggagcctgagcaggaccccctgagcaaaggaggcagcagtgacagcggcatcgacaccaccctgtacaccagcagccccagctgcatgagcctggccaaggcccccaggcctgccaagccccacaagcccccaggctccatgggcctgtgtggcggcggccgggaggccgccggccgcagccaccacgccgacagaagaagagaggtgtccccagccccagctgtggccggccagagcaagggctaccggcccaagctgtacagcagcggcagcagcacccccaccggcctggccggcggcagccgggaccccccccggcagcccagcgacatgggcagccgggtgggctacccagcccaggtgtacaagacagccagcgctgagaccccccggcccagccagctggcccagcccagccccttccagctgagcgcctctgtgcccaagagcttcttcagcaagcagcctgtgaggaacaagcaccccaccggctggaagaggacagaggagcccccaccccggcccctgcccttcagtgaccccaagaagcaggtggacaccaacaccaagaatgtgtttggccagccccggctgcgggccagcctgcgggacctgcggagccccaggaagaactacaagagcaccattgaagatgacctgaagaagctgatcatcatggacaacctgggccctgagcaggagcgggacaccggccagagcccccagaagggcctgcagaggaccctgagtgatgagagcctgtgcagcggccggcgggagcccagctttgccagccctgctggcctggagcccggcctgcccagtgatgtgctcttcaccagcacctgtgccttccccagcagcaccctgcctgcccggcggcagcaccagcacccccacccccctgtgggccctggggccaccccagctgctggcagcggcttccctgagaagaagagcaccatcagcgccagcgagctgagcctggctgatggccgggaccggcccctgcggcggctggaccccggcctgatgcccctgcctgacacagctgctggcctggagtggagcagcctggtgaatgctgccaaggcctatgaggtgcagagagctgtgtccctcttcagcctgaatgaccctgccctgagcccagacatccccccagcccacagccctgtgcacagccacctgagcctggagcggggcccccccacccccaggaccacccccaccatgtctgaggagccccccctggacctgaccgggaaggtgtaccagctggaggtgatgctgaagcagctgcacacagacctgcagaaggagaagcaggacaaggtggtgctgcagagcgaggtggccagcctgcggcagaacaaccagaggctgcaggaggagagccaggccgccagcgagcagctgaggaagtttgctgagatcttctgccgggagaagaaggagctgtag

SEQ ID NO: 18978 - DNA, 660 bp, synthetic construct
  misc_feature 1..660: note = Description of Artificial Sequence: Synthetic coding sequence
  source 1..660: mol_type = other DNA
atggaggccgcccgggactatgctggggccctgatccggcccctgaccttcatgggcagccagaccaagagggtgctcttcacccccctgatgcacccagcccggcccttccgggtgagcaaccacgacaggagcagcagaagaggagtgatggccagcagcctgcaggagctgatcagcaagaccctggatgccctggtgattgccaccggcctggtgaccctggtgctggaggaggatggcaccgtggtggacacagaggagttcttccagaccctgggggacaacacccacttcatgatcctggagaagggccagaagtggatgcctggcagccagcacgtgcccacctgcagcccccccaagaggagcggcatcgcccgggtgacctttgacctgtaccgcctgaaccccaaggacttcatcggctgcctgaatgtgaaggccaccatgtatgagatgtacagcgtgtcctatgacatccgctgcaccggcctgaagggcctgctgcggagcctgctgcgcttcctgagctacagcgcccaggtgacaggccagttcctgatctacctgggcacctacatgctgcgggtgctggatgacaaggaggagcggcccagcctgcggagccaggccaagggccgcttcacctgtggctag

SEQ ID NO: 18979 - DNA, 660 bp, synthetic construct
  misc_feature 1..660: note = Description of Artificial Sequence: Synthetic coding sequence
  source 1..660: mol_type = other DNA
atggagtacctgagcgccctgaaccccagcgacctgctgcggtctgtgagcaacatcagcagcgagtttggaagaagagtgtggaccagcgcccccccaccccagaggcccttccgggtgtgtgaccacaagaggaccatcaggaagggcctgacagctgccacccggcaggagctgctggccaaggccctggagaccctgctgctgaatggagtgctgaccctggtgctggaggaggatggaacagctgtggacagcgaggacttcttccagctgctggaggatgacacctgcctgatggtgctgcagagcggccagagctggagccccaccaggtctggagtgctgtcctatggcctgggccgggagcggcccaagcacagcaaggacatcgcccgcttcacctttgatgtgtacaagcagaacccccgggacctgtttggcagcctgaatgtgaaggccaccttctacggcctgtacagcatgagctgtgacttccagggcctgggccccaagaaggtgctgcgggagctgctgcgctggaccagcaccctgctgcagggcctgggccacatgctgctgggcatcagcagcaccctgcggcatgctgtggagggcgctgagcagtggcagcagaagggccgcctgcacagctactag

SEQ ID NO: 18980 - DNA, 660 bp, synthetic construct; identical to SEQ ID NO: 18979
  misc_feature 1..660: note = Description of Artificial Sequence: Synthetic coding sequence
  source 1..660: mol_type = other DNA

SEQ ID NO: 18981 - DNA, 660 bp, synthetic construct; identical to SEQ ID NO: 18979
  misc_feature 1..660: note = Description of Artificial Sequence: Synthetic coding sequence
  source 1..660: mol_type = other DNA

SEQ ID NO: 18982 - DNA, 660 bp, synthetic construct; identical to SEQ ID NO: 18979
  misc_feature 1..660: note = Description of Artificial Sequence: Synthetic coding sequence
  source 1..660: mol_type = other DNA

SEQ ID NO: 18983 - DNA, 1860 bp, synthetic construct
  misc_feature 1..1860: note = Description of Artificial Sequence: Synthetic coding sequence
  source 1..1860: mol_type = other DNA
atgaacctggagcggctgaggaagagggtgcggcagtacctggaccagcagcagtaccagagcgccctcttctgggccgacaaggtggccagcctgagccgggagccccaggacatctactggctggcccagtgcctgtacctgacagcccagtaccacagagctgcccacgccctgcggagcaggaagctggacaagctgtatgaggcctgccgctacctggccgcccgctgccactatgctgccaaggagcaccagcaggccctggatgtgctggacatggaggagcccatcaacaagaggctgtttgagaagtacctgaaggatgaaagtggcttcaaggaccccagcagtgactgggagatgagccagagcagcatcaagagcagcatctgcctgctgcggggcaagatctatgatgccctggacaacagaaccctggccacctacagctacaaggaggccctgaagctggatgtgtactgctttgaggcctttgacctgctgaccagccaccacatgctgacagcccaggaggagaaggagctgctggagagcctgcccctgagcaagctgtgcaatgaggagcaggagctgctgcgcttcctgtttgagaacaagctgaagaagtacaacaagcccagcgagaccgtcatccctgagagcgtggatggcctgcaggagaacctggatgtggtggtgtccctggccgagcggcactactacaactgtgacttcaagatgtgctacaagctgacctctgtggtgatggagaaggaccccttccacgccagctgcctgcctgtgcacatcggcaccctggtggagctgaacaaggccaatgaactcttctacctgagccacaagctggtggacctgtaccccagcaaccctgtgtcctggtttgctgtgggctgctactacctgatggtgggccacaagaatgaacatgcccggcgctacctgagcaaggccaccaccctggagaagacctacggccctgcctggatcgcctacggccacagctttgctgtggagagcgagcatgaccaggccatggccgcctacttcaccgctgcccagctgatgaagggctgccacctgcccatgctgtacatcggcctggagtatggcctgaccaacaacagcaagctggccgagcgcttcttcagccaggccctgagcatcgcccctgaggacccctttgtgatgcatgaggtgggcgtggtggccttccagaatggagagtggaagacagctgagaagtggttcctggatgccctggagaagatcaaggccatcggaaatgaggtgacagtggacaagtgggagcccctgctgaacaacctgggccacgtgtgcaggaagctgaagaagtatgcagaggccctggactaccaccggcaggccctggtgctgatcccccagaatgccagcacctacagcgccatcggctacatccacagcctgatgggcaactttgaaaatgctgtggactacttccacacagccctgggcctgcggagagatgacaccttctctgtgaccatgctgggccactgcatcgagatgtacatcggggacagcgaggcctacatcggggctgacatcaaggacaagctgaagtgctatgactttgatgtgcacaccatgaagaccctgaagaacatcatcagccccccctgggacttccgggagtttgaggtggagaagcagacagctgaggagaccggcctgacccccctggagaccagcaggaagaccccagacagccggcccagcctggaggagacctttgaaattgagatgaatgaaagtgacatgatgctggagacctccatgtctgaccacagcacctag

SEQ ID NO: 18984 - DNA, 1428 bp, synthetic construct
  misc_feature 1..1428: note = Description of Artificial Sequence: Synthetic coding sequence
  source 1..1428: mol_type = other DNA
atggaggagcccatcaacaagaggctgtttgagaagtacctgaaggatgagagcggcttcaaggaccccagcagtgactgggagatgagccagagcagcatcaagagcagcatctgcctgctgcggggcaagatctatgatgccctggacaacagaaccctggccacctacagctacaaggaggccctgaagctggatgtgtactgctttgaggcctttgacctgctgaccagccaccacatgctgacagcccaggaggagaaggagctgctggagagcctgcccctgagcaagctgtgcaatgaggagcaggagctgctgcgcttcctgtttgagaacaagctgaagaagtacaacaagcccagcgagaccgtcatccctgagagcgtggatggcctgcaggagaacctggatgtggtggtgtccctggccgagcggcactactacaactgtgacttcaagatgtgctacaagctgacctctgtggtgatggagaaggaccccttccacgccagctgcctgcctgtgcacatcggcaccctggtggagctgaacaaggccaatgagctgttctacctgagccacaagctggtggacctgtaccccagcaaccctgtgtcctggtttgctgtgggctgctactacctgatggtgggccacaagaatgagcacgcccggcgctacctgagcaaggccaccaccctggagaagacctacggccctgcctggatcgcctacggccacagctttgctgtggagagcgagcatgaccaggccatggccgcctacttcaccgctgcccagctgatgaagggctggaagacagctgagaagtggttcctggatgccctggagaagatcaaggccatcggaaatgaggtgacagtggacaagtgggagcccctgctgaacaacctgggccacgtgtgcaggaagctgaagaagtatgcagaggccctggactaccaccggcaggccctggtgctgatcccccagaatgccagcacctacagcgccatcggctacatccacagcctgatgggcaactttgaaaatgctgtggactacttccacacagccctgggcctgcggagagatgacaccttctctgtgaccatgctgggccactgcatcgagatgtacatcggggacagcgaggcctacatcggggctgacatcaaggacaagctgaagtgctatgactttgatgtgcacaccatgaagaccctgaagaacatcatcagccccccctgggacttccgggagtttgaggtggagaagcagacagctgaggagaccggcctgacccccctggagaccagcaggaagaccccagacagccggcccagcctggaggagacctttgaaattgagatgaatgaaagtgacatgatgctggagacctccatgtctgaccacagcacctag

SEQ ID NO: 18985 - DNA, 1863 bp, synthetic construct
  misc_feature 1..1863: note = Description of Artificial Sequence: Synthetic coding sequence
  source 1..1863: mol_type = other DNA
atgaacctggagcggctgaggaagagggtgcggcagtacctggaccagcagcagtaccagagcgccctcttctgggccgacaaggtggccagcctgagccgggaggagccccaggacatctactggctggcccagtgcctgtacctgacagcccagtaccaccgggccgcccacgccctgcggagcaggaagctggacaagctgtatgaggcctgccgctacctggccgcccgctgccactacgccgccaaggagcaccagcaggccctggatgtgctggacatggaggagcccatcaacaagaggctgtttgagaagtacctgaaggatgagagcggcttcaaggaccccagcagtgactgggagatgagccagagcagcatcaagagcagcatctgcctgctgcggggcaagatctatgatgccctggacaacagaaccctggccacctacagctacaaggaggccctgaagctggatgtgtactgctttgaggcctttgacctgctgaccagccaccacatgctgacagcccaggaggagaaggagctgctggagagcctgcccctgagcaagctgtgcaatgaggagcaggagctgctgcgcttcctgtttgagaacaagctgaagaagtacaacaagcccagcgagaccgtcatccctgagagcgtggatggcctgcaggagaacctggatgtggtggtgtccctggccgagcggcactactacaactgtgacttcaagatgtgctacaagctgacctctgtggtgatggagaaggaccccttccacgccagctgcctgcctgtgcacatcggcaccctggtggagctgaacaaggccaatgagctgttctacctgagccacaagctggtggacctgtaccccagcaaccctgtgtcctggtttgctgtgggctgctactacctgatggtgggccacaagaatgagcacgcccggcgctacctgagcaaggccaccaccctggagaagacctacggccctgcctggatcgcctacggccacagctttgctgtggagagcgagcatgaccaggccatggccgcctacttcaccgctgcccagctgatgaagggctgccacctgcccatgctgtacatcggcctggagtatggcctgaccaacaacagcaagctggccgagcgcttcttcagccaggccctgagcatcgcccctgaggacccctttgtgatgcatgaggtgggcgtggtggccttccagaatggagagtggaagacagctgagaagtggttcctggatgccctggagaagatcaaggccatcggaaatgaggtgacagtggacaagtgggagcccctgctgaacaacctgggccacgtgtgcaggaagctgaagaagtatgcagaggccctggactaccaccggcaggccctggtgctgatcccccagaatgccagcacctacagcgccatcggctacatccacagcctgatgggcaactttgaaaatgctgtggactacttccacacagccctgggcctgcggagagatgacaccttctctgtgaccatgctgggccactgcatcgagatgtacatcggggacagcgaggcctacatcggggctgacatcaaggacaagctgaagtgctatgactttgatgtgcacaccatgaagaccctgaagaacatcatcagccccccctgggacttccgggagtttgaggtggagaagcagacagctgaggagaccggcctgacccccctggagaccagcaggaagaccccagacagccggcccagcctggaggagacctttgaaattgagatgaatgaaagtgacatgatgctggagacctccatgtctgaccacagcacctag

SEQ ID NO: 18986 - DNA, 1863 bp, synthetic construct; identical to SEQ ID NO: 18985
  misc_feature 1..1863: note = Description of Artificial Sequence: Synthetic coding sequence
  source 1..1863: mol_type = other DNA

SEQ ID NO: 18987 - DNA, 1581 bp, synthetic construct
  misc_feature 1..1581: note = Description of Artificial Sequence: Synthetic coding sequence
  source 1..1581: mol_type = other DNA
atggaggagcccatcaacaagaggctgtttgagaagtacctgaaggatgagagcggcttcaaggaccccagcagtgactgggagatgagccagagcagcatcaagagcagcatctgcctgctgcggggcaagatctatgatgccctggacaacagaaccctggccacctacagctacaaggaggccctgaagctggatgtgtactgctttgaggcctttgacctgctgaccagccaccacatgctgacagcccaggaggagaaggagctgctggagagcctgcccctgagcaagctgtgcaatgaggagcaggagctgctgcgcttcctgtttgagaacaagctgaagaagtacaacaagcccagcgagaccgtcatccctgagagcgtggatggcctgcaggagaacctggatgtggtggtgtccctggccgagcggcactactacaactgtgacttcaagatgtgctacaagctgacctctgtggtgatggagaaggaccccttccacgccagctgcctgcctgtgcacatcggcaccctggtggagctgaacaaggccaatgagctgttctacctgagccacaagctggtggacctgtaccccagcaaccctgtgtcctggtttgctgtgggctgctactacctgatggtgggccacaagaatgagcacgcccggcgctacctgagcaaggccaccaccctggagaagacctacggccctgcctggatcgcctacggccacagctttgctgtggagagcgagcatgaccaggccatggccgcctacttcaccgctgcccagctgatgaagggctgccacctgcccatgctgtacatcggcctggagtatggcctgaccaacaacagcaagctggccgagcgcttcttcagccaggccctgagcatcgcccctgaggacccctttgtgatgcatgaggtgggcgtggtggccttccagaatggagagtggaagacagctgagaagtggttcctggatgccctggagaagatcaaggccatcggaaatgaggtgacagtggacaagtgggagcccctgctgaacaacctgggccacgtgtgcaggaagctgaagaagtatgcagaggccctggactaccaccggcaggccctggtgctgatcccccagaatgccagcacctacagcgccatcggctacatccacagcctgatgggcaactttgaaaatgctgtggactacttccacacagccctgggcctgcggagagatgacaccttctctgtgaccatgctgggccactgcatcgagatgtacatcggggacagcgaggcctacatcggggctgacatcaaggacaagctgaagtgctatgactttgatgtgcacaccatgaagaccctgaagaacatcatcagccccccctgggacttccgggagtttgaggtggagaagcagacagctgaggagaccggcctgacccccctggagaccagcaggaagaccccagacagccggcccagcctggaggagacctttgaaattgagatgaatgaaagtgacatgatgctggagacctccatgtctgaccacagcacctag

SEQ ID NO: 18988 - DNA, 1581 bp, synthetic construct; identical to SEQ ID NO: 18987
  misc_feature 1..1581: note = Description of Artificial Sequence: Synthetic coding sequence
  source 1..1581: mol_type = other DNA

SEQ ID NO: 18989 - DNA, 1428 bp, synthetic construct; identical to SEQ ID NO: 18984
  misc_feature 1..1428: note = Description of Artificial Sequence: Synthetic coding sequence
  source 1..1428: mol_type = other DNA

SEQ ID NO: 18990 - DNA, 1500 bp, synthetic construct
  misc_feature 1..1500: note = Description of Artificial Sequence: Synthetic coding sequence
  source 1..1500: mol_type = other DNA
atggcccagtttgcctttgaaagtgacctgcacagcctgctgcagctggatgcccccatccccaatgcccccccagcccgctggcagaggaaggccaaggaggccgccggccctgcccccagccccatgagagctgccaacagaagccacagcgctggccgcaccccaggccgcacccctgggaagagcagcagcaaggtgcagaccacccccagcaagccaggaggagaccgctacatcccccacaggtctgctgcccagatggaggtggccagcttcctgctgagcaaggagaaccagcctgagaacagccagacccccaccaagaaggagcaccagaaggcctgggccctgaacctgaatggatttgatgtggaggaggccaagatcctgcggctgagcggcaagccccagaatgcccctgagggctaccagaaccggctgaaggtgctgtacagccagaaggccaccccaggcagcagcaggaagacctgccgctacatccccagcctgcctgaccgcatcctggatgcccctgagatcagaaatgactactacctgaacctggtggactggagcagtggaaatgtgctggccgtggccctggacaacagcgtgtacctgtggagcgccagcagcggggacatcctgcagctgctgcagatggagcagcctggagagtacatcagctctgtggcctggatcaaggagggcaactacctggccgtgggcaccagcagcgctgaggtgcagctgtgggatgtgcagcagcagaagaggctgaggaacatgaccagccacagcgcccgggtgggcagcctgtcctggaacagctacatcctgagcagcggcagccgcagcggccacatccaccaccatgatgtgcgggtggccgagcaccacgtggccaccctgagcggccacagccaggaggtgtgtggcctgcgctgggccccagatggccgccacctggccagcggcggcaatgacaacctggtgaatgtgtggcccagcgcccctggagagggcggctgggtgcccctgcagaccttcacccagcaccagggcgctgtgaaggctgtggcctggtgcccctggcagagcaatgtgctggccactggaggcggcaccagtgacagacacatccgcatctggaatgtgtgcagcggggcctgcctgtctgctgtggatgcccacagccaggtgtgcagcatcctgtggagcccccactacaaggagctgatcagcggccacggctttgcccagaaccagctggtgatctggaagtaccccaccatggccaaggtggccgagctgaagggccacaccagccgggtgctgagcctgaccatgagcccagatggagccaccgtggccagcgctgctgctgatgagaccctgcggctgtggcgctgctttgagctggaccctgcccggcggcgggagcgggagaaggccagcgctgccaagagcagcctcatccaccagggcatcagatag

SEQ ID NO: 18991 - DNA, 1500 bp, synthetic construct; identical to SEQ ID NO: 18990
  misc_feature 1..1500: note = Description of Artificial Sequence: Synthetic coding sequence
  source 1..1500: mol_type = other DNA

SEQ ID NO: 18992 - DNA, 1428 bp, synthetic construct
  misc_feature 1..1428: note = Description of Artificial Sequence: Synthetic coding sequence
  source 1..1428: mol_type = other DNA
atggcccagtttgcctttgaaagtgacctgcacagcctgctgcagctggatgcccccatccccaatgcccccccagcccgctggcagaggaaggccaaggaggccgccggccctgcccccagccccatgagagctgccaacagaagccacagcgctggccgcaccccaggccgcacccctgggaagagcagcagcaaggtgcagaccacccccagcaaggagaaccagcctgagaacagccagacccccaccaagaaggagcaccagaaggcctgggccctgaacctgaatggatttgatgtggaggaggccaagatcctgcggctgagcggcaagccccagaatgcccctgagggctaccagaaccggctgaaggtgctgtacagccagaaggccaccccaggcagcagcaggaagacctgccgctacatccccagcctgcctgaccgcatcctggatgcccctgagatcagaaatgactactacctgaacctggtggactggagcagtggaaatgtgctggccgtggccctggacaacagcgtgtacctgtggagcgccagcagcggggacatcctgcagctgctgcagatggagcagcctggagagtacatcagctctgtggcctggatcaaggagggcaactacctggccgtgggcaccagcagcgctgaggtgcagctgtgggatgtgcagcagcagaagaggctgaggaacatgaccagccacagcgcccgggtgggcagcctgtcctggaacagctacatcctgagcagcggcagccgcagcggccacatccaccaccatgatgtgcgggtggccgagcaccacgtggccaccctgagcggccacagccaggaggtgtgtggcctgcgctgggccccagatggccgccacctggccagcggcggcaatgacaacctggtgaatgtgtggcccagcgcccctggagagggcggctgggtgcccctgcagaccttcacccagcaccagggcgctgtgaaggctgtggcctggtgcccctggcagagcaatgtgctggccactggaggcggcaccagtgacagacacatccgcatctggaatgtgtgcagcggggcctgcctgtctgctgtggatgcccacagccaggtgtgcagcatcctgtggagcccccactacaaggagctgatcagcggccacggctttgcccagaaccagctggtgatctggaagtaccccaccatggccaaggtggccgagctgaagggccacaccagccgggtgctgagcctgaccatgagcccagatggagccaccgtggccagcgctgctgctgatgagaccctgcggctgtggcgctgctttgagctggaccctgcccggcggcgggagcgggagaaggccagcgctgccaagagcagcctcatccaccagggcatcagatag

SEQ ID NO: 18993 - DNA, 1422 bp, synthetic construct
  misc_feature 1..1422: note = Description of Artificial Sequence: Synthetic coding sequence
  source 1..1422: mol_type = other DNA
atgagcacagagctgttcagcagcacccgggaggagggcagcagcggcagcggccccagcttccgcagcaaccagaggaagatgctgaacctgctgctggagcgggacaccagcttcaccgtgtgcccagatgtgcccaggacccctgtgggcaagttcctgggggacagcgccaacctgagcatcctgagcggcggcacccccaagcgctgcctggacctgagcaacctgagcagtggagagatcacagccacccagctgaccaccagcgctgacctggatgagaccggccacctggacagcagcggcctgcaggaggtgcacctggccggcatgaaccacgaccagcacctgatgaagtgcagccctgcccagctgctgtgcagcacccccaacggcctggaccggggccacaggaagagagatgccatgtgcagcagcagcgccaacaaggaaaatgacaatggaaacctggtggacagcgagatgaagtacctgggcagccccatcaccaccgtgcccaagctggacaagaaccccaacctgggggaggaccaggccgaggagatcagtgatgagctgatggagttcagcctgaaggaccaggaggccaaggtgagccgcagcggcctgtaccgcagccccagcatgcctgagaacctgaaccggccccggctgaagcaggtggagaagttcaaggacaacaccatcccagacaaggtgaagaagaagtacttcagcggccagggcaagctgaggaagggcctgtgcctgaagaagacagtgtccctgtgtgacatcaccatcacccagatgctggaggaggacagcaaccagggccacctgattggagacttcagcaaggtgtgtgccctgcccaccgtgtctgggaagcaccaggacctgaagtatgtgaaccctgagaccgtggccgccctgctgagcggcaagttccagggcctcatcgagaagttctacgtgattgactgccgctacccctatgagtacctgggcggccacatccagggcgccctgaacctgtacagccaggaggagctgttcaacttcttcctgaagaagcccatcgtgcccctggacacccagaagaggatcatcatcgtgttccactgtgagttcagcagcgagcggggccccaggatgtgccgctgcctgcgggaggaggacaggagcctgaaccagtacccagccctgtactacccagagctgtacatcctgaagggcggctacagagacttcttccctgagtacatggagctgtgtgagccccagagctactgccccatgcaccaccaggaccacaagacagagctgctgcgctgccgcagccagagcaaggtgcaggagggggagcggcagctgcgggagcagatcgccctgctggtgaaggacatgagcccctag

SEQ ID NO: 18994 - DNA, 1203 bp, synthetic construct
  misc_feature 1..1203: note = Description of Artificial Sequence: Synthetic coding sequence
  source 1..1203: mol_type = other DNA
atgagcacagagctgttcagcagcacccgggaggagggcagcagcggcagcggccccagcttccgcagcaaccagaggaagatgctgaacctgctgctggagcgggacaccagcttcaccgtgtgcccagatgtgcccaggacccctgtgggcaagttcctgggggacagcgccaacctgagcatcctgagcggcagccctggcttcttccgcaccagcggcagcgccttctcctgggatgacaatggaaacctggtggacagcgagatgaagtacctgggcagccccatcaccaccgtgcccaagctggacaagaaccccaacctgggggaggaccaggccgaggagatcagtgatgagctgatggagttcagcctgaaggaccaggaggccaaggtgagccgcagcggcctgtaccgcagccccagcatgcctgagaacctgaaccggccccggctgaagcaggtggagaagttcaaggacaacaccatcccagacaaggtgaagaagaagtacttcagcggccagggcaagctgaggaagggcctgtgcctgaagaagacagtgtccctgtgtgacatcaccatcacccagatgctggaggaggacagcaaccagggccacctgattggagacttcagcaaggtgtgtgccctgcccaccgtgtctgggaagcaccaggacctgaagtatgtgaaccctgagaccgtggccgccctgctgagcggcaagttccagggcctgattgagaagttctacgtgattgactgccgctacccctatgagtacctgggcggccacatccagggcgccctgaacctgtacagccaggaggagctgttcaacttcttcctgaagaagcccatcgtgcccctggacacccagaagaggatcatcatcgtgttccactgtgagttcagcagcgagcggggccccaggatgtgccgctgcctgcgggaggaggacaggagcctgaaccagtacccagccctgtactacccagagctgtacatcctgaagggcggctacagagacttcttccctgagtacatggagctgtgtgagccccagagctactgccccatgcaccaccaggaccacaagacagagctgctgcgctgccgcagccagagcaaggtgcaggagggggagcggcagctgcgggagcagatcgccctgctggtgaaggacatgagcccctag

SEQ ID NO: 18995 - DNA, 1332 bp, synthetic construct
  misc_feature 1..1332: note = Description of Artificial Sequence: Synthetic coding sequence
  source 1..1332: mol_type = other DNA
atgagcacagagctgttcagcagcacccgggaggagggcagcagcggcagcggccccagcttccgcagcaaccagaggaagatgctgaacctgctgctggagcgggacaccagcttcaccgtgtgcccagatgtgcccaggacccctgtgggcaagttcctgggggacagcgccaacctgagcatcctgagcggcggcacccccaagcgctgcctggacctgagcaacctgagcagtggagagatcacagccacccagctgaccaccagcgctgacctggatgagaccggccacctggacagcagcggcctgcaggaggtgcacctggccggcatgaaccacgaccagcacctgatgaagtgcagcccagacaatggaaacctggtggacagcgagatgaagtacctgggcagccccatcaccaccgtgcccaagctggacaagaaccccaacctgggggaggaccaggccgaggagatcagtgatgagctgatggagttcagcctgaaggaccaggaggccaaggtgagccgcagcggcctgtaccgcagccccagcatgcctgagaacctgaaccggccccggctgaagcaggtggagaagttcaaggacaacaccatcccagacaaggtgaagaagaagtacttcagcggccagggcaagctgaggaagggcctgtgcctgaagaagacagtgtccctgtgtgacatcaccatcacccagatgctggaggaggacagcaaccagggccacctgattggagacttcagcaaggtgtgtgccctgcccaccgtgtctgggaagcaccaggacctgaagtatgtgaaccctgagaccgtggccgccctgctgagcggcaagttccagggcctcatcgagaagttctacgtgattgactgccgctacccctatgagtacctgggcggccacatccagggcgccctgaacctgtacagccaggaggagctgttcaacttcttcctgaagaagcccatcgtgcccctggacacccagaagaggatcatcatcgtgttccactgtgagttcagcagcgagcggggccccaggatgtgccgctgcctgcgggaggaggacaggagcctgaaccagtacccagccctgtactacccagagctgtacatcctgaagggcggctacagagacttcttccctgagtacatggagctgtgtgagccccagagctactgccccatgcaccaccaggaccacaagacagagctgctgcgctgccgcagccagagcaaggtgcaggagggggagcggcagctgcgggagcagatcgccctgctggtgaaggacatgagcccctag

SEQ ID NO: 18996 - DNA, 1293 bp, synthetic construct
  misc_feature 1..1293: note = Description of Artificial Sequence: Synthetic coding sequence
  source 1..1293: mol_type = other DNA
atgagcacagagctgttcagcagcacccgggaggagggcagcagcggcagcggccccagcttccgcagcaaccagaggaagatgctgaacctgctgctggagcgggacaccagcttcaccgtgtgcccagatgtgcccaggacccctgtgggcaagttcctgggggacagcgccaacctgagcatcctgagcggcagccctggcttcttccgcaccagcggcagcgccttctcctgggatgcccagctgctgtgcagcaccccaaatggcctggaccggggccacaggaagagagatgccatgtgcagcagcagcgccaacaaggaaaatgacaatggaaacctggtggacagcgagatgaagtacctgggcagccccatcaccaccgtgcccaagctggacaagaaccccaacctgggggaggaccaggccgaggagatcagtgatgagctgatggagttcagcctgaaggaccaggaggccaaggtgagccgcagcggcctgtaccgcagccccagcatgcctgagaacctgaaccggccccggctgaagcaggtggagaagttcaaggacaacaccatcccagacaaggtgaagaagaagtacttcagcggccagggcaagctgaggaagggcctgtgcctgaagaagacagtgtccctgtgtgacatcaccatcacccagatgctggaggaggacagcaaccagggccacctgattggagacttcagcaaggtgtgtgccctgcccaccgtgtctgggaagcaccaggacctgaagtatgtgaaccctgagaccgtggccgccctgctgagcggcaagttccagggcctgattgagaagttctacgtgattgactgccgctacccctatgagtacctgggcggccacatccagggcgccctgaacctgtacagccaggaggagctgttcaacttcttcctgaagaagcccatcgtgcccctggacacccagaagaggatcatcatcgtgttccactgtgagttcagcagcgagcggggccccaggatgtgccgctgcctgcgggaggaggacaggagcctgaaccagtacccagccctgtactacccagagctgtacatcctgaagggcggctacagagacttcttccctgagtacatggagctgtgtgagccccagagctactgccccatgcaccaccaggaccacaagacagagctgctgcgctgccgcagccagagcaaggtgcaggagggggagcggcagctgcgggagcagatcgccctgctggtgaaggacatgagcccctag

SEQ ID NO: 18997 - DNA, 1203 bp, synthetic construct; identical to SEQ ID NO: 18994
  misc_feature 1..1203: note = Description of Artificial Sequence: Synthetic coding sequence
  source 1..1203: mol_type = other DNA

SEQ ID NO: 18998 - DNA, 750 bp, synthetic construct
  misc_feature 1..750: note = Description of Artificial Sequence: Synthetic coding sequence
  source 1..750: mol_type = other DNA
atgagcacagagctgttcagcagcacccgggaggagggcagcagcggcagcggccccagcttccgcagcaaccagaggaagatgctgaacctgctgctggagcgggacaccagcttcaccgtgtgcccagatgtgcccaggacccctgtgggcaagttcctgggggacagcgccaacctgagcatcctgagcggcggcacccccaagcgctgcctggacctgagcaacctgagcagtggagagatcacagccacccagctgaccaccagcgctgacctggatgagaccggccacctggacagcagcggcctgcaggaggtgcacctggccggcatgaaccacgaccagcacctgatgaagtgcagccctgcccagctgctgtgcagcacccccaacggcctggaccggggccacaggaagagagatgccatgtgcagcagcagcgccaacaaggaaaatgacaatggaaacctggtggacagcgagatgaagtacctgggcagccccatcaccaccgtgcccaagctggacaagaaccccaacctgggggaggaccaggccgaggagatcagtgatgagctgatggagttcagcctgaaggaccaggaggccaaggtgagccgcagcggcctgtaccgcagccccagcatgcctgagaacctgaaccggccccggctgaagcaggtggagaagttcaaggacaacaccatcccagacaaggtgaagaagaagtacttcagcggccagtag

SEQ ID NO: 18999 - DNA, 1422 bp, synthetic construct; identical to SEQ ID NO: 18993
  misc_feature 1..1422: note = Description of Artificial Sequence: Synthetic coding sequence
  source 1..1422: mol_type = other DNA

SEQ ID NO: 19000 - DNA, 1473 bp, synthetic construct
  misc_feature 1..1473: note = Description of Artificial Sequence: Synthetic coding sequence
  source 1..1473: mol_type = other DNA
atgtctgaggaggcccgcttctgcttcagccctggagagaacagcaagaccatgagcacagagctgttcagcagcacccgggaggagggcagcagcggcagcggccccagcttccgcagcaaccagaggaagatgctgaacctgctgctggagcgggacaccagcttcaccgtgtgcccagatgtgcccaggacccctgtgggcaagttcctgggggacagcgccaacctgagcatcctgagcggcggcacccccaagcgctgcctggacctgagcaacctgagcagcggggagatcacagccacccagctgaccaccagcgctgacctggatgaaacaggccacctggacagcagcggcctgcaggaggtgcacctggccggcatgaaccacgaccagcacctgatgaagtgcagccctgcccagctgctgtgcagcaccccaaatggcctggaccggggccacaggaagagagatgccatgtgcagcagcagcgccaacaaggaaaatgacaatggaaacctggtggacagcgagatgaagtacctgggcagccccatcaccaccgtgcccaagctggacaagaaccccaacctgggggaggaccaggccgaggagatcagtgatgagctgatggagttcagcctgaaggaccaggaggccaaggtgagccgcagcggcctgtaccgcagccccagcatgcctgagaacctgaaccggccccggctgaagcaggtggagaagttcaaggacaacaccatcccagacaaggtgaagaagaagtacttcagcggccagggcaagctgaggaagggcctgtgcctgaagaagacagtgtccctgtgtgacatcaccatcacccagatgctggaggaggacagcaaccagggccacctgattggagacttcagcaaggtgtgtgccctgcccaccgtgtctgggaagcaccaggacctgaagtatgtgaaccctgagaccgtggccgccctgctgagcggcaagttccagggcctgattgagaagttctacgtgattgactgccgctacccctatgagtacctgggcggccacatccagggcgccctgaacctgtacagccaggaggagctgttcaacttcttcctgaagaagcccatcgtgcccctggacacccagaagaggatcatcatcgtgttccactgtgagttcagcagcgagcggggccccaggatgtgccgctgcctgcgggaggaggacaggagcctgaaccagtacccagccctgtactacccagagctgtacatcctgaagggcggctacagagacttcttccctgagtacatggagctgtgtgagccccagagctactgccccatgcaccaccaggaccacaagacagagctgctgcgctgccgcagccagagcaaggtgcaggagggggagcggcagctgcgggagcagatcgccctgctggtgaaggacatgagcccctag

SEQ ID NO: 19001 - DNA, 288 bp, synthetic construct
  misc_feature 1..288: note = Description of Artificial Sequence: Synthetic coding sequence
  source 1..288: mol_type = other DNA
atggagggcggctttggaagtgactttggaggcagcggcagcggcaagctggaccccggcctcatcatggagcaggtgaaggtgcagattgctgtggccaatgcccaggagctgctgcagaggatgacagacaagtgcttcagaaaatgtattggcaagccaggcggcagcctggacaacagcgagcagaagtgcatcgccatgtgcatggaccgctacatggatgcctggaacacagtgtcccgggcctacaacagccggctgcagcgggagcgggccaacatgtag

SEQ ID NO: 19002 - DNA, 576 bp, synthetic construct
  misc_feature 1..576: note = Description of Artificial Sequence: Synthetic coding sequence
  source 1..576: mol_type = other DNA
atgcagaccatcaagtgtgtggtggtgggagatggagctgtgggcaagacctgcctgctgatctcctacaccaccaacaagttccccagtgaatatgtgcccaccgtgtttgacaactatgctgtgacagtgatgattggaggagagccctacaccctgggcctgtttgacacagctggccaggaggactatgaccggctgcggcccctgagctacccccagacagatgtgttcctggtgtgcttctctgtggtgagccccagcagctttgaaaatgtgaaggagaagtgggtgcctgagatcacccaccactgccccaagacccccttcctgctggtgggcacccagattgacctgagagatgaccccagcaccatcgagaagctggccaagaacaagcagaagcccatcaccccagagacagctgagaagctggcccgggacctgaaggctgtgaagtatgtggagtgcagcgccctgacccagaggggcctgaagaatgtgtttgatgaggccatcctggccgccctggagcccccagagacccagcccaagaggaagtgctgcatcttctag

SEQ ID NO: 19003 - DNA, 576 bp, synthetic construct
  misc_feature 1..576: note = Description of Artificial Sequence: Synthetic coding sequence
  source 1..576: mol_type = other DNA
atgcagaccatcaagtgtgtggtggtgggagatggagctgtgggcaagacctgcctgctgatctcctacaccaccaacaagttccccagtgaatatgtgcccaccgtgtttgacaactatgctgtgacagtgatgattggaggagagccctacaccctgggcctgtttgacacagctggccaggaggactatgaccggctgcggcccctgagctacccccagacagatgtgttcctggtgtgcttctctgtggtgagccccagcagctttgaaaatgtgaaggagaagtgggtgcctgagatcacccaccactgccccaagacccccttcctgctggtgggcacccagattgacctgagagatgaccccagcaccatcgagaagctggccaagaacaagcagaagcccatcaccccagagacagctgagaagctggcccgggacctgaaggctgtgaagtatgtggagtgcagcgccctgacccagaagggcctgaagaatgtgtttgatgaggccatcctggccgccctggagcccccagagcccaagaagagccgccgctgtgtgctgctgtag

SEQ ID NO: 19004 - DNA, 576 bp, synthetic construct; identical to SEQ ID NO: 19003
  misc_feature 1..576: note = Description of Artificial Sequence: Synthetic coding sequence
  source 1..576: mol_type = other DNA

SEQ ID NO: 19005 - DNA, 411 bp, synthetic construct
  misc_feature 1..411: note = Description of Artificial Sequence: Synthetic coding sequence
  source 1..411: mol_type = other DNA
atgcagaccatcaagtgtgtggtggtgggagatggagctgtgggcaagacctgcctgctgatctcctacaccaccaacaagttccccagtgaatatgtgcccaccgtgtttgacaactatgctgtgacagtgatgattggaggagagccctacaccctgggcctgtttgacacagctggccaggaggactatgaccggctgcggcccctgagctacccccagacagatgtgttcctggtgtgcttctctgtggtgagccccagcagctttgaaaatgtgaaggagaagtgggtgcctgagatcacccaccactgccccaagacccccttcctgctggtgggcacccagattgacctgagagatgaccccagcaccatcgagaagctggccaagaacaagcagaagccctag

SEQ ID NO: 19006 - DNA, 702 bp, synthetic construct
  misc_feature 1..702: note = Description of Artificial Sequence: Synthetic coding sequence
  source 1..702: mol_type = other DNA
atgagcccagacatcctgcacaacaagcagatcagcatcggcatctgcacagactacctggacttctcctgggtgaactacatccacttcaagcagctgaagaaccagtggaaggtgcggcggggggacaccggctttgcccggtctgctggccggcagaacagcagccggcaggacagcaatgagtggtggagccagtttggagaggtgtgccccacctcctggaatgaggtgtttgacaactatgctgtgacagtgatgattggaggagagccctacaccctgggcctgtttgacacagctggccaggaggactatgaccggctgcggcccctgagctacccccagacagatgtgttcctggtgtgcttctctgtggtgagccccagcagctttgaaaatgtgaaggagaagtgggtgcctgagatcacccaccactgccccaagacccccttcctgctggtgggcacccagattgacctgagagatgaccccagcaccatcgagaagctggccaagaacaagcagaagcccatcaccccagagacagctgagaagctggcccgggacctgaaggctgtgaagtatgtggagtgcagcgccctgacccagaagggcctgaagaatgtgtttgatgaggccatcctggccgccctggagcccccagagcccaagaagagccgccgctgtgtgctgctgtag

SEQ ID NO: 19007 - DNA, 1269 bp, synthetic construct
  misc_feature 1..1269: note = Description of Artificial Sequence: Synthetic coding sequence
  source 1..1269: mol_type = other DNA
atgaacagcggccacagcttcagccagacccccagcgccagcttccacggggccggcggcggctggggccggcccaggagcttcccccgggcccccaccgtgcatggaggagctgggggcgcccgcatcagcctgtccttcaccaccaggagctgccccccacctgggggctcctggggcagcggccgcagcagccccctgctgggcggcaatggcaaggccaccatgcagaacctgaatgaccggctggccagctacctggagaaggtgcgggccctggaggaggccaacatgaagctggagagccgcatcctgaagtggcaccagcagagggaccccggcagcaagaaggactacagccagtatgaggagaacatcacccacctgcaggagcagatcgtggatggcaagatgaccaatgcccagatcatcctgctgattgacaatgccaggatggctgtggatgacttcaacctgaagtatgaaaatgagcacagcttcaagaaggacctggagattgaggtggagggcctgcggaggaccctggacaacctgaccatcgtgaccacagacctggagcaggaggtggagggcatgaggaaggagctgatcctgatgaagaagcaccacgagcaggagatggagaagcaccacgtgcccagcgacttcaacgtgaatgtgaaggtggacaccggccccagagaagatctcatcaaggtgctggaggacatgaggcaggagtatgagctgatcatcaagaagaagcaccgggacctggacacctggtacaaggagcagagcgctgccatgagccaggaggccgccagccctgccaccgtgcagagccggcagggcgacatccacgagctgaagaggaccttccaggccctggagattgacctgcagacccagtacagcaccaagagcgccctggagaacatgctgtctgagacccagagccgctacagctgcaagctgcaggacatgcaggagatcatcagccactatgaggaggagctgacccagctgcggcatgagctggagcggcagaacaatgagtaccaggtgctgctgggcatcaagacccacctggagaaggagatcaccacctaccgccgcctgctggagggggagagcgagggcacccgggaggagagcaagagctccatgaaggtgtctgccacccccaagatcaaggccatcacccaggagaccatcaatggccgcctggtgctgtgccaggtgaatgagatccagaagcacgcctag

SEQ ID NO: 19008 - DNA, 1596 bp, synthetic construct
  misc_feature 1..1596: note = Description of Artificial Sequence: Synthetic coding sequence
  source 1..1596: mol_type = other DNA
atggctgatgtgctgtctgtgctgcggcagtacaacatccagaagaaggagatcgtggtgaagggagatgaagtcatctttggagagttctcctggcccaagaatgtgaagaccaactacgtggtgtggggcaccgggaaggagggccagccccgggagtactacaccctggacagcatcctcttcctgctgaacaacgtgcacctgagccaccctgtgtatgtgcggcgggccgccacagagaacatccctgtggtgagaagaccagacaggaaggacctgctgggctacctgaatggagaggccagcaccagcgccagcattgacagaagtgcccccctggagatcggcctgcagaggagcacccaggtgaagagagctgctgatgaggtgctggccgaggccaagaagcccagaattgaagatgaggagtgtgtgcggctggacaaggagcggctggccgcccggctggagggccacaaggagggcatcgtgcagacagagcagatccgcagcctgtctgaggccatgtctgtggagaagattgctgccatcaaggccaagatcatggccaagaagaggagcaccatcaagacagacctggatgatgacatcacagccctgaagcagaggagctttgtggatgctgaggtggatgtgacccgggacatcgtgtcccgggagcgggtgtggaggaccaggaccaccatcctgcagagcacaggcaagaacttcagcaagaacatctttgccatcctgcagagcgtgaaggcccgggaggagggccgggcccctgagcagaggcctgccccaaatgctgcccctgtggaccccaccctgcggaccaagcagcccatcccagctgcctacaacagatatgaccaggagcgcttcaagggcaaggaggagacagagggcttcaagattgacaccatgggcacctaccacggcatgaccctgaagtctgtgacagagggcgccagcgccaggaagacccagaccccagctgcccagcctgtgcccaggcctgtgtcccaggcccggcccccacccaaccagaagaagggcagcaggacccccatcatcatcatcccagctgccaccaccagcctcatcaccatgctgaatgccaaggacctgctgcaggacctgaagtttgtgcccagtgatgagaagaagaagcagggctgccagcgggagaatgagaccctcatccagaggaggaaggaccagatgcagcccggcggcacagccatctctgtgacagtgccctacagagtggtggaccagcccctgaagctgatgccccaggactgggacagagtggtggccgtgtttgtgcagggccctgcctggcagttcaagggctggccctggctgctgcctgatggcagccctgtggacatctttgccaagatcaaggccttccacctgaagtatgatgaggtgcggctggaccccaacgtgcagaagtgggatgtgacagtgctggagctgagctaccacaagaggcacctggacaggcctgtgttcctgcgcttctgggagaccctggaccgctacatggtgaagcacaagagccacctgcgcttctag

SEQ ID NO: 19009 - DNA, 951 bp, synthetic construct
  misc_feature 1..951: note = Description of Artificial Sequence: Synthetic coding sequence
  source 1..951: mol_type = other DNA
atggctgatgtgctgtctgtgctgcggcagtacaacatccagaagaaggagatcgtggtgaagggagatgaagtcatctttggagagttctcctggcccaagaatgtgaagaccaactacgtggtgtggggcaccgggaaggagggccagccccgggagtactacaccctggacagcatcctcttcctgctgaacaacgtgcacctgagccaccctgtgtatgtgcggcgggccgccacagagaacatccctgtggtgagaagaccagacaggaaggacctgctgggctacctgaatggagaggccagcaccagcgccagcattgacagaagtgcccccctggagatcggcctgcagaggagcacccaggtgaagagagctgctgatgaggtgctggccgaggccaagaagcccagaattgaagatgaggagtgtgtgcggctggacaaggagcggctggccgcccggctggagggccacaaggagggcatcgtgcagacagagcagatccgcagcctgtctgaggccatgtctgtggagaagattgctgccatcaaggccaagatcatggccaagaagaggagcaccatcaagacagacctggatgatgacatcacagccctgaagcagaggagctttgtggatgctgaggtggatgtgacccgggacatcgtgtcccgggagcgggtgtggaggaccaggaccaccatcctgcagagcacaggcaagaacttcagcaagaacatctttgccatcctgcagagcgtgaaggcccgggaggagggccgggcccctgagcagaggcctgccccaaatgctgcccctgtggaccccaccctgcggaccaagcagcccatcccagctgcctacaacagatatgaccaggagcgcatcagcaacacccactaccacaacagctgcagctaccacctgttcaacaaccacgcctag

SEQ ID NO: 19010 - DNA, 1317 bp, synthetic construct
  misc_feature 1..1317: note = Description of Artificial Sequence: Synthetic coding sequence
  source 1..1317: mol_type = other DNA
atgggcggctgtgccggcagcagaagacgcttcagtgacagcgagggggaggagaccgtgcctgagccccggctgcccctgctggaccaccagggcgcccactggaagaatgctgtgggcttctggctgctgggcctgtgcaacaacttctcctatgtggtgatgctgtctgctgcccatgacatcctgagccacaagaggaccagcggcaaccagagccacgtggaccccggccccacccccatcccccacaacagcagcagcagatttgactgcaacagcgtgtccacagctgctgtgctgctggccgacatcctgcccaccctggtgatcaagctgctggcccccctgggcctgcacctgctgccctacagcccccgggtgctggtgtctggcatctgtgccgccggcagctttgtgctggtggccttcagccacagcgtgggcaccagcctgtgtggggtggtgtttgccagcatcagcagcggcctgggggaggtgaccttcctgagcctgacagccttctaccccagggctgtgatctcctggtggagcagcggcaccggcggggccggcctgctgggcgccctgagctacctgggcctgacccaggccggcctgagcccccagcagaccctgctgtccatgctgggcatcccagccctgctgctggccagctacttcctgctgctgaccagccctgaggcccaggaccctggaggagaggaggaggccgagagcgctgcccggcagcccctcatcagaacagaggcccctgagagcaagccaggcagcagcagcagcctgagcctgcgggagcgctggacagtgttcaagggcctgctgtggtacatcgtgcccctggtggtggtgtactttgctgagtacttcatcaaccagggcctgtttgagctgctcttcttctggaacaccagcctgagccacgcccagcagtaccgctggtaccagatgctgtaccaggccggcgtgtttgccagccgcagcagcctgcgctgctgccgcatccgcttcacctgggccctggccctgctgcagtgcctgaacctggtgttcctgctggctgatgtgtggtttggcttcctgcccagcatctacctggtgttcctgatcatcctgtatgagggcctgctgggcggggccgcctacgtgaacaccttccacaacatcgccctggagaccagtgatgagcaccgggagtttgccatggccgccacctgcatcagtgacaccctgggcatcagcctgagcggcctgctggccctgcccctgcatgacttcctgtgccagctgtcctag

SEQ ID NO: 19011 - DNA, 504 bp, synthetic construct
  misc_feature 1..504: note = Description of Artificial Sequence: Synthetic coding sequence
  source 1..504: mol_type = other DNA
atgggcggctgtgccggcagcagaagacgcttcagtgacagcgagggggaggagaccgtgcctgagccccggctgcccctgctggaccaccagggcgcccactggaagaatgctgtgggcttctggctgctgggcctgtgcaacaacttctcctatgtggtgatgctgtctgctgcccatgacatcctgagccacaagaggaccagcggcaaccagagccaccccccaggcagccggcagtgggacctgtgctgctggaagctgcggcccggctgcctcttctccttctgtggggaccagcctgtgtgctacttcctgctgctgaccagccctgaggcccaggaccccggcggggaggaggaggccgagagcgctgcccggcagcccctcatcagaacagaggcccctgagagcaagccaggcagcagcagcagcctgagcctgcgggagcgctggacagtgttcaagggcctgctgtggtacatcgtgcccctggtggtgtag

SEQ ID NO: 19012 - DNA, 1266 bp, synthetic construct
  misc_feature 1..1266: note = Description of Artificial Sequence: Synthetic coding sequence
  source 1..1266: mol_type = other DNA
atgggcggctgtgccggcagcagaagacgcttcagtgacagcgagggggaggagaccgtgcctgagccccggctgcccctgctggaccaccagggcgcccactggaagaatgctgtgggcttctggctgctgggcctgtgcaacaacttctcctatgtggtgatgctgtctgctgcccatgacatcctgagccacaagaggaccagcggcaaccagagccacgtggaccccggccccacccccatcccccacaacagcagcagcagatttgactgcaacagcgtgtccacagctgctgtgctgctggccgacatcctgcccaccctggtgatcaagctgctggcccccctgggcctgcacctgctgccctacagcccccgggtgctggtgtctggcatctgtgccgccggcagctttgtgctggtggccttcagccacagcgtgggcaccagcctgtgtggggtggtgtttgccagcatcagcagcggcctgggggaggtgaccttcctgagcctgacagccttctaccccagggctgtgatctcctggtggagcagcggcaccggcggggccggcctgctgggcgccctgagctacctgggcctgacccaggccggcctgagcccccagcagaccctgctgtccatgctgggcatcccagccctgctgctggccagctacttcctgctgctgaccagccctgaggcccaggaccctggaggagaggaggaggccgagagcgctgcccggcagcccctcatcagaacagaggcccctgagagcaagccaggcagcagcagcagcctgagcctgcgggagcgctggacagtgttcaaggtgaggatgatggccggctttgagctgctcttcttctggaacaccagcctgagccacgcccagcagtaccgctggtaccagatgctgtaccaggccggcgtgtttgccagccgcagcagcctgcgctgctgccgcatccgcttcacctgggccctggccctgctgcagtgcctgaacctggtgttcctgctggctgatgtgtggtttggcttcctgcccagcatctacctggtgttcctgatcatcctgtatgagggcctgctgggcggggccgcctacgtgaacaccttccacaacatcgccctggagaccagtgatgagcaccgggagtttgccatggccgccacctgcatcagtgacaccctgggcatcagcctgagcggcctgctggccctgcccctgcatgacttcctgtgccagctgtcctag

SEQ ID NO: 19013 - DNA, 1173 bp, synthetic construct
  misc_feature 1..1173: note = Description of Artificial Sequence: Synthetic coding sequence
  source 1..1173: mol_type = other DNA
atgggcggctgtgccggcagcagaagacgcttcagtgacagcgagggggaggagaccgtgcctgagccccggctgcccctgctggaccaccagggcgcccactggaagaatgctgtgggcttctggctgctgggcctgtgcaacaacttctcctatgtggtgatgctgtctgctgcccatgacatcctgagccacaagaggaccagcggcaaccagagccacgtggaccccggccccacccccatcccccacaacagcagcagcagatttgactgcaacagcgtgtccacagctgctgtgctgctggccgacatcctgcccaccctggtgatcaagctgctggcccccctgggcctgcacctgctgccctacagcccccgggtgctggtgtctggcatctgtgccgccggcagctttgtgctggtggccttcagccacagcgtgggcaccagcctgtgtggggtggtgtttgccagcatcagcagcggcctgggggaggtgaccttcctgagcctgacagccttctaccccagctacttcctgctgctgaccagccctgaggcccaggaccctggaggagaggaggaggccgagagcgctgcccggcagcccctcatcagaacagaggcccctgagagcaagccaggcagcagcagcagcctgagcctgcgggagcgctggacagtgttcaagggcctgctgtggtacatcgtgcccctggtggtggtgtactttgctgagtacttcatcaaccagggcctgtttgagctgctcttcttctggaacaccagcctgagccacgcccagcagtaccgctggtaccagatgctgtaccaggccggcgtgtttgccagccgcagcagcctgcgctgctgccgcatccgcttcacctgggccctggccctgctgcagtgcctgaacctggtgttcctgctggctgatgtgtggtttggcttcctgcccagcatctacctggtgttcctgatcatcctgtatgagggcctgctgggcggggccgcctacgtgaacaccttccacaacatcgccctggagaccagtgatgagcaccgggagtttgccatggccgccacctgcatcagtgacaccctgggcatcagcctgagcggcctgctggccctgcccctgcatgacttcctgtgccagctgtcctag

SEQ ID NO: 19014 - DNA, 762 bp, synthetic construct
  misc_feature 1..762: note = Description of Artificial Sequence: Synthetic coding sequence
  source 1..762: mol_type = other DNA
atgggcggctgtgccggcagcagaagacgcttcagtgacagcgagggggaggagaccgtgcctgagccccggctgcccctgctggaccaccagggcgcccactggaagaatgctgtgggcttctggctgctgggcctgtgcaacaacttctcctatgtggtgatgctgtctgctgcccatgacatcctgagccacaagaggaccagcggcaaccagagccacgtggaccccggccccacccccatcccccacaacagcagcagcagatttgactgcaacagcgtgtccacagctgctgtgctgctggccgacatcctgcccaccctggtgatcaagctgctggcccccctgggcctgcacctgctgccctacagcccccgggtgctggtgtctggcatctgtgccgccggcagctttgtgctggtggccttcagccacagcgtgggcaccagcctgtgtggcagcagcagcagcctgagcctgcgggagcgctggacagtgttcaagggcctgctgtggtacatcgtgcccctggtggtggtgtactttgctgagtacttcatcaaccagggcctgtttgagctgctcttcttctggaacaccagcctgagccacgcccagcagtaccgctggtaccagatgctgtaccaggccggcgtgtttgccagccgcagcagcctgcgctgctgccgcatccgcttcacctgggccctggccctgctgcagatggagagccgctctgtggcccaggccggcatgtag

SEQ ID NO: 19015 - DNA, 1020 bp, synthetic construct
  misc_feature 1..1020: note = Description of Artificial Sequence: Synthetic coding sequence
  source 1..1020: mol_type = other DNA
atgggcggctgtgccggcagcagaagacgcttcagtgacagcgagggggaggagaccgtgcctgagccccggctgcccctgctggaccaccagggcgcccactggaagaatgctgtgggcttctggctgctgggcctgtgcaacaacttctcctatgtggtgatgctgtctgctgcccatgacatcctgagccacaagaggaccagcggcaaccagagccacgtggaccccggccccacccccatcccccacaacagcagcagcagatttgactgcaacagcgtgtccacagcccctcctggcagccggcagtgggacctgtgctgctggaagctgcggcccggctgcctcttctccttctgtggggaccagcctgtgtgctacttcctgctgctgaccagccctgaggcccaggaccccggcggggaggaggaggccgagagcgctgcccggcagcccctcatcagaacagaggcccctgagagcaagccaggcagcagcagcagcctgagcctgcgggagcgctggacagtgttcaagggcctgctgtggtacatcgtgcccctggtggtggtgtactttgctgagtacttcatcaaccagggcctgtttgagctgctcttcttctggaacaccagcctgagccacgcccagcagtaccgctggtaccagatgctgtaccaggccggcgtgtttgccagccgcagcagcctgcgctgctgccgcatccgcttcacctgggccctggccctgctgcagtgcctgaacctggtgttcctgctggctgatgtgtggtttggcttcctgcccagcatctacctggtgttcctgatcatcctgtatgagggcctgctgggcggggccgcctacgtgaacaccttccacaacatcgccctggagaccagtgatgagcaccgggagtttgccatggccgccacctgcatcagtgacaccctgggcatcagcctgagcggcctgctggccctgcccctgcatgacttcctgtgccagctgtcctag

SEQ ID NO: 19016 - DNA, 1155 bp, synthetic construct
  misc_feature 1..1155: note = Description of Artificial Sequence: Synthetic coding sequence
  source 1..1155: mol_type = other DNA
atgctgtctgctgcccatgacatcctgagccacaagaggaccagcggcaaccagagccacgtggaccccggccccacccccatcccccacaacagcagcagcagatttgactgcaacagcgtgtccacagctgctgtgctgctggccgacatcctgcccaccctggtgatcaagctgctggcccccctgggcctgcacctgctgccctacagcccccgggtgctggtgtctggcatctgtgccgccggcagctttgtgctggtggccttcagccacagcgtgggcaccagcctgtgtggggtggtgtttgccagcatcagcagcggcctgggggaggtgaccttcctgagcctgacagccttctaccccagggctgtgatctcctggtggagcagcggcaccggcggggccggcctgctgggcgccctgagctacctgggcctgacccaggccggcctgagcccccagcagaccctgctgtccatgctgggcatcccagccctgctgctggccagctacttcctgctgctgaccagccctgaggcccaggaccctggaggagaggaggaggccgagagcgctgcccggcagcccctcatcagaacagaggcccctgagagcaagccaggcagcagcagcagcctgagcctgcgggagcgctggacagtgttcaagggcctgctgtggtacatcgtgcccctggtggtggtgtactttgctgagtacttcatcaaccagggcctgtttgagctgctcttcttctggaacaccagcctgagccacgcccagcagtaccgctggtaccagatgctgtaccaggccggcgtgtttgccagccgcagcagcctgcgctgctgccgcatccgcttcacctgggccctggccctgctgcagtgcctgaacctggtgttcctgctggctgatgtgtggtttggcttcctgcccagcatctacctggtgttcctgatcatcctgtatgagggcctgctgggcggggccgcctacgtgaacaccttccacaacatcgccctggagaccagtgatgagcaccgggagtttgccatggccgccacctgcatcagtgacaccctgggcatcagcctgagcggcctgctggccctgcccctgcatgacttcctgtgccagctgtcctag

SEQ ID NO: 19017 - DNA, 1317 bp, synthetic construct; identical to SEQ ID NO: 19010
  misc_feature 1..1317: note = Description of Artificial Sequence: Synthetic coding sequence
  source 1..1317: mol_type = other DNA

SEQ ID NO: 19018 - DNA, 1317 bp, synthetic construct; identical to SEQ ID NO: 19010
  misc_feature 1..1317: note = Description of Artificial Sequence: Synthetic coding sequence
  source 1..1317: mol_type = other DNA

SEQ ID NO: 19019 - DNA, 1017 bp, synthetic construct
  misc_feature 1..1017: note = Description of Artificial Sequence: Synthetic coding sequence
  source 1..1017: mol_type = other DNA
atgtggacccaggcccagaggaggagccccaccacagcccaccacgacctgacagccaccctgagcctgcggctgccccgggtgctggtgtctggcatctgtgccgccggcagctttgtgctggtggccttcagccacagcgtgggcaccagcctgtgtggggtggtgtttgccagcatcagcagcggcctgggggaggtgaccttcctgagcctgacagccttctaccccagggctgtgatctcctggtggagcagcggcaccggcggggccggcctgctgggcgccctgagctacctgggcctgacccaggccggcctgagcccccagcagaccctgctgtccatgctgggcatcccagccctgctgctggccagctacttcctgctgctgaccagccctgaggcccaggaccctggaggagaggaggaggccgagagcgctgcccggcagcccctcatcagaacagaggcccctgagagcaagccaggcagcagcagcagcctgagcctgcgggagcgctggacagtgttcaagggcctgctgtggtacatcgtgcccctggtggtggtgtactttgctgagtacttcatcaaccagggcctgtttgagctgctcttcttctggaacaccagcctgagccacgcccagcagtaccgctggtaccagatgctgtaccaggccggcgtgtttgccagccgcagcagcctgcgctgctgccgcatccgcttcacctgggccctggccctgctgcagtgcctgaacctggtgttcctgctggctgatgtgtggtttggcttcctgcccagcatctacctggtgttcctgatcatcctgtatgagggcctgctgggcggggccgcctacgtgaacaccttccacaacatcgccctggagaccagtgatgagcaccgggagtttgccatggccgccacctgcatcagtgacaccctgggcatcagcctgagcggcctgctggccctgcccctgcatgacttcctgtgccagctgtcctag

SEQ ID NO: 19020 - DNA, 1083 bp, synthetic construct
  misc_feature 1..1083: note = Description of Artificial Sequence: Synthetic coding sequence
  source 1..1083: mol_type = other DNA
atgctgtctgctgcccatgacatcctgagccacaagaggaccagcggcaaccagagccatgctgtgctgctggccgacatcctgcccaccctggtgatcaagctgctggcccccctgggcctgcacctgctgccctacagcccccgggtgctggtgtctggcatctgtgccgccggcagctttgtgctggtggccttcagccacagcgtgggcaccagcctgtgtggggtggtgtttgccagcatcagcagcggcctgggggaggtgaccttcctgagcctgacagccttctaccccagggctgtgatctcctggtggagcagcggcaccggcggggccggcctgctgggcgccctgagctacctgggcctgacccaggccggcctgagcccccagcagaccctgctgtccatgctgggcatcccagccctgctgctggccagctacttcctgctgctgaccagccctgaggcccaggaccctggaggagaggaggaggccgagagcgctgcccggcagcccctcatcagaacagaggcccctgagagcaagccaggcagcagcagcagcctgagcctgcgggagcgctggacagtgttcaagggcctgctgtggtacatcgtgcccctggtggtggtgtactttgctgagtacttcatcaaccagggcctgtttgagctgctcttcttctggaacaccagcctgagccacgcccagcagtaccgctggtaccagatgctgtaccaggccggcgtgtttgccagccgcagcagcctgcgctgctgccgcatccgcttcacctgggccctggccctgctgcagtgcctgaacctggtgttcctgctggctgatgtgtggtttggcttcctgcccagcatctacctggtgttcctgatcatcctgtatgagggcctgctgggcggggccgcctacgtgaacaccttccacaacatcgccctggagaccagtgatgagcaccgggagtttgccatggccgccacctgcatcagtgacaccctgggcatcagcctgagcggcctgctggccctgcccctgcatgacttcctgtgccagctgtcctag

SEQ ID NO: 19021 - DNA, 1299 bp, synthetic construct
  misc_feature 1..1299: note = Description of Artificial Sequence: Synthetic coding sequence
  source 1..1299: mol_type = other DNA
atggctgtgccctttgtggaggactgggacctggtgcagaccctgggggagggcgcctacggggaggtgcagctggccgtgaacagagtgacagaggaggccgtggccgtgaagatcgtggacatgaagagagctgtggactgcccagagaacatcaagaaggagatctgcatcaacaagatgctgaaccatgaaaatgtggtgaagttctacggccaccggcgggagggcaacatccagtacctgttcctggagtactgcagcggcggggagctgtttgaccgcatcgagccagacatcggcatgcctgagccagatgcccagcgcttcttccaccagctgatggccggcgtggtgtacctgcacggcatcggcatcacccaccgggacatcaagccagagaacctgctgctggatgagcgggacaacctgaagatcagtgactttggcctggccaccgtcttccgctacaacaaccgggagcggctgctgaacaagatgtgtggcaccctgccctacgtggcccctgagctgctgaagagaagagagttccacgccgagcctgtggatgtgtggagctgtggcatcgtgctgacagccatgctggccggggagctgccctgggaccagcccagcgacagctgccaggagtacagcgactggaaggagaagaagacctacctgaacccctggaagaagattgacagcgcccccctggccctgctgcacaagatcctggtggagaaccccagcgcccgcatcaccatcccagacatcaagaaggaccgctggtacaacaagcccctgaagaagggggccaagaggccccgggtgaccagcggcggcgtgtctgagagccccagcggcttcagcaagcacatccagagcaacctggacttcagccctgtgaacagcgccagcagcgaggagaatgtgaagtacagcagcagccagcctgagcccaggacaggcctgagcctgtgggacaccagccccagctacatcgacaagctggtgcagggcatctccttcagccagcccacctgcccagaccacatgctgctgaacagccagctgctgggcaccccaggcagcagccaggtgaccatcagcaccacagacagaagaaacaacaagctgatcttcaaggtgaacctgctggagatggatgacaagatcctggtggacttccggctgagcaaaggagatggcctggagttcaagaggcacttcctgaagatcaagggcaagctgattgatattgtgagcagccagaagatctggctgcctgccacctag

SEQ ID NO: 19022 - DNA, 1431 bp, synthetic construct
  misc_feature 1..1431: note = Description of Artificial Sequence: Synthetic coding sequence
  source 1..1431: mol_type = other DNA
atggctgtgccctttgtggaggactgggacctggtgcagaccctgggggagggcgcctacggggaggtgcagctggccgtgaacagagtgacagaggaggccgtggccgtgaagatcgtggacatgaagagagctgtggactgcccagagaacatcaagaaggagatctgcatcaacaagatgctgaaccatgaaaatgtggtgaagttctacggccaccggcgggagggcaacatccagtacctgttcctggagtactgcagcggcggggagctgtttgaccgcatcgagccagacatcggcatgcctgagccagatgcccagcgcttcttccaccagctgatggccggcgtggtgtacctgcacggcatcggcatcacccaccgggacatcaagccagagaacctgctgctggatgagcgggacaacctgaagatcagtgactttggcctggccaccgtcttccgctacaacaaccgggagcggctgctgaacaagatgtgtggcaccctgccctacgtggcccctgagctgctgaagagaagagagttccacgccgagcctgtggatgtgtggagctgtggcatcgtgctgacagccatgctggccggggagctgccctgggaccagcccagcgacagctgccaggagtacagcgactggaaggagaagaagacctacctgaacccctggaagaagattgacagcgcccccctggccctgctgcacaagatcctggtggagaaccccagcgcccgcatcaccatcccagacatcaagaaggaccgctggtacaacaagcccctgaagaagggggccaagaggccccgggtgaccagcggcggcgtgtctgagagccccagcggcttcagcaagcacatccagagcaacctggacttcagccctgtgaacagcgccagcagcgaggagaatgtgaagtacagcagcagccagcctgagcccaggacaggcctgagcctgtgggacaccagccccagctacatcgacaagctggtgcagggcatctccttcagccagcccacctgcccagaccacatgctgctgaacagccagctgctgggcaccccaggcagcagccagaacccctggcagaggctggtgaagaggatgacccgcttcttcaccaagctggatgctgacaagagctaccagtgcctgaaggagacctgtgagaagctgggctaccagtggaagaagagctgcatgaaccaggtgaccatcagcaccacagacagaagaaacaacaagctgatcttcaaggtgaacctgctggagatggatgacaagatcctggtggacttccggctgagcaaaggagatggcctggagttcaagaggcacttcctgaagatcaagggcaagctgattgatattgtgagcagccagaagatctggctgcctgccacctag

SEQ ID NO: 19023 - DNA, 1431 bp, synthetic construct; identical to SEQ ID NO: 19022
  misc_feature 1..1431: note = Description of Artificial Sequence: Synthetic coding sequence
  source 1..1431: mol_type = other DNA

SEQ ID NO: 19024 - DNA, 1431 bp, synthetic construct; identical to SEQ ID NO: 19022
  misc_feature 1..1431: note = Description of Artificial Sequence: Synthetic coding sequence
  source 1..1431: mol_type = other DNA

SEQ ID NO: 19025 - DNA, 402 bp, synthetic construct
  misc_feature 1..402: note = Description of Artificial Sequence: Synthetic coding sequence
  source 1..402: mol_type = other DNA
atggctgtgccctttgtggaggactgggacctggtgcagaccctgggggagggcgcctacggggaggtgcagctggccgtgaacagagtgacagaggaggccgtggccgtgaagatcgtggacatgaagagagctgtggactgcccagagaacatcaagaaggagatctgcatcaacaagatgctgaaccatgaaaatgtggtgaagttctacggccaccggcgggagggcaacatccagtacctgttcctggagtactgcagcggcggggagctgtttgaccgcatcgagccagacatcggcatgcctgagccagatgcccagcgcttcttccaccagctgatggccggcgtggtgtacctgcacggcatcggcatcacccaccgggacatcaagccctag

SEQ ID NO: 19026 - DNA, 513 bp, synthetic construct
  misc_feature 1..513: note = Description of Artificial Sequence: Synthetic coding sequence
  source 1..513: mol_type = other DNA
atggctgtgccctttgtggaggactgggacctggtgcagaccctgggggagggcgcctacggggaggtgcagctggccgtgaacagagtgacagaggaggccgtggccgtgaagatcgtggacatgaagagagctgtggactgcccagagaacatcaagaaggagatctgcatcaacaagatgctgaaccatgaaaatgtggtgaagttctacggccaccggcgggagggcaacatccagtacctgttcctggagtactgcagcggcggggagctgtttgaccgcatcgagccagacatcggcatgcctgagccagatgcccagcgcttcttccaccagctgatggccggcgtggtgtacctgcacggcatcggcatcacccaccgggacatcaagccagagaacctgctgctggatgagcgggacaacctgaagatcagtgactttggcctggccaccgtcttccgctacaacaaccgggagcggctgctgaacaagatgtgtggcacctag

SEQ ID NO: 19027 - DNA, 615 bp, synthetic construct
  misc_feature 1..615: note = Description of Artificial Sequence: Synthetic coding sequence
  source 1..615: mol_type = other DNA
atggctgtgccctttgtggaggactgggacctggtgcagaccctgggggagggcgcctacggggaggtgcagctggccgtgaacagagtgacagaggaggccgtggccgtgaagatcgtggacatgaagagagctgtggactgcccagagaacatcaagaaggagatctgcatcaacaagatgctgaaccatgaaaatgtggtgaagttctacggccaccggcgggagggcaacatccagtacctgttcctggagtactgcagcggcggggagctgtttgaccgcatcgagccagacatcggcatgcctgagccagatgcccagcgcttcttccaccagctgatggccggcgtggtgtacctgcacggcatcggcatcacccaccgggacatcaagccagagaacctgctgctggatgagcgggacaacctgaagatcagtgactttggcctggccaccgtcttccgctacaacaaccgggagcggctgctgaacaagatgtgtggcaccctgccctacgtggcccctgagctgctgaagagaagagagttccacgccgagcctgtggatgtgtggagctgtggcatcgtgctgacagccatgctggccggctag

SEQ ID NO: 19028 - DNA, 129 bp, synthetic construct
  misc_feature 1..129: note = Description of Artificial Sequence: Synthetic coding sequence
  source 1..129: mol_type = other DNA
atggctgtgccctttgtggaggactgggacctggtgcagaccctgggggagggcgcctacggggaggtgcagctggccgtgaacagagtgacagaggaggccgtggccgtgaagatcgtggacatgtag

SEQ ID NO: 19029 - DNA, 1431 bp, synthetic construct; identical to SEQ ID NO: 19022
  misc_feature 1..1431: note = Description of Artificial Sequence: Synthetic coding sequence
  source 1..1431: mol_type = other DNA

SEQ ID NO: 19030 - DNA, 384 bp, synthetic construct
  misc_feature 1..384: note = Description of Artificial Sequence: Synthetic coding sequence
  source 1..384: mol_type = other DNA
atggctgtgccctttgtggaggactgggacctggtgcagaccctgggggagggcgcctacggggaggtgcagctggccgtgaacagagtgacagaggaggccgtggccgtgaagatcgtggacatgaagagagctgtggactgcccagagaacatcaagaaggagatctgcatcaacaagatgctgaaccatgaaaatgtggtgaagttctacggccaccggcgggagggcaacatccagtacctgttcctggagtactgcagcggcggggagctgtttgaccgcatcgagccagacatcggcatgcctgagccagatgcccagcgcttcttccaccagctgatggccggcgtggtgtacctgcacggcatcggcatcacctag

SEQ ID NO: 19031 - DNA, 1329 bp, synthetic construct
  misc_feature 1..1329: note = Description of Artificial Sequence: Synthetic coding sequence
  source 1..1329: mol_type = other DNA
atggctgtgccctttgtggaggactgggacctggtgcagaccctgggggagggcgcctacggggaggtgcagctggccgtgaacagagtgacagaggaggccgtggccgtgaagatcgtggacatgaagagagctgtggactgcccagagaacatcaagaaggagatctgcatcaacaagatgctgaaccatgaaaatgtggtgaagttctacggccaccggcgggagggcaacatccagtacctgttcctggagtactgcagcggcggggagctgtttgaccgcatcgagccagacatcggcatgcctgagccagatgcccagcgcttcttccaccagctgatggccggcgtggtgtacctgcacggcatcggcatcacccaccgggacatcaagccagagaacctgctgctggatgagcgggacaacctgaagatcagtgactttggcctggccaccgtcttccgctacaacaaccgggagcggctgctgaacaagatgtgtggcaccctgccctacgtggcccctgagctgctgaagagaagagagttccacgccgagcctgtggatgtgtggagctgtggcatcgtgctgacagccatgctggccggggagctgccctgggaccagcccagcgacagctgccaggagtacagcgactggaaggagaagaagacctacctgaacccctggaagaagattgacagcgcccccctggccctgctgcacaagatcctggtggagaaccccagcgcccgcatcaccatcccagacatcaagaaggaccgctggtacaacaagcccctgaagaagggggccaagaggccccgggtgaccagcggcggcgtgtctgagagccccagcggcttcagcaagcacatccagagcaacctggacttcagccctgtgaacagcgccagcagcgaggagaatgtgaagtacagcagcagccagcctgagcccaggacaggcctgagcctgtgggacaccagccccagctacatcgacaagctggtgcagggcatctccttcagccagcccacctgcccagaccacatgctgctgaacagccagctgctgggcaccccaggcagcagccagaacccctggcagaggctggtgaagaggatgacccgcttcttcaccaagctggatgctgacaagagctaccagtgcctgaaggagacctgtgagaagctgggctaccagtggaagaagagctgcatgaaccagggagatggcctggagttcaagaggcacttcctgaagatcaagggcaagctgattgatattgtgagcagccagaagatctggctgcctgccacctag

SEQ ID NO: 19032 - DNA, 1632 bp, synthetic construct
  misc_feature 1..1632: note = Description of Artificial Sequence: Synthetic coding sequence
  source 1..1632: mol_type = other DNA
atgagccgggagagtgatgtggaggcccagcagagccacggcagcagcgcctgcagccagccccacggctctgtgacccagagccagggcagcagcagccagagccagggcatcagcagcagcagcaccagcaccatgcccaacagcagccagagcagccacagcagcagcggcaccctgagcagcctggagaccgtgtccacccaggagctgtacagcatccctgaggaccaggagcctgaggaccaggagcctgaggagcccaccccagccccctgggcccggctgtgggccctgcaggacggctttgccaacctggagtgtgtgaatgacaactactggtttggccgggacaagagctgtgagtactgctttgatgagcccctgctgaagaggacagacaagtaccgcacctacagcaagaagcacttccgcatcttccgggaggtgggccccaagaacagctacatcgcctacatcgaggaccacagcggaaatggcacctttgtgaacacagagctggtgggcaagggcaagaggcggcccctgaacaacaacagcgagatcgccctgagcctgagcaggaacaaggtgtttgtgttctttgacctgactgtggatgaccagagcgtgtaccccaaggccctgagagatgagtacatcatgagcaagaccctgggcagcggggcctgtggggaggtgaagctggcctttgagaggaagacctgcaagaaggtggccatcaagatcatcagcaagaggaagtttgccatcggcagcgcccgggaggccgaccctgccctgaatgtggagacagaaattgagatcctgaagaagctgaaccacccctgcatcatcaagatcaagaacttctttgatgctgaggactactacatcgtgctggagctgatggagggcggggagctgtttgacaaggtggtgggcaacaagaggctgaaggaggccacctgcaagctgtacttctaccagatgctgctggccgtgcagtacctgcatgaaaatggcatcatccaccgggacctgaagccagaaaatgtgctgctgagcagccaggaggaggactgcctgatcaagatcacagactttggccacagcaagatcctgggggagaccagcctgatgaggaccctgtgtggcacccccacctacctggcccctgaggtgctggtgtctgtgggcacagctggctacaacagagctgtggactgctggagcctgggcgtcatcctcttcatctgcctgagcggctacccacccttcagcgagcacaggacccaggtgtccctgaaggaccagatcaccagcggcaagtacaacttcatccctgaggtgtgggccgaggtgtctgagaaggccctggacctggtgaagaagctgctggtggtggaccccaaggcccgcttcaccacagaggaggccctgcggcacccctggctgcaggatgaggacatgaagaggaagttccaggacctgctgtctgaggagaatgaaagcacagccctgccccaggtgctggcccagcccagcaccagcaggaagaggccccgggagggggaggccgagggcgctgagaccaccaagaggcctgctgtgtgtgccgctgtgctgtag

SEQ ID NO: 19033 - DNA, 1545 bp, synthetic construct
  misc_feature 1..1545: note = Description of Artificial Sequence: Synthetic coding sequence
  source 1..1545: mol_type = other DNA
atgagccgggagagtgatgtggaggcccagcagagccacggcagcagcgcctgcagccagccccacggctctgtgacccagagccagggcagcagcagccagagccagggcatcagcagcagcagcaccagcaccatgcccaacagcagccagagcagccacagcagcagcggcaccctgagcagcctggagaccgtgtccacccaggagctgtacagcatccctgaggaccaggagcctgaggaccaggagcctgaggagcccaccccagccccctgggcccggctgtgggccctgcaggacggctttgccaacctggagtgtgtgaatgacaactactggtttggccgggacaagagctgtgagtactgctttgatgagcccctgctgaagaggacagacaagtaccgcacctacagcaagaagcacttccgcatcttccgggaggtgggccccaagaacagctacatcgcctacatcgaggaccacagcggaaatggcacctttgtgaacacagagctggtgggcaagggcaagaggcggcccctgaacaacaacagcgagatcgccctgagcctgagcaggaacaaggtgtttgtgttctttgacctgactgtggatgaccagagcgtgtaccccaaggccctgagagatgagtacatcatgagcaagaccctgggcagcggggcctgtggggaggtgaagctggcctttgagaggaagacctgcaagaaggtggccatcaagatcatcagcaagaggaagtttgccatcggcagcgcccgggaggccgaccctgccctgaatgtggagacagaaattgagatcctgaagaagctgaaccacccctgcatcatcaagatcaagaacttctttgatgctgaggactactacatcgtgctggagctgatggagggcggggagctgtttgacaaggtggtgggcaacaagaggctgaaggaggccacctgcaagctgtacttctaccagatgctgctggccgtgcagatcacagactttggccacagcaagatcctgggggagaccagcctgatgaggaccctgtgtggcacccccacctacctggcccctgaggtgctggtgtctgtgggcacagctggctacaacagagctgtggactgctggagcctgggcgtcatcctcttcatctgcctgagcggctacccacccttcagcgagcacaggacccaggtgtccctgaaggaccagatcaccagcggcaagtacaacttcatccctgaggtgtgggccgaggtgtctgagaaggccctggacctggtgaagaagctgctggtggtggaccccaaggcccgcttcaccacagaggaggccctgcggcacccctggctgcaggatgaggacatgaagaggaagttccaggacctgctgtctgaagaaaatgaaagcacagccctgccccaggtgctggcccagcccagcaccagcaggaagaggccccgggagggggaggccgagggcgctgagaccaccaagaggcctgctgtgtgtgccgctgtgctgtag

SEQ ID NO: 19034 - DNA, 681 bp, synthetic construct
  misc_feature 1..681: note = Description of Artificial Sequence: Synthetic coding sequence
  source 1..681: mol_type = other DNA
atgagccgggagagtgatgtggaggcccagcagagccacggcagcagcgcctgcagccagccccacggctctgtgacccagagccagggcagcagcagccagagccagggcatcagcagcagcagcaccagcaccatgcccaacagcagccagagcagccacagcagcagcggcaccctgagcagcctggagaccgtgtccacccaggagctgtacagcatccccccagaggtgctggtgtctgtgggcacagctggctacaacagagctgtggactgctggagcctgggcgtcatcctcttcatctgcctgagcggctacccacccttcagcgagcacaggacccaggtgtccctgaaggaccagatcaccagcggcaagtacaacttcatccctgaggtgtgggccgaggtgtctgagaaggccctggacctggtgaagaagctgctggtggtggaccccaaggcccgcttcaccacagaggaggccctgcggcacccctggctgcaggatgaggacatgaagaggaagttccaggacctgctgtctgaagaaaatgaaagcacagccctgccccaggtgctggcccagcccagcaccagcaggaagaggccccgggagggggaggccgagggcgctgagaccaccaagaggcctgctgtgtgtgccgctgtgctgtag

SEQ ID NO: 19035 - DNA, 492 bp, synthetic construct
  misc_feature 1..492: note = Description of Artificial Sequence: Synthetic coding sequence
  source 1..492: mol_type = other DNA
atgagccgggagagtgatgtggaggcccagcagagccacggcagcagcgcctgcagccagccccacggctctgtgacccagagccagggcagcagcagccagagccagggcatcagcagcagcagcaccagcaccatgcccaacagcagccagagcagccacagcagcagcggcaccctgagcagcctggagaccgtgtccacccaggagctgtacagcatccctgaggaccaggagcctgaggaccaggagcctgaggagcccaccccagccccctgggcccggctgtgggccctgcaggacggctttgccaacctgggagatgaggacatgaagaggaagttccaggacctgctgtctgaggagaatgaaagcacagccctgccccaggtgctggcccagcccagcaccagcaggaagaggccccgggagggggaggccgagggcgctgagaccaccaagaggcctgctgtgtgtgccgctgtgctgtag

SEQ ID NO: 19036 - DNA, 870 bp, synthetic construct
  misc_feature 1..870: note = Description of Artificial Sequence: Synthetic coding sequence
  source 1..870: mol_type = other DNA
atgagccgggagagtgatgtggaggcccagcagagccacggcagcagcgcctgcagccagccccacggctctgtgacccagagccagggcagcagcagccagagccagggcatcagcagcagcagcaccagcaccatgcccaacagcagccagagcagccacagcagcagcggcaccctgagcagcctggagaccgtgtccacccaggagctgtacagcatccctgaggaccaggagcctgaggaccaggagcctgaggagcccaccccagccccctgggcccggctgtgggccctgcaggacggctttgccaacctggagtgtgtgaatgacaactactggtttggccgggacaagagctgtgagtactgctttgatgagcccctgctgaagaggacagacaagtaccgcacctacagcaagaagcacttccgcatcttccgggaggtgggccccaagaacagctacatcgcctacatcgaggaccacagcggaaatggcacctttgtgaacacagagctggtgggcaagggcaagaggcggcccctgaacaacaacagcgagatcgccctgagcctgagcaggaacaaggtgtttgtgttctttgacctgactgtggatgaccagagcgtgtaccccaaggccctgagagatgagtacatcatgagcaagaccctgggcagcggggcctgtggggaggtgaagctggcctttgagaggaagacctgcaagaaggtggccatcaagatcatcagcaagaggaagtttgccatcggcagcgcccgggaggccgaccctgccctgaatgtggagacagaaattgagatcctgaagaagctgaaccatgatggccggggccgggctgtgtag

SEQ ID NO: 19037 - DNA, 1359 bp, synthetic construct
  misc_feature 1..1359: note = Description of Artificial Sequence: Synthetic coding sequence
  source 1..1359: mol_type = other DNA
atgagccgggagagtgatgtggaggcccagcagagccacggcagcagcgcctgcagccagccccacggctctgtgacccagagccagggcagcagcagccagagccagggcatcagcagcagcagcaccagcaccatgcccaacagcagccagagcagccacagcagcagcggcaccctgagcagcctggagaccgtgtccacccaggagctgtacagcatccctgaggaccaggagcctgaggaccaggagcctgaggagcccaccccagccccctgggcccggctgtgggccctgcaggacggctttgccaacctggtgtttgtgttctttgacctgactgtggatgaccagagcgtgtaccccaaggccctgagagatgagtacatcatgagcaagaccctgggcagcggggcctgtggggaggtgaagctggcctttgagaggaagacctgcaagaaggtggccatcaagatcatcagcaagaggaagtttgccatcggcagcgcccgggaggccgaccctgccctgaatgtggagacagaaattgagatcctgaagaagctgaaccacccctgcatcatcaagatcaagaacttctttgatgctgaggactactacatcgtgctggagctgatggagggcggggagctgtttgacaaggtggtgggcaacaagaggctgaaggaggccacctgcaagctgtacttctaccagatgctgctggccgtgcagtacctgcatgaaaatggcatcatccaccgggacctgaagccagaaaatgtgctgctgagcagccaggaggaggactgcctgatcaagatcacagactttggccacagcaagatcctgggggagaccagcctgatgaggaccctgtgtggcacccccacctacctggcccctgaggtgctggtgtctgtgggcacagctggctacaacagagctgtggactgctggagcctgggcgtcatcctcttcatctgcctgagcggctacccacccttcagcgagcacaggacccaggtgtccctgaaggaccagatcaccagcggcaagtacaacttcatccctgaggtgtgggccgaggtgtctgagaaggccctggacctggtgaagaagctgctggtggtggaccccaaggcccgcttcaccacagaggaggccctgcggcacccctggctgcaggatgaggacatgaagaggaagttccaggacctgctgtctgaagaaaatgaaagcacagccctgccccaggtgctggcccagcccagcaccagcaggaagaggccccgggagggggaggccgagggcgctgagaccaccaagaggcctgctgtgtgtgccgctgtgctgtag

SEQ ID NO: 19038 - DNA, 1761 bp, synthetic construct
  misc_feature 1..1761: note = Description of Artificial Sequence: Synthetic coding sequence
  source 1..1761: mol_type = other DNA
atgagccgggagagtgatgtggaggcccagcagagccacggcagcagcgcctgcagccagccccacggctctgtgacccagagccagggcagcagcagccagagccagggcatcagcagcagcagcaccagcaccatgcccaacagcagccagagcagccacagcagcagcggcaccctgagcagcctggagaccgtgtccacccaggagctgtacagcatccctgaggaccaggagcctgaggaccaggagcctgaggagcccaccccagccccctgggcccggctgtgggccctgcaggacggctttgccaacctggagacagagagcggccacgtgacccagagcgacctggagctgctgctgagcagtgaccccccagccagcgccagccagagcgctggcatccggggcgtgcgccaccaccccaggcctgtgtgcagcctgaagtgtgtgaatgacaactactggtttggccgggacaagagctgtgagtactgctttgatgagcccctgctgaagaggacagacaagtaccgcacctacagcaagaagcacttccgcatcttccgggaggtgggccccaagaacagctacatcgcctacatcgaggaccacagcggaaatggcacctttgtgaacacagagctggtgggcaagggcaagagaagacccctgaacaacaacagcgagatcgccctgagcctgagcaggaacaaggtgtttgtgttctttgacctgactgtggatgaccagagcgtgtaccccaaggccctgagagatgagtacatcatgagcaagaccctgggcagcggggcctgtggggaggtgaagctggcctttgagaggaagacctgcaagaaggtggccatcaagatcatcagcaagaggaagtttgccatcggcagcgcccgggaggccgaccctgccctgaatgtggagacagaaattgagatcctgaagaagctgaaccacccctgcatcatcaagatcaagaacttctttgatgctgaggactactacatcgtgctggagctgatggagggcggggagctgtttgacaaggtggtgggcaacaagaggctgaaggaggccacctgcaagctgtacttctaccagatgctgctggccgtgcagtacctgcatgaaaatggcatcatccaccgggacctgaagccagaaaatgtgctgctgagcagccaggaggaggactgcctgatcaagatcacagactttggccacagcaagatcctgggggagaccagcctgatgaggaccctgtgtggcacccccacctacctggcccctgaggtgctggtgtctgtgggcacagctggctacaacagagctgtggactgctggagcctgggcgtcatcctcttcatctgcctgagcggctacccacccttcagcgagcacaggacccaggtgtccctgaaggaccagatcaccagcggcaagtacaacttcatccctgaggtgtgggccgaggtgtctgagaaggccctggacctggtgaagaagctgctggtggtggaccccaaggcccgcttcaccacagaggaggccctgcggcacccctggctgcaggatgaggacatgaagaggaagttccaggacctgctgtctgaagaaaatgaaagcacagccctgccccaggtgctggcccagcccagcaccagcaggaagaggccccgggagggggaggccgagggcgctgagaccaccaagaggcctgctgtgtgtgccgctgtgctgtag

SEQ ID NO: 19039 - DNA, 1545 bp, synthetic construct; identical to SEQ ID NO: 19033
  misc_feature 1..1545: note = Description of Artificial Sequence: Synthetic coding sequence
  source 1..1545: mol_type = other DNA

SEQ ID NO: 19040 - DNA, 1359 bp, synthetic construct; identical to SEQ ID NO: 19037
  misc_feature 1..1359: note = Description of Artificial Sequence: Synthetic coding sequence
  source 1..1359: mol_type = other DNA

SEQ ID NO: 19041 - DNA, 1632 bp, synthetic construct; identical to SEQ ID NO: 19032
  misc_feature 1..1632: note = Description of Artificial Sequence: Synthetic coding sequence
  source 1..1632: mol_type = other DNA

SEQ ID NO: 19042 - DNA, 1632 bp, synthetic construct; identical to SEQ ID NO: 19032
  misc_feature 1..1632: note = Description of Artificial Sequence: Synthetic coding sequence
  source 1..1632: mol_type = other DNA

SEQ ID NO: 19043 - DNA, 969 bp, synthetic construct
  misc_feature 1..969: note = Description of Artificial Sequence: Synthetic coding sequence
  source 1..969: mol_type = other DNA
atgagcaagaccctgggcagcggggcctgtggggaggtgaagctggcctttgagaggaagacctgcaagaaggtggccatcaagatcatcagcaagaggaagtttgccatcggcagcgcccgggaggccgaccctgccctgaatgtggagacagaaattgagatcctgaagaagctgaaccacccctgcatcatcaagatcaagaacttctttgatgctgaggactactacatcgtgctggagctgatggagggcggggagctgtttgacaaggtggtgggcaacaagaggctgaaggaggccacctgcaagctgtacttctaccagatgctgctggccgtgcagtacctgcatgaaaatggcatcatccaccgggacctgaagccagaaaatgtgctgctgagcagccaggaggaggactgcctgatcaagatcacagactttggccacagcaagatcctgggggagaccagcctgatgaggaccctgtgtggcacccccacctacctggcccctgaggtgctggtgtctgtgggcacagctggctacaacagagctgtggactgctggagcctgggcgtcatcctcttcatctgcctgagcggctacccacccttcagcgagcacaggacccaggtgtccctgaaggaccagatcaccagcggcaagtacaacttcatccctgaggtgtgggccgaggtgtctgagaaggccctggacctggtgaagaagctgctggtggtggaccccaaggcccgcttcaccacagaggaggccctgcggcacccctggctgcaggatgaggacatgaagaggaagttccaggacctgctgtctgaagaaaatgaaagcacagccctgccccaggtgctggcccagcccagcaccagcaggaagaggccccgggagggggaggccgagggcgctgagaccaccaagaggcctgctgtgtgtgccgctgtgctgtag

SEQ ID NO: 19044 - DNA, 624 bp, synthetic construct
  misc_feature 1..624: note = Description of Artificial Sequence: Synthetic coding sequence
  source 1..624: mol_type = other DNA
atgagccgggagagtgatgtggaggcccagcagagccacggcagcagcgcctgcagccagccccacggctctgtgacccagagccagggcagcagcagccagagccagggcatcagcagcagcagcaccagcaccatgcccaacagcagccagagcagccacagcagcagcggcaccctgagcagcctggagaccgtgtccacccaggagctgtacagcatccctgaggaccaggagcctgaggaccaggagcctgaggagcccaccccagccccctgggcccggctgtgggccctgcaggacggctttgccaacctggagtgtgtgaatgacaactactggtttggccgggacaagagctgtgagtactgctttgatgagcccctgctgaagaggacagacaagtaccgcacctacagcaagaagcacttccgcatcttccgggaggtgggccccaagaacagctacatcgcctacatcgaggaccacagcggaaatggcacctttgtgaacacagagctggtgggcaagggcaagaggcggcccctgaacaacaacagcgagatcgccctgagcctgagcaggaacaaggagaagatcctgaagatctacagcctgtcctag

SEQ ID NO: 19045 - DNA, 294 bp, synthetic construct
  misc_feature 1..294: note = Description of Artificial Sequence: Synthetic coding sequence
  source 1..294: mol_type = other DNA
atgaaggtgtctgctgccctgctgtggctgctgctgattgctgctgccttcagcccccagggcctggccggccctgcctctgtgcccaccacctgctgcttcaacctggccaacaggaagatccccctgcagaggctggagagctaccgccgcatcaccagcggcaagtgcccccagaaggctgtgatcttcaagaccaagctggccaaggacatctgtgccgaccccaagaagaagtgggtgcaggacagcatgaagtacctggaccagaagagccccacccccaagccctag

SEQ ID NO: 19046 - DNA, 1692 bp, synthetic construct
  misc_feature 1..1692: note = Description of Artificial Sequence: Synthetic coding sequence
  source 1..1692: mol_type = other DNA
atgagccgcatcggcggggccggcctgcctgctgctgccctgactggacctggccgcttcaggatggcccgggaggagcccgccccagctgccctggccgctgctggccagcccggcggcggccggggcggggagcgggccctgcagggccctggggtggcccggcggggccggcccagcctgagccgggccaagctgcacggcctgcggcacatgtgtgccggccgcacagctgctgggggcagcttccagaggcgggccctgtgggtgctggccttctgcaccagctttggcctgctgctgtcctggagcagcaaccggctgctgtactggctgtccttccccagccacaccagggtgcaccgggagtggagccggcagctgcccttccctgctgtgacagtgtgcaacaacaaccccctgcgcttcccccggctgagcaagggggacctgtactatgccggccactggctgggcctgctgctgcccaacagaacagcccggcccctggtgtctgagctgctgcggggagatgagccccggcggcagtggttcaggaagctggccgacttccgcctcttcctgccccccaggcactttgagggcatctctgctgccttcatggaccggctgggccaccagctggaggacatgctgctgagctgcaagtacagaggagagctgtgtggcccccacaacttcagcagcgtcttcaccaagtatggcaagtgctacatgttcaacagcggagaagatggcaagcccctgctgaccaccgtgaagggcggcactggaaatggcctggagatcatgctggacatccagcaggatgagtacctgcccatctggggcgagacagaggagaccacctttgaagctggggtgaaggtgcagatccacagccagagcgagccccccttcatccaggagctgggctttggagtggcccctggcttccagacctttgtggccacccaggagcagaggctgacctacctgcccccaccctggggagaatgtcgcagcagcgagatgggcctggacttcttccctgtgtacagcatcacagcctgcagaattgactgtgagacccgctacatcgtggagaactgcaactgcaggatggtgcacatgcctggagatgcccccttctgcaccccagagcagcacaaggaatgtgccgagcccgccctgggcctgctggccgagaaggacagcaactactgcctgtgcaggaccccctgcaacctgacccgctacaacaaggagctgtccatggtgaagatccccagcaagaccagcgccaagtacctggagaagaagttcaacaagtctgagaagtacatcagcgagaacatcctggtgctggacatcttctttgaggccctgaactatgagaccatcgagcagaagaaggcctatgaggtggccgccctgctgggggacattggaggccagatgggcctcttcatcggggccagcatcctgaccatcctggagctgtttgactacatctatgagctgatcaaggagaagctgctggacctgctgggcaaggaggaggatgagggcagccatgatgaaaatgtgtccacctgtgacaccatgcccaaccacagcgagaccatcagccacacagtgaatgtgcccctgcagaccaccctgggcaccctggaggagatcgcctgctag

SEQ ID NO: 19047 - DNA, 2328 bp, synthetic construct
  misc_feature 1..2328: note = Description of Artificial Sequence: Synthetic coding sequence
  source 1..2328: mol_type = other DNA
atggtgggcccagaagatgctggggcctgcagcggcaggaaccccaagctgctgcctgtgcctgccccagaccctgtgggccaggacaggaaggtgatccgggccaccggcggctttggaggcggcgtgggcgctgtggagcccccagaggaggctgatgaggaggaggaggctgatgaggaggaggagaccccaccccggcagctgctgcagcgctacctggccgctgctggggagcagctggagcccggcctgtgctactgccccctgcctgctggccaggccggggcccctcctccttctgctgcccccaggagtgatgcctgcctgctgggcagcggcagcaagcacagaggagctgaggtggctgatggccgggcccccaggcatgagggcatgaccaatggagacagcggcttcctgcccggccgggactgccgggacctggaggaggcccggggcctggcccgggccggcggccgggagagcagaagaagaagaccctacggccgcctgcggctggagggccctggagatgaagatgctgatggagctggcagccccagcgactgggccagccccctggaggaccccctgcggagctgctgcctggtggccgcagatgcccaggagcctgagggcgccggcagtgacagcggggacagccctgccagcagctgcagcagcagtgaagattctgagcagaggggcgtgggcgctgggggccctgaggagggcgcccccccagccaccagcgctgagaggaccaatggaggagctgagccccggctgggcttcagtgacatccacttcaacagcaggaacaccttccaggtgtcccggggccagagcgcccgggaccacctgcccccagctggcccccctgtgcccctgcctgctgctgagcagggccctgctggggccagcgcccgggccaggagaagtggcggctttgctgacttcttcaccaggaacctcttccccaagaggaccaaggagctgaagtctgtggtgcacagcgcccctggctggaagctgtttgggaaggtgcccccccgggagaacctgcagaagaccagcaagatcatccagcaggagtatgaggccaggactggaagaacctgcaagcccccaccccagagcagcaggaggaagaactttgaatttgagcccctgagcaccacagccctgatcctggaggaccggcccagcaacctgcctgccaagtctgtggaggaggccctgcggcaccggcaggagtatgatgagatggtggccgaggccaagaagcgggagatcaaggaggcccacaagaggaagaggatcatgaaggagcgcttcaagcaggaggagaacatcgccagcgccatggtgatctggatcaatgagatcctgcccaactgggaggtgatgaggagcaccaggagagtgcgggagctgtggtggcagggcctgccccccagcgtgcggggcaaggtgtggagcctggccgtgggcaatgagctgaacatcaccccagagctgtatgagatcttcctgagccgggccaaggagcgctggaagagcttcagcgagaccagcagtgaaaatgacacagagggcgtgtctgtggccgaccgggaggccagcctggagctgatcaagctggacatcagcaggaccttccccagcctgtacatcttccagaagggcggcccctaccatgatgtgctgcacagcatcctgggcgcctacacctgctacagaccagatgtgggctacgtgcagggcatgtccttcatcgctgctgtgctgatcctgaacctggaggaggctgatgccttcatcgcctttgccaacctgctgaacaagccctgccagctggccttcttccgggtggaccacagcatgatgctgaagtactttgccacctttgaggtgttctttgaggagaacctgagcaagctgttcctgcacttcaagagctacagcctgaccccagacatctacctgattgactggatcttcaccctgtacagcaagagcctgcccctggacctggcctgccgggtgtgggatgtgttctgcagagatggagaggagttcctgttcagaacaggcctgggcatcctgcggctgtatgaggacatcctgctgcagatggacttcatccacatcgcccagttcctgaccaagctgcctgaggacatcaccagcgagaagctgttcagctgcatcgccgccatccagatgcagaacagcaccaagaagtggacccaggtgtttgcctctgtgatgaaggacatcaaggagggggacaagaacagcagccctgccctgaagagctag

SEQ ID NO: 19048 - DNA, 276 bp, synthetic construct
  misc_feature 1..276: note = Description of Artificial Sequence: Synthetic coding sequence
  source 1..276: mol_type = other DNA
atgaaggtgtctgctgctgccctggccgtcatcctgattgccacagccctgtgtgccccagccagcgccagcccctacagcagtgacaccaccccctgctgctttgcctacatcgcccggcccctgccccgggcccacatcaaggagtacttctacaccagcggcaagtgcagcaacccagctgtggtgtttgtgaccaggaagaaccggcaggtgtgtgccaaccctgagaagaagtgggtgcgggagtacatcaacagcctggagatgtcctag

SEQ ID NO: 19049 - DNA, 276 bp, synthetic construct; identical to SEQ ID NO: 19048
  misc_feature 1..276: note = Description of Artificial Sequence: Synthetic coding sequence
  source 1..276: mol_type = other DNA

SEQ ID NO: 19050 - DNA, 300 bp, synthetic construct
  misc_feature 1..300: note = Description of Artificial Sequence: Synthetic coding sequence
  source 1..300: mol_type = other DNA
atgaaggccagcgctgccctgctgtgcctgctgctgacagctgctgccttcagcccccagggcctggcccagcctgtgggcatcaacaccagcaccacctgctgctaccgcttcatcaacaagaagatccccaagcagaggctggagagctacagaaggaccaccagcagccactgcccccgggaggccgtcatcttcaagaccaagctggacaaggagatctgtgccgaccccacccagaagtgggtgcaggacttcatgaagcacctggacaagaagacccagacccccaagctgtag

SEQ ID NO: 19051 - DNA, 330 bp, synthetic construct
  misc_feature 1..330: note = Description of Artificial Sequence: Synthetic coding sequence
  source 1..330: mol_type = other DNA
atgtggaagcccatgcccagccccagcaacatgaaggccagcgctgccctgctgtgcctgctgctgacagctgctgccttcagcccccagggcctggcccagcctgtgggcatcaacaccagcaccacctgctgctaccgcttcatcaacaagaagatccccaagcagaggctggagagctacagaaggaccaccagcagccactgcccccgggaggccgtcatcttcaagaccaagctggacaaggagatctgtgccgaccccacccagaagtgggtgcaggacttcatgaagcacctggacaagaagacccagacccccaagctgtag

SEQ ID NO: 19052 - DNA, 276 bp, synthetic construct
  misc_feature 1..276: note = Description of Artificial Sequence: Synthetic coding sequence
  source 1..276: mol_type = other DNA
atgtggaagcccatgcccagccccagcaacatgaaggccagcgctgccctgctgtgcctgctgctgacagctgctgccttcagcccccagggcctggcccagcctgagcggcccaggacccacccccagtggaccttcctgctggtggtgtccctgcagctgggcctcatcctgcagctgcctgctgccacagacctgagcatcaggaagagcctgagccggggctggagggccacagagggcccccctgtggccaccgtgcctgggaagctgtag

SEQ ID NO: 19053 - DNA, 174 bp, synthetic construct
  misc_feature 1..174: note = Description of Artificial Sequence: Synthetic coding sequence
  source 1..174: mol_type = other DNA
atgtggaagcccatgcccagccccagcaacatgaaggccagcgctgccctgctgtgcctgctgctgacagctgctgccttcagcccccagggcctggcccagcctgccagccggcccaactggaccaggagatctgtgctgaccccccacaggagcggcagcaggaccctgtag

SEQ ID NO: 19054 - DNA, 297 bp, synthetic construct
  misc_feature 1..297: note = Description of Artificial Sequence: Synthetic coding sequence
  source 1..297: mol_type = other DNA
atgaaccagacagccatcctgatctgctgcctgatcttcctgaccctgagcggcatccagggcgtgcccctgagcaggacagtgcgctgcacctgcatcagcatcagcaaccagcctgtgaaccccaggagcctggagaagctggagatcatcccagccagccagttctgcccccgggtggagatcatcgccaccatgaagaagaagggggagaagcgctgcctgaaccctgagagcaaggccatcaagaacctgctgaaggctgtgtccaaggagaggagcaagaggagcccctag

SEQ ID NO: 19055 - DNA, 270 bp, synthetic construct
  misc_feature 1..270: note = Description of Artificial Sequence: Synthetic coding sequence
  source 1..270: mol_type = other DNA
atgaatgccaaggtggtggtggtgctggtgctggtgctgacagccctgtgcctgagtgatggcaagcctgtgtccctgagctaccgctgcccctgccgcttctttgagagccacgtggcccgggccaacgtgaagcacctgaagatcctgaacacccccaactgtgccctgcagatcgtggcccggctgaagaacaacaaccggcaggtgtgcatcgaccccaagctgaagtggatccaggagtacctggagaaggccctgaacaagtag

SEQ ID NO: 19056 - DNA, 360 bp, synthetic construct
  misc_feature 1..360: note = Description of Artificial Sequence: Synthetic coding sequence
  source 1..360: mol_type = other DNA
atgaatgccaaggtggtggtggtgctggtgctggtgctgacagccctgtgcctgagtgatggcaagcctgtgtccctgagctaccgctgcccctgccgcttctttgagagccacgtggcccgggccaacgtgaagcacctgaagatcctgaacacccccaactgtgccctgcagatcgtggcccggctgaagaacaacaaccggcaggtgtgcatcgaccccaagctgaagtggatccaggagtacctggagaaggccctgaacaagggcagaagagaggagaaggtgggcaagaaggagaagattggcaagaagaagaggcagaagaagaggaaggccgcccagaagaggaagaactag

SEQ ID NO: 19057 - DNA, 282 bp, synthetic construct
  misc_feature 1..282: note = Description of Artificial Sequence: Synthetic coding sequence
  source 1..282: mol_type = other DNA
atgaatgccaaggtggtggtggtgctggtgctggtgctgacagccctgtgcctgagtgatggcaagcctgtgtccctgagctaccgctgcccctgccgcttctttgagagccacgtggcccgggccaacgtgaagcacctgaagatcctgaacacccccaactgtgccctgcagatcgtggcccggctgaagaacaacaaccggcaggtgtgcatcgaccccaagctgaagtggatccaggagtacctggagaaggccctgaacaagcgcttcaagatgtag

SEQ ID NO: 19058 - DNA, 423 bp, synthetic construct
  misc_feature 1..423: note = Description of Artificial Sequence: Synthetic coding sequence
  source 1..423: mol_type = other DNA
atgaatgccaaggtggtggtggtgctggtgctggtgctgacagccctgtgcctgagtgatggcaagcctgtgtccctgagctaccgctgcccctgccgcttctttgagagccacgtggcccgggccaacgtgaagcacctgaagatcctgaacacccccaactgtgccctgcagatcgtggcccggctgaagaacaacaaccggcaggtgtgcatcgaccccaagctgaagtggatccaggagtacctggagaaggccctgaacaacctgatctctgctgccccagctgggaagagggtgattgctggggcccgggccctgcaccccagccccccccgggcctgccccacagcccgggccctgtgtgagatccggctgtggcccccacctgagtggagctggcccagccctggagatgtgtag

SEQ ID NO: 19059 - DNA, 273 bp, synthetic construct
  misc_feature 1..273: note = Description of Artificial Sequence: Synthetic coding sequence
  source 1..273: mol_type = other DNA
atgaatgccaaggtggtggtggtgctggtgctggtgctgacagccctgtgcctgagtgatggcaagcctgtgtccctgagctaccgctgcccctgccgcttctttgagagccacgtggcccgggccaacgtgaagcacctgaagatcctgaacacccccaactgtgccctgcagatcgtggcccggctgaagaacaacaaccggcaggtgtgcatcgaccccaagctgaagtggatccaggagtacctggagaaggccctgaacaactgctag

SEQ ID NO: 19060 - DNA, 330 bp, synthetic construct
  misc_feature 1..330: note = Description of Artificial Sequence: Synthetic coding sequence
  source 1..330: mol_type = other DNA
atgaagttcatcagcaccagcctgctgctgatgctgctggtgagcagcctgagccctgtgcagggcgtgctggaggtgtactacaccagcctgcgctgccgctgtgtgcaggagagcagcgtcttcatcccccggcgcttcatcgaccgcatccagatcctgcccagaggaaatggctgccccaggaaggagatcatcgtgtggaagaagaacaagagcatcgtgtgtgtggacccccaggccgagtggatccagaggatgatggaggtgctgaggaagaggagcagcagcaccctgcctgtgcctgtgttcaagaggaagatcccctag

SEQ ID NO: 19061 - DNA, 1560 bp, synthetic construct
  misc_feature 1..1560: note = Description of Artificial Sequence: Synthetic coding sequence
  source 1..1560: mol_type = other DNA
atgttcctgctgcccctgcctgctgctggccgggtggtggtgcggcggctggccgtgcggcgcttcggcagccgcagcctgagcacagctgacatgaccaagggcctggtgctgggcatctacagcaaggagaaggaggatgatgtgccccagttcaccagcgctggagaaaattttgacaagctgctggccggcaagctgcgggagaccctgaacatcagcggcccccccctgaaggccggcaagaccaggaccttctacggcctgcaccaggacttccccagcgtggtgctggtgggcctgggcaagaaggccgccggcattgatgagcaggagaactggcatgagggcaaggagaacatccgggctgctgtggccgccggctgccggcagatccaggacctggagctgagctctgtggaggtggacccctgtggagatgcccaggccgctgctgagggcgctgtgctgggcctgtatgaatatgatgacctgaagcagaagaagaagatggctgtgtctgccaagctgtatggcagcggggaccaggaggcctggcagaagggcgtgctgtttgccagcggccagaacctggcccggcagctgatggagaccccagccaatgagatgacccccaccaggtttgctgagatcatcgagaagaacctgaagagcgccagcagcaagacagaggtgcacatccggcccaagtcctggattgaggagcaggccatgggcagcttcctgtctgtggccaagggcagtgatgagccccctgtgttcctggagatccactacaagggcagccccaatgccaatgaaccacccctggtgtttgtgggcaagggcatcacctttgacagcggcggcatcagcatcaaggccagcgccaacatggacctgatgagagctgacatgggcggggccgccaccatctgcagcgccatcgtgtctgctgccaagctgaacctgcccatcaacatcatcggcctggcccccctgtgtgagaacatgcccagcggcaaggccaacaagccaggagatgtggtgcgggccaagaatggcaagaccatccaggtggacaacacagatgctgagggccgcctcatcctggctgatgccctgtgctacgcccacaccttcaaccccaaggtgatcctgaatgctgccaccctgactggagccatggatgtggccctgggcagcggggccactggagtcttcaccaacagctcctggctgtggaacaagctgtttgaggccagcattgaaacaggagacagagtgtggaggatgcccctgtttgagcactacacccggcaggtggtggactgccagctggctgatgtgaacaacatcggcaagtacagatctgctggggcctgcacagctgctgccttcctgaaggagtttgtgacccaccccaagtgggcccacctggacattgctggggtgatgaccaacaaggatgaggtgccctacctgaggaagggcatgacaggccggcccaccaggaccctcatcgagttcctgctgcgcttcagccaggacaatgcctag

SEQ ID NO: 19062 - DNA, 378 bp, synthetic construct
  misc_feature 1..378: note = Description of Artificial Sequence: Synthetic coding sequence
  source 1..378: mol_type = other DNA
atgaagaagagcggcgtgctcttcctgctgggcatcatcctgctggtgctgattggagtgcagggcacccctgtggtgaggaagggccgctgcagctgcatcagcaccaaccagggcaccatccacctgcagagcctgaaggacctgaagcagtttgcccccagccccagctgtgagaagattgagatcatcgccaccctgaagaatggagtgcagacctgcctgaacccagattctgcagatgtgaaggagctgatcaagaagtgggagaagcaggtgtcccagaagaagaagcagaagaatggcaagaagcaccagaagaagaaggtgctgaaggtgaggaagagccagaggagccggcagaagaagaccacctag

SEQ ID NO: 19063 - DNA, 1083 bp, synthetic construct
  misc_feature 1..1083: note = Description of Artificial Sequence: Synthetic coding sequence
  source 1..1083: mol_type = other DNA
atggaggacttcaacatggagagtgacagctttgaggacttctggaagggggaggacctgagcaactacagctacagcagcaccctgccccccttcctgctggatgctgccccctgtgagcctgagagcctggagatcaacaagtactttgtggtgatcatctatgccctggtgttcctgctgagcctgctgggcaacagcctggtgatgctggtgatcctgtacagccgggtgggccgctctgtgacagatgtgtacctgctgaacctggccctggccgacctgctgtttgccctgaccctgcccatctgggccgccagcaaggtgaatggctggatcttcggcaccttcctgtgcaaggtggtgtccctgctgaaggaggtgaacttctacagcggcatcctgctgctggcctgcatctctgtggaccgctacctggccatcgtgcacgccaccaggaccctgacccagaagcgctacctggtgaagttcatctgcctgagcatctggggcctgagcctgctgctggccctgcctgtgctgctcttccggaggacagtgtacagcagcaatgtgtccccagcctgctatgaggacatgggcaacaacacagccaactggaggatgctgctgcgcatcctgccccagagctttggcttcatcgtgcccctgctgatcatgctgttctgctacggcttcaccctgcggaccctcttcaaggcccacatgggccagaagcaccgggccatgagggtcatctttgctgtggtgctgatcttcctgctgtgctggctgccctacaacctggtgctgctggccgacaccctgatgaggacccaggtgatccaggagacctgtgagaggaggaaccacatcgaccgggccctggatgccacagagatcctgggcatcctgcacagctgcctgaaccccctcatctatgccttcatcggccagaagttcagacatggcctgctgaagatcctggccatccacggcctcatcagcaaggacagcctgcccaaggacagccggcccagctttgtgggcagcagcagcggccacaccagcaccaccctgtag

SEQ ID NO: 19064 - DNA, 417 bp, synthetic construct
  misc_feature 1..417: note = Description of Artificial Sequence: Synthetic coding sequence
  source 1..417: mol_type = other DNA
atggaggacttcaacatggagagtgacagctttgaggacttctggaagggggaggacctgagcaactacagctacagcagcaccctgccccccttcctgctggatgctgccccctgtgagcctgagagcctggagatcaacaagtactttgtggtgatcatctatgccctggtgttcctgctgagcctgctgggcaacagcctggtgatgctggtgatcctgtacagccgggtgggccgctctgtgacagatgtgtacctgctgaacctggccctggccgacctgctgtttgccctgaccctgcccatctgggccgccagcaaggtgaatggctggatcttcggcaccttcctgtgcaaggtggtgtccctgctgaaggaggtgaacttctacagcggcatcctgctgctggcctag

SEQ ID NO: 19065 - DNA, 48 bp, synthetic construct
  misc_feature 1..48: note = Description of Artificial Sequence: Synthetic coding sequence
  source 1..48: mol_type = other DNA
atggaggacttcaacatggagagtgacagctttgaggacttctggtag

SEQ ID NO: 19066 - DNA, 519 bp, synthetic construct
  misc_feature 1..519: note = Description of Artificial Sequence: Synthetic coding sequence
  source 1..519: mol_type = other DNA
atggaggacttcaacatggagagtgacagctttgaggacttctggaagggggaggacctgagcaactacagctacagcagcaccctgccccccttcctgctggatgctgccccctgtgagcctgagagcctggagatcaacaagtactttgtggtgatcatctatgccctggtgttcctgctgagcctgctgggcaacagcctggtgatgctggtgatcctgtacagccgggtgggccgctctgtgacagatgtgtacctgctgaacctggccctggccgacctgctgtttgccctgaccctgcccatctgggccgccagcaaggtgaatggctggatcttcggcaccttcctgtgcaaggtggtgtccctgctgaaggaggtgaacttctacagcggcatcctgctgctggcctgcatctctgtggaccgctacctggccatcgtgcacgccaccaggaccctgacccagaagcgctacctggtgaagttcatctgcctgagcatctggggcctgtag

SEQ ID NO: 19067 - DNA, 48 bp, synthetic construct; identical to SEQ ID NO: 19065
  misc_feature 1..48: note = Description of Artificial Sequence: Synthetic coding sequence
  source 1..48: mol_type = other DNA

SEQ ID NO: 19068 - DNA, 606 bp, synthetic construct
  misc_feature 1..606: note = Description of Artificial Sequence: Synthetic coding sequence
  source 1..606: mol_type = other DNA
atggaggacttcaacatggagagtgacagctttgaggacttctggaagggggaggacctgagcaactacagctacagcagcaccctgccccccttcctgctggatgctgccccctgtgagcctgagagcctggagatcaacaagtactttgtggtgatcatctatgccctggtgttcctgctgagcctgctgggcaacagcctggtgatgctggtgatcctgtacagccgggtgggccgctctgtgacagatgtgtacctgctgaacctggccctggccgacctgctgtttgccctgaccctgcccatctgggccgccagcaaggtgaatggctggatcttcggcaccttcctgtgcaaggtggtgtccctgctgaaggaggtgaacttctacagcggcatcctgctgctggcctgcatctctgtggaccgctacctggccatcgtgcacgccaccaggaccctgacccagaagcgctacctggtgaagttcatctgcctgagcatctggggcctgagcctgctgctggccctgcctgtgctgctcttccggaggacagtgtacagcagcaatgtgtccccagcctgctatgaggacatgggctag

SEQ ID NO: 19069 - DNA, 411 bp, synthetic construct
  misc_feature 1..411: note = Description of Artificial Sequence: Synthetic coding sequence
  source 1..411: mol_type = other DNA
atggaggacttcaacatggagagtgacagctttgaggacttctggaagggggaggacctgagcaactacagctacagcagcaccctgccccccttcctgctggatgctgccccctgtgagcctgagagcctggagatcaacaagtactttgtggtgatcatctatgccctggtgttcctgctgagcctgctgggcaacagcctggtgatgctggtgatcctgtacagccgggtgggccgctctgtgacagatgtgtacctgctgaacctggccctggccgacctgctgtttgccctgaccctgcccatctgggccgccagcaaggtgaatggctggatcttcggcaccttcctgtgcaaggtggtgtccctgctgaaggaggtgaacttctacagcggcatcctgctgtag

SEQ ID NO: 19070 - DNA, 1059 bp, synthetic construct
  misc_feature 1..1059: note = Description of Artificial Sequence: Synthetic coding sequence
  source 1..1059: mol_type = other DNA
atggagggcatcagcatctacaccagtgacaactacacagaggagatgggcagcggggactatgacagcatgaaggagccctgcttccgggaggagaatgccaacttcaacaagatcttcctgcccaccatctacagcatcatcttcctgactggaattgtgggcaatggcctggtgatcctggtgatgggctaccagaagaagctgcgctccatgacagacaagtaccgcctgcacctgtctgtggccgacctgctgtttgtgatcaccctgcccttctgggccgtggatgctgtggccaactggtacttcggcaacttcctgtgcaaggctgtgcacgtgatctacacagtgaacctgtacagctctgtgctgatcctggccttcatcagcctggaccgctacctggccatcgtgcacgccaccaacagccagaggcccaggaagctgctggccgagaaggtggtgtatgtgggcgtgtggatcccagccctgctgctgaccatcccagacttcatctttgccaacgtgtctgaggctgatgaccgctacatctgtgaccgcttctacccaaatgacctgtgggtggtggtgttccagttccagcacatcatggtgggcctcatcctgcccggcatcgtcatcctgagctgctactgcatcatcatcagcaagctgagccacagcaagggccaccagaagaggaaggccctgaagaccaccgtcatcctgatcctggccttctttgcctgctggctgccctactacatcggcatcagcattgacagcttcatcctgctggagatcatcaagcagggctgtgaatttgaaaatacagtgcacaagtggatcagcatcacagaggccctggccttcttccactgctgcctgaaccccatcctgtatgccttcctgggcgccaagttcaagaccagcgcccagcacgccctgacctctgtgtcccggggcagcagcctgaagatcctgagcaagggcaagagaggaggccacagctctgtgtccacagagagcgagagcagcagcttccacagcagctag

SEQ ID NO: 19071 - DNA, 1071 bp, synthetic construct
  misc_feature 1..1071: note = Description of Artificial Sequence: Synthetic coding sequence
  source 1..1071: mol_type = other DNA
atgagcatccccctgcccctgctgcagatctacaccagtgacaactacacagaggagatgggcagcggggactatgacagcatgaaggagccctgcttccgggaggagaatgccaacttcaacaagatcttcctgcccaccatctacagcatcatcttcctgactggaattgtgggcaatggcctggtgatcctggtgatgggctaccagaagaagctgcgctccatgacagacaagtaccgcctgcacctgtctgtggccgacctgctgtttgtgatcaccctgcccttctgggccgtggatgctgtggccaactggtacttcggcaacttcctgtgcaaggctgtgcacgtgatctacacagtgaacctgtacagctctgtgctgatcctggccttcatcagcctggaccgctacctggccatcgtgcacgccaccaacagccagaggcccaggaagctgctggccgagaaggtggtgtatgtgggcgtgtggatcccagccctgctgctgaccatcccagacttcatctttgccaacgtgtctgaggctgatgaccgctacatctgtgaccgcttctacccaaatgacctgtgggtggtggtgttccagttccagcacatcatggtgggcctcatcctgcccggcatcgtcatcctgagctgctactgcatcatcatcagcaagctgagccacagcaagggccaccagaagaggaaggccctgaagaccaccgtcatcctgatcctggccttctttgcctgctggctgccctactacatcggcatcagcattgacagcttcatcctgctggagatcatcaagcagggctgtgaatttgaaaatacagtgcacaagtggatcagcatcacagaggccctggccttcttccactgctgcctgaaccccatcctgtatgccttcctgggcgccaagttcaagaccagcgcccagcacgccctgacctctgtgtcccggggcagcagcctgaagatcctgagcaagggcaagagaggaggccacagctctgtgtccacagagagcgagagcagcagcttccacagcagctag

SEQ ID NO: 19072 - DNA, 669 bp, synthetic construct
  misc_feature 1..669: note = Description of Artificial Sequence: Synthetic coding sequence
  source 1..669: mol_type = other DNA
atgccctggcagacaggcaccctgggcaccagctatgcccggcagagcatgagcagcacccagagcaccagcacagctgtgagcagctcctggatcccagccctgctgctgaccatcccagacttcatctttgccaacgtgtctgaggctgatgaccgctacatctgtgaccgcttctacccaaatgacctgtgggtggtggtgttccagttccagcacatcatggtgggcctcatcctgcccggcatcgtcatcctgagctgctactgcatcatcatcagcaagctgagccacagcaagggccaccagaagaggaaggccctgaagaccaccgtcatcctgatcctggccttctttgcctgctggctgccctactacatcggcatcagcattgacagcttcatcctgctggagatcatcaagcagggctgtgaatttgaaaatacagtgcacaagtggatcagcatcacagaggccctggccttcttccactgctgcctgaaccccatcctgtatgccttcctgggcgccaagttcaagaccagcgcccagcacgccctgacctctgtgtcccggggcagcagcctgaagatcctgagcaagggcaagagaggaggccacagctctgtgtccacagagagcgagagcagcagcttccacagcagctag

SEQ ID NO: 19073 - DNA, 2832 bp, synthetic construct
  misc_feature 1..2832: note = Description of Artificial Sequence: Synthetic coding sequence
  source 1..2832: mol_type = other DNA
atgacccagaggagcattgctggccccatctgcaacctgaagtttgtgaccctgctggtggccctgagcagcgagctgcccttcctgggcgccggcgtgcagctgcaggacaatggctacaacggcctgctgattgccatcaacccccaggtgcctgagaaccagaacctgatcagcaacatcaaggagatgatcacagaggccagcttctacctgttcaatgccaccaagagaagagtcttcttcaggaacatcaagatcctgatcccagccacctggaaggccaacaacaacagcaagatcaagcaggagagctatgagaaggccaacgtcatcgtgacagactggtatggagcccatggagatgacccctacaccctgcagtaccggggctgtgggaaggagggcaagtacatccacttcacccccaacttcctgctgaatgacaacctgacagctggctacggcagccggggccgggtgtttgtgcatgagtgggcccacctgcgctggggcgtgtttgatgagtacaacaatgacaagcccttctacatcaatggccagaaccagatcaaggtgacccgctgcagcagtgacatcaccggcatctttgtgtgtgagaagggcccctgcccccaggagaactgcatcatcagcaagctgttcaaggagggctgcaccttcatctacaacagcacccagaatgccacagccagcatcatgttcatgcagagcctgagctctgtggtggagttctgcaatgccagcacccacaaccaggaggcccccaacctgcagaaccagatgtgcagcctgcggagcgcctgggatgtgatcacagacagcgctgacttccaccacagcttccccatgaatggaacagagctgcccccaccacccaccttcagcctggtgcaggccggggacaaggtggtgtgcctggtgctggatgtgagcagcaagatggccgaggccgaccggctgctgcagctgcagcaggccgctgagttctacctgatgcagatcgtggagatccacacctttgtgggcatcgccagctttgacagcaaaggagagatccgggcccagctgcaccagatcaacagcaatgatgacaggaagctgctggtgtcctacctgcccaccaccgtgtctgccaagacagacatcagcatctgcagcggcctgaagaagggctttgaggtggtggagaagctgaatggcaaggcctacggctctgtgatgatcctggtgaccagcggagatgacaagctgctgggcaactgcctgcccaccgtgctgagcagcggcagcaccatccacagcatcgccctgggcagcagcgctgcccccaacctggaggagctgagccggctgaccggcggcctgaagttctttgtgcctgacatcagcaacagcaacagcatgattgatgccttcagccgcatcagcagcggcactggagacatcttccagcagcacatccagctggagagcactggagaaaatgtgaagccccaccaccagctgaagaacacagtgacagtggacaacacagtgggcaatgacaccatgttcctggtgacctggcaggccagcggccccccagagatcatcctgtttgatcctgatggcaggaagtactacaccaacaacttcatcaccaacctgaccttcagaacagccagcctgtggatccctggaacagccaagccaggccactggacctacaccctgaacaacacccaccacagcctgcaggccctgaaggtgacagtgaccagccgggccagcaacagcgctgtgcccccagccaccgtggaggcctttgtggagcgggacagcctgcacttcccccaccctgtgatgatctatgccaacgtgaagcagggcttctaccccatcctgaatgccaccgtgacagccaccgtggagcctgagaccggggaccctgtgaccctgcggctgctggatgatggagctggagcagatgtgatcaagaatgatggcatctacagccgctacttcttctcctttgctgccaacggccgctacagcctgaaggtgcacgtgaaccacagccccagcatcagcaccccagcccacagcatccctggcagccacgccatgtatgtgcccggctacacagccaacggcaacatccagatgaatgcccccaggaagtctgtgggcagaaatgaggaggagaggaagtggggcttcagccgggtgagcagcggcggcagcttctctgtgctgggcgtgcctgctggcccccacccagatgtgtttcctccctgcaagatcatcgacctggaggccgtgaaggtggaggaggagctgaccctgtcctggacagcccctggagaggactttgaccagggccaggccaccagctatgagatccgcatgagcaagagcctgcagaacatccaggatgacttcaacaatgccatcctggtgaacaccagcaagaggaacccccagcaggccggcatccgggagatcttcaccttcagcccccagatcagcaccaacggccctgagcaccagcccaatggagagacccatgagagccaccgcatctacgtggccatccgggccatggacaggaacagcctgcagagcgctgtgagcaacatcgcccaggcccccctcttcatcccccccaacagcgaccctgtgcctgcccgggactacctgatcctgaagggcgtgctgacagccatgggcctgattggcatcatctgcctgatcatcgtggtgacccaccacaccctgagcaggaagaagagagctgacaagaaggaaaatggcaccaagctgctgtag

SEQ ID NO: 19074 - DNA, 423 bp, synthetic construct
  misc_feature 1..423: note = Description of Artificial Sequence: Synthetic coding sequence
  source 1..423: mol_type = other DNA
atgacccagaggagcattgctggccccatctgcaacctgaagtttgtgaccctgctggtggccctgagcagcgagctgcccttcctgggcgccggcgtgcagctgcaggacaatggctacaacggcctgctgattgccatcaacccccaggtgcctgagaaccagaacctgatcagcaacatcaaggagatgatcacagaggccagcttctacctgttcaatgccaccaagagaagagtcttcttcaggaacatcaagatcctgatcccagccacctggaaggccaacaacaacagcaagatcaagcaggagagctatgagaaggccaacgtcatcgtgacagactggtatggagcccatggagatgaccagggcgtggagaagcgggagaacaccttcatcagccacctgatctcctactag

SEQ ID NO: 19075 - DNA, 1233 bp, synthetic construct
  misc_feature 1..1233: note = Description of Artificial Sequence: Synthetic coding sequence
  source 1..1233: mol_type = other DNA
atgaatgatgaggactacagcaccatctatgacaccatccagaatgaaagaacctatgaggtgcctgaccagccagaagaaaatgaaagcccccactatgatgatgtgcatgagtacctgcggccagaaaatgacctgtatgccacccagctgaacacccatgaatatgactttgtgtctgtgtacaccatcaagggggaggagaccagcctggcctctgtgcagagtgaagatcggggctacctgctgcctgatgagatctacagcgagctgcaggaggcccaccctggagagccccaggaggaccggggcatctccatggagggcctgtacagcagcacccaggaccagcagctgtgtgccgctgagctgcaggagaatggatctgtgatgaaggaggacctgcccagccccagcagcttcaccatccagcacagcaaggccttcagcaccaccaagtacagctgctacagtgatgctgagggcctggaggagaaggagggcgcccacatgaaccctgagatctacctgtttgtgaaggccggcattgatggagagagcatcggcaactgccccttcagccagaggctcttcatgatcctgtggctgaagggcgtggtgttcaacgtgaccaccgtggacctgaagaggaagccagctgacctgcacaacctggcccctggcacccacccccccttcctgaccttcaatggagatgtgaagacagatgtgaacaagattgaggagttcctggaggagaccctgaccccagagaagtaccccaagctggccgccaagcaccgggagagcaacacagctggcatcgacatcttcagcaagttcagcgcctacatcaagaacaccaagcagcagaacaatgctgccctggagcggggcctgaccaaggccctgaagaagctggatgactacctgaacacccccctgcctgaggagattgatgccaacacctgtggggaggacaagggcagcaggaggaagttcctggatggagatgagctgaccctggccgactgcaacctgctgcccaagctgcacgtggtgaagatcgtggccaagaagtacagaaattatgacatcccagctgagatgacaggcctgtggagatacctgaagaatgcctatgccagagatgagttcaccaacacctgtgccgctgacagcgagattgagctggcctatgcagatgtggccaagaggctgagccgctcctag

SEQ ID NO: 19076 - DNA, 756 bp, synthetic construct
  misc_feature 1..756: note = Description of Artificial Sequence: Synthetic coding sequence
  source 1..756: mol_type = other DNA
atgacagacagcgccacagccaatggagatgaccgggaccctgagattgagctgtttgtgaaggccggcattgatggagagagcatcggcaactgccccttcagccagaggctcttcatgatcctgtggctgaagggcgtggtgttcaacgtgaccaccgtggacctgaagaggaagccagctgacctgcacaacctggcccctggcacccacccccccttcctgaccttcaatggagatgtgaagacagatgtgaacaagattgaggagttcctggaggagaccctgaccccagagaagtaccccaagctggccgccaagcaccgggagagcaacacagctggcatcgacatcttcagcaagttcagcgcctacatcaagaacaccaagcagcagaacaatgctgccctggagcggggcctgaccaaggccctgaagaagctggatgactacctgaacacccccctgcctgaggagattgatgccaacacctgtggagaagataaaggcagcaggaggaagttcctggatggagatgagctgaccctggccgactgcaacctgctgcccaagctgcacgtggtgaagatcgtggccaagaagtacagaaattatgacatcccagctgagatgacaggcctgtggagatacctgaagaatgcctatgccagagatgagttcaccaacacctgtgccgctgacagcgagattgagctggcctatgcagatgtggccaagaggctgagccgctcctag

SEQ ID NO: 19077 - DNA, 618 bp, synthetic construct
  misc_feature 1..618: note = Description of Artificial Sequence: Synthetic coding sequence
  source 1..618: mol_type = other DNA
atgacagacagcgccacagccaatggagatgaccgggaccctgagattgagctgtttgtgaaggccggcattgatggagagagcatcggcaactgccccttcagccagaggctcttcatgatcctgtggctgaagggcgtggtgttcaacgtgaccaccgtggacctgaagaggaagccagctgacctgcacaacctggcccctggcacccacccccccttcctgaccttcaatggagatgtgaagacagatgtgaacaagattgaggagttcctggaggagaccctgaccccagagaagtaccccaagctggccgccaagcaccgggagagcaacacagctggcatcgacatcttcagcaagttcagcgcctacatcaagaacaccaagcagcagaacaatgctgccctggagcggggcctgaccaaggccctgaagaagctggatgactacctgaacacccccctgcctgaggagattgatgccaacacctgtggagaagataaaggcagcaggaggaagttcctggatggagatgagctgaccctggccgactgcaacctgctgcccaagctgcacgtggtgaaggagcaggtgcccctgaagggcatgatctag

SEQ ID NO: 19078 - DNA, 5823 bp, synthetic construct
  misc_feature 1..5823: note = Description of Artificial Sequence: Synthetic coding sequence
  source 1..5823: mol_type = other DNA
atggccagcggcctgggcagccccagcccctgcagcgctggcagcgaggaggaggacatggatgccctgctgaacaacagcctgcccccaccccacccagaaaatgaagaagatcctgaggaggacctgtctgaaacagagacccccaagctgaagaagaagaagaagcccaagaagccccgggaccccaagatccccaagagcaagaggcagaagaaggagaggatgctgctgtgccggcagctgggggacagcagcggggagggccctgagtttgtggaggaggaggaggaggtggccctgcggagtgacagcgagggcagtgactacacccctgggaagaagaagaagaagaagctgggccccaagaaggagaagaagagcaagagcaagaggaaggaggaggaggaggaggaggatgatgatgatgacagcaaggagcccaagagcagcgcccagctgctggaggactggggcatggaggacatcgaccacgtgttcagcgaggaggactaccgcaccctgaccaactacaaggccttcagccagtttgtgcggcccctgattgctgccaagaaccccaagattgctgtgtccaagatgatgatggtgctgggcgccaagtggagggagttcagcaccaacaaccccttcaagggcagcagcggggcctctgtggccgctgctgctgctgctgctgtggccgtggtggagagcatggtgacagccacagaggtggcccctcctcctcctcctgtggaggtgcccatcaggaaggccaagaccaaggagggcaagggccccaatgcccggaggaagcccaagggcagcccccgggtgcctgatgccaagaagcccaagcccaagaaggtggcccccctgaagatcaagctgggcggcttcggcagcaagaggaagaggagcagcagtgaagatgatgacctggatgtggagagtgactttgatgatgccagcatcaacagctacagcgtgtctgatggcagcaccagccgcagcagccgcagcaggaagaagctgcggaccaccaagaagaagaagaagggggaggaggaggtgacagctgtggatggctatgaaacagaccaccaggactactgtgaggtgtgccagcagggcggggagatcatcctgtgtgacacctgcccccgggcctaccacatggtgtgcctggaccctgacatggagaaggcccctgagggcaagtggagctgcccccactgtgagaaggagggcatccagtgggaggccaaggaggacaacagcgagggggaggagatcctggaggaggtgggcggggacctggaggaggaggatgaccaccacatggagttctgccgggtgtgcaaggatggaggagagctgctgtgctgtgacacctgccccagcagctaccacatccactgcctgaacccccccctgcctgagatccccaatggagagtggctgtgcccccgctgcacctgcccagccctgaagggcaaggtgcagaagatcctgatctggaagtggggccagccccccagccccacccctgtgccccggcccccagatgctgaccccaacacccccagccccaagcccctggagggccggcctgagcggcagttctttgtgaagtggcagggcatgagctactggcactgctcctgggtgtctgagctgcagctggagctgcactgccaggtgatgttcaggaactaccagaggaagaatgacatggatgagcccccatctggggactttggaggagatgaggagaagagcaggaagaggaagaacaaggaccccaagtttgctgagatggaggagcgcttctaccgctatggcatcaagccagagtggatgatgatccaccgcatcctgaaccacagcgtggacaagaagggccacgtgcactacctgatcaagtggagggacctgccctatgaccaggcctcctgggagagtgaagatgtggagatccaggactatgacctcttcaagcagagctactggaaccaccgggagctgatgagaggagaggagggccggcctgggaagaagctgaagaaggtgaagctgaggaagctggagcggcccccagagacccccaccgtggaccccaccgtgaagtatgaaaggcagcctgagtacctggatgccaccggcggcaccctgcacccctaccagatggagggcctgaactggctgcgcttctcctgggcccagggcacagacaccatcctggctgatgagatgggcctgggcaagacagtgcagacagctgtgttcctgtacagcctgtacaaggagggccacagcaagggccccttcctggtgtctgcccccctgagcaccatcatcaactgggagcgggagtttgagatgtgggccccagacatgtatgtggtgacctacgtgggggacaaggacagccgggccatcatccgggagaatgagttctcctttgaggacaatgccatccggggcggcaagaaggccagcaggatgaagaaggaggcctctgtgaagttccacgtgctgctgaccagctatgagctgatcaccatcgacatggccatcctgggcagcattgactgggcctgcctgattgtggatgaggcccaccggctgaagaacaaccagagcaagttcttccgggtgctgaatggctacagcctgcagcacaagctgctgctgaccggcacccccctgcagaacaacctggaggagctgttccacctgctgaacttcctgaccccagagcgcttccacaacctggagggcttcctggaggagtttgctgacatcgccaaggaggaccagatcaagaagctgcatgacatgctgggcccccacatgctgcggcggctgaaggcagatgtgttcaagaacatgcccagcaagacagagctgattgtgcgggtggagctgagccccatgcagaagaagtactacaagtacatcctgaccaggaactttgaggccctgaatgcccggggcggcggcaaccaggtgtccctgctgaatgtggtgatggacctgaagaagtgctgcaaccacccctacctgtttcctgtggccgccatggaggcccccaagatgcccaacggcatgtatgatggcagcgccctgatccgggccagcggcaagctgctgctgctgcagaagatgctgaagaacctgaaggagggcggccaccgggtgctgatcttcagccagatgaccaagatgctggacctgctggaggacttcctggagcacgagggctacaagtatgaaagaattgatggcggcatcactggaaacatgaggcaggaggccatcgaccgcttcaatgcccctggggcccagcagttctgcttcctgctgagcacccgggccggcggcctgggcatcaacctggccacagctgacaccgtcatcatctatgacagcgactggaacccccacaatgacatccaggccttcagccgggcccacagaattggccagaacaagaaggtgatgatctacagatttgtgacccgggcctctgtggaggagcgcatcacccaggtggccaagaagaagatgatgctgacccacctggtggtgcggcccggcctgggcagcaagacaggctccatgagcaagcaggagctggatgacatcctgaagtttggaacagaggagctgttcaaggatgaggccacagatggcggcggggacaacaaggagggggaggacagcagcgtcatccactatgatgacaaggccatcgagcggctgctggacaggaaccaggatgaaacagaggacacagagctgcagggcatgaatgagtacctgagcagcttcaaggtggcccagtatgtggtgcgggaggaggagatgggagaggaggaggaggtggagcgggagatcatcaagcaggaggagagcgtggaccctgactactgggagaagctgctgcggcaccactatgagcagcagcaggaggacctggccaggaacctgggcaagggcaagaggatcaggaagcaggtgaactacaatgatggcagccaggaggaccggggcgtgtgtggccggccccggcccccacccatgggccgcagcaccagggctgtgggccctgcccacctgcccagcctgcccccagactggcaggatgaccagagcgacaaccagagcgactacagcgtggccagcgaggagggagatgaagattttgatgagaggtctgaggccccccggcggcccagcaggaagggcctgagaaatgacaaggacaagcccctgccccccctgctggcccgggtgggcggcaacatcgaggtgctgggcttcaatgcccggcagaggaaggccttcctgaatgccatcatgagatatggcatgccaccccaggatgccttcaccacccagtggctggtgcgggacctgcggggcaagtctgagaaggagttcaaggcctacgtgtccctcttcatgaggcacctgtgtgagcccggggctgatggagctgagacctttgctgatggagtgccccgggagggcctgagccggcagcacgtgctgacccgcatcggcgtgatgagcctcatcaggaagaaggtgcaggagtttgaacatgtgaatggccgctggagcatgcctgagctggccgaggtggaggagaacaagaagatgagccagcccggcagccccagccccaagacccccacccccagcacccctggggacacccagcccaacaccccagcccctgtgcccccagcagaagatggcatcaagattgaggagaacagcctgaaggaggaggagagcattgaaggagagaaggaggtgaagagcacagcccctgagacagccattgaatgtacccaggccccagccccagcctctgaagatgagaaggtggtggtggagcccccagagggggaggagaaggtggagaaggccgaggtgaaggagaggacagaggagcccatggagacagagcccaagggagctgctgatgtggagaaggtggaggagaagagcgccatcgacctgacccccatcgtggtggaggacaaggaggagaagaaggaggaggaggagaagaaggaggtgatgctgcagaatggagagacccccaaggacctgaatgatgagaagcagaagaagaacatcaagcagcgcttcatgttcaacattgctgatggcggcttcacagagctgcacagcctgtggcagaatgaggagcgggccgccaccgtgaccaagaagacctatgagatctggcacagaagacatgactactggctgctggccggcatcatcaaccacggctacgcccgctggcaggacatccagaatgaccccaggtatgccatcctgaatgagcccttcaagggggagatgaacagaggcaacttcctggagatcaagaacaagttcctggcccggcgcttcaagctgctggagcaggccctggtgattgaggagcagctgcggcgggccgcctacctgaacatgtctgaggaccccagccaccccagcatggccctgaacaccaggtttgctgaggtggagtgcctggccgagagccaccagcacctgagcaaggagagcatggccggcaacaagccagccaatgctgtgctgcacaaggtgctgaagcagctggaggagctgctgagtgacatgaaggcagatgtgacccggctgcctgccaccatcgcccgcatcccccctgtggccgtgcggctgcagatgtctgagaggaacatcctgagccggctggccaacagagcccctgagcccaccccccagcaggtggcccagcagcagtag

SEQ ID NO: 19079 - DNA, 5739 bp, synthetic construct
  misc_feature 1..5739: note = Description of Artificial Sequence: Synthetic coding sequence
  source 1..5739: mol_type = other DNA
atggccagcggcctgggcagccccagcccctgcagcgctggcagcgaggaggaggacatggatgccctgctgaacaacagcctgcccccaccccacccagaaaatgaagaagatcctgaggaggacctgtctgaaacagagacccccaagctgaagaagaagaagaagcccaagaagccccgggaccccaagatccccaagagcaagaggcagaagaaggagaggatgctgctgtgccggcagctgggggacagcagcggggagggccctgagtttgtggaggaggaggaggaggtggccctgcggagtgacagcgagggcagtgactacacccctgggaagaagaagaagaagaagctgggccccaagaaggagaagaagagcaagagcaagaggaaggaggaggaggaggaggaggatgatgatgatgacagcaaggagcccaagagcagcgcccagctgctggaggactggggcatggaggacatcgaccacgtgttcagcgaggaggactaccgcaccctgaccaactacaaggccttcagccagtttgtgcggcccctgattgctgccaagaaccccaagattgctgtgtccaagatgatgatggtgctgggcgccaagtggagggagttcagcaccaacaaccccttcaagggcagcagcggggcctctgtggccgctgctgctgctgctgctgtggccgtggtggagagcatggtgacagccacagaggtggcccctcctcctcctcctgtggaggtgcccatcaggaaggccaagaccaaggagggcaagggccccaatgcccggaggaagcccaagggcagcccccgggtgcctgatgccaagaagcccaagcccaagaaggtggcccccctgaagatcaagctgggcggcttcggcagcaagaggaagaggagcagcagtgaagatgatgacctggatgtggagagtgactttgatgatgccagcatcaacagctacagcgtgtctgatggcagcaccagccgcagcagccgcagcaggaagaagctgcggaccaccaagaagaagaagaagggggaggaggaggtgacagctgtggatggctatgaaacagaccaccaggactactgtgaggtgtgccagcagggcggggagatcatcctgtgtgacacctgcccccgggcctaccacatggtgtgcctggaccctgacatggagaaggcccctgagggcaagtggagctgcccccactgtgagaaggagggcatccagtgggaggccaaggaggacaacagcgagggggaggagatcctggaggaggtgggcggggacctggaggaggaggatgaccaccacatggagttctgccgggtgtgcaaggatggaggagagctgctgtgctgtgacacctgccccagcagctaccacatccactgcctgaacccccccctgcctgagatccccaatggagagtggctgtgcccccgctgcacctgcccagccctgaagggcaaggtgcagaagatcctgatctggaagtggggccagccccccagccccacccctgtgccccggcccccagatgctgaccccaacacccccagccccaagcccctggagggccggcctgagcggcagttctttgtgaagtggcagggcatgagctactggcactgctcctgggtgtctgagctgcagctggagctgcactgccaggtgatgttcaggaactaccagaggaagaatgacatggatgagcccccatctggggactttggaggagatgaggagaagagcaggaagaggaagaacaaggaccccaagtttgctgagatggaggagcgcttctaccgctatggcatcaagccagagtggatgatgatccaccgcatcctgaaccacagcgtggacaagaagggccacgtgcactacctgatcaagtggagggacctgccctatgaccaggcctcctgggagagtgaagatgtggagatccaggactatgacctcttcaagcagagctactggaaccaccgggagctgatgagaggagaggagggccggcctgggaagaagctgaagaaggtgaagctgaggaagctggagcggcccccagagacccccaccgtggaccccaccgtgaagtatgaaaggcagcctgagtacctggatgccaccggcggcaccctgcacccctaccagatggagggcctgaactggctgcgcttctcctgggcccagggcacagacaccatcctggctgatgagatgggcctgggcaagacagtgcagacagctgtgttcctgtacagcctgtacaaggagggccacagcaagggccccttcctggtgtctgcccccctgagcaccatcatcaactgggagcgggagtttgagatgtgggccccagacatgtatgtggtgacctacgtgggggacaaggacagccgggccatcatccgggagaatgagttctcctttgaggacaatgccatccggggcggcaagaaggccagcaggatgaagaaggaggcctctgtgaagttccacgtgctgctgaccagctatgagctgatcaccatcgacatggccatcctgggcagcattgactgggcctgcctgattgtggatgaggcccaccggctgaagaacaaccagagcaagttcttccgggtgctgaatggctacagcctgcagcacaagctgctgctgaccggcacccccctgcagaacaacctggaggagctgttccacctgctgaacttcctgaccccagagcgcttccacaacctggagggcttcctggaggagtttgctgacatcgccaaggaggaccagatcaagaagctgcatgacatgctgggcccccacatgctgcggcggctgaaggcagatgtgttcaagaacatgcccagcaagacagagctgattgtgcgggtggagctgagccccatgcagaagaagtactacaagtacatcctgaccaggaactttgaggccctgaatgcccggggcggcggcaaccaggtgtccctgctgaatgtggtgatggacctgaagaagtgctgcaaccacccctacctgtttcctgtggccgccatggaggcccccaagatgcccaacggcatgtatgatggcagcgccctgatccgggccagcggcaagctgctgctgctgcagaagatgctgaagaacctgaaggagggcggccaccgggtgctgatcttcagccagatgaccaagatgctggacctgctggaggacttcctggagcacgagggctacaagtatgaaagaattgatggcggcatcactggaaacatgaggcaggaggccatcgaccgcttcaatgcccctggggcccagcagttctgcttcctgctgagcacccgggccggcggcctgggcatcaacctggccacagctgacaccgtcatcatctatgacagcgactggaacccccacaatgacatccaggccttcagccgggcccacagaattggccagaacaagaaggtgatgatctacagatttgtgacccgggcctctgtggaggagcgcatcacccaggtggccaagaagaagatgatgctgacccacctggtggtgcggcccggcctgggcagcaagacaggctccatgagcaagcaggagctggatgacatcctgaagtttggaacagaggagctgttcaaggatgaggccacagatggcggcggggacaacaaggagggggaggacagcagcgtcatccactatgatgacaaggccatcgagcggctgctggacaggaaccaggatgaaacagaggacacagagctgcagggcatgaatgagtacctgagcagcttcaaggtggcccagtatgtggtgcgggaggaggagatgggagaggaggaggaggtggagcgggagatcatcaagcaggaggagagcgtggaccctgactactgggagaagctgctgcggcaccactatgagcagcagcaggaggacctggccaggaacctgggcaagggcaagaggatcaggaagcaggtgaactacaatgatggcagccaggaggaccgggactggcaggatgaccagagcgacaaccagagcgactacagcgtggccagcgaggagggagatgaagattttgatgagaggtctgaggccccccggcggcccagcaggaagggcctgagaaatgacaaggacaagcccctgccccccctgctggcccgggtgggcggcaacatcgaggtgctgggcttcaatgcccggcagaggaaggccttcctgaatgccatcatgagatatggcatgccaccccaggatgccttcaccacccagtggctggtgcgggacctgcggggcaagtctgagaaggagttcaaggcctacgtgtccctcttcatgaggcacctgtgtgagcccggggctgatggagctgagacctttgctgatggagtgccccgggagggcctgagccggcagcacgtgctgacccgcatcggcgtgatgagcctcatcaggaagaaggtgcaggagtttgaacatgtgaatggccgctggagcatgcctgagctggccgaggtggaggagaacaagaagatgagccagcccggcagccccagccccaagacccccacccccagcacccctggggacacccagcccaacaccccagcccctgtgcccccagcagaagatggcatcaagattgaggagaacagcctgaaggaggaggagagcattgaaggagagaaggaggtgaagagcacagcccctgagacagccattgaatgtacccaggccccagccccagcctctgaagatgagaaggtggtggtggagcccccagagggggaggagaaggtggagaaggccgaggtgaaggagaggacagaggagcccatggagacagagcccaagggagctgctgatgtggagaaggtggaggagaagagcgccatcgacctgacccccatcgtggtggaggacaaggaggagaagaaggaggaggaggagaagaaggaggtgatgctgcagaatggagagacccccaaggacctgaatgatgagaagcagaagaagaacatcaagcagcgcttcatgttcaacattgctgatggcggcttcacagagctgcacagcctgtggcagaatgaggagcgggccgccaccgtgaccaagaagacctatgagatctggcacagaagacatgactactggctgctggccggcatcatcaaccacggctacgcccgctggcaggacatccagaatgaccccaggtatgccatcctgaatgagcccttcaagggggagatgaacagaggcaacttcctggagatcaagaacaagttcctggcccggcgcttcaagctgctggagcaggccctggtgattgaggagcagctgcggcgggccgcctacctgaacatgtctgaggaccccagccaccccagcatggccctgaacaccaggtttgctgaggtggagtgcctggccgagagccaccagcacctgagcaaggagagcatggccggcaacaagccagccaatgctgtgctgcacaaggtgctgaagcagctggaggagctgctgagtgacatgaaggcagatgtgacccggctgcctgccaccatcgcccgcatcccccctgtggccgtgcggctgcagatgtctgagaggaacatcctgagccggctggccaacagagcccctgagcccaccccccagcaggtggcccagcagcagtag

SEQ ID NO: 19080 - DNA, 5661 bp, synthetic construct
  misc_feature 1..5661: note = Description of Artificial Sequence: Synthetic coding sequence
  source 1..5661: mol_type = other DNA
atggatgccctgctgaacaacagcctgcccccaccccacccagaaaatgaggaggaccctgaggaggacctgtctgaaacagagacccccaagctgaagaagaagaagaagcccaagaagccccgggaccccaagatccccaagagcaagaggcagaagaaggagctgggggacagcagcggggagggccctgagtttgtggaggaggaggaggaggtggccctgcggagtgacagcgagggcagtgactacacccctgggaagaagaagaagaagaagctgggccccaagaaggagaagaagagcaagagcaagaggaaggaggaggaggaggaggaggatgatgatgatgacagcaaggagcccaagagcagcgcccagctgctggaggactggggcatggaggacatcgaccacgtgttcagcgaggaggactaccgcaccctgaccaactacaaggccttcagccagtttgtgcggcccctgattgctgccaagaaccccaagattgctgtgtccaagatgatgatggtgctgggcgccaagtggagggagttcagcaccaacaaccccttcaagggcagcagcggggcctctgtggccgctgctgctgctgctgctgtggccgtggtggagagcatggtgacagccacagaggtggcccctcctcctcctcctgtggaggtgcccatcaggaaggccaagaccaaggagggcaagggccccaatgcccggaggaagcccaagggcagcccccgggtgcctgatgccaagaagcccaagcccaagaaggtggcccccctgaagatcaagctgggcggcttcggcagcaagaggaagaggagcagcagtgaagatgatgacctggatgtggagagtgactttgatgatgccagcatcaacagctacagcgtgtctgatggcagcaccagccgcagcagccgcagcaggaagaagctgcggaccaccaagaagaagaagaagggggaggaggaggtgacagctgtggatggctatgaaacagaccaccaggactactgtgaggtgtgccagcagggcggggagatcatcctgtgtgacacctgcccccgggcctaccacatggtgtgcctggaccctgacatggagaaggcccctgagggcaagtggagctgcccccactgtgagaaggagggcatccagtgggaggccaaggaggacaacagcgagggggaggagatcctggaggaggtgggcggggacctggaggaggaggatgaccaccacatggagttctgccgggtgtgcaaggatggaggagagctgctgtgctgtgacacctgccccagcagctaccacatccactgcctgaacccccccctgcctgagatccccaatggagagtggctgtgcccccgctgcacctgcccagccctgaagggcaaggtgcagaagatcctgatctggaagtggggccagccccccagccccacccctgtgccccggcccccagatgctgaccccaacacccccagccccaagcccctggagggccggcctgagcggcagttctttgtgaagtggcagggcatgagctactggcactgctcctgggtgtctgagctgcagctggagctgcactgccaggtgatgttcaggaactaccagaggaagaatgacatggatgagcccccatctggggactttggaggagatgaggagaagagcaggaagaggaagaacaaggaccccaagtttgctgagatggaggagcgcttctaccgctatggcatcaagccagagtggatgatgatccaccgcatcctgaaccacagcgtggacaagaagggccacgtgcactacctgatcaagtggagggacctgccctatgaccaggcctcctgggagagtgaagatgtggagatccaggactatgacctcttcaagcagagctactggaaccaccgggagctgatgagaggagaggagggccggcctgggaagaagctgaagaaggtgaagctgaggaagctggagcggcccccagagacccccaccgtggaccccaccgtgaagtatgaaaggcagcctgagtacctggatgccaccggcggcaccctgcacccctaccagatggagggcctgaactggctgcgcttctcctgggcccagggcacagacaccatcctggctgatgagatgggcctgggcaagacagtgcagacagctgtgttcctgtacagcctgtacaaggagggccacagcaagggccccttcctggtgtctgcccccctgagcaccatcatcaactgggagcgggagtttgagatgtgggccccagacatgtatgtggtgacctacgtgggggacaaggacagccgggccatcatccgggagaatgagttctcctttgaggacaatgccatccggggcggcaagaaggccagcaggatgaagaaggaggcctctgtgaagttccacgtgctgctgaccagctatgagctgatcaccatcgacatggccatcctgggcagcattgactgggcctgcctgattgtggatgaggcccaccggctgaagaacaaccagagcaagttcttccgggtgctgaatggctacagcctgcagcacaagctgctgctgaccggcacccccctgcagaacaacctggaggagctgttccacctgctgaacttcctgaccccagagcgcttccacaacctggagggcttcctggaggagtttgctgacatcgccaaggaggaccagatcaagaagctgcatgacatgctgggcccccacatgctgcggcggctgaaggcagatgtgttcaagaacatgcccagcaagacagagctgattgtgcgggtggagctgagccccatgcagaagaagtactacaagtacatcctgaccaggaactttgaggccctgaatgcccggggcggcggcaaccaggtgtccctgctgaatgtggtgatggacctgaagaagtgctgcaaccacccctacctgtttcctgtggccgccatggaggcccccaagatgcccaacggcatgtatgatggcagcgccctgatccgggccagcggcaagctgctgctgctgcagaagatgctgaagaacctgaaggagggcggccaccgggtgctgatcttcagccagatgaccaagatgctggacctgctggaggacttcctggagcacgagggctacaagtatgaaagaattgatggcggcatcactggaaacatgaggcaggaggccatcgaccgcttcaatgcccctggggcccagcagttctgcttcctgctgagcacccgggccggcggcctgggcatcaacctggccacagctgacaccgtcatcatctatgacagcgactggaacccccacaatgacatccaggccttcagccgggcccacagaattggccagaacaagaaggtgatgatctacagatttgtgacccgggcctctgtggaggagcgcatcacccaggtggccaagaagaagatgatgctgacccacctggtggtgcggcccggcctgggcagcaagacaggctccatgagcaagcaggagctggatgacatcctgaagtttggaacagaggagctgttcaaggatgaggccacagatggcggcggggacaacaaggagggggaggacagcagcgtcatccactatgatgacaaggccatcgagcggctgctggacaggaaccaggatgaaacagaggacacagagctgcagggcatgaatgagtacctgagcagcttcaaggtggcccagtatgtggtgcgggaggaggagatgggagaggaggaggaggtggagcgggagatcatcaagcaggaggagagcgtggaccctgactactgggagaagctgctgcggcaccactatgagcagcagcaggaggacctggccaggaacctgggcaagggcaagaggatcaggaagcaggtgaactacaatgatggcagccaggaggaccgggactggcaggatgaccagagcgacaaccagagcgactacagcgtggccagcgaggagggagatgaagattttgatgagaggtctgaggccccccggcggcccagcaggaagggcctgagaaatgacaaggacaagcccctgccccccctgctggcccgggtgggcggcaacatcgaggtgctgggcttcaatgcccggcagaggaaggccttcctgaatgccatcatgagatatggcatgccaccccaggatgccttcaccacccagtggctggtgcgggacctgcggggcaagtctgagaaggagttcaaggcctacgtgtccctcttcatgaggcacctgtgtgagcccggggctgatggagctgagacctttgctgatggagtgccccgggagggcctgagccggcagcacgtgctgacccgcatcggcgtgatgagcctcatcaggaagaaggtgcaggagtttgaacatgtgaatggccgctggagcatgcctgagctggccgaggtggaggagaacaagaagatgagccagcccggcagccccagccccaagacccccacccccagcacccctggggacacccagcccaacaccccagcccctgtgcccccagcagaagatggcatcaagattgaggagaacagcctgaaggaggaggagagcattgaaggagagaaggaggtgaagagcacagcccctgagacagccattgaatgtacccaggccccagccccagcctctgaagatgagaaggtggtggtggagcccccagagggggaggagaaggtggagaaggccgaggtgaaggagaggacagaggagcccatggagacagagcccaagggagctgctgatgtggagaaggtggaggagaagagcgccatcgacctgacccccatcgtggtggaggacaaggaggagaagaaggaggaggaggagaagaaggaggtgatgctgcagaatggagagacccccaaggacctgaatgatgagaagcagaagaagaacatcaagcagcgcttcatgttcaacattgctgatggcggcttcacagagctgcacagcctgtggcagaatgaggagcgggccgccaccgtgaccaagaagacctatgagatctggcacagaagacatgactactggctgctggccggcatcatcaaccacggctacgcccgctggcaggacatccagaatgaccccaggtatgccatcctgaatgagcccttcaagggggagatgaacagaggcaacttcctggagatcaagaacaagttcctggcccggcgcttcaagctgctggagcaggccctggtgattgaggagcagctgcggcgggccgcctacctgaacatgtctgaggaccccagccaccccagcatggccctgaacaccaggtttgctgaggtggagtgcctggccgagagccaccagcacctgagcaaggagagcatggccggcaacaagccagccaatgctgtgctgcacaaggtgctgaagcagctggaggagctgctgagtgacatgaaggcagatgtgacccggctgcctgccaccatcgcccgcatcccccctgtggccgtgcggctgcagatgtctgagaggaacatcctgagccggctggccaacagagcccctgagcccaccccccagcaggtggcccagcagcagtag

SEQ ID NO: 19081 - DNA, 5718 bp, synthetic construct
  misc_feature 1..5718: note = Description of Artificial Sequence: Synthetic coding sequence
  source 1..5718: mol_type = other DNA
atggccagcggcctgggcagccccagcccctgcagcgctggcagcgaggaggaggacatggatgccctgctgaacaacagcctgcccccaccccacccagaaaatgaagaagatcctgaggaggacctgtctgaaacagagacccccaagctgaagaagaagaagaagcccaagaagccccgggaccccaagatccccaagagcaagaggcagaagaaggagctgggggacagcagtggagagggccctgagtttgtggaggaggaggaggaggtggccctgcggagtgacagcgagggcagtgactacaccccaggcaagaagaagaagaagaagctgggccccaagaaggagaagaagagcaagagcaagaggaaggaggaggaggaggaggaggatgatgatgatgacagcaaggagcccaagagcagcgcccagctgctggaggactggggcatggaggacatcgaccacgtgttttctgaggaggactaccgcaccctgaccaactacaaggccttcagccagtttgtgcggcccctgattgctgccaagaaccccaagattgctgtgtccaagatgatgatggtgctgggcgccaagtggagggagttcagcaccaacaaccccttcaagggcagcagcggggcctctgtggccgctgctgctgctgctgctgtggccgtggtggagagcatggtgacagccacagaggtggcccctcctcctcctcctgtggaggtgcccatcaggaaggccaagaccaaggagggcaagggccccaatgcccggaggaagcccaagggcagcccccgggtgcctgatgccaagaagcccaagcccaagaaggtggcccccctgaagatcaagctgggcggcttcggcagcaagaggaagaggagcagcagtgaagatgatgacctggatgtggagagtgactttgatgatgccagcatcaacagctacagcgtgtctgatggcagcaccagccgcagcagccgcagcaggaagaagctgcggaccaccaagaagaagaagaagggggaggaggaggtgacagctgtggatggctatgaaacagaccaccaggactactgtgaggtgtgccagcagggcggggagatcatcctgtgtgacacctgcccccgggcctaccacatggtgtgcctggaccctgacatggagaaggcccctgagggcaagtggagctgcccccactgtgagaaggagggcatccagtgggaggccaaggaggacaacagcgagggggaggagatcctggaggaggtgggcggggacctggaggaggaggatgaccaccacatggagttctgccgggtgtgcaaggatggaggagagctgctgtgctgtgacacctgccccagcagctaccacatccactgcctgaacccccccctgcctgagatccccaacggggagtggctgtgcccccgctgcacctgcccagccctgaagggcaaggtgcagaagatcctgatctggaagtggggccagccccccagccccacccctgtgccccggcccccagatgctgaccccaacacccccagccccaagcccctggagggccggcctgagcggcagttctttgtgaagtggcagggcatgagctactggcactgctcctgggtgtctgagctgcagctggagctgcactgccaggtgatgttcaggaactaccagaggaagaatgacatggatgagccccccagcggggactttggaggagatgaggagaagagcaggaagaggaagaacaaggaccccaagtttgctgagatggaggagcgcttctaccgctatggcatcaagccagagtggatgatgatccaccgcatcctgaaccacagcgtggacaagaagggccacgtgcactacctgatcaagtggagggacctgccctatgaccaggcctcctgggagagtgaagatgtggagatccaggactatgacctcttcaagcagagctactggaaccaccgggagctgatgagaggagaggagggccggcctgggaagaagctgaagaaggtgaagctgaggaagctggagaggcctcctgagacccccaccgtggaccccaccgtgaagtatgagcggcagcctgagtacctggatgccactggaggcaccctgcacccctaccagatggagggcctgaactggctgcgcttctcctgggcccagggcacagacaccatcctggctgatgagatgggcctgggcaagacagtgcagacagctgtgttcctgtacagcctgtacaaggagggccacagcaagggccccttcctggtgtctgcccccctgagcaccatcatcaactgggagcgggagtttgagatgtgggccccagacatgtatgtggtgacctacgtgggggacaaggacagccgggccatcatcagagaaaatgagttctcctttgaagataatgccatccggggcggcaagaaggccagcaggatgaagaaggaggcctctgtgaagttccacgtgctgctgaccagctatgagctgatcaccatcgacatggccatcctgggcagcattgactgggcctgcctgattgtggatgaggcccaccggctgaagaacaaccagagcaagttcttccgggtgctgaatggctacagcctgcagcacaagctgctgctgaccggcacccccctgcagaacaacctggaggagctgttccacctgctgaacttcctgaccccagagcgcttccacaacctggagggcttcctggaggagtttgctgacatcgccaaggaggaccagatcaagaagctgcatgacatgctgggcccccacatgctgcggcggctgaaggcagatgtgttcaagaacatgcccagcaagacagagctgattgtgcgggtggagctgagccccatgcagaagaagtactacaagtacatcctgaccaggaactttgaggccctgaatgcccggggcggcggcaaccaggtgtccctgctgaatgtggtgatggacctgaagaagtgctgcaaccacccctacctgtttcctgtggccgccatggaggcccccaagatgcccaacggcatgtatgatggcagcgccctgatccgggccagcggcaagctgctgctgctgcagaagatgctgaagaacctgaaggagggcggccaccgggtgctgatcttcagccagatgaccaagatgctggacctgctggaggacttcctggagcacgagggctacaagtatgaaagaattgatggcggcatcaccggcaacatgaggcaggaggccatcgaccgcttcaatgcccctggggcccagcagttctgcttcctgctgagcaccagggctgggggcctgggcatcaacctggccacagctgacaccgtcatcatctatgacagcgactggaacccccacaatgacatccaggccttcagccgggcccaccgcatcggccagaacaagaaggtgatgatctacagatttgtgacccgggcctctgtggaggagcgcatcacccaggtggccaagaagaagatgatgctgacccacctggtggtgcggcccggcctgggcagcaagacaggctccatgagcaagcaggagctggatgacatcctgaagtttggaacagaggagctgttcaaggatgaggccacagatggcggcggggacaacaaggagggggaggacagcagcgtcatccactatgatgacaaggccatcgagcggctgctggacaggaaccaggatgaaacagaggacacagagctgcagggcatgaatgagtacctgagcagcttcaaggtggcccagtatgtggtgcgggaggaggagatgggagaggaggaggaggtggagcgggagatcatcaagcaggaggagagcgtggaccctgactactgggagaagctgctgcggcaccactatgagcagcagcaggaggacctggccaggaacctgggcaagggcaagaggatcaggaagcaggtgaactacaatgatggcagccaggaggaccgggactggcaggatgaccagagcgacaaccagagcgactacagcgtggccagcgaggagggagatgaggactttgatgagaggtctgaggccccccggcggcccagcaggaagggcctgagaaatgacaaggacaagcccctgccccccctgctggcccgggtgggcggcaacatcgaggtgctgggcttcaatgcccggcagaggaaggccttcctgaatgccatcatgagatatggcatgccaccccaggatgccttcaccacccagtggctggtgcgggacctgcggggcaagtctgagaaggagttcaaggcctacgtgtccctcttcatgaggcacctgtgtgagcctggagcagatggagctgagacctttgctgatggagtgccccgggagggcctgagccggcagcacgtgctgaccagaattggagtgatgagcctcatcaggaagaaggtgcaggagtttgagcacgtgaatggccgctggagcatgcctgagctggccgaggtggaggagaacaagaagatgagccagcccggcagccccagccccaagacccccacccccagcacccctggggacacccagcccaacaccccagcccctgtgcccccagcagaagatggcatcaagattgaggagaacagcctgaaggaggaggagagcattgaaggagagaaggaggtgaagagcacagcccctgagacagccatcgagtgcacccaggccccagccccagcctctgaagatgagaaggtggtggtggagcccccagagggggaggagaaggtggagaaggccgaggtgaaggagaggacagaggagcccatggagacagagcccaagggagctgctgatgtggagaaggtggaggagaagagcgccatcgacctgacccccatcgtggtggaggacaaggaggagaagaaggaggaggaggagaagaaggaggtgatgctgcagaatggagagacccccaaggacctgaatgatgagaagcagaagaagaacatcaagcagcgcttcatgttcaacattgctgatggcggcttcacagagctgcacagcctgtggcagaatgaggagagagctgccaccgtgaccaagaagacctatgagatctggcacagaagacatgactactggctgctggccggcatcatcaaccacggctacgcccgctggcaggacatccagaatgaccccaggtatgccatcctgaatgagcccttcaagggggagatgaacagaggcaacttcctggagatcaagaacaagttcctggcccggcgcttcaagctgctggagcaggccctggtgattgaggagcagctgcggcgggccgcctacctgaacatgtctgaggaccccagccaccccagcatggccctgaacaccaggtttgctgaggtggagtgcctggccgagagccaccagcacctgagcaaggagagcatggccggcaacaagccagccaatgctgtgctgcacaaggtgctgaagcagctggaggagctgctgagtgacatgaaggcagatgtgacccggctgcctgccaccatcgcccgcatcccccctgtggccgtgcggctgcagatgtctgaaagaaacatcctgagccggctggccaacagagcccctgagcccaccccccagcaggtggcccagcagcagtag

SEQ ID NO: 19082 - DNA, 5814 bp, synthetic construct
  misc_feature 1..5814: note = Description of Artificial Sequence: Synthetic coding sequence
  source 1..5814: mol_type = other DNA
atggccagcggcctgggcagccccagcccctgcagcgctggcagcgaggaggaggacatggatgccctgctgaacaacagcctgcccccaccccaccctgaggaccctgaggaggacctgtctgaaacagagacccccaagctgaagaagaagaagaagcccaagaagccccgggaccccaagatccccaagagcaagaggcagaagaaggagaggatgctgctgtgccggcagctgggggacagcagtggagagggccctgagtttgtggaggaggaggaggaggtggccctgcggagtgacagcgagggcagtgactacaccccaggcaagaagaagaagaagaagctgggccccaagaaggagaagaagagcaagagcaagaggaaggaggaggaggaggaggaggatgatgatgatgacagcaaggagcccaagagcagcgcccagctgctggaggactggggcatggaggacatcgaccacgtgttttctgaggaggactaccgcaccctgaccaactacaaggccttcagccagtttgtgcggcccctgattgctgccaagaaccccaagattgctgtgtccaagatgatgatggtgctgggcgccaagtggagggagttcagcaccaacaaccccttcaagggcagcagcggggcctctgtggccgctgctgctgctgctgctgtggccgtggtggagagcatggtgacagccacagaggtggcccctcctcctcctcctgtggaggtgcccatcaggaaggccaagaccaaggagggcaagggccccaatgcccggaggaagcccaagggcagcccccgggtgcctgatgccaagaagcccaagcccaagaaggtggcccccctgaagatcaagctgggcggcttcggcagcaagaggaagaggagcagcagtgaagatgatgacctggatgtggagagtgactttgatgatgccagcatcaacagctacagcgtgtctgatggcagcaccagccgcagcagccgcagcaggaagaagctgcggaccaccaagaagaagaagaagggggaggaggaggtgacagctgtggatggctatgaaacagaccaccaggactactgtgaggtgtgccagcagggcggggagatcatcctgtgtgacacctgcccccgggcctaccacatggtgtgcctggaccctgacatggagaaggcccctgagggcaagtggagctgcccccactgtgagaaggagggcatccagtgggaggccaaggaggacaacagcgagggggaggagatcctggaggaggtgggcggggacctggaggaggaggatgaccaccacatggagttctgccgggtgtgcaaggatggaggagagctgctgtgctgtgacacctgccccagcagctaccacatccactgcctgaacccccccctgcctgagatccccaacggggagtggctgtgcccccgctgcacctgcccagccctgaagggcaaggtgcagaagatcctgatctggaagtggggccagccccccagccccacccctgtgccccggcccccagatgctgaccccaacacccccagccccaagcccctggagggccggcctgagcggcagttctttgtgaagtggcagggcatgagctactggcactgctcctgggtgtctgagctgcagctggagctgcactgccaggtgatgttcaggaactaccagaggaagaatgacatggatgagccccccagcggggactttggaggagatgaggagaagagcaggaagaggaagaacaaggaccccaagtttgctgagatggaggagcgcttctaccgctatggcatcaagccagagtggatgatgatccaccgcatcctgaaccacagcgtggacaagaagggccacgtgcactacctgatcaagtggagggacctgccctatgaccaggcctcctgggagagtgaagatgtggagatccaggactatgacctcttcaagcagagctactggaaccaccgggagctgatgagaggagaggagggccggcctgggaagaagctgaagaaggtgaagctgaggaagctggagaggcctcctgagacccccaccgtggaccccaccgtgaagtatgagcggcagcctgagtacctggatgccactggaggcaccctgcacccctaccagatggagggcctgaactggctgcgcttctcctgggcccagggcacagacaccatcctggctgatgagatgggcctgggcaagacagtgcagacagctgtgttcctgtacagcctgtacaaggagggccacagcaagggccccttcctggtgtctgcccccctgagcaccatcatcaactgggagcgggagtttgagatgtgggccccagacatgtatgtggtgacctacgtgggggacaaggacagccgggccatcatcagagaaaatgagttctcctttgaagataatgccatccggggcggcaagaaggccagcaggatgaagaaggaggcctctgtgaagttccacgtgctgctgaccagctatgagctgatcaccatcgacatggccatcctgggcagcattgactgggcctgcctgattgtggatgaggcccaccggctgaagaacaaccagagcaagttcttccgggtgctgaatggctacagcctgcagcacaagctgctgctgaccggcacccccctgcagaacaacctggaggagctgttccacctgctgaacttcctgaccccagagcgcttccacaacctggagggcttcctggaggagtttgctgacatcgccaaggaggaccagatcaagaagctgcatgacatgctgggcccccacatgctgcggcggctgaaggcagatgtgttcaagaacatgcccagcaagacagagctgattgtgcgggtggagctgagccccatgcagaagaagtactacaagtacatcctgaccaggaactttgaggccctgaatgcccggggcggcggcaaccaggtgtccctgctgaatgtggtgatggacctgaagaagtgctgcaaccacccctacctgtttcctgtggccgccatggaggcccccaagatgcccaacggcatgtatgatggcagcgccctgatccgggccagcggcaagctgctgctgctgcagaagatgctgaagaacctgaaggagggcggccaccgggtgctgatcttcagccagatgaccaagatgctggacctgctggaggacttcctggagcacgagggctacaagtatgaaagaattgatggcggcatcaccggcaacatgaggcaggaggccatcgaccgcttcaatgcccctggggcccagcagttctgcttcctgctgagcaccagggctgggggcctgggcatcaacctggccacagctgacaccgtcatcatctatgacagcgactggaacccccacaatgacatccaggccttcagccgggcccaccgcatcggccagaacaagaaggtgatgatctacagatttgtgacccgggcctctgtggaggagcgcatcacccaggtggccaagaagaagatgatgctgacccacctggtggtgcggcccggcctgggcagcaagacaggctccatgagcaagcaggagctggatgacatcctgaagtttggaacagaggagctgttcaaggatgaggccacagatggcggcggggacaacaaggagggggaggacagcagcgtcatccactatgatgacaaggccatcgagcggctgctggacaggaaccaggatgaaacagaggacacagagctgcagggcatgaatgagtacctgagcagcttcaaggtggcccagtatgtggtgcgggaggaggagatgggagaggaggaggaggtggagcgggagatcatcaagcaggaggagagcgtggaccctgactactgggagaagctgctgcggcaccactatgagcagcagcaggaggacctggccaggaacctgggcaagggcaagaggatcaggaagcaggtgaactacaatgatggcagccaggaggacagaggagtgtgtggccggccccggcccccacccatgggccgcagcaccagggctgtgggccctgcccacctgcccagcctgcccccagactggcaggatgaccagagcgacaaccagagcgactacagcgtggccagcgaggagggagatgaggactttgatgagaggtctgaggccccccggcggcccagcaggaagggcctgagaaatgacaaggacaagcccctgccccccctgctggcccgggtgggcggcaacatcgaggtgctgggcttcaatgcccggcagaggaaggccttcctgaatgccatcatgagatatggcatgccaccccaggatgccttcaccacccagtggctggtgcgggacctgcggggcaagtctgagaaggagttcaaggcctacgtgtccctcttcatgaggcacctgtgtgagcctggagcagatggagctgagacctttgctgatggagtgccccgggagggcctgagccggcagcacgtgctgaccagaattggagtgatgagcctcatcaggaagaaggtgcaggagtttgagcacgtgaatggccgctggagcatgcctgagctggccgaggtggaggagaacaagaagatgagccagcccggcagccccagccccaagacccccacccccagcacccctggggacacccagcccaacaccccagcccctgtgcccccagcagaagatggcatcaagattgaggagaacagcctgaaggaggaggagagcattgaaggagagaaggaggtgaagagcacagcccctgagacagccatcgagtgcacccaggccccagccccagcctctgaagatgagaaggtggtggtggagcccccagagggggaggagaaggtggagaaggccgaggtgaaggagaggacagaggagcccatggagacagagcccaagggagctgctgatgtggagaaggtggaggagaagagcgccatcgacctgacccccatcgtggtggaggacaaggaggagaagaaggaggaggaggagaagaaggaggtgatgctgcagaatggagagacccccaaggacctgaatgatgagaagcagaagaagaacatcaagcagcgcttcatgttcaacattgctgatggcggcttcacagagctgcacagcctgtggcagaatgaggagagagctgccaccgtgaccaagaagacctatgagatctggcacagaagacatgactactggctgctggccggcatcatcaaccacggctacgcccgctggcaggacatccagaatgaccccaggtatgccatcctgaatgagcccttcaagggggagatgaacagaggcaacttcctggagatcaagaacaagttcctggcccggcgcttcaagctgctggagcaggccctggtgattgaggagcagctgcggcgggccgcctacctgaacatgtctgaggaccccagccaccccagcatggccctgaacaccaggtttgctgaggtggagtgcctggccgagagccaccagcacctgagcaaggagagcatggccggcaacaagccagccaatgctgtgctgcacaaggtgctgaagcagctggaggagctgctgagtgacatgaaggcagatgtgacccggctgcctgccaccatcgcccgcatcccccctgtggccgtgcggctgcagatgtctgaaagaaacatcctgagccggctggccaacagagcccctgagcccaccccccagcaggtggcccagcagcagtag

SEQ ID NO: 19083 - DNA, 1065 bp, synthetic construct
  misc_feature 1..1065: note = Description of Artificial Sequence: Synthetic coding sequence
  source 1..1065: mol_type = other DNA
atggccagcggcctgggcagccccagcccctgcagcgctggcagcgaggaggaggacatggatgccctgctgaacaacagcctgcccccaccccacccagaaaatgaagaagatcctgaggaggacctgtctgaaacagagacccccaagctgaagaagaagaagaagcccaagaagccccgggaccccaagatccccaagagcaagaggcagaagaaggagaggatgctgctgtgccggcagctgggggacagcagcggggagggccctgagtttgtggaggaggaggaggaggtggccctgcggagtgacagcgagggcagtgactacacccctgggaagaagaagaagaagaagctgggccccaagaaggagaagaagagcaagagcaagaggaaggaggaggaggaggaggaggatgatgatgatgacagcaaggagcccaagagcagcgcccagctgctggaggactggggcatggaggacatcgaccacgtgttcagcgaggaggactaccgcaccctgaccaactacaaggccttcagccagtttgtgcggcccctgattgctgccaagaaccccaagattgctgtgtccaagatgatgatggtgctgggcgccaagtggagggagttcagcaccaacaaccccttcaagggcagcagcggggcctctgtggccgctgctgctgctgctgctgtggccgtggtggagagcatggtgacagccacagaggtggcccctcctcctcctcctgtggaggtgcccatcaggaaggccaagaccaaggagggcaagggccccaatgcccggaggaagcccaagggcagcccccgggtgcctgatgccaagaagcccaagcccaagaaggtggcccccctgaagatcaagctgggcggcttcggcagcaagaggaagaggagcagcagtgaagatgatgacctggatgtggagagtgactttgatgatgccagcatcaacagctacagcgtgtctgatggcagcaccagccgcagcagccgcagcaggaagaagctgcggaccaccaagaagaagaagaagtag

SEQ ID NO: 19084 - DNA, 1065 bp, synthetic construct; identical to SEQ ID NO: 19083
  misc_feature 1..1065: note = Description of Artificial Sequence: Synthetic coding sequence
  source 1..1065: mol_type = other DNA

SEQ ID NO: 19085 - DNA, 2562 bp, synthetic construct
  misc_feature 1..2562: note = Description of Artificial Sequence: Synthetic coding sequence
  source 1..2562: mol_type = other DNA
atgttcctgccccacatgaaccacctgaccctggagcagaccttcttcagccaggtgctgcccaagacagtgaagctgtttgatgacatgatgtatgagctgaccagccaggcccggggcctgagcagccagaacctggagatccagaccaccctgaggaacatcctgcagaccatggtgcagctgctgggcgccctgaccggctgtgtgcagcacatctgtgccacccaggagagcatcatcctggagaacatccagagcctgcccagctctgtgctgcacatcatcaagagcacctttgtgcactgcaagaacagcgagagcgtgtacagcggctgcctgcacctggtgtctgacctgctgcaggccctcttcaaggaggcctacagcctgcagaagcagctgatggagctgctggacatggtgtgcatggaccccctggtggatgacaatgatgacatcctgaacatggtgattgtcatccacagcctgctggacatctgcagcgtcatcagctccatggaccacgccttccacgccaacacctggaagttcatcatcaagcagagcctgaagcaccagagcatcatcaagagccagctgaagcacaaggacatcatcaccagcctgtgtgaggacatcctcttctccttccacagctgcctgcagctggccgagcagatgacccagagtgatgcccaggacaatgctgactaccgcctcttccagaagaccctgaagctgtgccgcttctttgccaacagcctgctgcactacgccaaggagttcctgcccttcctgagtgacagctgctgcaccctgcaccagctgtacctgcagatccacagcaagttcccccccagcctgtatgccacccgcatcagcaaggcccaccaggaggagattgctggggccttcctggtgaccctggaccccctcatcagccagctgctgaccttccagcccttcatgcaggtggtgctggacagcaagctggacctgccctgtgagctgcagttcccccagtgcctgctgctggtggtggtgatggacaagctgcccagccagcccaaggaggtgcagaccctgtggtgcacagacagccaggtgtctgagaccaccacccgcatcagcctgctgaaggctgtgttctacagctttgagcagtgcagcggggagctgagcctgcctgtgcacctgcagggcctgaagagcaagggcaaggccgaggtggccgtgaccctgtaccagcacgtgtgtgtgcacctgtgcaccttcatcaccagcttccaccccagcctgtttgctgagctggatgctgccctgctgaatgctgtgctgagcgccaacatgatcaccagcctgctggccatggatgcctggtgcttcctggcccgctatggaacagctgagctgtgtgcccaccacgtgaccatcgtggcccacctgatcaagagctgccctggagagtgctaccagctgatcaacctgagcatcctgctgaagaggctcttcttcttcatggccccaccccaccagctggagttcatccagaagttcagccccaaggaggccgagaacctgcccctgtggcagcacatctccttccaggccctgcccccagagctgcgggagcagacagtgcatgaggtgaccaccgtgggcacagctgagtgcaggaagtggctgagccgcagcaggaccctgggggagctggagagcctgaacacagtgctgagcgccctgctggccgtgtgcaacagcgctggggaggccctggacaccgggaagcagacagccatcatcgaggtggtgtcccagctgtgggccttcctgaacatcaagcaggtggccgaccagccctacgtgcagcagaccttcagcctgctgctgcccctgctgggcttcttcatccagaccctggaccccaagctgatcctgcaggccgtgaccctgcagaccagcctgctgaagctggagctgcctgactatgtgcggctggccatgctggactttgtgagcagcctgggcaagctgttcatccctgaggccatccaggaccgcatcctgcccaacctgagctgcatgtttgccctgctgctggccgaccgctcctggctgctggagcagcacaccctggaggccttcacccagtttgctgagggcaccaaccacgaggagatcgtgccccagtgcctgagcagcgaggagaccaagaacaaggtggtgtccttcctggagaagacaggctttgtggatgaaacagaagctgccaaggtggagcgggtgaagcaggagaagggcatcttctgggagccctttgccaacgtgacagtggaggaggccaagaggagcagcctgcagccctatgccaagagggcccggcaggagttcccctgggaggaggagtaccgcagcgccctgcacaccatcgccggggccctggaggccacagagagcctgctgcagaagggccctgccccagcctggctgtccatggagatggaggccctgcaggagaggatggacaagctgaagcgctacatccacaccctgggctag

SEQ ID NO: 19086 - DNA, 2562 bp, synthetic construct; identical to SEQ ID NO: 19085
  misc_feature 1..2562: note = Description of Artificial Sequence: Synthetic coding sequence
  source 1..2562: mol_type = other DNA

SEQ ID NO: 19087 - DNA, 993 bp, synthetic construct
  misc_feature 1..993: note = Description of Artificial Sequence: Synthetic coding sequence
  source 1..993: mol_type = other DNA
atgatgtatgagctgaccagccaggcccggggcctgagcagccagaacctggagatccagaccaccctgaggaacatcctgcagaccatggtgcagctgctgggcgccctgaccggctgtgtgcagcacatctgtgccacccaggagagcatcatcctggagaacatccagagcctgcccagctctgtgctgcacatcatcaagagcacctttgtgcactgcaagaacagcgagagcgtgtacagcggctgcctgcacctggtgtctgacctgctgcaggccctcttcaaggaggcctacagcctgcagaagcagctgatggagctgctggacatggtgtgcatggaccccctggtggatgacaatgatgacatcctgaacatggtgattgtcatccacagcctgctggacatctgcagcgtcatcagctccatggaccacgccttccacgccaacacctggaagttcatcatcaagcagagcctgaagcaccagagcatcatcaagagccagctgaagcacaaggacatcatcaccagcctgtgtgaggacatcctcttctccttccacagctgcctgcagctggccgagcagatgacccagagtgatgcccaggacaatgctgactaccgcctcttccagaagaccctgaagctgtgccgcttctttgccaacagcctgctgcactacgccaaggagttcctgcccttcctgagtgacagctgctgcaccctgcaccagctgtacctgcagatccacagcaagtttcctcccagcctgtatgccacccgcatcagcaaggcccaccaggaggagattgctggggccttcctggtgaccctggaccccctcatcagccagctgctgaccttccagcccttcatgcaggtggtgctggacagcaagctgggctacctgtacagcaagcccttcagcacagtgctgagctctgtgctggtgaacagcctgtacctgttcatctacagagactag

SEQ ID NO: 19088 - DNA, 1047 bp, synthetic construct
  misc_feature 1..1047: note = Description of Artificial Sequence: Synthetic coding sequence
  source 1..1047: mol_type = other DNA
atgagccaggagggcgctgtgcctgccagcgctgtgcccctggaggagctgagctcctggccagaggagctgtgccggcgggagctgcccagcgtgctgccccggctgctgagcctgagccagcacagcgacagctggattgagcacatccagatcctgaagatcatcgtggagatgttcctgccccacatgaaccacctgaccctggagcagaccttcttcagccaggtgctgcccaagacagtgaagctgtttgatgacatgatgtatgagctgaccagccaggcccggggcctgagcagccagaacctggagatccagaccaccctgaggaacatcctgcagaccatggtgcagctgctgggcgccctgaccggctgtgtgcagcacatctgtgccacccaggagagcatcatcctggagaacatccagagcctgcccagctctgtgctgcacatcatcaagagcacctttgtgcactgcaagaacagcgagagcgtgtacagcggctgcctgcacctggtgtctgacctgctgcaggccctcttcaaggaggcctacagcctgcagaagcagctgatggagctgctggacatggtgtgcatggaccccctggtggatgacaatgatgacatcctgaacatggtgattgtcatccacagcctgctggacatctgcagcgtcatcagctccatggaccacgccttccacgccaacacctggaagttcatcatcaagcagagcctgaagcaccagagcatcatcaagagccagctgaagcacaaggacatcatcaccagcctgtgtgaggacatcctcttctccttccacagctgcctgcagctggccgagcagatgacccagagtgatgcccaggacaatgctgactaccgcctcttccagaagaccctgaagctgtgccgcttctttgccaacagcctgctgcactacgccaaggagttcctgcccttcctgagtgacagctgctgcaccctgcaccagctgtacctgcagatccaccgctggagctttgccctggccgtgtag

SEQ ID NO: 19089 - DNA, 2100 bp, synthetic construct
  misc_feature 1..2100: note = Description of Artificial Sequence: Synthetic coding sequence
  source 1..2100: mol_type = other DNA
atgctgaagctgtctggagagggcctgcgggacagctaccacagccggcgggaccagatcgccctgaagaacctgcagagtgatgtgacagaggccaagagtgacttcaccaaggagaccctggccagccagaacaccaagatgatcagcagcatcgtcatcagccagatgattgatgagaacaagagcagagaaaatagagccagcctgcccctgccctgtgccatcgcccagagccgggcccaccacgccaagcagagcctggccaacagaagtggagtgaacatccaccgggcctttgccctgctgcccggccgcctgggcatcccagcccccagtgatgagcggggccctgaggccgagctgccccccaaggaggagcggccctgtggcggcccccggcggggctttgccagcatcaccatcacagccaggagagtgggccccccagcccgggccctggtgtggggcacagctggggacagcctgtgccccaagtgcagagctgaggacaccctcttccaggcccccccagccctggccaacggggcccaccctggccgccaccagaggagctttgcctgcacagagttcagcaggaacagctctgtggtgcggctgaaggtgcctgaggcccacacaggcctgtgtgaaagaaggaagtactgggtgacccatgctgatgacaaggagaccagcttctccccagacacccccctgagcggcaagagccccctggtgttcagcagctgtgtgcacctgcgggtgtcccagcagtgcccagacagcatctactacgtggacaagagcctgtctgtgcccatcgagcccccccagatcgccagccccaagatgcacaggtctgtgctgagcctgaacctgaactgcagcagccaccggctgacagcagatggagtggatggcctggtgaaccgggagcccatcagcgaggccctgaagcaggagctgctggagggggaccaggacctggtgggccagcgctggaaccctggcctgcaggagagccacctgaaggagacccccagcctgcggcgggtgcacctgggcactggagcctgcccctggagcggcagcttccccctggagaacacagagctggccaacgtgggcgccaaccaggtgacagtgaggaaaggagagaaggaccacaccacccactgccacgccagtgaccacgccaaccagctgagcatccacatccctggctggagctacagagctgtgcacaccaaggtgttttctggcagcagcaagaggcagcagggcgaggtgtgcatgacagtgtctgcccctcctgtggagcagaagcccaccaggcacttcctgcccatcggggacagcagccccagtgatgactgcctgagccgggacctgtctgagcccacagaaagaagacaccagagcttcctgaagccccgcatcctcttccctggcttcctgtgccccctgcaggatgtgtgtgccagcctgcaggaggacaatggagtgcagatcgagagcaagttccccaagggggactacacctgctgtgacctggtggtgaagatcaaggagtgcaagaagtctgaggaccccaccaccccagagcccagccctgctgcccccagccctgcccccagagatggagctggcagccctggcctgtctgaggactgcagcgagagccagcagaccccagcccggagcctgaccctgcaggaggccctggaggtgaggaagccccagttcatcagccgcagccaggagcggctgaagaagctggagcacatggtgcagcagaggaaggcccagaggaaagaagacctgcggcagaagcagagcctgctgcccatccgcaccagcaagaagcagttcaccatcccccaccccctgagtgacaacctcttcaagcccaaggagcgctgcatcagcgagaaggagatgcacatgaggagcaagaggatctatgacaacctgcctgaggtgaagaagaagaaggaggagcagaggaagagggtcatcctgcagagcaaccggctgcgggcagaggtgttcaagaagcagctgctggaccagctgctgcagagaaatgctgtgtag

SEQ ID NO: 19090 - DNA, 1959 bp, synthetic construct
  misc_feature 1..1959: note = Description of Artificial Sequence: Synthetic coding sequence
  source 1..1959: mol_type = other DNA
atgatcagcagcatcgtcatcagccagatgattgatgagaacaagagccgggagaacagagccagcctgcccctgccctgtgccatcgcccagagccgggcccaccacgccaagcagagcctggccaacagaagtggagtgaacatccaccgggcctttgccctgctgcccggccgcctgggcatcccagcccccagtgatgagcggggccctgaggccgagctgccccccaaggaggagcggccctgtggcggcccccggcggggctttgccagcatcaccatcacagcccggcgggtgggccccccagcccgggccctggtgtggggcacagctggggacagcctgtgccccaagtgcagagctgaggacaccctcttccaggcccccccagccctggccaatggagcccaccctggccgccaccagaggagctttgcctgcacagagttcagcaggaacagctctgtggtgcggctgaaggtgcctgaggcccacacaggcctgtgtgagaggaggaagtactgggtgacccatgctgatgacaaggagaccagcttctccccagacacccccctgagcggcaagagccccctggtgttcagcagctgtgtgcacctgcgggtgtcccagcagtgcccagacagcatctactacgtggacaagagcctgtctgtgcccatcgagcccccccagatcgccagccccaagatgcacaggtctgtgctgagcctgaacctgaactgcagcagccaccggctgacagcagatggagtggatggcctggtgaaccgggagcccatcagcgaggccctgaagcaggagctgctggagggggaccaggacctggtgggccagcgctggaaccctggcctgcaggagagccacctgaaggagacccccagcctgcggcgggtgcacctgggcaccggggcctgcccctggagcggcagcttccccctggagaacacagagctggccaacgtgggcgccaaccaggtgacagtgaggaagggggagaaggaccacaccacccactgccacgccagtgaccacgccaaccagctgagcatccacatccctggctggagctacagagctgtgcacaccaaggtgttcagcggcagcagcaagaggcagcagggcgaggtgtgcatgacagtgtctgcccctcctgtggagcagaagcccaccaggcacttcctgcccatcggggacagcagccccagtgatgactgcctgagccgggacctgtctgagcccacagagcggcggcaccagagcttcctgaagccccgcatcctcttccctggcttcctgtgccccctgcaggatgtgtgtgccagcctgcaggaggacaacggggtgcagatcgagagcaagttccccaagggggactacacctgctgtgacctggtggtgaagatcaaggagtgcaagaagtctgaggaccccaccaccccagagcccagccctgctgcccccagccctgcccccagagatggagctggcagccctggcctgtctgaggactgcagcgagagccagcagaccccagcccggagcctgaccctgcaggaggccctggaggtgaggaagccccagttcatcagccgcagccaggagcggctgaagaagctggagcacatggtgcagcagaggaaggcccagaggaaggaggacctgcggcagaagcagagcctgctgcccatccgcaccagcaagaagcagttcaccatcccccaccccctgagtgacaacctcttcaagcccaaggagcgctgcatcagcgagaaggagatgcacatgaggagcaagaggatctatgacaacctgcctgaggtgaagaagaagaaggaggagcagaggaagagggtcatcctgcagagcaaccggctgcgggcagaggtgttcaagaagcagctgctggaccagctgctgcagagaaatgctgtgtag

SEQ ID NO: 19091 - DNA, 1152 bp, synthetic construct
  misc_feature 1..1152: note = Description of Artificial Sequence: Synthetic coding sequence
  source 1..1152: mol_type = other DNA
atgatcagcagcatcgtcatcagccagatgattgatgagaacaagagccgggagaacagagccagcctgcccctgccctgtgccatcgcccagagccgggcccaccacgccaagcagagcctggccaacagaagtggagtgaacatccaccgggcctttgccctgctgcccggccgcctgggcatcccagcccccagtgatgagcggggccctgaggccgagctgccccccaaggaggagcggccctgtggcggcccccggcggggctttgccagcatcaccatcacagcccggcgggtgggccccccagcccgggccctggtgtggggcacagctggggacagcctgtgccccaagtgcagagctgaggacaccctcttccaggcccccccagccctggccaatggagcccaccctggccgccaccagaggagctttgcctgcacagagttcagcaggaacagctctgtggtgcggctgaaggtgcctgaggcccacacaggcctgtgtgagaggaggaagtactgggtgacccatgctgatgacaaggagaccagcttctccccagacacccccctgagcggcaagagccccctggtgttcagcagctgtgtgcacctgcgggtgtcccagcagtgcccagacagcatctactacgtggacaagagcctgtctgtgcccatcgagcccccccagatcgccagccccaagatgcacaggtctgtgctgagcctgaacctgaactgcagcagccaccggctgacagcagatggagtggatggcctggtgaaccgggagcccatcagcgaggccctgaagcaggagctgctggagggggaccaggacctggtgggccagcgctggaaccctggcctgcaggagagccacctgaaggagacccccagcctgcggcgggtgcacctgggcaccggggcctgcccctggagcggcagcttccccctggagaacacagagctggccaacgtgggcgccaaccaggtgacagtgaggaagggggagaaggaccacaccacccactgccacgccagtgaccacgccaaccagctgagcatccacatccctggctggagctacagagctgacctgctgcaggagggccagcacaagcagctgtccatgttccagaggtag

SEQ ID NO: 19092 - DNA, 1152 bp, synthetic construct; identical to SEQ ID NO: 19091
  misc_feature 1..1152: note = Description of Artificial Sequence: Synthetic coding sequence
  source 1..1152: mol_type = other DNA

SEQ ID NO: 19093 - DNA, 729 bp, synthetic construct
  misc_feature 1..729: note = Description of Artificial Sequence: Synthetic coding sequence
  source 1..729: mol_type = other DNA
tgatggagcggcagcttccccctggagaacacagagctggccaacgtgggcgccaaccaggtgacagtgaggaaaggagagaaggaccacaccacccactgccacgccagtgaccacgccaaccagctgagcatccacatccctggctggagctaccgggccggggactacacctgctgtgacctggtggtgaagatcaaggagtgcaagaagtctgaggaccccaccaccccagagcccagccctgctgcccccagccctgcccccagagatggagctggcagccctggcctgtctgaggactgcagcgagagccagcagaccccagcccggagcctgaccctgcaggaggccctggaggtgaggaagccccagttcatcagccgcagccaggagcggctgaagaagctggagcacatggtgcagcagaggaaggcccagaggaaggaggacctgcggcagaagcagagcctgctgcccatccgcaccagcaagaagcagttcaccatcccccaccccctgagtgacaacctcttcaagcccaaggagcgctgcatcagcgagaaggagatgcacatgaggagcaagaggatctatgacaacctgcctgaggtgaagaagaagaaggaggagcagaggaagagggtcatcctgcagagcaaccggctgcgggcagaggtgttcaagaagcagctgctggaccagctgctgcagagaaatgctgtgtag

SEQ ID NO: 19094 - DNA, 1989 bp, synthetic construct
  misc_feature 1..1989: note = Description of Artificial Sequence: Synthetic coding sequence
  source 1..1989: mol_type = other DNA
atgctgaagctgtctggagagggcctgcgggacagctaccacagccggcgggaccagatcgccctgaagaacctgcagagtgatgtgacagaggccaagagtgacttcaccaaggagaccctggccagccagaacaccaagatgatcagcagcatcgtcatcagccagatgattgatgagaacaagagcagagaaaatagagccagcctgcccctgccctgtgccatcgcccagagccgggcccaccacgccaagcagagcctggccaacagaagtggagtgaacatccaccgggcctttgccctgctgcccggccgcctgggcatcccagcccccagtgatgagcggggccctgaggccgagctgccccccaaggaggagcggccctgtggcggcccccggcggggctttgccagcatcaccatcacagccaggagagtgggccccccagcccgggccctggtgtggggcacagctggggacagcctgtgccccaagtgcagagctgaggacaccctcttccaggcccccccagccctggccaacggggcccaccctggccgccaccagaggagctttgcctgcacagagttcagcaggaacagctctgtggtgcggctgaaggtgcctgaggcccacacaggcctgtgtgaaagaaggaagtactgggtgacccatgctgatgacaaggagaccagcttctccccagacacccccctgagcggcaagagccccctggtgttcagcagctgtgtgcacctgcgggtgtcccagcagtgcccagacagcatctactacgtggacaagagcctgtctgtgcccatcgagcccccccagatcgccagccccaagatgcacaggtctgtgctgagcctgaacctgaactgcagcagccaccggctgacagcagatggagtggatggcctggtgaaccgggagcccatcagcgaggccctgaagcaggagctgctggagggggaccaggacctggtgggccagcgctggaaccctggcctgcaggagagccacctgaaggagacccccagcctgcggcgggtgcacctgggcactggagcctgcccctggagcggcagcttccccctggagaacacagagctggccaacgtgggcgccaaccaggtgacagtgaggaaaggagagaaggaccacaccacccactgccacgccagtgaccacgccaaccagctgagcatccacatccctggctggagctacagagctgtgcacaccaaggtgttttctggcagcagcaagaggcagcagggcgaggtgtgcatgacagtgtctgcccctcctgtggagcagaagcccaccaggcacttcctgcccatcggggacagcagccccagtgatgactgcctgagccgggacctgtctgagcccacagaaagaagacaccagagcttcctgaagccccgcatcctcttccctggcttcctgtgccccctgcaggatgtgtgtgccagcctgcaggaggacaatggagtgcagatcgagagcaagttccccaagggggactacacctgctgtgacctggtggtgaagatcaaggagtgcaagaagtctgaggaccccaccaccccagagcccagccctgctgcccccagccctgcccccagagatggagctggcagccctggcctgtctgaggactgcagcgagagccagcagaccccagcccggagcctgaccctgcaggaggccctggaggtgaggaagccccagttcatcagccgcagccaggagcggctgaagaagctggagcacatggtgcagcagaggaaggcccagaggaaagaagacctgcggcagaagcagagcctgctgcccatccgcaccagcaagaagcagttcaccatcccccaccccctgagtgacaacctcttcaagcccaaggagcgctgcatcagcgagaaggagatgcacatgaggagcaagaggatctatgacaacctgcctgaggtgtag

SEQ ID NO: 19095 - DNA, 1809 bp, synthetic construct
  misc_feature 1..1809: note = Description of Artificial Sequence: Synthetic coding sequence
  source 1..1809: mol_type = other DNA
atgctgaagctgtctggagagggcctgcgggacagctaccacagccggcgggaccagatcgccctgaagaacctgcagagtgatgtgacagaggccaagagtgacttcaccaaggagaccctggccagccagaacaccaagatgatcagcagcatcgtcatcagccagatgattgatgagaacaagagcagagaaaatagagccagcctgcccctgccctgtgccatcgcccagagccgggcccaccacgccaagcagagcctggccaacagaagtggagtgaacatccaccgggcctttgccctgctgcccggccgcctgggcatcccagcccccagtgatgagcggggccctgaggccgagctgccccccaaggaggagcggccctgtggcggcccccggcggggctttgccagcatcaccatcacagccaggagagtgggccccccagcccgggccctggtgtggggcacagctggggacagcctgtgccccaagtgcagagctgaggacaccctcttccaggcccccccagccctggccaacggggcccaccctggccgccaccagaggagctttgcctgcacagagttcagcaggaacagctctgtggtgcggctgaaggtgcctgaggcccacacaggcctgtgtgaaagaaggaagtactgggtgacccatgctgatgacaaggagaccagcttctccccagacacccccctgagcggcaagagccccctggtgttcagcagctgtgtgcacctgcgggtgtcccagcagtgcccagacagcatctactacgtggacaagagcctgtctgtgcccatcgagcccccccagatcgccagccccaagatgcacaggtctgtgctgagcctgaacctgaactgcagcagccaccggctgacagcagatggagtggatggcctggtgaaccgggagcccatcagcgaggccctgaagcaggagctgctggagggggaccaggacctggtgggccagcgctggaaccctggcctgcaggagagccacctgaaggagacccccagcctgcggcgggtgcacctgggcactggagcctgcccctggagcggcagcttccccctggagaacacagagctggccaacgtgggcgccaaccaggtgacagtgaggaaaggagagaaggaccacaccacccactgccacgccagtgaccacgccaaccagctgagcatccacatccctggctggagctaccgggccggggactacacctgctgtgacctggtggtgaagatcaaggagtgcaagaagtctgaggaccccaccaccccagagcccagccctgctgcccccagccctgcccccagagatggagctggcagccctggcctgtctgaggactgcagcgagagccagcagaccccagcccggagcctgaccctgcaggaggccctggaggtgaggaagccccagttcatcagccgcagccaggagcggctgaagaagctggagcacatggtgcagcagaggaaggcccagaggaaggaggacctgcggcagaagcagagcctgctgcccatccgcaccagcaagaagcagttcaccatcccccaccccctgagtgacaacctcttcaagcccaaggagcgctgcatcagcgagaaggagatgcacatgaggagcaagaggatctatgacaacctgcctgaggtgaagaagaagaaggaggagcagaggaagagggtcatcctgcagagcaaccggctgcgggcagaggtgttcaagaagcagctgctggaccagctgctgcagagaaatgctgtgtag

SEQ ID NO: 19096 - DNA, 2391 bp, synthetic construct
  misc_feature 1..2391: note = Description of Artificial Sequence: Synthetic coding sequence
  source 1..2391: mol_type = other DNA
atgcagcacagcggcatccccaccaagacccacccccagggctacgccgcccgctacacagaaacagctgtgcacaggaccttccagatcaagaccttcagcacagagctgaagaaccacgtgatggtgatggactttgtgaagagcaactggttccccagccagaggcgggccaaggtgtgcatcatccacatgtgccagggcctgaagacagctgagcagacagccagccgctatgagatccacagccgcctcttcagcagccccaaggaccacagcgcctgggagagaaatgaaagcctgagcaatgccggcctgcgggacagctaccacagcagaagagaccagatcgccctgaagaacctgcagagtgatgtgacagaggccaagagtgacttcaccaaggagaccctggccagccagaacaccaagatgatcagcagcatcgtcatcagccagatgattgatgagaacaagagccgggagaacagagccagcctgcccctgccctgtgccatcgcccagagccgggcccaccacgccaagcagagcctggccaacagaagtggagtgaacatccaccgggcctttgccctgctgcccggccgcctgggcatcccagcccccagtgatgagcggggccctgaggccgagctgccccccaaggaggagcggccctgtggcggcccccggcggggctttgccagcatcaccatcacagcccggcgggtgggccccccagcccgggccctggtgtggggcacagctggggacagcctgtgccccaagtgcagagctgaggacaccctcttccaggcccccccagccctggccaatggagcccaccctggccgccaccagaggagctttgcctgcacagagttcagcaggaacagctctgtggtgcggctgaaggtgcctgaggcccacacaggcctgtgtgagaggaggaagtactgggtgacccatgctgatgacaaggagaccagcttctccccagacacccccctgagcggcaagagccccctggtgttcagcagctgtgtgcacctgcgggtgtcccagcagtgcccagacagcatctactacgtggacaagagcctgtctgtgcccatcgagcccccccagatcgccagccccaagatgcacaggtctgtgctgagcctgaacctgaactgcagcagccaccggctgacagcagatggagtggatggcctggtgaaccgggagcccatcagcgaggccctgaagcaggagctgctggagggggaccaggacctggtgggccagcgctggaaccctggcctgcaggagagccacctgaaggagacccccagcctgcggcgggtgcacctgggcaccggggcctgcccctggagcggcagcttccccctggagaacacagagctggccaacgtgggcgccaaccaggtgacagtgaggaagggggagaaggaccacaccacccactgccacgccagtgaccacgccaaccagctgagcatccacatccctggctggagctacagagctgtgcacaccaaggtgttcagcggcagcagcaagaggcagcagggcgaggtgtgcatgacagtgtctgcccctcctgtggagcagaagcccaccaggcacttcctgcccatcggggacagcagccccagtgatgactgcctgagccgggacctgtctgagcccacagagcggcggcaccagagcttcctgaagccccgcatcctcttccctggcttcctgtgccccctgcaggatgtgtgtgccagcctgcaggaggacaacggggtgcagatcgagagcaagttccccaagggggactacacctgctgtgacctggtggtgaagatcaaggagtgcaagaagtctgaggaccccaccaccccagagcccagccctgctgcccccagccctgcccccagagatggagctggcagccctggcctgtctgaggactgcagcgagagccagcagaccccagcccggagcctgaccctgcaggaggccctggaggtgaggaagccccagttcatcagccgcagccaggagcggctgaagaagctggagcacatggtgcagcagaggaaggcccagaggaaggaggacctgcggcagaagcagagcctgctgcccatccgcaccagcaagaagcagttcaccatcccccaccccctgagtgacaacctcttcaagcccaaggagcgctgcatcagcgagaaggagatgcacatgaggagcaagaggatctatgacaacctgcctgaggtgaagaagaagaaggaggagcagaggaagagggtcatcctgcagagcaaccggctgcgggcagaggtgttcaagaagcagctgctggaccagctgctgcagagaaatgctgtgtag

SEQ ID NO: 19097 - DNA, 786 bp, synthetic construct
  misc_feature 1..786: note = Description of Artificial Sequence: Synthetic coding sequence
  source 1..786: mol_type = other DNA
atgagcaccaccacctgccaggtggtggccttcctgctgagcatcctgggcctggccggctgcatcgccgccaccggcatggacatgtggagcacccaggacctgtatgacaaccctgtgaccagcgtcttccagtatgagggcctgtggaggagctgtgtgcggcagagcagcggcttcacagagtgccggccctacttcaccatcctgggcctgcctgccatgctgcaggccgtgcgggccctgatgattgtgggcatcgtgctgggcgccatcggcctgctggtgtccatctttgccctgaagtgcatccgcatcggctccatggaggacagcgccaaggccaacatgaccctgaccagcggcatcatgttcatcgtgtctggcctgtgtgccatcgccggcgtgtctgtgtttgccaacatgctggtgaccaacttctggatgagcacagccaacatgtacacaggcatgggcggcatggtgcagacagtgcagacccgctacacctttggagctgccctgtttgtgggctgggtggccggcggcctgaccctgattggaggagtgatgatgtgcatcgcctgccggggcctggcccctgaggagaccaactacaaggctgtgtcctaccacgccagcggccacagcgtggcctacaagccaggcggcttcaaggccagcactggatttggcagcaacaccaagaacaagaagatctatgatggaggagccaggacagaagatgaggtgcagagctaccccagcaagcatgactatgtgtag

SEQ ID NO: 19098 - DNA, 786 bp, synthetic construct
  misc_feature 1..786: note = Description of Artificial Sequence: Synthetic coding sequence
  source 1..786: mol_type = other DNA
atggctgtgacagcctgccagggcctgggctttgtggtgtccctcatcggcattgctggcatcatcgccgccacctgcatggaccagtggagcacccaggacctgtacaacaaccctgtgacagctgtgttcaactaccagggcctgtggaggagctgtgtgcgggagagcagcggcttcacagagtgccggggctacttcaccctgctgggcctgcctgccatgctgcaggccgtgcgggccctgatgattgtgggcatcgtgctgggcgccatcggcctgctggtgtccatctttgccctgaagtgcatccgcatcggctccatggaggacagcgccaaggccaacatgaccctgaccagcggcatcatgttcatcgtgtctggcctgtgtgccatcgccggcgtgtctgtgtttgccaacatgctggtgaccaacttctggatgagcacagccaacatgtacacaggcatgggcggcatggtgcagacagtgcagacccgctacacctttggagctgccctgtttgtgggctgggtggccggcggcctgaccctgattggaggagtgatgatgtgcatcgcctgccggggcctggcccctgaggagaccaactacaaggctgtgtcctaccacgccagcggccacagcgtggcctacaagccaggcggcttcaaggccagcactggatttggcagcaacaccaagaacaagaagatctatgatggaggagccaggacagaagatgaggtgcagagctaccccagcaagcatgactatgtgtag

SEQ ID NO: 19099 - DNA, 753 bp, synthetic construct
  misc_feature 1..753: note = Description of Artificial Sequence: Synthetic coding sequence
  source 1..753: mol_type = other DNA
atgagcaccaccacctgccaggtggtggccttcctgctgagcatcctgggcctggccggctgcatcgccgccaccggcatggacatgtggagcacccaggacctgtatgacaaccctgtgaccagcgtcttccagtatgagggcctgtggaggagctgtgtgcggcagagcagcggcttcacagagtgccggccctacttcaccatcctgggcctgcctgccatgctgcaggccgtgcgggccctgatgattgtggccatctttgccctgaagtgcatcagaattggctccatggaggacagcgccaaggccaacatgaccctgaccagcggcatcatgtttattgtgtctggcctgtgtgccatcgccggcgtgtctgtgtttgccaacatgctggtgaccaacttctggatgagcacagccaacatgtacacaggcatgggcggcatggtgcagacagtgcagacccgctacaccttcggggccgccctgtttgtgggctgggtggccggcggcctgaccctcatcggcggcgtgatgatgtgcatcgcctgccggggcctggcccctgaggagaccaactacaaggctgtgtcctaccacgccagcggccacagcgtggcctacaagccaggcggcttcaaggccagcacaggcttcggcagcaacaccaagaacaagaagatctatgatggaggagccaggacagaagatgaggtgcagagctaccccagcaagcatgactatgtgtag

SEQ ID NO: 19100 - DNA, 3000 bp, synthetic construct
  misc_feature 1..3000: note = Description of Artificial Sequence: Synthetic coding sequence
  source 1..3000: mol_type = other DNA
atgggccctgcccccctgcccctgctgctgggcctcttcctgcctgccctgtggaggcgggccatcacagaggcccgggaggaggccaagccctaccccctcttccctggccccttccctggcagcctgcagacagaccacacccccctgctgagcctgccccacgccagcggctaccagcctgccctgatgttcagccccacccagcccggccggccccacactggaaatgtggccatcccccaggtgacctctgtggagagcaagcccctgccccccctggccttcaagcacacagtgggccacatcatcctgtctgagcacaagggcgtgaagttcaactgcagcatctctgtgcccaacatctaccaggacaccaccatctcctggtggaaggatggcaaggagctgctgggcgcccaccacgccatcacccagttctacccagatgatgaggtgacagccatcatcgccagcttcagcatcacctctgtgcagaggagtgacaatggcagctacatctgcaagatgaagatcaacaatgaggagatcgtgtctgaccccatctacatcgaggtgcagggcctgccccacttcaccaagcagcctgagagcatgaatgtgaccaggaacacagccttcaacctgacctgccaggccgtgggccccccagagcctgtgaacatcttctgggtgcagaacagcagccgggtgaatgagcagcctgagaagagccccagcgtgctgactgtgcccggcctgacagagatggctgtgttcagctgtgaggcccacaatgacaagggcctgactgtgtccaagggcgtgcagatcaacatcaaggccatccccagccccccaacagaggtgtccatccggaacagcacagcccacagcatcctgatctcctgggtgcccggctttgatggctacagccccttcaggaactgcagcatccaggtgaaggaggccgaccccctgagcaatggatctgtgatgatcttcaacaccagcgccctgccccacctgtaccagatcaagcagctgcaggccctggccaactacagcattggagtgtcctgcatgaatgaaattggctggagcgctgtgagcccctggatcctggccagcaccacagaaggagcccccagcgtggcccccctgaatgtgacagtgttcctgaatgaaagcagtgacaacgtggacatccgctggatgaagccacccaccaagcagcaggatggagagctggtgggctaccgcatcagccacgtgtggcagagcgctggcatcagcaaggagctgctggaggaggtgggccagaatggcagccgggcccgcatctctgtgcaggtgcacaatgccacctgcaccgtgagaattgctgctgtgacccggggcggcgtgggccccttcagtgaccctgtgaagatcttcatcccagcccacggctgggtggactatgcccccagcagcaccccagcccctggaaatgctgaccctgtgctgatcatcttcggctgcttctgtggcttcatcctgattggcctcatcctgtacatcagcctggccatcaggaagagggtgcaggagaccaagtttggaaatgccttcacagaagaagattctgagctggtggtgaactacatcgccaagaagagcttctgcagaagagccatcgagctgaccctgcacagcctgggcgtgtctgaggagctgcagaacaagctggaggatgtggtgattgacaggaacctgctgatcctgggcaagatcctgggggagggggagtttggatctgtgatggagggcaacctgaagcaggaggatggcaccagcctgaaggtggccgtgaagaccatgaagctggacaacagcagccagcgggagattgaggagttcctgtctgaggccgcctgcatgaaggacttcagccaccccaacgtcatccggctgctgggcgtgtgcatcgagatgagcagccagggcatccccaagcccatggtgatcctgcccttcatgaagtacggggacctgcacacctacctgctgtacagccggctggagaccggccccaagcacatccccctgcagaccctgctgaagttcatggtggacatcgccctgggcatggagtacctgagcaacagaaacttcctgcaccgggacctggccgccaggaactgcatgctgagagatgacatgacagtgtgtgtggccgactttggcctgagcaagaagatctacagcggggactactaccggcagggcagaattgccaagatgcctgtgaagtggatcgccatcgagagcctggccgacagagtgtacaccagcaagagtgatgtgtgggccttcggcgtgaccatgtgggagatcgccacccggggcatgaccccctacccaggagtgcagaaccacgagatgtatgactacctgctgcacggccaccggctgaagcagcctgaggactgcctggatgagctgtatgagatcatgtacagctgctggaggacagaccccctggaccggcccaccttctctgtgctgcggctgcagctggagaagctgctggagagcctgcctgatgtgaggaaccaggctgatgtgatctacgtgaacacccagctgctggagagcagcgagggcctggcccagggcagcaccctggcccccctggacctgaacattgatcctgacagcatcatcgccagctgcaccccccgggccgccatctctgtggtgacagctgaggtgcatgacagcaagccccatgagggccgctacatcctgaatggaggcagcgaggagtgggaggacctgaccagcgcccccagcgctgctgtgacagctgagaagaacagcgtgctgcccggggagcggctggtgagaaatggagtgtcctggagccacagctccatgctgcccctgggcagcagcctgcctgatgagctgctgtttgctgatgacagcagcgagggcagcgaggtgctgatgtag

SEQ ID NO: 19101 - DNA, 1671 bp, synthetic construct
  misc_feature 1..1671: note = Description of Artificial Sequence: Synthetic coding sequence
  source 1..1671: mol_type = other DNA
atgaagccacccaccaagcagcaggatggagagctggtgggctaccgcatcagccacgtgtggcagagcgctggcatcagcaaggagctgctggaggaggtgggccagaatggcagccgggcccgcatctctgtgcaggtgcacaatgccacctgcaccgtgagaattgctgctgtgacccggggcggcgtgggccccttcagtgaccctgtgaagatcttcatcccagcccacggggagagctacacccacgcccagatcgccaggaacctgcacaaggtgcggcctgcctacatcagcctgaccatctgcagcagcctgctgcaggcctctgtgagccacatcttccagaccatgacaggcctgctggtgtccacccggctgggccgcctgtgccccctcttcaacagcggggcctggcagaggaggagctgtgcccaccacctgtggctgctgctgtggatcctgattggcctcatcctgtacatcagcctggccatcaggaagagggtgcaggagaccaagtttggaaatgccttcacagaagaagattctgagctggtggtgaactacatcgccaagaagagcttctgcagaagagccatcgagctgaccctgcacagcctgggcgtgtctgaggagctgcagaacaagctggaggatgtggtgattgacaggaacctgctgatcctgggcaagatcctgggggagggggagtttggatctgtgatggagggcaacctgaagcaggaggatggcaccagcctgaaggtggccgtgaagaccatgaagctggacaacagcagccagcgggagattgaggagttcctgtctgaggccgcctgcatgaaggacttcagccaccccaacgtcatccggctgctgggcaccagcgagaagtgccgctgggtggccaagagggccctgctgatctgcagcgtgcccaaggagaagatcagcggcgtggacaagaactgcctgcagatccacatccccctgcagaccctgctgaagttcatggtggacatcgccctgggcatggagtacctgagcaacagaaacttcctgcaccgggacctggccgccaggaactgcatgctgagagatgacatgacagtgtgtgtggccgactttggcctgagcaagaagatctacagcggggactactaccggcagggcagaattgccaagatgcctgtgaagtggatcgccatcgagagcctggccgacagagtgtacaccagcaagagtgatgtgtgggccttcggcgtgaccatgtgggagatcgccacccggggcatgaccccctacccaggagtgcagaaccacgagatgtatgactacctgctgcacggccaccggctgaagcagcccacagcctggatgaactgtgaccaggtgggcatgtgccggggcgtggagcccacagacaccccagcccaggagcccttcctgatgtgggagatcgtgtatgagtgcaccctggccggggagcccatcccagaccggcccaccttctctgtgctgcggctgcagctggagaagctgctggagagcctgcctgatgtgaggaaccaggctgatgtgatctacgtgaacacccagctgctggagagcagcgagggcctggccctgcacccctgcagcacaggcctggagcaccggccctag

SEQ ID NO: 19102 - DNA, 2472 bp, synthetic construct
  misc_feature 1..2472: note = Description of Artificial Sequence: Synthetic coding sequence
  source 1..2472: mol_type = other DNA
atgaagatcaacaatgaggagatcgtgtctgaccccatctacatcgaggtgcagggcctgccccacttcaccaagcagcctgagagcatgaatgtgaccaggaacacagccttcaacctgacctgccaggccgtgggccccccagagcctgtgaacatcttctgggtgcagaacagcagccgggtgaatgagcagcctgagaagagccccagcgtgctgactgtgcccggcctgacagagatggctgtgttcagctgtgaggcccacaatgacaagggcctgactgtgtccaagggcgtgcagatcaacatcaaggccatccccagccccccaacagaggtgtccatccggaacagcacagcccacagcatcctgatctcctgggtgcccggctttgatggctacagccccttcaggaactgcagcatccaggtgaaggaggccgaccccctgagcaatggatctgtgatgatcttcaacaccagcgccctgccccacctgtaccagatcaagcagctgcaggccctggccaactacagcattggagtgtcctgcatgaatgaaattggctggagcgctgtgagcccctggatcctggccagcaccacagaaggagcccccagcgtggcccccctgaatgtgacagtgttcctgaatgaaagcagtgacaacgtggacatccgctggatgaagccacccaccaagcagcaggatggagagctggtgggctaccgcatcagccacgtgtggcagagcgctggcatcagcaaggagctgctggaggaggtgggccagaatggcagccgggcccgcatctctgtgcaggtgcacaatgccacctgcaccgtgagaattgctgctgtgacccggggcggcgtgggccccttcagtgaccctgtgaagatcttcatcccagcccacggctgggtggactatgcccccagcagcaccccagcccctggaaatgctgaccctgtgctgatcatcttcggctgcttctgtggcttcatcctgattggcctcatcctgtacatcagcctggccatcaggaagagggtgcaggagaccaagtttggaaatgccttcacagaagaagattctgagctggtggtgaactacatcgccaagaagagcttctgcagaagagccatcgagctgaccctgcacagcctgggcgtgtctgaggagctgcagaacaagctggaggatgtggtgattgacaggaacctgctgatcctgggcaagatcctgggggagggggagtttggatctgtgatggagggcaacctgaagcaggaggatggcaccagcctgaaggtggccgtgaagaccatgaagctggacaacagcagccagcgggagattgaggagttcctgtctgaggccgcctgcatgaaggacttcagccaccccaacgtcatccggctgctgggcgtgtgcatcgagatgagcagccagggcatccccaagcccatggtgatcctgcccttcatgaagtacggggacctgcacacctacctgctgtacagccggctggagaccggccccaagcacatccccctgcagaccctgctgaagttcatggtggacatcgccctgggcatggagtacctgagcaacagaaacttcctgcaccgggacctggccgccaggaactgcatgctgagagatgacatgacagtgtgtgtggccgactttggcctgagcaagaagatctacagcggggactactaccggcagggcagaattgccaagatgcctgtgaagtggatcgccatcgagagcctggccgacagagtgtacaccagcaagagtgatgtgtgggccttcggcgtgaccatgtgggagatcgccacccggggcatgaccccctacccaggagtgcagaaccacgagatgtatgactacctgctgcacggccaccggctgaagcagcctgaggactgcctggatgagctgtatgagatcatgtacagctgctggaggacagaccccctggaccggcccaccttctctgtgctgcggctgcagctggagaagctgctggagagcctgcctgatgtgaggaaccaggctgatgtgatctacgtgaacacccagctgctggagagcagcgagggcctggcccagggcagcaccctggcccccctggacctgaacattgatcctgacagcatcatcgccagctgcaccccccgggccgccatctctgtggtgacagctgaggtgcatgacagcaagccccatgagggccgctacatcctgaatggaggcagcgaggagtgggaggacctgaccagcgcccccagcgctgctgtgacagctgagaagaacagcgtgctgcccggggagcggctggtgagaaatggagtgtcctggagccacagctccatgctgcccctgggcagcagcctgcctgatgagctgctgtttgctgatgacagcagcgagggcagcgaggtgctgatgtag

SEQ ID NO: 19103 - DNA, 3000 bp, synthetic construct; identical to SEQ ID NO: 19100
  misc_feature 1..3000: note = Description of Artificial Sequence: Synthetic coding sequence
  source 1..3000: mol_type = other DNA

SEQ ID NO: 19104 - DNA, 501 bp, synthetic construct
  misc_feature 1..501: note = Description of Artificial Sequence: Synthetic coding sequence
  source 1..501: mol_type = other DNA
atggccagcggcgtggccgtgtctgatggagtcatcaaggtgttcaatgacatgaaggtgaggaagagcagcaccccagaggaggtgaagaagaggaagaaggctgtgctcttctgcctgtctgaggacaagaagaacatcatcctggaggagggcaaggagatcctggtgggagatgtgggccagacagtggatgacccctatgccacctttgtgaagatgctgcctgacaaggactgccgctatgccctgtatgatgccacctatgagaccaaggagagcaagaaggaggacctggtgttcatcttctgggcccctgagagcgcccccctgaagagcaagatgatctatgccagcagcaaggatgccatcaagaagaagctgaccggcatcaagcatgagctgcaggccaactgctatgaggaggtgaaggaccgctgcaccctggccgagaagctgggcggcagcgctgtgatcagcctggagggcaagcccctgtag

SEQ ID NO: 19105 - DNA, 501 bp, synthetic construct; identical to SEQ ID NO: 19104
  misc_feature 1..501: note = Description of Artificial Sequence: Synthetic coding sequence
  source 1..501: mol_type = other DNA

SEQ ID NO: 19106 - DNA, 276 bp, synthetic construct
  misc_feature 1..276: note = Description of Artificial Sequence: Synthetic coding sequence
  source 1..276: mol_type = other DNA
atggccagcggcgtggccgtgtctgatggagtcatcaaggtgttcaatgacatgaaggtgaggaagagcagcaccccagaggaggtgaagaagaggaagaaggctgtgctcttctgcctgtctgaggacaagaagaacatcatcctggaggagggcaaggagatcctggtgggagatgtgggccagacagtggatgacccctatgccacctttgtgaagatgctgcctgacaaggactgccgctatgccctgtatgatgccacctatgagacctag

SEQ ID NO: 19107 - DNA, 4101 bp, synthetic construct
  misc_feature 1..4101: note = Description of Artificial Sequence: Synthetic coding sequence
  source 1..4101: mol_type = other DNA
atgctgagctttgtggacaccaggaccctgctgctgctggccgtgaccctgtgcctggccacctgccagagcctgcaggaggagaccgtgaggaagggccctgctggggaccggggccccagaggagagcggggccccccaggccccccaggaagagatggagaagatggccccactggacctcctggccccccaggccccccaggccccccaggcctgggcggcaactttgctgcccagtatgatggcaagggcgtgggcctgggccctggccccatgggcctgatgggcccccggggccccccaggagctgctggggcccctggcccccagggcttccagggccctgctggggagcccggggagcccggccagacaggccctgctggggcccggggccctgctggccccccaggcaaggctggagaagatggccaccctgggaagccaggccggcctggagagcggggcgtggtgggcccccagggcgcccggggcttccctggcaccccaggcctgcccggcttcaagggcatccggggccacaacggcctggatggcctgaagggccagcccggggcccctggggtgaagggggagcccggggcccctggagaaaatggcaccccaggccagacaggagcccggggcctgcctggagagcggggccgggtgggcgcccctggccctgctggggcccggggcagtgatggctctgtgggccctgtgggccctgctggccccatcggcagcgctggccccccaggcttccctggggcccctggccccaagggggagattggagctgtgggcaatgccggccctgctggccctgctggccccagaggagaggtgggcctgcccggcctgagcggccctgtgggccccccaggcaaccctggggccaacggcctgaccggggccaagggagctgctggcctgcccggggtggccggggcccctggcctgcccggcccccggggcatccctggccctgtgggcgccgccggggccactggagcccggggcctggtgggggagcccggccctgctggcagcaagggggagagcggcaacaagggggagcccggcagcgctggcccccagggccccccaggccccagcggggaggagggcaagaggggccccaacggggaggccggcagcgctggccccccaggccccccaggcctgcggggcagccctggcagccggggcctgcccggggctgatggccgggccggcgtgatgggccccccaggcagcagaggagccagcggccctgctggggtgcggggccccaatggagatgctggccggcctggagagcccggcctgatgggcccccggggcctgcccggcagccctggcaacatcggccctgctgggaaggagggccctgtgggcctgcccggcattgatggccggcccggccccatcggccctgctggggcccggggggagcccggcaacatcggcttccctggccccaagggccccactggagaccccgggaagaatggagacaagggccatgctggcctggccggggcccggggggcccctggcccagatggcaacaacggggcccagggccccccaggcccccagggcgtgcagggcggcaaaggagagcagggccccccaggccccccaggcttccagggcctgcccggccccagcggccctgctggggaggtgggcaagccaggagagcggggcctgcacggggagtttggcctgcccggccctgctggccccagaggagagcggggccccccaggagagagcggggccgccggccccaccggccccatcggcagccggggccccagcggccccccaggcccagatggcaacaagggggagcccggggtggtgggcgctgtgggcacagctggccccagcggccccagcggcctgcccggggagagaggagctgctggcatccctgggggcaagggggagaagggggagcccggcctgcggggggagatcggcaaccctggaagagatggagcccggggggcccctggagctgtgggcgcccctggccctgctggggccaccggggacagaggagaggccggggctgctggccctgctggccctgctggcccccggggcagccctggagagcggggggaggtgggccctgctggccccaatggatttgctggccctgctggagctgctggccagcccggggccaagggggagcggggggccaagggccccaagggagaaaatggagtggtgggccccaccggccctgtgggcgccgccggccctgctggccccaacggccccccaggccctgctggcagcagaggagatggcggccccccaggcatgacaggcttccctggagctgctggccgcactggacctcctggccccagcggcatcagcggccccccaggccccccaggccctgctgggaaggagggcctgcggggccccaggggggaccagggccctgtgggccgcactggagaggtgggcgctgtgggccccccaggctttgctggggagaagggccccagcggggaggccggcacagctggccccccaggcaccccaggcccccagggcctgctgggcgcccctggcatcctgggcctgcccggcagcagaggagagcggggcctgcccggggtggccggggctgtgggggagcccggccccctgggcattgctggccccccaggggcccggggccccccaggagctgtgggcagccctggggtgaatggagcccctggagaggccggcagagatggcaaccctggaaatgatggccccccaggaagagatggccagcccggccacaagggggagcggggctacccaggcaacatcggccctgtgggcgccgccggggcccctggcccccacggccctgtgggccctgctgggaagcacggcaacagaggagaaacaggccccagcggccctgtgggccctgctggagctgtgggcccccggggccccagcggcccccagggcatccggggggacaagggggagcctggagagaagggcccccggggcctgcccggcctgaagggccacaacggcctgcagggcctgcccggcattgctggccaccacggggaccagggcgcccctggctctgtgggccctgctggcccccggggccctgctggccccagcggccctgctgggaaggatggccgcacaggccaccctggcaccgtgggccctgctggcatccggggcccccagggccaccagggccctgctggccccccaggccccccaggccccccaggccccccaggagtgtctgggggcggctatgactttggctatgatggagacttctacagagctgaccagcccaggtctgcccccagcctgcggcccaaggactatgaggtggatgccaccctgaagagcctgaacaaccagatcgagaccctgctgaccccagagggcagcaggaagaacccagcccggacctgccgggacctgcggctgagccaccctgagtggagcagcggctactactggattgaccccaaccagggctgcaccatggatgccatcaaggtgtactgtgacttcagcactggagagacctgcatccgggcccagcctgagaacatcccagccaagaactggtaccgcagcagcaaggacaagaagcacgtgtggctgggggagaccatcaatgccggcagccagtttgagtacaacgtggagggcgtgaccagcaaggagatggccacccagctggccttcatgaggctgctggccaactatgccagccagaacatcacctaccactgcaagaacagcatcgcctacatggatgaggagactggaaacctgaagaaggctgtgatcctgcagggcagcaatgatgtggagctggtggccgagggcaacagccgcttcacctacacagtgctggtggatggctgcagcaagaagaccaatgagtggggcaagaccatcatcgagtacaagaccaacaagcccagccggctgcccttcctggacatcgcccccctggacattggaggagctgaccaggagttctttgtggacatcggccctgtgtgcttcaagtag

SEQ ID NO: 19108 - DNA, 4104 bp, synthetic construct
  misc_feature 1..4104: note = Description of Artificial Sequence: Synthetic coding sequence
  source 1..4104: mol_type = other DNA
atgctgagctttgtggacaccaggaccctgctgctgctggccgtgaccctgtgcctggccacctgccagtgcaccctgggcggccagaccctgagcaagtttcctccctacctgcacatcgagaggtctgagcagggccccccaggccccccaggaagagatggagaagatggccccaccggccccccaggccccccaggccccccaggccccccaggcctgggcggcaactttgctgcccagtatgatggaaaaggagtgggcctgggccctggccccatgggcctgatgggcccccggggccccccaggagctgctggggcccctggcccccagggcttccagggccctgctggggagcctggagagcccggccagacaggccctgctggggcccggggccctgctggccccccaggcaaggccggggaggatggccaccctgggaagccaggccggcctggagagcggggcgtggtgggcccccagggcgcccggggcttccctggcaccccaggcctgcccggcttcaagggcatccggggccacaacggcctggatggcctgaagggccagcccggggcccctggggtgaagggggagcccggggcccctggagaaaatggcaccccaggccagacaggagcccggggcctgcccggggagcggggccgggtgggcgcccctggccctgctggggcccggggcagtgatggctctgtgggccctgtgggccctgctggccccatcggcagcgctggccccccaggcttccctggggcccctggccccaagggggagatcggggctgtgggcaatgccggccctgctggccctgctggccccagaggagaggtgggcctgcccggcctgagcggccctgtgggccccccaggcaaccctggggccaacggcctgactggagccaagggagctgctggcctgcccggggtggccggggcccctggcctgcccggcccccggggcatccctggccctgtgggcgctgctggggccaccggggcccggggcctggtgggggagcccggccctgctggcagcaaaggagagagcggcaacaagggggagcccggcagcgctggcccccagggccccccaggccccagcggggaggagggcaagaggggccccaatggagaggccggcagcgctggccccccaggccccccaggcctgcggggcagccctggcagccggggcctgcctggagcagatggccgggccggcgtgatgggccccccaggcagcagaggagccagcggccctgctggggtgcggggccccaatggagatgctggccggcctggagagcccggcctgatgggcccccggggcctgcccggcagccctggcaacatcggccctgctgggaaggagggccctgtgggcctgcccggcattgatggccggcccggccccatcggccctgctggggcccggggggagcccggcaacatcggcttccctggccccaagggccccaccggggaccccgggaagaatggagacaagggccacgccggcctggccggggcccggggggcccctggcccagatggcaacaatggagcccagggccccccaggcccccagggcgtgcagggcggcaagggggagcagggccccccaggccccccaggcttccagggcctgcccggccccagcggccctgctggggaggtgggcaagccaggagagcggggcctgcatggagaatttggcctgcccggccctgctggccccagaggagagcggggccccccaggagagagcggggctgctggccccaccggccccatcggcagccggggccccagcggccccccaggcccagatggcaacaagggggagcccggggtggtgggcgctgtgggcacagctggccccagcggccccagcggcctgcctggagagagaggagctgctggcatccctgggggcaaaggagagaagggggagcccggcctgcggggggagatcggcaaccctggaagagatggagcccggggggcccctggagctgtgggcgcccctggccctgctggggccactggagacagaggagaggccggggccgccggccctgctggccctgctggcccccggggcagccctggagagcggggggaggtgggccctgctggccccaacggctttgctggccctgctggagctgctggccagcccggggccaagggggagcggggggccaagggccccaagggggagaatggagtggtgggccccactggacctgtgggcgctgctggccctgctggccccaatggacctcctggccctgctggcagcagaggagatggcggccccccaggcatgacaggcttccctggagctgctggccgcacaggccccccaggccccagcggcatcagcggccccccaggccccccaggccctgctgggaaggagggcctgcggggccccaggggggaccagggccctgtgggccgcactggagaggtgggcgctgtgggccccccaggctttgctggggagaagggccccagcggggaggccggcacagctggccccccaggcaccccaggcccccagggcctgctgggcgcccctggcatcctgggcctgcccggcagcagaggagagcggggcctgcccggggtggccggggctgtgggggagcccggccccctgggcattgctggccccccaggggcccggggccccccaggagctgtgggcagccctggggtgaatggagcccctggagaggccggcagagatggcaaccctggaaatgatggccccccaggaagagatggccagcccggccacaagggggagcggggctacccaggcaacatcggccctgtgggcgctgctggggcccctggcccccacggccctgtgggccctgctgggaagcacggcaacagaggagagaccggccccagcggccctgtgggccctgctggagctgtgggcccccggggccccagcggcccccagggcatccggggggacaagggggagcccggggagaagggcccccggggcctgcccggcctgaagggccacaacggcctgcagggcctgcccggcattgctggccaccacggggaccagggcgcccctggctctgtgggccctgctggcccccggggccctgctggccccagcggccctgctgggaaggatggccgcacaggccaccctggcaccgtgggccctgctggcatccggggcccccagggccaccagggccctgctggccccccaggccccccaggccccccaggccccccaggagtgtctgggggcggctatgactttggctatgatggagacttctacagagctgaccagcccaggtctgcccccagcctgcggcccaaggactatgaggtggatgccaccctgaagagcctgaacaaccagatcgagaccctgctgaccccagagggcagcaggaagaacccagcccggacctgccgggacctgcggctgagccaccctgagtggagcagcggctactactggattgaccccaaccagggctgcaccatggatgccatcaaggtgtactgtgacttcagcactggagagacctgcatccgggcccagcctgagaacatcccagccaagaactggtaccgcagcagcaaggacaagaagcacgtgtggctgggggagaccatcaatgccggcagccagtttgagtacaacgtggagggcgtgaccagcaaggagatggccacccagctggccttcatgaggctgctggccaactatgccagccagaacatcacctaccactgcaagaacagcatcgcctacatggatgaggagaccggcaacctgaagaaggccgtcatcctgcagggcagcaatgatgtggagctggtggccgagggcaacagccgcttcacctacacagtgctggtggatggctgcagcaagaagaccaatgagtggggcaagaccatcatcgagtacaagaccaacaagcccagccggctgcccttcctggacatcgcccccctggacatcggcggcgctgaccaggagttctttgtggacatcggccctgtgtgcttcaagtag

SEQ ID NO: 19109 - DNA, 4401 bp, synthetic construct
  misc_feature 1..4401: note = Description of Artificial Sequence: Synthetic coding sequence
  source 1..4401: mol_type = other DNA
atgatgagctttgtgcagaagggctcctggctgctgctggccctgctgcaccccaccatcatcctggcccagcaggaggccgtggagggcggctgcagccacctgggccagagctatgctgacagagatgtgtggaagccagagccctgccagatctgtgtgtgtgacagcggctctgtgctgtgtgatgacatcatctgtgatgaccaggagctggactgccccaaccctgagatcccctttggagagtgctgtgctgtgtgcccccagcccccaacagcccccacccggccccccaacggccagggcccccagggccccaagggggaccccggccccccaggcatccctggaagaaatggagaccccggcatccctggccagcccggcagccctggcagccctggccccccaggcatctgtgagagctgccccaccggcccccagaactacagcccccagtatgacagctatgatgtgaagagcggcgtggccgtgggcggcctggccggctacccaggccctgctggccccccaggccccccaggccccccaggcaccagcggccaccctggcagccctggcagccctggctaccagggccccccaggagagcccggccaggccggccccagcggccccccaggccccccaggggccatcggccccagcggccctgctgggaaggatggagagagcggccggcccggccggcctggagagcggggcctgcccggccccccaggcatcaagggccctgctggcatccctggcttccctggcatgaagggccaccggggctttgatggaagaaatggagagaagggggagaccggggcccctggcctgaagggggagaatggcctgcccggggagaatggagcccctggccccatgggccccaggggggcccctggagagcggggccggcccggcctgcccggggctgctggggcccggggaaatgatggagcccggggcagtgatggccagcccggccccccaggccccccaggcacagctggcttccctggcagccctggggccaagggggaggtgggccctgctggcagccctggcagcaatggagcccctggccagagaggagagcccggcccccagggccatgctggggcccagggccccccaggccccccaggcatcaatggcagccctgggggcaaaggagagatgggccctgctggcatccctggggcccctggcctgatgggcgcccggggccccccaggccctgctggggccaacggggcccctggcctgcggggcggggccggggagcccgggaagaatggagccaagggggagcccggccccagaggagagcggggggaggccggcatccctggggtgcctggggccaagggagaagatggcaaggatggcagccctggagagcccggggccaacggcctgcctggagctgctggggagcggggggcccctggcttccggggccctgctggccccaacggcatccctggagagaagggccctgctggggagcggggggcccctggccctgctggccccagaggagctgctggggagcccggcagagatggagtgcctgggggccctggcatgaggggcatgcctggcagccctgggggccctggcagtgatggcaagccaggccccccaggcagccagggcgagagcggccggcccggccccccaggccccagcggcccccggggccagcccggggtgatgggcttccctggccccaagggaaatgatggagcccctgggaagaatggagagcggggcggccctgggggccctggcccccagggccccccaggcaagaatggagagaccggcccccagggccccccaggccccactggacctggaggagacaagggggacaccggccccccaggcccccagggcctgcagggcctgcccggcaccggcggccccccaggagaaaatggcaagccaggagagcccggccccaagggagatgctggggcccctggggcccctgggggcaaaggagatgctggggcccctggagagcggggccccccaggcctggccggggcccctggcctgcggggcggggccggccccccaggccctgagggcggcaaaggagctgctggccccccaggccccccaggagctgctggcaccccaggcctgcagggcatgcctggagagcggggcggcctgggcagccctggccccaagggggacaagggggagcccggcggccctggagcagatggagtgcctgggaaggatggcccccggggccccaccggccccatcggccccccaggccctgctggccagcccggggacaagggggagggcggggcccctggcctgcccggcattgctggcccccggggcagccctggagagcggggggagactggacctcctggccctgctggcttccctggggcccctggccagaatggagagcccggcggcaagggggagcggggggcccctggagagaagggggagggcggccccccaggagtggccggccccccaggcggcagcggccctgctggccccccaggcccccagggcgtgaagggggagcggggcagccctgggggccctggagctgctggcttccctggggcccggggcctgcccggccccccaggcagcaatggaaatcctggccccccaggccccagcggcagccctgggaaggatggccccccaggccctgctggcaacacaggagcccctggcagccctggggtgtctggccccaagggagatgctggccagcctggagagaagggcagccctggggcccagggccccccaggggcccctggccccctgggcattgctggcatcactggagcccggggcctggccggccccccaggcatgcctggcccccggggcagccctggcccccagggcgtgaagggggagagcggcaagccaggggccaacggcctgtctggagagcggggccccccaggcccccagggcctgcccggcctggccggcacagctggggagcccggcagagatggcaaccctggcagtgatggcctgcccggcagagatggcagccctgggggcaaaggagacagaggagaaaatggcagccctggggcccctggggcccctggccaccctggccccccaggccctgtgggccctgctgggaagagcggggacagaggagagagcggccctgctggccctgctggggcccctggccctgctggcagcagaggagcccctggcccccagggccccaggggggacaagggggagactggagagagaggagctgctggcatcaagggccaccggggcttccctggcaaccctggggcccctggcagccctggccctgctggccagcagggcgccatcggcagccctggccctgctggcccccggggccctgtgggccccagcggccccccaggcaaggatggcaccagcggccaccctggccccatcggccccccaggcccccggggcaacagaggagagcggggcagcgagggcagccctggccaccctggccagcccggccccccaggccccccaggggcccctggcccctgctgcggcggcgtgggcgctgctgccatcgccggcatcggcggggagaaggccggcggctttgccccctactatggagatgagcccatggacttcaagatcaacacagatgagatcatgaccagcctgaagtctgtgaatggccagatcgagagcctcatcagcccagatggcagcaggaagaacccagccaggaactgccgggacctgaagttctgccaccctgagctgaagagcggggagtactgggtggaccccaaccagggctgcaagctggatgccatcaaggtgttctgcaacatggagaccggggagacctgcatcagcgccaaccccctgaatgtgcccaggaagcactggtggacagacagcagcgctgagaagaagcacgtgtggtttggagagagcatggatggcggcttccagttctcctatggcaaccctgagctgcctgaagatgtgctggatgtgcacctggccttcctgcggctgctgagcagccgggccagccagaacatcacctaccactgcaagaacagcatcgcctacatggaccaggccagcggaaatgtgaagaaggccctgaagctgatgggcagcaatgaaggagagttcaaggccgagggcaacagcaagttcacctacacagtgctggaggatggctgcaccaagcacactggagagtggagcaagacagtgtttgagtaccgcaccaggaaggctgtgcggctgcccatcgtggacatcgccccctatgacattggaggccctgaccaggagtttggagtggatgtgggccctgtgtgcttcctgtag

SEQ ID NO: 19110 - DNA, 3492 bp, synthetic construct
  misc_feature 1..3492: note = Description of Artificial Sequence: Synthetic coding sequence
  source 1..3492: mol_type = other DNA
atgatgagctttgtgcagaagggctcctggctgctgctggccctgctgcaccccaccatcatcctggcccagcaggaggccgtggagggcggctgcagccacctgggccagagctatgctgacagagatgtgtggaagccagagccctgccagatctgtgtgtgtgacagcggctctgtgctgtgtgatgacatcatctgtgatgaccaggagctggactgccccaaccctgagatcccctttggagagtgctgtgctgtgtgcccccagcccccaacagcccccacccggccccccaacggccagggcccccagggccccaagggggaccccggccccccaggcatccctggaagaaatggagaccccggcatccctggccagcccggcagccctggcagccctggccccccaggcatctgtgagagctgccccaccggcccccagaactacagcccccagtatgacagctatgatgtgaagagcggcgtggccgtgggcggcctggccggctacccaggccctgctggccccccaggccccccaggccccccaggcaccagcggccaccctggcagccctggcagccctggctaccagggccccccaggagagcccggccaggccggccccagcggccccccaggccccccaggggccatcggccccagcggccctgctgggaaggatggagagagcggccggcccggccggcctggagagcggggcctgcccggccccccaggcatcaagggccctgctggcatccctggcttccctggcatgaagggccaccggggctttgatggaagaaatggagagaagggggagaccggggcccctggcctgaagggggagaatggcctgcccggggagaatggagcccctggccccatgggccccaggggggcccctggagagcggggccggcccggcctgcccggggctgctggggcccggggaaatgatggagcccggggcagtgatggccagcccggccccccaggccccccaggcacagctggcttccctggcagccctggggccaagggggaggtgggccctgctggcagccctggcagcaatggagcccctggccagagaggagagcccggcccccagggccatgctggggcccagggccccccaggccccccaggcatcaatggcagccctgggggcaaaggagagatgggccctgctggcatccctggggcccctggcctgatgggcgcccggggccccccaggccctgctggggccaacggggcccctggcctgcggggcggggccggggagcccgggaagaatggagccaagggggagcccggccccagaggagagcggggggaggccggcatccctggggtgcctggggccaagggagaagatggcaaggatggcagccctggagagcccggggccaacggcctgcctggagctgctggggagcggggggcccctggcttccggggccctgctggccccaacggcatccctggagagaagggccctgctggggagcggggggcccctggccctgctggccccagaggagctgctggggagcccggcagagatggagtgcctgggggccctggcatgaggggcatgcctggcagccctgggggccctggcagtgatggcaagccaggccccccaggcagccagggcgagagcggccggcccggccccccaggccccagcggcccccggggccagcccggggtgatgggcttccctggccccaagggaaatgatggagcccctgggaagaatggagagcggggcggccctgggggccctggcccccagggccccccaggcaagaatggagagaccggcccccagggccccccaggccccactggacctggaggagacaagggggacaccggccccccaggcccccagggcctgcagggcctgcccggcaccggcggccccccaggagaaaatggcaagccaggagagcccggccccaagggagatgctggggcccctggggcccctgggggcaaaggagatgctggggcccctggagagcggggccccccaggcctggccggggcccctggcctgcggggcggggccggccccccaggccctgagggcggcaaaggagctgctggccccccaggccccccaggagctgctggcaccccaggcctgcagggcatgcctggagagcggggcggcctgggcagccctggccccaagggggacaagggggagcccggcggccctggagcagatggagtgcctgggaaggatggcccccggggccccaccggccccatcggccccccaggccctgctggccagcccggggacaagggggagggcggggcccctggcctgcccggcattgctggcccccggggcagccctggagagcggggggagactggacctcctggccctgctggcttccctggggcccctggccagaatggagagcccggcggcaagggggagcggggggcccctggagagaagggggagggcggccccccaggcctgtttggccccccaggcaaggatggcaccagcggccaccctggccccatcggccccccaggcccccggggcaacagaggagagcggggcagcgagggcagccctggccaccctggccagcccggccccccaggccccccaggggcccctggcccctgctgcggcggcgtgggcgccgccgccatcgccggcattggaggagagaaggccggcggctttgccccctactatggagatgagcccatggacttcaagatcaacacagatgagatcatgaccagcctgaagtctgtgaatggccagatcgagagcctcatcagcccagatggcagcaggaagaacccagccaggaactgccgggacctgaagttctgccaccctgagctgaagtctggagagtactgggtggaccccaaccagggctgcaagctggatgccatcaaggtgttctgcaacatggagactggagagacctgcatcagcgccaaccccctgaatgtgcccaggaagcactggtggacagacagcagcgctgagaagaagcacgtgtggtttggagagagcatggatggcggcttccagttctcctatggcaaccctgagctgcctgaagatgtgctggatgtgcacctggccttcctgcggctgctgagcagccgggccagccagaacatcacctaccactgcaagaacagcatcgcctacatggaccaggccagcggaaatgtgaagaaggccctgaagctgatgggcagcaatgaaggagagttcaaggccgagggcaacagcaagttcacctacacagtgctggaggatggctgcaccaagcacactggagagtggagcaagacagtgtttgagtaccgcaccaggaaggctgtgcggctgcccatcgtggacatcgccccctatgacatcggcggccctgaccaggagtttggagtggatgtgggccctgtgtgcttcctgtag

SEQ ID NO: 19111 - DNA, 5139 bp, synthetic construct
  misc_feature 1..5139: note = Description of Artificial Sequence: Synthetic coding sequence
  source 1..5139: mol_type = other DNA
atgggccgggaccagagagctgtggccggccctgccctgcggcgctggctgctgctgggcaccgtgacagtgggcttcctggcccagagcgtgctggccggcgtgaagaagtttgatgtgccctgtggcggccgggactgcagcggcggctgccagtgctacccagagaagggcggccggggccagcccggccctgtgggcccccagggctacaacggccccccaggcctgcagggcttccctggcctgcagggcaggaaaggagacaagggggagcggggggcccctggggtgacaggccccaagggagatgtgggcgcccggggcgtgtctggcttccctggagcagatggcatccctggccaccctggccagggcggcccccggggccggcccggctatgatggctgcaatggcacccagggcgacagcggcccccagggccccccaggcagcgagggcttcaccggccccccaggcccccagggccccaagggccagaagggggagccctatgccctgcccaaggaggagcgggaccgctacagaggagagcccggggagcccggcctggtgggcttccagggccccccaggccggcccggccacgtgggccagatgggccctgtgggcgcccctggccggcccggccccagcagtgatgagagcttcaagaacaagctgaagaacaagggcctgaactactacacagtgaacagcatgcagggagatgtgggccagcccggccccaacggcatccccagcgacaccctgcaccccatcatcgcccccactggagtgaccttccacccagaccagtacaagggccctgtgggctggaggggccggccctgggtggccggcatcagcctgaagggggaggagggcatcatgggcttccctggcctgcggggctacccaggcctgagcggggagaagggcagccctggccagaagggcagccggggcctggatggctaccagggcccagatggcccccggggccccaagggggaggccggggaccccggccccccaggcctgcctgcctacagcccccaccccagcctggccaagggggcccggggggaccccggcttccctggggcccagggcgagcccggcagccagggcgagcccggggaccccggcctgcccggccccccaggcctgagcattggagatggagaccagaggcggggcctgcctggagagatgggccccaagggcttcatcggggaccccggcatcccagccctgtatggaggccccccaggcccagatggcaagaggggccccccaggccccccaggcctgcccggccccccaggcccagatggcttcctgtttggcctgaagggggccaagggccgggccggcttccctggcctgcccggcagccctggggcccggggccccaagggctggaagggagatgctggggagtgccgctgcacagaaggagatgaggccatcaagggcctgcccggcctgcccggccccaagggctttgctggcatcaacggggagcccggcaggaagggggacagaggagaccccggccagcacggcctgcccggcttccctggcctgaagggcgtgcccggcaacatcggggcccctggccccaagggggccaagggggacagcaggaccatcaccaccaagggggagcggggccagcccggggtgcctggggtgcccggcatgaagggagatgatggcagccctggaagagatggcctggatggcttccctggcctgcccggccccccaggagatggcatcaagggccccccaggggaccccggctacccaggcatccctggcaccaagggcaccccaggagagatgggccccccaggcctgggcctgcccggcctgaagggccagaggggcttccctggagatgctggcctgcccggccccccaggcttcctgggccccccaggccctgctggcaccccaggccagattgactgtgacacagatgtgaagagagctgtgggcggggaccggcaggaggccatccagcccggctgcatcggcggccccaagggcctgcccggcctgcccggccccccaggccccaccggggccaagggcctgcggggcatccctggctttgctggagcagatggcggccctggcccccggggcctgcctggagatgctggccgggagggcttccctggccccccaggcttcatcggcccccggggcagcaaaggagctgtgggcctgcccggcccagatggcagccctggccccatcggcctgcccggcccagatggccccccaggagagcggggcctgcctggagaggtgctgggcgcccagcccggccccagaggagatgctggggtgcccggccagcccggcctgaagggcctgcccggggaccggggccccccaggcttccggggcagccagggcatgcctggcatgcctggcctgaagggccagcccggcctgcccggccccagcggccagcccggcctgtatggccccccaggcctgcacggcttccctggggcccctggccaggagggccccctgggcctgcccggcatccctggccgggagggcctgcccggggacagaggagaccccggggacaccggggcccctggccctgtgggcatgaagggcctgagcggggacagaggagatgctggcttcaccggggagcagggccaccctggcagccctggcttcaagggcattgatggcatgcctggcaccccaggcctgaagggggaccggggcagccctggcatggatggcttccagggcatgcctggcctgaagggccggcccggcttccctggcagcaagggggaggccggcttcttcggcatccctggcctgaagggcctggccggggagcccggcttcaagggcagcagaggagaccccggccccccaggccccccacctgtgatcctgcccggcatgaaggacatcaagggggagaagggagatgagggccccatgggcctgaagggctacctgggcgccaagggcatccagggcatgcctggcatccctggcctgagcggcatccctggcctgcccggccggcccggccacatcaagggcgtgaagggggacattggagtgcccggcatccctggcctgcccggcttccctggggtggccggccccccaggcatcaccggcttccctggcttcatcggcagcagaggagacaagggggcccctggccgggccggcctgtatggagagatcggggccactggagactttggagacattggagacaccatcaacctgcccggccggcccggcctgaagggggagcggggcaccaccggcatccctggcctgaagggcttctttggagagaagggcacagaaggagacatcggcttccctggcatcaccggggtgactggagtgcagggccccccaggcctgaagggccagacaggcttccctggcctgactggacctcctggcagccagggcgagctgggcagaattggcctgcccggcggcaaaggagatgatggctggccaggggcccctggcctgcccggcttccctggcctgcggggcatccggggcctgcacggcctgcccggcaccaagggcttccctggcagccctggcagtgacatccacggggaccccggcttccctggccccccaggagagcggggggaccctggagaggccaacaccctgcccggccctgtgggcgtgcccggccagaagggggaccagggcgcccctggagagcggggccccccaggcagccctggcctgcagggcttccctggcatcaccccacccagcaacatcagcggggcccctggggacaagggggcccctggcatcttcggcctgaagggctaccggggccccccaggccccccaggcagcgctgccctgcccggcagcaagggggacaccggcaaccctggggcccctggcaccccaggcaccaagggctgggccggggacagcggcccccagggccggcctggggtgtttggcctgcctggagagaagggccccagaggagagcagggcttcatgggcaacacaggccccactggagctgtgggggaccggggccccaagggccccaagggggaccccggcttccctggggcccctggcaccgtgggcgcccctggcattgctggcatcccccagaagattgctgtgcagcccggcaccgtgggcccccagggcagaagaggccccccaggggcccctggagagatgggcccccagggccccccaggagagcccggcttccggggggcccctgggaaggccggcccccagggccggggcggcgtgtctgctgtgcccggcttcagaggagatgagggccccatcggccaccagggccccatcggccaggagggcgcccctggccggcccggcagccctggcctgcccggcatgcctggccgctctgtgtccatcggctacctgctggtgaagcacagccagacagaccaggagcccatgtgccctgtgggcatgaacaagctgtggagcggctacagcctgctgtactttgagggccaggagaaggcccacaaccaggacctgggcctggccggcagctgcctggcccgcttcagcaccatgcccttcctgtactgcaaccctggagatgtgtgctactatgccagcagaaatgacaagagctactggctgagcaccacagcccccctgcccatgatgcctgtggccgaggatgagatcaagccctacatcagccgctgcagcgtgtgtgaggccccagccatcgccatcgctgtgcacagccaggatgtgtccatcccccactgcccagctggctggaggagcctgtggattggctacagcttcctgatgcacacagctgctggagatgaaggaggcggccagagcctggtgtccccaggcagctgcctggaggacttccgggccacccccttcattgaatgtaatggaggccggggcacctgccactactatgccaacaagtacagcttctggctgaccaccatccctgagcagagcttccagggcagccccagcgctgacaccctgaaggccggcctcatccgcacccacatcagccgctgccaggtgtgcatgaagaacctgtag

SEQ ID NO: 19112 - DNA, 5139 bp, synthetic construct
  misc_feature 1..5139: note = Description of Artificial Sequence: Synthetic coding sequence
  source 1..5139: mol_type = other DNA
atgggccgggaccagagagctgtggccggccctgccctgcggcgctggctgctgctgggcaccgtgacagtgggcttcctggcccagagcgtgctggccggcgtgaagaagtttgatgtgccctgtggcggccgggactgcagcggcggctgccagtgctacccagagaagggcggccggggccagcccggccctgtgggcccccagggctacaacggccccccaggcctgcagggcttccctggcctgcagggcaggaaaggagacaagggggagcggggggcccctggggtgacaggccccaagggagatgtgggcgcccggggcgtgtctggcttccctggagcagatggcatccctggccaccctggccagggcggcccccggggccggcccggctatgatggctgcaatggcacccagggcgacagcggcccccagggccccccaggcagcgagggcttcaccggccccccaggcccccagggccccaagggccagaagggggagccctatgccctgcccaaggaggagcgggaccgctacagaggagagcccggggagcccggcctggtgggcttccagggccccccaggccggcccggccacgtgggccagatgggccctgtgggcgcccctggccggcccggccccccaggccccccaggccccaagggccagcagggcaacagaggcctgggcttctacggcgtgaagggggagaagggagatgtgggccagcccggccccaacggcatccccagcgacaccctgcaccccatcatcgcccccactggagtgaccttccacccagaccagtacaagggggagaagggcagcgagggggagcccggcatccggggcatcagcctgaagggggaggagggcatcatgggcttccctggcctgcggggctacccaggcctgagcggggagaagggcagccctggccagaagggcagccggggcctggatggctaccagggcccagatggcccccggggccccaagggggaggccggggaccccggccccccaggcctgcctgcctacagcccccaccccagcctggccaagggggcccggggggaccccggcttccctggggcccagggcgagcccggcagccagggcgagcccggggaccccggcctgcccggccccccaggcctgagcattggagatggagaccagaggcggggcctgcctggagagatgggccccaagggcttcatcggggaccccggcatcccagccctgtatggaggccccccaggcccagatggcaagaggggccccccaggccccccaggcctgcccggccccccaggcccagatggcttcctgtttggcctgaagggggccaagggccgggccggcttccctggcctgcccggcagccctggggcccggggccccaagggctggaagggagatgctggggagtgccgctgcacagaaggagatgaggccatcaagggcctgcccggcctgcccggccccaagggctttgctggcatcaacggggagcccggcaggaagggggacagaggagaccccggccagcacggcctgcccggcttccctggcctgaagggcgtgcccggcaacatcggggcccctggccccaagggggccaagggggacagcaggaccatcaccaccaagggggagcggggccagcccggggtgcctggggtgcccggcatgaagggagatgatggcagccctggaagagatggcctggatggcttccctggcctgcccggccccccaggagatggcatcaagggccccccaggggaccccggctacccaggcatccctggcaccaagggcaccccaggagagatgggccccccaggcctgggcctgcccggcctgaagggccagaggggcttccctggagatgctggcctgcccggccccccaggcttcctgggccccccaggccctgctggcaccccaggccagattgactgtgacacagatgtgaagagagctgtgggcggggaccggcaggaggccatccagcccggctgcatcggcggccccaagggcctgcccggcctgcccggccccccaggccccaccggggccaagggcctgcggggcatccctggctttgctggagcagatggcggccctggcccccggggcctgcctggagatgctggccgggagggcttccctggccccccaggcttcatcggcccccggggcagcaaaggagctgtgggcctgcccggcccagatggcagccctggccccatcggcctgcccggcccagatggccccccaggagagcggggcctgcctggagaggtgctgggcgcccagcccggccccagaggagatgctggggtgcccggccagcccggcctgaagggcctgcccggggaccggggccccccaggcttccggggcagccagggcatgcctggcatgcctggcctgaagggccagcccggcctgcccggccccagcggccagcccggcctgtatggccccccaggcctgcacggcttccctggggcccctggccaggagggccccctgggcctgcccggcatccctggccgggagggcctgcccggggacagaggagaccccggggacaccggggcccctggccctgtgggcatgaagggcctgagcggggacagaggagatgctggcttcaccggggagcagggccaccctggcagccctggcttcaagggcattgatggcatgcctggcaccccaggcctgaagggggaccggggcagccctggcatggatggcttccagggcatgcctggcctgaagggccggcccggcttccctggcagcaagggggaggccggcttcttcggcatccctggcctgaagggcctggccggggagcccggcttcaagggcagcagaggagaccccggccccccaggccccccacctgtgatcctgcccggcatgaaggacatcaagggggagaagggagatgagggccccatgggcctgaagggctacctgggcgccaagggcatccagggcatgcctggcatccctggcctgagcggcatccctggcctgcccggccggcccggccacatcaagggcgtgaagggggacattggagtgcccggcatccctggcctgcccggcttccctggggtggccggccccccaggcatcaccggcttccctggcttcatcggcagcagaggagacaagggggcccctggccgggccggcctgtatggagagatcggggccactggagactttggagacattggagacaccatcaacctgcccggccggcccggcctgaagggggagcggggcaccaccggcatccctggcctgaagggcttctttggagagaagggcacagaaggagacatcggcttccctggcatcaccggggtgactggagtgcagggccccccaggcctgaagggccagacaggcttccctggcctgactggacctcctggcagccagggcgagctgggcagaattggcctgcccggcggcaaaggagatgatggctggccaggggcccctggcctgcccggcttccctggcctgcggggcatccggggcctgcacggcctgcccggcaccaagggcttccctggcagccctggcagtgacatccacggggaccccggcttccctggccccccaggagagcggggggaccctggagaggccaacaccctgcccggccctgtgggcgtgcccggccagaagggggaccagggcgcccctggagagcggggccccccaggcagccctggcctgcagggcttccctggcatcaccccacccagcaacatcagcggggcccctggggacaagggggcccctggcatcttcggcctgaagggctaccggggccccccaggccccccaggcagcgctgccctgcccggcagcaagggggacaccggcaaccctggggcccctggcaccccaggcaccaagggctgggccggggacagcggcccccagggccggcctggggtgtttggcctgcctggagagaagggccccagaggagagcagggcttcatgggcaacacaggccccactggagctgtgggggaccggggccccaagggccccaagggggaccccggcttccctggggcccctggcaccgtgggcgcccctggcattgctggcatcccccagaagattgctgtgcagcccggcaccgtgggcccccagggcagaagaggccccccaggggcccctggagagatgggcccccagggccccccaggagagcccggcttccggggggcccctgggaaggccggcccccagggccggggcggcgtgtctgctgtgcccggcttcagaggagatgagggccccatcggccaccagggccccatcggccaggagggcgcccctggccggcccggcagccctggcctgcccggcatgcctggccgctctgtgtccatcggctacctgctggtgaagcacagccagacagaccaggagcccatgtgccctgtgggcatgaacaagctgtggagcggctacagcctgctgtactttgagggccaggagaaggcccacaaccaggacctgggcctggccggcagctgcctggcccgcttcagcaccatgcccttcctgtactgcaaccctggagatgtgtgctactatgccagcagaaatgacaagagctactggctgagcaccacagcccccctgcccatgatgcctgtggccgaggatgagatcaagccctacatcagccgctgcagcgtgtgtgaggccccagccatcgccatcgctgtgcacagccaggatgtgtccatcccccactgcccagctggctggaggagcctgtggattggctacagcttcctgatgcacacagctgctggagatgaaggaggcggccagagcctggtgtccccaggcagctgcctggaggacttccgggccacccccttcattgaatgtaatggaggccggggcacctgccactactatgccaacaagtacagcttctggctgaccaccatccctgagcagagcttccagggcagccccagcgctgacaccctgaaggccggcctcatccgcacccacatcagccgctgccaggtgtgcatgaagaacctgtag

SEQ ID NO: 19113 - DNA, 318 bp, synthetic construct
  misc_feature 1..318: note = Description of Artificial Sequence: Synthetic coding sequence
  source 1..318: mol_type = other DNA
atgggccgggaccagagagctgtggccggccctgccctgcggcgctggctgctgctgggcaccgtgacagtgggcttcctggcccagagcgtgctggccggcgtgaagaagtttgatgtgccctgtggcggccgggactgcagcggcggctgccagtgctacccagagaagggcggccggggccagcccggccctgtgggcccccagggctacaacggccccccaggcctgcagggcttccctggcctgcagggcaggaaaggagacaagggggagcggggggcccctggggtgacaggccccaagggagatgtgtag

SEQ ID NO: 19114 - DNA, 4497 bp, synthetic construct
  misc_feature 1..4497: note = Description of Artificial Sequence: Synthetic coding sequence
  source 1..4497: mol_type = other DNA
atgtctgccaggacagccccccggccccaggtgctgctgctgcccctgctgctggtgctgctggccgccgccccagctgccagcaagggctgtgtgtgcaaggacaagggccagtgcttctgtgatggagccaagggggagaagggggagaagggcttccctggccccccaggcagccctggccagaagggcttcaccggccctgagggcctgcccggcccccagggccccaagagcttccgggccatccccagctacagcggcggcaagagcctgcagggcatcagcggcctgcccggcttcagcggcagccctggcctgcccggcaccccaggcaacacaggcccctacggcctggtgggcgtgcccggctgcagcggcagcaaaggagagcagggcttccctggcctgcccggcaccctgggctacccaggcatccctggcatccacaacctgaagatcttcaagggggccccagccaaggaggaggacatcgagctggatgccaagggggaccccggcctgcccggggcccctggcccccagggcctgcccggccccccaggcttccctggccctgtgggccccccaggccccccaggcttcttcggcttccctggggccatgggcccccggggccccaagagctttgtgctgagcagccgcatcagcaccaagggggagaagggcgtgaagggcctgactggacctcctggccccccaggcaccgtgattgtgaccctgactggaccagacaacagaacagacctgaagggggagaagggggacaagggggccatgggagagcccggccccccaggccccagcggcctgcctggagagagctatggcagcgagaagggggcccctggggaccccggcctgcagggcaagccaggcaaggatggagtgcccggcttccctggcagcgagggcgtgaagggcaacagaggcttccctggcctgatgggagaagatggcatcaaggaggagaagagagatgtggccatcgtgtccttcagcagcaagacagagtactatgacacctaccaggagaagggagatgagggcaccccaggccccccaggccccaggggggcccggggcccccagggcaagaacaagttccgctgcatccctggcagccagggcagcagccggcccggcctgcggggggcccctggctggccaggcctgaagggcagcaaaggagagcggggccggcctgggaaggatgccatgggcaccccaggcagccctggctgtgccggcagccctggcctgcccggcagccctggccccccaggccccccaggggacatcgtgttcagaaaaggacctcctggggaccacggcctgcccggctacctgggcagccctggcatccctggggtggatggccccaagggggagcccggcctgctgtgcacccagtgcccctacatccctggccccccaggcctgcccggcctgcccggcctgcatggagtgaagggcatccctggccggcagggcgctgctggcctgaagggcagccctggcagccctggcaacacaggcctgcccggcttccctggcttccctggggcccagggcgaccccggcctgaagggggagaagggggagaccctgcagcctgagggccaggtgggcgtgcctggggaccccggcctgcggggccagcccggcaggaagggcctggatggcatccctggcaccccaggagtgaagggcctgcccggccccaagggggagctggccctgtctggagagaagggggaccagggccccccaggggaccccggcagccctggcagccctggccctgctggccctgctggccccccaggctacggcccccagggcgagcccggcctgcagggcacccagggcgtgcctggggcccctggccccccaggagaggccggccccagaggagagctgtctgtgtccacccctgtgcccggccccccaggccccccaggccccccaggccaccctggcccccagggccccccaggcatccctggcagcctgggcaaatgtggggaccccggcctgcccggcccagatggagagcccggcatccctggcatcggcttccctggccccccaggccccaagggggaccagggcttccctggcaccaagggcagcctgggctgccctgggaagatgggagagcccggcctgcccgggaagccaggcctgcccggggccaagggggagcctgctgtggccatgcctgggggccctggcaccccaggcttccctggagagcggggcaacagcggggagcacggggagatcggcctgcccggcctgcccggcctgcccggcaccccaggaaatgaaggcctggatggccccaggggggaccccggccagcccggccccccaggagagcagggccccccaggccgctgcatcgagggccccaggggggcccagggcctgcccggcctgaatggcctgaagggccagcagggcagaagaggcaagacaggccccaagggggaccccggcatccctggcctggacagaagtggcttccctggagaaacaggcagccctggcatccctggccaccagggcgagatgggccccctgggccagaggggctacccaggcaaccctggcatcctgggccccccaggagaagatggagtgattggcatgatgggcttccctggggccatcggccccccaggccccccaggcaaccctggcaccccaggccagaggggcagccctggcatccctggggtgaagggccagaggggcacccctggggccaagggggagcagggcgacaagggcaaccctggccccagcgagatcagccacgtgattggagacaagggggagcccggcctgaagggctttgctggcaaccctggagagaagggcaacagaggagtgcccggcatgcctggcctgaagggcctgaagggcctgcccggccctgctggccccccaggccccaggggggacctgggcagcacaggcaaccctggagagcccggcctgcggggcatccctggctccatgggcaacatgggcatgcctggcagcaagggcaagaggggcaccctgggcttccctggccgggccggccggcccggcctgcccggcatccacggcctgcagggcgacaagggggagcccggctacagcgagggcacccggcccggccccccaggccccaccggggaccccggcctgcccggggacatgggcaagaagggggagatgggccagcccggccccccaggccacctgggccctgctggccctgagggcgcccctggcagccctggcagccctggcctgcccgggaagccaggcccccacggggacctgggcttcaagggcatcaagggcctgctgggccccccaggcatccggggccccccaggcctgcccggcttccctggcagccctggccccatgggcatccggggggaccagggcagagatggcatccctggccctgctggggagaagggggagaccggcctgctgcgggcccctcctggcccccggggcaaccctggggcccagggcgccaagggggacagaggagcccctggcttccctggcctgcccggcaggaagggggccatgggagatgctggcccccggggccccaccggcatcgagggcttccctggccccccaggcctgcccggggccatcatccctggccagacaggcaacagaggccccccaggcagccggggcagccctggggcccctggccccccaggccccccaggcagccacgtgattggcatcaagggggacaagggctccatgggccaccctggccccaagggccccccaggcacagctggggacatgggccccccaggccgcctgggcgcccctggcaccccaggcctgcccggccccaggggggaccccggcttccagggcttccctggggtgaagggggagaagggcaaccctggcttcctgggcagcatcggccccccaggccccatcggccccaagggccccccaggagtgcggggggaccccggcaccctgaagatcatcagcctgcccggcagccctggccccccaggcaccccaggagagcccggcatgcagggcgagcccggccccccaggccccccaggcaacctgggcccctgtggcccccggggcaagccaggcaaggatggcaagccaggcaccccaggccctgctggggagaagggcaacaagggcagcaagggggagcccggccctgctggcagtgatggcctgcccggcctgaagggcaagagaggagacagcggcagccctgccacctggaccacccggggctttgtgttcaccaggcacagccagaccacagccatccccagctgcccagagggcaccgtgcccctgtacagcggcttctccttcctgtttgtgcagggcaaccagagggcccacggccaggacctggatgccctgtttgtgaaggtgctgcggagcccctag

SEQ ID NO: 19115 - DNA, 4914 bp, synthetic construct
  misc_feature 1..4914: note = Description of Artificial Sequence: Synthetic coding sequence
  source 1..4914: mol_type = other DNA
atgtctgccaggacagccccccggccccaggtgctgctgctgcccctgctgctggtgctgctggccgccgccccagctgccagcaagggctgtgtgtgcaaggacaagggccagtgcttctgtgatggagccaagggggagaagggggagaagggcttccctggccccccaggcagccctggccagaagggcttcaccggccctgagggcctgcccggcccccagggccccaagagcttccgggccatccccagctacagcggcggcaagagcctgcagggcatcagcggcctgcccggcttcagcggcagccctggcctgcccggcaccccaggcaacacaggcccctacggcctggtgggcgtgcccggctgcagcggcagcaaaggagagcagggcttccctggcctgcccggcaccctgggctacccaggcatccctggcatccacaacctgaagatcttcaagggggccccagccaaggaggaggacatcgagctggatgccaagggggaccccggcctgcccggggcccctggcccccagggcctgcccggccccccaggcttccctggccctgtgggccccccaggccccccaggcttcttcggcttccctggggccatgggcccccggggccccaagagctttgtgctgagcagccgcatcagcaccaagggggagaagggcgtgaagggcctgactggacctcctggccccccaggcaccgtgattgtgaccctgactggaccagacaacagaacagacctgaagggggagaagggggacaagggggccatgggagagcccggccccccaggccccagcggcctgcctggagagagctatggcagcgagaagggggcccctggggaccccggcctgcagggcaagccaggcaaggatggagtgcccggcttccctggcagcgagggcgtgaagggcaacagaggcttccctggcctgatgggagaagatggcatcaaggaggagaagagagatgtggccatcgtgtccttcagcagcaagacagagtactatgacacctaccaggagaagggagatgagggcaccccaggccccccaggccccaggggggcccggggcccccagggcaagaacaagttccgctgcatccctggcagccagggcagcagccggcccggcctgcggggggcccctggctggccaggcctgaagggcagcaaaggagagcggggccggcctgggaaggatgccatgggcaccccaggcagccctggctgtgccggcagccctggcctgcccggcagccctggccccccaggccccccaggggacatcgtgttcagaaaaggacctcctggggaccacggcctgcccggctacctgggcagccctggcatccctggggtggatggccccaagggggagcccggcctgctgtgcacccagtgcccctacatccctggccccccaggcctgcccggcctgcccggcctgcatggagtgaagggcatccctggccggcagggcgctgctggcctgaagggcagccctggcagccctggcaacacaggcctgcccggcttccctggcttccctggggcccagggcgaccccggcctgaagggggagaagggggagaccctgcagcctgagggccaggtgggcgtgcctggggaccccggcctgcggggccagcccggcaggaagggcctggatggcatccctggcaccccaggagtgaagggcctgcccggccccaagggggagctggccctgtctggagagaagggggaccagggccccccaggggaccccggcagccctggcagccctggccctgctggccctgctggccccccaggctacggcccccagggcgagcccggcctgcagggcacccagggcgtgcctggggcccctggccccccaggagaggccggccccagaggagagctgtctgtgtccacccctgtgcccggccccccaggccccccaggccccccaggccaccctggcccccagggccccccaggcatccctggcagcctgggcaaatgtggggaccccggcctgcccggcccagatggagagcccggcatccctggcatcggcttccctggccccccaggccccaagggggaccagggcttccctggcaccaagggcagcctgggctgccctgggaagatgggagagcccggcctgcccgggaagccaggcctgcccggggccaagggggagcctgctgtggccatgcctgggggccctggcaccccaggcttccctggagagcggggcaacagcggggagcacggggagatcggcctgcccggcctgcccggcctgcccggcaccccaggaaatgaaggcctggatggccccaggggggaccccggccagcccggccccccaggagagcagggccccccaggccgctgcatcgagggccccaggggggcccagggcctgcccggcctgaatggcctgaagggccagcagggcagaagaggcaagacaggccccaagggggaccccggcatccctggcctggacagaagtggcttccctggagaaacaggcagccctggcatccctggccaccagggcgagatgggccccctgggccagaggggctacccaggcaaccctggcatcctgggccccccaggagaagatggagtgattggcatgatgggcttccctggggccatcggccccccaggccccccaggcaaccctggcaccccaggccagaggggcagccctggcatccctggggtgaagggccagaggggcacccctggggccaagggggagcagggcgacaagggcaaccctggccccagcgagatcagccacgtgattggagacaagggggagcccggcctgaagggctttgctggcaaccctggagagaagggcaacagaggagtgcccggcatgcctggcctgaagggcctgaagggcctgcccggccctgctggccccccaggccccaggggggacctgggcagcacaggcaaccctggagagcccggcctgcggggcatccctggctccatgggcaacatgggcatgcctggcagcaagggcaagaggggcaccctgggcttccctggccgggccggccggcccggcctgcccggcatccacggcctgcagggcgacaagggggagcccggctacagcgagggcacccggcccggccccccaggccccaccggggaccccggcctgcccggggacatgggcaagaagggggagatgggccagcccggccccccaggccacctgggccctgctggccctgagggcgcccctggcagccctggcagccctggcctgcccgggaagccaggcccccacggggacctgggcttcaagggcatcaagggcctgctgggccccccaggcatccggggccccccaggcctgcccggcttccctggcagccctggccccatgggcatccggggggaccagggcagagatggcatccctggccctgctggggagaagggggagaccggcctgctgcgggcccctcctggcccccggggcaaccctggggcccagggcgccaagggggacagaggagcccctggcttccctggcctgcccggcaggaagggggccatgggagatgctggcccccggggccccaccggcatcgagggcttccctggccccccaggcctgcccggggccatcatccctggccagacaggcaacagaggccccccaggcagccggggcagccctggggcccctggccccccaggccccccaggcagccacgtgattggcatcaagggggacaagggctccatgggccaccctggccccaagggccccccaggcacagctggggacatgggccccccaggccgcctgggcgcccctggcaccccaggcctgcccggccccaggggggaccccggcttccagggcttccctggggtgaagggggagaagggcaaccctggcttcctgggcagcatcggccccccaggccccatcggccccaagggccccccaggagtgcggggggaccccggcaccctgaagatcatcagcctgcccggcagccctggccccccaggcaccccaggagagcccggcatgcagggcgagcccggccccccaggccccccaggcaacctgggcccctgtggcccccggggcaagccaggcaaggatggcaagccaggcaccccaggccctgctggggagaagggcaacaagggcagcaagggggagcccggccctgctggcagtgatggcctgcccggcctgaagggcaagagaggagacagcggcagccctgccacctggaccacccggggctttgtgttcaccaggcacagccagaccacagccatccccagctgcccagagggcaccgtgcccctgtacagcggcttctccttcctgtttgtgcagggcaaccagagggcccacggccaggacctgggcaccctgggcagctgcctgcagcgcttcaccaccatgcccttcctgttctgcaatgtgaatgatgtgtgcaactttgccagcagaaatgactacagctactggctgagcaccccagccctgatgcccatgaacatggcccccatcaccggccgggccctggagccctacatcagccgctgcaccgtgtgtgagggccctgccatcgccatcgctgtgcacagccagaccacagacatccccccctgcccccacggctggatcagcctgtggaagggcttctccttcatcatgaaggcctacagcatcaactgtgagagctggggcatcaggaagaacaacaagagcctgtctggagtgcatgaggagaagaccctgaagctgaagaagacagctgagctgctcttcttcatcctgaagaacaaggtgatgacagagcacgctgtgatctag

SEQ ID NO: 19116 - DNA, 4485 bp, synthetic construct
  misc_feature 1..4485: note = Description of Artificial Sequence: Synthetic coding sequence
  source 1..4485: mol_type = other DNA
atgtctgccaggacagccccccggccccaggtgctgctgctgcccctgctgctggtgctgctggccgccgccccagctgccagcaagggctgtgtgtgcaaggacaagggccagtgcttctgtgatggagccaagggggagaagggggagaagggcttccctggccccccaggcagccctggccagaagggcttcaccggccctgagggcctgcccggcccccagggccccaagagcttccgggccatccccagctacagcggcggcaagagcctgcagggcatcagcggcctgcccggcttcagcggcagccctggcctgcccggcaccccaggcaacacaggcccctacggcctggtgggcgtgcccggctgcagcggcagcaaaggagagcagggcttccctggcctgcccggcaccctgggctacccaggcatccctggcatccacaacctgaagatcttcaagggggccccagccaaggaggaggacatcgagctggatgccaagggggaccccggcctgcccggggcccctggcccccagggcctgcccggccccccaggcttccctggccctgtgggccccccaggccccccaggcttcttcggcttccctggggccatgggcccccggggccccaagagctttgtgctgagcagccgcatcagcaccaagggggagaagggcgtgaagggcctgactggacctcctggccccccaggcaccgtgattgtgaccctgactggaccagacaacagaacagacctgaagggggagaagggggacaagggggccatgggagagcccggccccccaggccccagcggcctgcctggagagagctatggcagcgagaagggggcccctggggaccccggcctgcagggcaagccaggcaaggatggagtgcccggcttccctggcagcgagggcgtgaagggcaacagaggcttccctggcctgatgggagaagatggcatcaaggaggagaagagagatgtggccatcgtgtccttcagcagcaagacagagtactatgacacctaccaggagaagggagatgagggcaccccaggccccccaggccccaggggggcccggggcccccagggcaagaacaagttccgctgcatccctggcagccagggcagcagccggcccggcctgcggggggcccctggctggccaggcctgaagggcagcaaaggagagcggggccggcctgggaaggatgccatgggcaccccaggcagccctggctgtgccggcagccctggcctgcccggcagccctggccccccaggccccccaggggacatcgtgttcagaaaaggacctcctggggaccacggcctgcccggctacctgggcagccctggcatccctggggtggatggccccaagggggagcccggcctgctgtgcacccagtgcccctacatccctggccccccaggcctgcccggcctgcccggcctgcatggagtgaagggcatccctggccggcagggcgctgctggcctgaagggcagccctggcagccctggcaacacaggcctgcccggcttccctggcttccctggggcccagggcgaccccggcctgaagggggagaagggggagaccctgcagcctgagggccaggtgggcgtgcctggggaccccggcctgcggggccagcccggcaggaagggcctggatggcatccctggcaccccaggagtgaagggcctgcccggccccaagggggagctggccctgtctggagagaagggggaccagggccccccaggggaccccggcagccctggcagccctggccctgctggccctgctggccccccaggctacggcccccagggcgagcccggcctgcagggcacccagggcgtgcctggggcccctggccccccaggagaggccggccccagaggagagctgtctgtgtccacccctgtgcccggccccccaggccccccaggccccccaggccaccctggcccccagggccccccaggcatccctggcagcctgggcaaatgtggggaccccggcctgcccggcccagatggagagcccggcatccctggcatcggcttccctggccccccaggccccaagggggaccagggcttccctggcaccaagggcagcctgggctgccctgggaagatgggagagcccggcctgcccgggaagccaggcctgcccggggccaagggggagcctgctgtggccatgcctgggggccctggcaccccaggcttccctggagagcggggcaacagcggggagcacggggagatcggcctgcccggcctgcccggcctgcccggcaccccaggaaatgaaggcctggatggccccaggggggaccccggccagcccggccccccaggagagcagggccccccaggccgctgcatcgagggccccaggggggcccagggcctgcccggcctgaatggcctgaagggccagcagggcagaagaggcaagacaggccccaagggggaccccggcatccctggcctggacagaagtggcttccctggagaaacaggcagccctggcatccctggccaccagggcgagatgggccccctgggccagaggggctacccaggcaaccctggcatcctgggccccccaggagaagatggagtgattggcatgatgggcttccctggggccatcggccccccaggccccccaggcaaccctggcaccccaggccagaggggcagccctggcatccctggggtgaagggccagaggggcacccctggggccaagggggagcagggcgacaagggcaaccctggccccagcgagatcagccacgtgattggagacaagggggagcccggcctgaagggctttgctggcaaccctggagagaagggcaacagaggagtgcccggcatgcctggcctgaagggcctgaagggcctgcccggccctgctggccccccaggccccaggggggacctgggcagcacaggcaaccctggagagcccggcctgcggggcatccctggctccatgggcaacatgggcatgcctggcagcaagggcaagaggggcaccctgggcttccctggccgggccggccggcccggcctgcccggcatccacggcctgcagggcgacaagggggagcccggctacagcgagggcacccggcccggccccccaggccccaccggggaccccggcctgcccggggacatgggcaagaagggggagatgggccagcccggccccccaggccacctgggccctgctggccctgagggcgcccctggcagccctggcagccctggcctgcccgggaagccaggcccccacggggacctgggcttcaagggcatcaagggcctgctgggccccccaggcatccggggccccccaggcctgcccggcttccctggcagccctggccccatgggcatccggggggaccagggcagagatggcatccctggccctgctggggagaagggggagaccggcctgctgcgggcccctcctggcccccggggcaaccctggggcccagggcgccaagggggacagaggagcccctggcttccctggcctgcccggcaggaagggggccatgggagatgctggcccccggggccccaccggcatcgagggcttccctggccccccaggcctgcccggggccatcatccctggccagacaggcaacagaggccccccaggcagccggggcagccctggggcccctggccccccaggccccccaggcagccacgtgattggcatcaagggggacaagggctccatgggccaccctggccccaagggccccccaggcacagctggggacatgggccccccaggccgcctgggcgcccctggcaccccaggcctgcccggccccaggggggaccccggcttccagggcttccctggggtgaagggggagaagggcaaccctggcttcctgggcagcatcggccccccaggccccatcggccccaagggccccccaggagtgcggggggaccccggcaccctgaagatcatcagcctgcccggcagccctggccccccaggcaccccaggagagcccggcatgcagggcgagcccggccccccaggccccccaggcaacctgggcccctgtggcccccggggcaagccaggcaaggatggcaagccaggcaccccaggccctgctggggagaagggcaacaagggcagcaagggggagcccggccctgctggcagtgatggcctgcccggcctgaagggcaagagaggagacagcggcagccctgccacctggaccacccggggctttgtgttcaccaggcacagccagaccacagccatccccagctgcccagagggcaccgtgcccctgtacagcggcttctccttcctgtttgtgcagggcaaccagagggcccacggccaggacctggagagcctcttccaccagctgtag

SEQ ID NO: 19117 - DNA, 4275 bp, synthetic construct
  misc_feature 1..4275: note = Description of Artificial Sequence: Synthetic coding sequence
  source 1..4275: mol_type = other DNA
atgtctgccaggacagccccccggccccaggtgctgctgctgcccctgctgctggtgctgctggccgccgccccagctgccagcaagggctgtgtgtgcaaggacaagggccagtgcttctgtgatggagccaagggggagaagggggagaagggcttccctggccccccaggcagccctggccagaagggcttcaccggccctgagggcctgcccggcccccagggccccaagagcttccgggccatccccagctacagcggcggcaagagcctgcagggcatcagcggcctgcccggcttcagcggcagccctggcctgcccggcaccccaggcaacacaggcccctacggcctggtgggcgtgcccggctgcagcggcagcaaaggagagcagggcttccctggcctgcccggcaccctgggctacccaggcatccctggcatccacaacctgaagatcttcaagggggccccagccaaggaggaggacatcgagctggatgccaagggggaccccggcctgcccggggcccctggcccccagggcctgcccggccccccaggcttccctggccctgtgggccccccaggccccccaggcttcttcggcttccctggggccatgggcccccggggccccaagagctttgtgctgagcagccgcatcagcaccaagggggagaagggcgtgaagggcctgactggacctcctggccccccaggcaccgtgattgtgaccctgactggaccagacaacagaacagacctgaagggggagaagggggacaagggggccatgggagagcccggccccccaggccccagcggcctgcctggagagagctatggcagcgagaagggggcccctggggaccccggcctgcagggcaagccaggcaaggatggagtgcccggcttccctggcagcgagggcgtgaagggcaacagaggcttccctggcctgatgggagaagatggcatcaaggaggagaagagagatgtggccatcgtgtccttcagcagcaagacagagtactatgacacctaccaggagaagggagatgagggcaccccaggccccccaggccccaggggggcccggggcccccagggcaagaacaagttccgctgcatccctggcagccagggcagcagccggcccggcctgcggggggcccctggctggccaggcctgaagggcagcaaaggagagcggggccggcctgggaaggatgccatgggcaccccaggcagccctggctgtgccggcagccctggcctgcccggcagccctggccccccaggccccccaggggacatcgtgttcagaaaaggacctcctggggaccacggcctgcccggctacctgggcagccctggcatccctggggtggatggccccaagggggagcccggcctgctgtgcacccagtgcccctacatccctggccccccaggcctgcccggcctgcccggcctgcatggagtgaagggcatccctggccggcagggcgctgctggcctgaagggcagccctggcagccctggcaacacaggcctgcccggcttccctggcttccctggggcccagggcgaccccggcctgaagggggagaagggggagaccctgcagcctgagggccaggtgggcgtgcctggggaccccggcctgcggggccagcccggcaggaagggcctggatggcatccctggcaccccaggagtgaagggcctgcccggccccaagggggagctggccctgtctggagagaagggggaccagggccccccaggggaccccggcagccctggcagccctggccctgctggccctgctggccccccaggctacggcccccagggcgagcccggcctgcagggcacccagggcgtgcctggggcccctggccccccaggagaggccggccccagaggagagctgtctgtgtccacccctgtgcccggccccccaggccccccaggccccccaggccaccctggcccccagggccccccaggcatccctggcagcctgggcaaatgtggggaccccggcctgcccggcccagatggagagcccggcatccctggcatcggcttccctggccccccaggccccaagggggaccagggcttccctggcaccaagggcagcctgggctgccctgggaagatgggagagcccggcctgcccgggaagccaggcctgcccggggccaagggggagcctgctgtggccatgcctgggggccctggcaccccaggcttccctggagagcggggcaacagcggggagcacggggagatcggcctgcccggcctgcccggcctgcccggcaccccaggaaatgaaggcctggatggccccaggggggaccccggccagcccggccccccaggagagcagggccccccaggccgctgcatcgagggccccaggggggcccagggcctgcccggcctgaatggcctgaagggccagcagggcagaagaggcaagacaggccccaagggggaccccggcatccctggcctggacagaagtggcttccctggagaaacaggcagccctggcatccctggccaccagggcgagatgggccccctgggccagaggggctacccaggcaaccctggcatcctgggccccccaggagaagatggagtgattggcatgatgggcttccctggggccatcggccccccaggccccccaggcaaccctggcaccccaggccagaggggcagccctggcatccctggggtgaagggccagaggggcacccctggggccaagggggagcagggcgacaagggcaaccctggccccagcgagatcagccacgtgattggagacaagggggagcccggcctgaagggctttgctggcaaccctggagagaagggcaacagaggagtgcccggcatgcctggcctgaagggcctgaagggcctgcccggccctgctggccccccaggccccaggggggacctgggcagcacaggcaaccctggagagcccggcctgcggggcatccctggctccatgggcaacatgggcatgcctggcagcaagggcaagaggggcaccctgggcttccctggccgggccggccggcccggcctgcccggcatccacggcctgcagggcgacaagggggagcccggctacagcgagggcacccggcccggccccccaggccccaccggggaccccggcctgcccggggacatgggcaagaagggggagatgggccagcccggccccccaggccacctgggccctgctggccctgagggcgcccctggcagccctggcagccctggcctgcccgggaagccaggcccccacggggacctgggcttcaagggcatcaagggcctgctgggccccccaggcatccggggccccccaggcctgcccggcttccctggcagccctggccccatgggcatccggggggaccagggcagagatggcatccctggccctgctggggagaagggggagaccggcctgctgcgggcccctcctggcccccggggcaaccctggggcccagggcgccaagggggacagaggagcccctggcttccctggcctgcccggcaggaagggggccatgggagatgctggcccccggggccccaccggcatcgagggcttccctggccccccaggcctgcccggggccatcatccctggccagacaggcaacagaggccccccaggcagccggggcagccctggggcccctggccccccaggccccccaggcagccacgtgattggcatcaagggggacaagggctccatgggccaccctggccccaagggccccccaggcacagctggggacatgggccccccaggccgcctgggcgcccctggcaccccaggcctgcccggccccaggggggaccccggcttccagggcttccctggggtgaagggggagaagggcaaccctggcttcctgggcagcatcggccccccaggccccatcggccccaagggccccccaggagtgcggggggaccccggcaccctgaagatcatcagcctgcccggcagccctggccccccaggcaccccaggagagcccggcatgcagggcgagcccggccccccaggccccccaggcaacctgggcccctgtggcccccggggcaagccaggcaaggatggcaagccaggcaccccaggccctgctggggagaagggcaacaagggcagcaagggggagcctgagagcctcttccaccagctgtag

SEQ ID NO: 19118 - DNA, 5013 bp, synthetic construct
  misc_feature 1..5013: note = Description of Artificial Sequence: Synthetic coding sequence
  source 1..5013: mol_type = other DNA
atgtctgccaggacagccccccggccccaggtgctgctgctgcccctgctgctggtgctgctggccgccgccccagctgccagcaagggctgtgtgtgcaaggacaagggccagtgcttctgtgatggagccaagggggagaagggggagaagggcttccctggccccccaggcagccctggccagaagggcttcaccggccctgagggcctgcccggcccccagggccccaagggcttccctggcctgcccggcctgaccggcagcaagggcgtgcggggcatcagcggcctgcccggcttcagcggcagccctggcctgcccggcaccccaggcaacacaggcccctacggcctggtgggcgtgcccggctgcagcggcagcaaaggagagcagggcttccctggcctgcccggcaccctgggctacccaggcatccctggagctgctggcctgaagggccagaagggggccccagccaaggaggaggacatcgagctggatgccaagggggaccccggcctgcccggggcccctggcccccagggcctgcccggccccccaggcttccctggccctgtgggccccccaggccccccaggcttcttcggcttccctggggccatgggcccccggggccccaagggccacatgggagagcgggtgattggccacaagggggagcggggcgtgaagggcctgactggacctcctggccccccaggcaccgtgattgtgaccctgactggaccagacaacagaacagacctgaagggggagaagggggacaagggggccatgggagagcccggccccccaggccccagcggcctgcctggagagagctatggcagcgagaagggggcccctggggaccccggcctgcagggcaagccaggcaaggatggagtgcccggcttccctggcagcgagggcgtgaagggcaacagaggcttccctggcctgatgggagaagatggcatcaagggccagaagggggacatcggccccccaggcttccggggccccacagagtactatgacacctaccaggagaagggagatgagggcaccccaggccccccaggccccaggggggcccggggcccccagggccccagcggccccccaggagtgcccggcagccctggcagcagccggcccggcctgcggggggcccctggctggccaggcctgaagggcagcaaaggagagcggggccggcctgggaaggatgccatgggcaccccaggcagccctggctgtgccggcagccctggcctgcccggcagccctggccccccaggccccccaggggacatcgtgttcagaaaaggacctcctggggaccacggcctgcccggctacctgggcagccctggcatccctggggtggatggccccaagggggagcccggcctgctgtgcacccagtgcccctacatccctggccccccaggcctgcccggcctgcccggcctgcatggagtgaagggcatccctggccggcagggcgctgctggcctgaagggcagccctggcagccctggcaacacaggcctgcccggcttccctggcttccctggggcccagggcgaccccggcctgaagggggagaagggggagaccctgcagcctgagggccaggtgggcgtgcctggggaccccggcctgcggggccagcccggcaggaagggcctggatggcatccctggcaccccaggagtgaagggcctgcccggccccaagggggagctggccctgtctggagagaagggggaccagggccccccaggggaccccggcagccctggcagccctggccctgctggccctgctggccccccaggctacggcccccagggcgagcccggcctgcagggcacccagggcgtgcctggggcccctggccccccaggagaggccggccccagaggagagctgtctgtgtccacccctgtgcccggccccccaggccccccaggccccccaggccaccctggcccccagggccccccaggcatccctggcagcctgggcaaatgtggggaccccggcctgcccggcccagatggagagcccggcatccctggcatcggcttccctggccccccaggccccaagggggaccagggcttccctggcaccaagggcagcctgggctgccctgggaagatgggagagcccggcctgcccgggaagccaggcctgcccggggccaagggggagcctgctgtggccatgcctgggggccctggcaccccaggcttccctggagagcggggcaacagcggggagcacggggagatcggcctgcccggcctgcccggcctgcccggcaccccaggaaatgaaggcctggatggccccaggggggaccccggccagcccggccccccaggagagcagggccccccaggccgctgcatcgagggccccaggggggcccagggcctgcccggcctgaatggcctgaagggccagcagggcagaagaggcaagacaggccccaagggggaccccggcatccctggcctggacagaagtggcttccctggagaaacaggcagccctggcatccctggccaccagggcgagatgggccccctgggccagaggggctacccaggcaaccctggcatcctgggccccccaggagaagatggagtgattggcatgatgggcttccctggggccatcggccccccaggccccccaggcaaccctggcaccccaggccagaggggcagccctggcatccctggggtgaagggccagaggggcacccctggggccaagggggagcagggcgacaagggcaaccctggccccagcgagatcagccacgtgattggagacaagggggagcccggcctgaagggctttgctggcaaccctggagagaagggcaacagaggagtgcccggcatgcctggcctgaagggcctgaagggcctgcccggccctgctggccccccaggccccaggggggacctgggcagcacaggcaaccctggagagcccggcctgcggggcatccctggctccatgggcaacatgggcatgcctggcagcaagggcaagaggggcaccctgggcttccctggccgggccggccggcccggcctgcccggcatccacggcctgcagggcgacaagggggagcccggctacagcgagggcacccggcccggccccccaggccccaccggggaccccggcctgcccggggacatgggcaagaagggggagatgggccagcccggccccccaggccacctgggccctgctggccctgagggcgcccctggcagccctggcagccctggcctgcccgggaagccaggcccccacggggacctgggcttcaagggcatcaagggcctgctgggccccccaggcatccggggccccccaggcctgcccggcttccctggcagccctggccccatgggcatccggggggaccagggcagagatggcatccctggccctgctggggagaagggggagaccggcctgctgcgggcccctcctggcccccggggcaaccctggggcccagggcgccaagggggacagaggagcccctggcttccctggcctgcccggcaggaagggggccatgggagatgctggcccccggggccccaccggcatcgagggcttccctggccccccaggcctgcccggggccatcatccctggccagacaggcaacagaggccccccaggcagccggggcagccctggggcccctggccccccaggccccccaggcagccacgtgattggcatcaagggggacaagggctccatgggccaccctggccccaagggccccccaggcacagctggggacatgggccccccaggccgcctgggcgcccctggcaccccaggcctgcccggccccaggggggaccccggcttccagggcttccctggggtgaagggggagaagggcaaccctggcttcctgggcagcatcggccccccaggccccatcggccccaagggccccccaggagtgcggggggaccccggcaccctgaagatcatcagcctgcccggcagccctggccccccaggcaccccaggagagcccggcatgcagggcgagcccggccccccaggccccccaggcaacctgggcccctgtggcccccggggcaagccaggcaaggatggcaagccaggcaccccaggccctgctggggagaagggcaacaagggcagcaagggggagcccggccctgctggcagtgatggcctgcccggcctgaagggcaagagaggagacagcggcagccctgccacctggaccacccggggctttgtgttcaccaggcacagccagaccacagccatccccagctgcccagagggcaccgtgcccctgtacagcggcttctccttcctgtttgtgcagggcaaccagagggcccacggccaggacctgggcaccctgggcagctgcctgcagcgcttcaccaccatgcccttcctgttctgcaatgtgaatgatgtgtgcaactttgccagcagaaatgactacagctactggctgagcaccccagccctgatgcccatgaacatggcccccatcaccggccgggccctggagccctacatcagccgctgcaccgtgtgtgagggccctgccatcgccatcgctgtgcacagccagaccacagacatccccccctgcccccacggctggatcagcctgtggaagggcttctccttcatcatgttcaccagcgctggcagcgagggcaccggccaggccctggccagccctggcagctgcctggaggagttccgggccagccccttcctggagtgccacggccggggcacctgcaactactacagcaacagctacagcttctggctggccagcctgaaccctgagaggatgttcaggaagcccatccccagcacagtgaaggccggggagctggagaagatcatcagccgctgccaggtgtgcatgaagaagaggcactag

SEQ ID NO: 19119 - DNA, 4500 bp, synthetic construct
  misc_feature 1..4500: note = Description of Artificial Sequence: Synthetic coding sequence
  source 1..4500: mol_type = other DNA
atgatggccaactgggccgaggcccggcccctgctgatcctgattgtgctgctgggccagtttgtgtccatcaaggcccaggaggaggatgaagatgagggctatggagaggagatcgcctgcacccagaatggccagatgtacctgaacagagacatctggaagccagccccctgccagatctgtgtgtgtgacaacggggccatcctgtgtgacaagattgagtgccaggatgtgctggactgtgccgaccctgtgaccccacctggagagtgctgccctgtgtgcagccagacccctgggggcggcaacaccaactttggccggggcaggaagggccagaagggggagcccggcctggtgcctgtggtgacaggcatccggggccggcccggccctgctggccccccaggcagccagggccccagaggagagcggggccccaagggccggcccggcccccggggcccccagggcattgatggagagcccggggtgcccggccagcccggggcccctggccccccaggccaccccagccaccctggcccagatggcctgagccggcccttcagcgcccagatggccggcctggatgagaagagcggcctgggcagccaggtgggcctgatgcctggctctgtgggccctgtgggcccccggggcccccagggcctgcagggccagcagggcggggccggccccaccggccccccaggagagcccggggaccccggccccatgggccccatcggcagccggggccctgagggccccccaggcaagccaggagaagatggagagcctggaagaaatggaaatcctggagaggtgggctttgctggcagccctggggcccggggcttccctggggcccctggcctgcccggcctgaagggccaccggggccacaagggcctggagggccccaagggggaggtgggcgcccctggcagcaagggggaggccggccccaccggccccatgggcgccatgggccccctgggcccccggggcatgcctggagagcggggccgcctgggcccccagggcgcccctggccagagaggagcccacggcatgcctgggaagccaggccccatgggccccctgggcatccctggcagcagcggcttccctggcaaccctggcatgaagggggaggccggccccaccggggcccggggccctgagggcccccagggccagagaggagaaacaggccccccaggccctgtgggcagccctggcctgcccggggccatcggcacagatggcacccctggggccaagggccccaccggcagccctggcaccagcggccccccaggcagcgctggccccccaggcagccctggcccccagggcagcacaggcccccagggcatccggggccagcccggggaccccggggtgcccggcttcaagggggaggccggccccaagggggagcccggcccccacggcatccagggccccatcggccccccaggagaggagggcaagaggggccccaggggggaccccggcaccgtgggccccccaggccctgtgggggagcggggggcccctggcaacagaggcttccctggcagtgatggcctgcccggccccaagggggcccagggcgagcggggccctgtgggcagcagcggccccaagggcagccagggcgaccccggccggcctggagagcccggcctgcccggggcccggggcctgactggaaatcctggggtgcagggccctgagggcaagctgggccccctgggcgcccctggagaagatggccggcccggccccccaggcagcatcggcatccggggccagcccggctccatgggcctgcccggccccaagggcagcagcggggaccccgggaagccaggagaggccggaaatgccggcgtgcccggccagagaggagcccctgggaaggatggagaggtgggccccagcggccctgtgggccccccaggcctggccggggagcggggggagcagggccccccaggccccaccggcttccagggcctgcccggccccccaggccccccaggagagggcggcaagccaggggaccagggcgtgcctggggaccctggagctgtgggccccctgggccccagaggagagcggggcaaccctggagagcggggggagcccggcatcaccggcctgcccggggagaagggcatggccggcggccacggcccagatggccccaagggcagccctggccccagcggcacccctggggacaccggccccccaggcctgcagggcatgcctggagagcggggcattgctggcaccccaggccccaagggggaccggggcggcatcggggagaagggagctgagggcacagctggaaatgatggagcccggggcctgcccggccccctgggccccccaggccctgctggccccaccggggagaagggggagcccggcccccggggcctggtgggccccccaggcagccggggcaaccctggcagcagaggagaaaatggccccaccggggctgtgggctttgctggcccccagggcccagatggccagcccggggtgaagggggagcctggagagcccggccagaagggagatgctggcagccctggcccccagggcctggccggcagccctggcccccacggccccaacggggtgcccggcctgaagggcggccggggcacccagggccccccaggggccaccggcttccctggcagcgctggccgggtgggccccccaggccctgctggggcccctggccctgctggccccctgggggagcccgggaaggagggccccccaggcctgcggggggaccccggcagccacggccgggtgggggaccggggccctgctggccccccaggcggccctggggacaagggggaccctggagaagatggccagcccggcccagatggccccccaggccctgctggcaccaccggccagaggggcatcgtgggcatgcctggccagagaggagagcggggcatgcctggcctgcccggccctgctggcacccctgggaaggtgggccccaccggggccactggagacaagggccccccaggccctgtgggccccccaggcagcaatggacctgtgggggagcccggccctgagggccctgctggaaatgatggcaccccaggaagagatggagctgtgggggagcggggggacagaggagaccccggccctgctggcctgcccggcagccagggcgcccctggcaccccaggccctgtgggcgcccctggagatgctggccagagaggagaccccggcagccggggccccatcggccccccaggccgggccggcaagaggggcctgcccggcccccagggccccaggggggacaagggggaccatggagacagaggagaccggggccagaagggccaccggggcttcaccggcctgcagggcctgcccggccccccaggccccaacggggagcagggcagcgctggcatccctggccccttcggcccccggggccccccaggccctgtgggccccagcggcaaggagggcaaccctggccccctgggccccatcggccccccaggagtgcggggctctgtgggggaggccggccctgagggccccccaggagagcccggccccccaggccccccaggccccccaggccacctgacagctgccctgggggacatcatgggccactatgatgagagcatgccagaccccctgcctgagttcacagaggaccaggccgccccagatgacaagaacaagacagaccccggggtgcacgccaccctgaagagcctgagcagccagatcgagaccatgaggagcccagatggcagcaagaagcacccagcccggacctgtgatgacctgaagctgtgccacagcgccaagcagagcggggagtactggattgaccccaaccagggctctgtggaggatgccatcaaggtgtactgcaacatggagaccggggagacctgcatcagcgccaaccccagctctgtgcccaggaagacctggtgggccagcaagagcccagacaacaagcctgtgtggtacggcctggacatgaacagaggcagccagtttgcctacggggaccaccagagccccaacacagccatcacccagatgaccttcctgcggctgctgagcaaggaggccagccagaacatcacctacatctgcaagaacagcgtgggctacatggatgaccaggccaagaacctgaagaaggctgtggtgctgaagggggccaatgacctggacatcaaggccgagggcaacatccgcttccgctacatcgtgctgcaggacacctgcagcaagagaaatggaaatgtgggcaagacagtgtttgagtaccgcacccagaatgtggcccggctgcccatcatcgacctggcccctgtggatgtgggcggcacagaccaggagtttggagtggagatcggccctgtgtgctttgtgtag

SEQ ID NO: 19120 - DNA, 3420 bp, synthetic construct
  misc_feature 1..3420: note = Description of Artificial Sequence: Synthetic coding sequence
  source 1..3420: mol_type = other DNA
ctgcccggccgccgccaccggctgggccccccaggcagccagggccccagaggagagcggggccccaagggccggcccggcccccggggcccccagggcattgatggagagcccggggtgcccggccagcccggggcccctggaggagctggccccactggacctcctggagagcccggggaccccggccccatgggccccatcggcagccggggccctgagggccccccaggcaagccaggagaagatggagagcccggcagaaatggaaatcctggagaggtgggctttgctggcagccctggggcccggggcttccctggggcccctggcctgcccggcctgaagggccaccggggccacaagggcctggagggccccaagggggaggtgggcgcccctggcagcaaaggagaggccggccccaccggccccaggggggaccccggcaccgtgggccccccaggccctgtgggggagcggggggcccctggcaacagaggcttccctggcagtgatggcctgcccggccccaagggggcccagggcgagcggggccctgtgggcagcagcggccccaagggcagccagggcgaccccggccggcctggagagcccggcctgcccggggcccggggcctgactggaaatcctggggtgcagggccctgagggcaagctgggccccctgggcgcccctggagaagatggccggcccggccccccaggcagcatcggcatccggggccagcccggctccatgggcctgcccggccccaagggcagcagcggggaccccgggaagccaggagaggccggaaatgccggcgtgcccggccagagaggagcccctgggaaggatggagaggtgggccccagcggccctgtgggccccccaggcctggccggggagcggggggagcagggccccccaggccccaccggcttccagggcctgcccggccccccaggccccccaggagagggcggcaagccaggggaccagggcgtgcctggggaccctggagctgtgggccccctgggccccagaggagagcggggcaaccctggagagcggggggagcccggcatcaccggcctgcccggggagaagggcatggccggcggccacggcccagatggccccaagggcagccctggccccagcggcacccctggggacaccggccccccaggcctgcagggcatgcctggagagcggggcattgctggcaccccaggccccaagggggaccggggcggcatcggggagaagggagctgagggcacagctggaaatgatggagcccggggcctgcccggccccctgggccccccaggccctgctggccccaccggggagaagggggagcccggcccccggggcctggtgggccccccaggcagccggggcaaccctggcagcagaggagaaaatggccccaccggggctgtgggctttgctggcccccagggcccagatggccagcccggggtgaagggggagcctggagagcccggccagaagggagatgctggcagccctggcccccagggcctggccggcagccctggcccccacggccccaacggggtgcccggcctgaagggcggccggggcacccagggccccccaggggccaccggcttccctggcagcgctggccgggtgggccccccaggccctgctggggcccctggccctgctggccccctgggggagcccgggaaggagggccccccaggcctgcggggggaccccggcagccacggccgggtgggggaccggggccctgctggccccccaggcggccctggggacaagggggaccctggagaagatggccagcccggcccagatggccccccaggccctgctggcaccaccggccagaggggcatcgtgggcatgcctggccagagaggagagcggggcatgcctggcctgcccggccctgctggcacccctgggaaggtgggccccaccggggccactggagacaagggccccccaggccctgtgggccccccaggcagcaatggacctgtgggggagcccggccctgagggccctgctggaaatgatggcaccccaggaagagatggagctgtgggggagcggggggacagaggagaccccggccctgctggcctgcccggcagccagggcgcccctggcaccccaggccctgtgggcgcccctggagatgctggccagagaggagaccccggcagccggggccccatcggccccccaggccgggccggcaagaggggcctgcccggcccccagggccccaggggggacaagggggaccatggagacagaggagaccggggccagaagggccaccggggcttcaccggcctgcagggcctgcccggccccccaggccccaacggggagcagggcagcgctggcatccctggccccttcggcccccggggccccccaggccctgtgggccccagcggcaaggagggcaaccctggccccctgggccccatcggccccccaggagtgcggggctctgtgggggaggccggccctgagggccccccaggagagcccggccccccaggccccccaggccccccaggccacctgacagctgccctgggggacatcatgggccactatgatgagagcatgccagaccccctgcctgagttcacagaggaccaggccgccccagatgacaagaacaagacagaccccggggtgcacgccaccctgaagagcctgagcagccagatcgagaccatgaggagcccagatggcagcaagaagcacccagcccggacctgtgatgacctgaagctgtgccacagcgccaagcagagcggggagtactggattgaccccaaccagggctctgtggaggatgccatcaaggtgtactgcaacatggagaccggggagacctgcatcagcgccaaccccagctctgtgcccaggaagacctggtgggccagcaagagcccagacaacaagcctgtgtggtacggcctggacatgaacagaggcagccagtttgcctacggggaccaccagagccccaacacagccatcacccagatgaccttcctgcggctgctgagcaaggaggccagccagaacatcacctacatctgcaagaacagcgtgggctacatggatgaccaggccaagaacctgaagaaggctgtggtgctgaagggggccaatgacctggacatcaaggccgagggcaacatccgcttccgctacatcgtgctgcaggacacctgcagcaagagaaatggaaatgtgggcaagacagtgtttgagtaccgcacccagaatgtggcccggctgcccatcatcgacctggcccctgtggatgtgggcggcacagaccaggagtttggagtggagatcggccctgtgtgctttgtgtag

SEQ ID NO: 19121 - DNA, 5304 bp, synthetic construct
  misc_feature 1..5304: note = Description of Artificial Sequence: Synthetic coding sequence
  source 1..5304: mol_type = other DNA
atggagccctggagcagccgctggaagaccaagcgctggctgtgggacttcaccgtgaccaccctggccctgaccttcctgttccaggcccgggaggtgcggggggccgcccctgtggatgtgctgaaggccctggacttccacaacagccctgagggcatcagcaagaccaccggcttctgcaccaacaggaagaacagcaagggcagtgacacagcctacagagtgtccaagcaggcccagctgagcgcccccaccaagcagctgtttcctgggggcaccttccctgaggacttcagcatcctcttcaccgtgaagcccaagaagggcatccagagcttcctgctgagcatctacaatgagcacggcatccagcagattggagtggaggtgggccgcagccctgtgttcctgtttgaggaccacacaggcaagccagcccctgaggactaccccctcttcagaacagtgaacattgctgatggcaagtggcaccgggtggccatctctgtggagaagaagacagtgaccatgattgtggactgcaagaagaagaccaccaagcccctggacagaagtgagcgggccatcgtggacaccaacggcatcaccgtgtttggcacccgcatcctggatgaggaggtgtttgaaggagacatccagcagttcctgatcaccggggaccccaaggccgcctatgactactgtgagcactacagcccagactgtgacagcagcgcccccaaggccgcccaggcccaggagccccagattgatgaggccaacatcgtggatgacttccaggagtacaactacggcaccatggagagctaccagacagaggcccccaggcatgtgtctggcaccaatgagcccaaccctgtggaggagatcttcacagaggagtacctgactggagaagattatgacagccagaggaagaacagcgaggacaccctgtatgagaacaaggagattgatggccgggacagcgacctgctggtggatggagacctgggggagtatgacttctatgagtacaaggagtatgaggacaagcccaccagccccccaaatgaggagtttggacctggggtgcctgctgagacagacatcacagagaccagcatcaatggccacggggcctatggagagaagggccagaagggggagcctgctgtggtggagcccggcatgctggtggagggccccccaggccctgctggccctgctggcatcatgggccccccaggcctgcagggccccactggacctcctggggaccccggggaccggggccccccaggccggcccggcctgcctggagcagatggcctgcccggccccccaggcaccatgctgatgctgcccttccgctatggaggagatggcagcaagggccccaccatcagcgcccaggaggcccaggcccaggccatcctgcagcaggcccgcatcgccctgcggggccccccaggccccatgggcctgaccggccggcccggccctgtgggcggccctggcagcagcggggccaagggggagagcggggaccccggcccccagggcccccggggcgtgcagggccccccaggccccaccgggaagccaggcaagaggggccggcctggagcagatggcggccggggcatgcctggagagcccggggccaagggggaccggggctttgatggcctgcccggcctgcccggggacaagggccacagaggagagcggggcccccagggccccccaggccccccaggagatgatggcatgagaggagaagatggagagatcggcccccggggcctgcccggggaggccggcccccggggcctgctgggcccccggggcacccctggggcccctggccagcccggcatggccggcgtggatggccccccaggccccaagggcaacatgggcccccagggcgagcccggccccccaggccagcagggcaaccctggcccccagggcctgcccggcccccagggccccatcggccccccaggagagaagggcccccagggcaagccaggcctggccggcctgcctggagcagatggccccccaggccaccctgggaaggagggccagagcggggagaagggggccctgggccccccaggcccccagggccccatcggctacccaggcccccggggcgtgaagggagcagatggagtgcggggcctgaagggcagcaagggggagaagggagaagatggcttccctggcttcaagggggacatgggcctgaagggggacagaggagaggtgggccagatcggccccagaggagaagatggccctgagggccccaagggccgggccggccccactggagaccccggccccagcggccaggccggggagaagggcaagctgggcgtgcccggcctgcccggctacccaggccggcagggccccaagggcagcacaggcttccctggcttccctggggccaatggagagaagggggcccggggcgtggccggcaagccaggcccccggggccagaggggccccaccggcccccggggcagcagaggagcccggggccccaccgggaagccaggccccaagggcaccagcggaggagatggccccccaggccccccaggagagcggggcccccagggcccccagggccctgtgggcttccctggccccaagggccccccaggccccccaggcaaggatggcctgcccggccaccctggccagagaggagaaacaggcttccagggcaagacaggccccccaggccctgggggcgtggtgggcccccagggccccaccggggagaccggccccatcggggagcggggccaccctggccccccaggccccccaggagagcagggcctgcccggggctgctgggaaggagggcgccaagggggaccccggcccccagggcatcagcggcaaggatggccctgctggcctgcggggcttccctggagagcggggcctgcccggggcccagggcgcccctggcctgaagggcggggagggcccccagggccccccaggccctgtgggcagccctggagagcggggcagcgctggaacagctggccccatcggcctgcccggccggcccggcccccagggccccccaggccctgctggggagaagggggcccctggagagaagggcccccagggccctgctggaagagatggagtgcagggccctgtgggcctgcccggccctgctggccctgctggcagccctggagaagatggagacaagggggagatcggggagcccggccagaagggcagcaaaggagacaagggggagaatggacctcctggccccccaggcctgcagggccctgtgggcgcccctggcattgctggaggagatggagagcccggcccccggggccagcagggcatgtttggccagaagggagatgaaggagcccggggcttccctggccccccaggccccatcggcctgcagggcctgcccggccccccaggagagaagggggagaatggagatgtgggccccatgggccccccaggccccccaggcccccggggcccccagggccccaacggggctgatggcccccagggccccccaggctctgtgggctctgtgggcggcgtgggggagaagggggagcccggggaggccggcaaccctggccccccaggagaggccggcgtgggcggccccaagggggagcggggggagaagggggaggccggccccccaggagctgctggccccccaggggccaagggccccccaggagatgatggccccaagggcaaccctggccctgtgggcttccctggggaccccggccccccaggagagcccggccctgctggccaggatggagtgggcggggacaagggggaggatggagaccccggccagcccggccccccaggccccagcggggaggccggccccccaggccccccaggcaagaggggccccccaggagctgctggagctgagggccggcagggcgagaagggggccaagggggaggccggggctgagggccccccaggcaagacaggccctgtgggcccccagggccctgctgggaagccaggccctgagggcctgcggggcatccctggccctgtgggggagcagggcctgcctggagctgctggccaggacggccccccaggccccatgggccccccaggcctgcccggcctgaagggggaccccggcagcaagggggagaagggccaccctggcctgattggcctcatcggccccccaggagagcagggcgagaagggggaccggggcctgcccggcacccagggcagccctggggccaagggagatggcggcatccctggccctgctggccccctgggccccccaggccccccaggcctgcccggcccccagggccccaagggcaacaagggcagcactggacctgctggccagaagggggacagcggcctgcccggccccccaggcagccctggccccccaggagaggtgatccagcccctgcccatcctgagcagcaagaagacccggcggcacacagagggcatgcaggctgatgctgatgacaacatcctggactacagtgatggcatggaggagatcttcggcagcctgaacagcctgaagcaggacatcgagcacatgaagttccccatgggcacccagaccaacccagcccggacctgcaaggacctgcagctgagccacccagacttcccagatggagagtactggattgaccccaaccagggctgcagcggggacagcttcaaggtgtactgcaacttcaccagcggcggggagacctgcatctacccagacaagaagtctgagggcgtgcgcatcagctcctggcccaaggagaagccaggctcctggttcagcgagttcaagaggggcaagctgctgagctacctggatgtggagggcaacagcatcaacatggtgcagatgaccttcctgaagctgctgacagccagcgcccggcagaacttcacctaccactgccaccagagcgctgcctggtatgatgtgagcagcggcagctatgacaaggccctgcgcttcctgggcagcaatgatgaggagatgtcctatgacaacaaccccttcatcaagaccctgtatgatggctgtgccagcaggaagggctatgagaagacagtgattgagatcaacacccccaagattgaccaggtgcccatcgtggatgtgatgatcaatgactttggagaccagaaccagaagtttggatttgaggtgggccctgtgtgcttcctgggctag

SEQ ID NO: 19122 - DNA, 5457 bp, synthetic construct
  misc_feature 1..5457: note = Description of Artificial Sequence: Synthetic coding sequence
  source 1..5457: mol_type = other DNA
atggagccctggagcagccgctggaagaccaagcgctggctgtgggacttcaccgtgaccaccctggccctgaccttcctgttccaggcccgggaggtgcggggggccgcccctgtggatgtgctgaaggccctggacttccacaacagccctgagggcatcagcaagaccaccggcttctgcaccaacaggaagaacagcaagggcagtgacacagcctacagagtgtccaagcaggcccagctgagcgcccccaccaagcagctgtttcctgggggcaccttccctgaggacttcagcatcctcttcaccgtgaagcccaagaagggcatccagagcttcctgctgagcatctacaatgagcacggcatccagcagattggagtggaggtgggccgcagccctgtgttcctgtttgaggaccacacaggcaagccagcccctgaggactaccccctcttcagaacagtgaacattgctgatggcaagtggcaccgggtggccatctctgtggagaagaagacagtgaccatgattgtggactgcaagaagaagaccaccaagcccctggacagaagtgagcgggccatcgtggacaccaacggcatcaccgtgtttggcacccgcatcctggatgaggaggtgtttgaaggagacatccagcagttcctgatcaccggggaccccaaggccgcctatgactactgtgagcactacagcccagactgtgacagcagcgcccccaaggccgcccaggcccaggagccccagattgatgagaagaagaagagcaacttcaagaagaagatgaggacagtggccaccaagagcaaggagaagagcaagaagttcaccccacccaagtctgagaagttcagcagcaagaagaagaagagctaccaggccagcgccaaggccaagctgggcgtgaaggccaacatcgtggatgacttccaggagtacaactacggcaccatggagagctaccagacagaggcccccaggcatgtgtctggcaccaatgagcccaaccctgtggaggagatcttcacagaggagtacctgaccggggaggactatgacagccagaggaagaacagcgaggacaccctgtatgagaacaaggagattgatggccgggacagcgacctgctggtggatggagacctgggggagtatgacttctatgagtacaaggagtatgaggacaagcccaccagccccccaaatgaggagtttggacctggggtgcctgctgagacagacatcacagagaccagcatcaatggacatggagcctacggggagaagggccagaagggggagcctgctgtggtggagcccggcatgctggtggagggccccccaggccctgctggccctgctggcatcatgggccccccaggcctgcagggccccaccggccccccaggggaccccggggaccggggccccccaggccggcccggcctgcccggggctgatggcctgcccggccccccaggcaccatgctgatgctgcccttccgctatggaggagatggcagcaagggccccaccatcagcgcccaggaggcccaggcccaggccatcctgcagcaggccagaattgccctgcggggccccccaggccccatgggcctgaccggccggcccggccctgtgggcggccctggcagcagcggggccaagggggagagcggggaccccggcccccagggcccccggggcgtgcagggccccccaggccccaccgggaagccaggcaagaggggccggcctggagcagatggcggccggggcatgcctggagagcccggggccaagggggaccggggctttgatggcctgcccggcctgcccggggacaagggccacagaggagagcggggcccccagggccccccaggccccccaggagatgatggcatgagaggagaagatggagaaattggcccccggggcctgcctggagaggccggcccccggggcctgctgggcccccggggcacccctggggcccctggccagcccggcatggccggcgtggatggccccccaggccccaagggcaacatgggcccccagggcgagcccggccccccaggccagcagggcaaccctggcccccagggcctgcccggcccccagggccccatcggccccccaggagagaagggcccccagggcaagccaggcctggccggcctgcccggggctgatggccccccaggccaccctgggaaggagggccagagcggggagaagggggccctgggccccccaggcccccagggccccatcggctacccaggcccccggggcgtgaagggagcagatggagtgcggggcctgaagggcagcaaaggagagaagggggaggatggcttccctggcttcaagggggacatgggcctgaagggggacagaggagaggtgggccagatcggccccagaggagaagatggccctgagggccccaagggccgggccggccccaccggggaccccggccccagcggccaggccggggagaagggcaagctgggcgtgcccggcctgcccggctacccaggccggcagggccccaagggcagcacaggcttccctggcttccctggggccaacggggagaagggggcccggggcgtggccggcaagccaggcccccggggccagaggggccccaccggcccccggggcagcagaggagcccggggccccaccgggaagccaggccccaagggcaccagcggaggagatggccccccaggccccccaggagagcggggcccccagggcccccagggccctgtgggcttccctggccccaagggccccccaggccccccaggcaaggatggcctgcccggccaccctggccagagaggagagaccggcttccagggcaagacaggccccccaggccctggaggagtggtgggcccccagggccccactggagagaccggccccatcggggagcggggccaccctggccccccaggccccccaggagagcagggcctgcctggagctgctgggaaggagggcgccaagggggaccccggcccccagggcatcagcggcaaggatggccctgctggcctgcggggcttccctggagagcggggcctgcccggggcccagggcgcccctggcctgaagggcggggagggcccccagggccccccaggccctgtgggcagccctggagagcggggcagcgctggaacagctggccccatcggcctgcccggccggcccggcccccagggccccccaggccctgctggggagaagggggcccctggagagaagggcccccagggccctgctggaagagatggagtgcagggccctgtgggcctgcccggccctgctggccctgctggcagccctggagaagatggagacaagggggagattggagagcccggccagaagggcagcaagggggacaagggagaaaatggccccccaggccccccaggcctgcagggccctgtgggcgcccctggcattgctggaggagatggagagcccggcccccggggccagcagggcatgtttggccagaagggagatgagggcgcccggggcttccctggccccccaggccccatcggcctgcagggcctgcccggccccccaggagagaagggagaaaatggagatgtgggccccatgggccccccaggccccccaggcccccggggcccccagggccccaatggagcagatggcccccagggccccccaggctctgtgggctctgtgggcggcgtgggggagaagggggagcctggagaggccggcaaccctggccccccaggagaggccggcgtgggcggccccaagggggagcggggggagaagggggaggccggccccccaggagctgctggccccccaggggccaagggccccccaggagatgatggccccaagggcaaccctggccctgtgggcttccctggggaccccggccccccaggagagcccggccctgctggccaggatggagtgggcggggacaagggagaagatggagaccccggccagcccggccccccaggccccagcggggaggccggccccccaggccccccaggcaagaggggccccccaggagctgctggagctgagggccggcagggcgagaagggggccaagggggaggccggggctgagggccccccaggcaagacaggccctgtgggcccccagggccctgctgggaagccaggccctgagggcctgcggggcatccctggccctgtgggggagcagggcctgcccggggctgctggccaggacggccccccaggccccatgggccccccaggcctgcccggcctgaagggggaccccggcagcaaaggagagaagggccaccctggcctcatcggcctgattggccccccaggagagcagggcgagaagggggaccggggcctgcccggcacccagggcagccctggggccaagggagatggcggcatccctggccctgctggccccctgggccccccaggccccccaggcctgcccggcccccagggccccaagggcaacaagggcagcacaggccctgctggccagaagggggacagcggcctgcccggccccccaggcagccctggccccccaggagaggtgatccagcccctgcccatcctgagcagcaagaagaccaggaggcacacagagggcatgcaggctgatgctgatgacaacatcctggactacagtgatggcatggaggagatcttcggcagcctgaacagcctgaagcaggacatcgagcacatgaagttccccatgggcacccagaccaacccagcccggacctgcaaggacctgcagctgagccacccagacttcccagatggagagtactggattgaccccaaccagggctgcagcggggacagcttcaaggtgtactgcaacttcaccagcggcggggagacctgcatctacccagacaagaagtcagaaggagtgcgcatcagctcctggcccaaggagaagccaggctcctggttcagcgagttcaagaggggcaagctgctgagctacctggatgtggagggcaacagcatcaacatggtgcagatgaccttcctgaagctgctgacagccagcgcccggcagaacttcacctaccactgccaccagagcgctgcctggtatgatgtgagcagcggcagctatgacaaggccctgcgcttcctgggcagcaatgatgaggagatgtcctatgacaacaaccccttcatcaagaccctgtatgatggctgtgccagcaggaagggctatgagaagacagtcatcgagatcaacacccccaagattgaccaggtgcccatcgtggatgtgatgatcaatgactttggagaccagaaccagaagtttggatttgaggtgggccctgtgtgcttcctgggctag

SEQ ID NO: 19123 - DNA, 3081 bp, synthetic construct
  misc_feature 1..3081: note = Description of Artificial Sequence: Synthetic coding sequence
  source 1..3081: mol_type = other DNA
atggtgtctgaggtgtcccgggacctgaaggtgaagcgggagaagctggtgaagctggcccaggagggcaagatggccctgaaggaccccaaggtggagcaggcccagctggagacccaggtgctgcaggtgaagcaggagaagcgggagaacctggagttccaggactaccaggacatccaggaggacaaggtgcagaggatcagtgatgtgattggcagcacaggcttccctggcttccctggggccaacggggagaagggggcccggggcgtggccggcaagccaggcccccggggccagaggggccccaccggcccccggggcagcagaggagcccggggccccaccgggaagccaggccccaagggcaccagcggaggagatggccccccaggccccccaggagagcggggcccccagggcccccagggccctgtgggcttccctggccccaagggccccccaggccccccaggcaaggatggcctgcccggccaccctggccagagaggagagaccggcttccagggcaagacaggccccccaggccctggaggagtggtgggcccccagggccccactggagagaccggccccatcggggagcggggccaccctggccccccaggccccccaggagagcagggcctgcctggagctgctgggaaggagggcgccaagggggaccccggcccccagggcatcagcggcaaggatggccctgctggcctgcggggcttccctggagagcggggcctgcccggggcccagggcgcccctggcctgaagggcggggagggcccccagggccccccaggccctgtgggcagccctggagagcggggcagcgctggaacagctggccccatcggcctgcccggccggcccggcccccagggccccccaggccctgctggggagaagggggcccctggagagaagggcccccagggccctgctggaagagatggagtgcagggccctgtgggcctgcccggccctgctggccctgctggcagccctggagaagatggagacaagggggagattggagagcccggccagaagggcagcaagggggacaagggagaaaatggccccccaggccccccaggcctgcagggccctgtgggcgcccctggcattgctggaggagatggagagcccggcccccggggccagcagggcatgtttggccagaagggagatgagggcgcccggggcttccctggccccccaggccccatcggcctgcagggcctgcccggccccccaggagagaagggagaaaatggagatgtgggccccatgggccccccaggccccccaggcccccggggcccccagggccccaatggagcagatggcccccagggccccccaggctctgtgggctctgtgggcggcgtgggggagaagggggagcctggagaggccggcaaccctggccccccaggagaggccggcgtgggcggccccaagggggagcggggggagaagggggaggccggccccccaggagctgctggccccccaggggccaagggccccccaggagatgatggccccaagggcaaccctggccctgtgggcttccctggggaccccggccccccaggagagcccggccctgctggccaggatggagtgggcggggacaagggagaagatggagaccccggccagcccggccccccaggccccagcggggaggccggccccccaggccccccaggcaagaggggccccccaggagctgctggagctgagggccggcagggcgagaagggggccaagggggaggccggggctgagggccccccaggcaagacaggccctgtgggcccccagggccctgctgggaagccaggccctgagggcctgcggggcatccctggccctgtgggggagcagggcctgcccggggctgctggccaggacggccccccaggccccatgggccccccaggcctgcccggcctgaagggggaccccggcagcaaaggagagaagggccaccctggcctcatcggcctgattggccccccaggagagcagggcgagaagggggaccggggcctgcccggcacccagggcagccctggggccaagggagatggcggcatccctggccctgctggccccctgggccccccaggccccccaggcctgcccggcccccagggccccaagggcaacaagggcagcacaggccctgctggccagaagggggacagcggcctgcccggccccccaggcagccctggccccccaggagaggtgatccagcccctgcccatcctgagcagcaagaagaccaggaggcacacagagggcatgcaggctgatgctgatgacaacatcctggactacagtgatggcatggaggagatcttcggcagcctgaacagcctgaagcaggacatcgagcacatgaagttccccatgggcacccagaccaacccagcccggacctgcaaggacctgcagctgagccacccagacttcccagatggagagtactggattgaccccaaccagggctgcagcggggacagcttcaaggtgtactgcaacttcaccagcggcggggagacctgcatctacccagacaagaagtcagaaggagtgcgcatcagctcctggcccaaggagaagccaggctcctggttcagcgagttcaagaggggcaagctgctgagctacctggatgtggagggcaacagcatcaacatggtgcagatgaccttcctgaagctgctgacagccagcgcccggcagaacttcacctaccactgccaccagagcgctgcctggtatgatgtgagcagcggcagctatgacaaggccctgcgcttcctgggcagcaatgatgaggagatgtcctatgacaacaaccccttcatcaagaccctgtatgatggctgtgccagcaggaagggctatgagaagacagtcatcgagatcaacacccccaagattgaccaggtgcccatcgtggatgtgatgatcaatgactttggagaccagaaccagaagtttggatttgaggtgggccctgtgtgcttcctgggctag

SEQ ID NO: 19124 - DNA, 5421 bp, synthetic construct
  misc_feature 1..5421: note = Description of Artificial Sequence: Synthetic coding sequence
  source 1..5421: mol_type = other DNA
atggagccctggagcagccgctggaagaccaagcgctggctgtgggacttcaccgtgaccaccctggccctgaccttcctgttccaggcccgggaggtgcggggggccgcccctgtggatgtgctgaaggccctggacttccacaacagccctgagggcatcagcaagaccaccggcttctgcaccaacaggaagaacagcaagggcagtgacacagcctacagagtgtccaagcaggcccagctgagcgcccccaccaagcagctgtttcctgggggcaccttccctgaggacttcagcatcctcttcaccgtgaagcccaagaagggcatccagagcttcctgctgagcatctacaatgagcacggcatccagcagattggagtggaggtgggccgcagccctgtgttcctgtttgaggaccacacaggcaagccagcccctgaggactaccccctcttcagaacagtgaacattgctgatggcaagtggcaccgggtggccatctctgtggagaagaagacagtgaccatgattgtggactgcaagaagaagaccaccaagcccctggacagaagtgagcgggccatcgtggacaccaacggcatcaccgtgtttggcacccgcatcctggatgaggaggtgtttgaaggagacatccagcagttcctgatcaccggggaccccaaggccgcctatgactactgtgagcactacagcccagactgtgacagcagcgcccccaaggccgcccaggcccaggagccccagattgatgaatatgcccctgaggacatcattgaatatgactatgaatatggagaggccgagtacaaggaggccgagagcgtgacagagggccccaccgtgacagaggagaccatcgcccagacagaggccaacatcgtggatgacttccaggagtacaactacggcaccatggagagctaccagacagaggcccccaggcatgtgtctggcaccaatgagcccaaccctgtggaggagatcttcacagaggagtacctgaccggggaggactatgacagccagaggaagaacagcgaggacaccctgtatgagaacaaggagattgatggccgggacagcgacctgctggtggatggagacctgggggagtatgacttctatgagtacaaggagtatgaggacaagcccaccagccccccaaatgaggagtttggacctggggtgcctgctgagacagacatcacagagaccagcatcaatggacatggagcctacggggagaagggccagaagggggagcctgctgtggtggagcccggcatgctggtggagggccccccaggccctgctggccctgctggcatcatgggccccccaggcctgcagggccccaccggccccccaggggaccccggggaccggggccccccaggccggcccggcctgcccggggctgatggcctgcccggccccccaggcaccatgctgatgctgcccttccgctatggaggagatggcagcaagggccccaccatcagcgcccaggaggcccaggcccaggccatcctgcagcaggccagaattgccctgcggggccccccaggccccatgggcctgaccggccggcccggccctgtgggcggccctggcagcagcggggccaagggggagagcggggaccccggcccccagggcccccggggcgtgcagggccccccaggccccaccgggaagccaggcaagaggggccggcctggagcagatggcggccggggcatgcctggagagcccggggccaagggggaccggggctttgatggcctgcccggcctgcccggggacaagggccacagaggagagcggggcccccagggccccccaggccccccaggagatgatggcatgagaggagaagatggagaaattggcccccggggcctgcctggagaggccggcccccggggcctgctgggcccccggggcacccctggggcccctggccagcccggcatggccggcgtggatggccccccaggccccaagggcaacatgggcccccagggcgagcccggccccccaggccagcagggcaaccctggcccccagggcctgcccggcccccagggccccatcggccccccaggagagaagggcccccagggcaagccaggcctggccggcctgcccggggctgatggccccccaggccaccctgggaaggagggccagagcggggagaagggggccctgggccccccaggcccccagggccccatcggctacccaggcccccggggcgtgaagggagcagatggagtgcggggcctgaagggcagcaaaggagagaagggggaggatggcttccctggcttcaagggggacatgggcctgaagggggacagaggagaggtgggccagatcggccccagaggagaagatggccctgagggccccaagggccgggccggccccaccggggaccccggccccagcggccaggccggggagaagggcaagctgggcgtgcccggcctgcccggctacccaggccggcagggccccaagggcagcacaggcttccctggcttccctggggccaacggggagaagggggcccggggcgtggccggcaagccaggcccccggggccagaggggccccaccggcccccggggcagcagaggagcccggggccccaccgggaagccaggccccaagggcaccagcggaggagatggccccccaggccccccaggagagcggggcccccagggcccccagggccctgtgggcttccctggccccaagggccccccaggccccccaggcaaggatggcctgcccggccaccctggccagagaggagagaccggcttccagggcaagacaggccccccaggccctggaggagtggtgggcccccagggccccactggagagaccggccccatcggggagcggggccaccctggccccccaggccccccaggagagcagggcctgcctggagctgctgggaaggagggcgccaagggggaccccggcccccagggcatcagcggcaaggatggccctgctggcctgcggggcttccctggagagcggggcctgcccggggcccagggcgcccctggcctgaagggcggggagggcccccagggccccccaggccctgtgggcagccctggagagcggggcagcgctggaacagctggccccatcggcctgcccggccggcccggcccccagggccccccaggccctgctggggagaagggggcccctggagagaagggcccccagggccctgctggaagagatggagtgcagggccctgtgggcctgcccggccctgctggccctgctggcagccctggagaagatggagacaagggggagattggagagcccggccagaagggcagcaagggggacaagggagaaaatggccccccaggccccccaggcctgcagggccctgtgggcgcccctggcattgctggaggagatggagagcccggcccccggggccagcagggcatgtttggccagaagggagatgagggcgcccggggcttccctggccccccaggccccatcggcctgcagggcctgcccggccccccaggagagaagggagaaaatggagatgtgggccccatgggccccccaggccccccaggcccccggggcccccagggccccaatggagcagatggcccccagggccccccaggctctgtgggctctgtgggcggcgtgggggagaagggggagcctggagaggccggcaaccctggccccccaggagaggccggcgtgggcggccccaagggggagcggggggagaagggggaggccggccccccaggagctgctggccccccaggggccaagggccccccaggagatgatggccccaagggcaaccctggccctgtgggcttccctggggaccccggccccccaggagagcccggccctgctggccaggatggagtgggcggggacaagggagaagatggagaccccggccagcccggccccccaggccccagcggggaggccggccccccaggccccccaggcaagaggggccccccaggagctgctggagctgagggccggcagggcgagaagggggccaagggggaggccggggctgagggccccccaggcaagacaggccctgtgggcccccagggccctgctgggaagccaggccctgagggcctgcggggcatccctggccctgtgggggagcagggcctgcccggggctgctggccaggacggccccccaggccccatgggccccccaggcctgcccggcctgaagggggaccccggcagcaaaggagagaagggccaccctggcctcatcggcctgattggccccccaggagagcagggcgagaagggggaccggggcctgcccggcacccagggcagccctggggccaagggagatggcggcatccctggccctgctggccccctgggccccccaggccccccaggcctgcccggcccccagggccccaagggcaacaagggcagcacaggccctgctggccagaagggggacagcggcctgcccggccccccaggcagccctggccccccaggagaggtgatccagcccctgcccatcctgagcagcaagaagaccaggaggcacacagagggcatgcaggctgatgctgatgacaacatcctggactacagtgatggcatggaggagatcttcggcagcctgaacagcctgaagcaggacatcgagcacatgaagttccccatgggcacccagaccaacccagcccggacctgcaaggacctgcagctgagccacccagacttcccagatggagagtactggattgaccccaaccagggctgcagcggggacagcttcaaggtgtactgcaacttcaccagcggcggggagacctgcatctacccagacaagaagtcagaaggagtgcgcatcagctcctggcccaaggagaagccaggctcctggttcagcgagttcaagaggggcaagctgctgagctacctggatgtggagggcaacagcatcaacatggtgcagatgaccttcctgaagctgctgacagccagcgcccggcagaacttcacctaccactgccaccagagcgctgcctggtatgatgtgagcagcggcagctatgacaaggccctgcgcttcctgggcagcaatgatgaggagatgtcctatgacaacaaccccttcatcaagaccctgtatgatggctgtgccagcaggaagggctatgagaagacagtcatcgagatcaacacccccaagattgaccaggtgcccatcgtggatgtgatgatcaatgactttggagaccagaaccagaagtttggatttgaggtgggccctgtgtgcttcctgggctag

SEQ ID NO: 19125 - DNA, 5073 bp, synthetic construct
  misc_feature 1..5073: note = Description of Artificial Sequence: Synthetic coding sequence
  source 1..5073: mol_type = other DNA
atggagccctggagcagccgctggaagaccaagcgctggctgtgggacttcaccgtgaccaccctggccctgaccttcctgttccaggcccgggaggtgcggggggccgcccctgtggatgtgctgaaggccctggacttccacaacagccctgagggcatcagcaagaccaccggcttctgcaccaacaggaagaacagcaagggcagtgacacagcctacagagtgtccaagcaggcccagctgagcgcccccaccaagcagctgtttcctgggggcaccttccctgaggacttcagcatcctcttcaccgtgaagcccaagaagggcatccagagcttcctgctgagcatctacaatgagcacggcatccagcagattggagtggaggtgggccgcagccctgtgttcctgtttgaggaccacacaggcaagccagcccctgaggactaccccctcttcagaacagtgaacattgctgatggcaagtggcaccgggtggccatctctgtggagaagaagacagtgaccatgattgtggactgcaagaagaagaccaccaagcccctggacagaagtgagcgggccatcgtggacaccaacggcatcaccgtgtttggcacccgcatcctggatgaggaggtgtttgaaggagacatccagcagttcctgatcaccggggaccccaaggccgcctatgactactgtgagcactacagcccagactgtgacagcagcgcccccaaggccgcccaggcccaggagccccagattgatgaatatgcccctgaggacatcattgaatatgactatgaatatggagaggccgagtacaaggaggccgagagcgtgacagagggccccaccgtgacagaggagaccatcgcccagacagagatcaatggacatggagcctacggggagaagggccagaagggggagcctgctgtggtggagcccggcatgctggtggagggccccccaggccctgctggccctgctggcatcatgggccccccaggcctgcagggccccaccggccccccaggggaccccggggaccggggccccccaggccggcccggcctgcccggggctgatggcctgcccggccccccaggcaccatgctgatgctgcccttccgctatggaggagatggcagcaagggccccaccatcagcgcccaggaggcccaggcccaggccatcctgcagcaggccagaattgccctgcggggccccccaggccccatgggcctgaccggccggcccggccctgtgggcggccctggcagcagcggggccaagggggagagcggggaccccggcccccagggcccccggggcgtgcagggccccccaggccccaccgggaagccaggcaagaggggccggcctggagcagatggcggccggggcatgcctggagagcccggggccaagggggaccggggctttgatggcctgcccggcctgcccggggacaagggccacagaggagagcggggcccccagggccccccaggccccccaggagatgatggcatgagaggagaagatggagaaattggcccccggggcctgcctggagaggccggcccccggggcctgctgggcccccggggcacccctggggcccctggccagcccggcatggccggcgtggatggccccccaggccccaagggcaacatgggcccccagggcgagcccggccccccaggccagcagggcaaccctggcccccagggcctgcccggcccccagggccccatcggccccccaggagagaagggcccccagggcaagccaggcctggccggcctgcccggggctgatggccccccaggccaccctgggaaggagggccagagcggggagaagggggccctgggccccccaggcccccagggccccatcggctacccaggcccccggggcgtgaagggagcagatggagtgcggggcctgaagggcagcaaaggagagaagggggaggatggcttccctggcttcaagggggacatgggcctgaagggggacagaggagaggtgggccagatcggccccagaggagaagatggccctgagggccccaagggccgggccggccccaccggggaccccggccccagcggccaggccggggagaagggcaagctgggcgtgcccggcctgcccggctacccaggccggcagggccccaagggcagcacaggcttccctggcttccctggggccaacggggagaagggggcccggggcgtggccggcaagccaggcccccggggccagaggggccccaccggcccccggggcagcagaggagcccggggccccaccgggaagccaggccccaagggcaccagcggaggagatggccccccaggccccccaggagagcggggcccccagggcccccagggccctgtgggcttccctggccccaagggccccccaggccccccaggcaaggatggcctgcccggccaccctggccagagaggagagaccggcttccagggcaagacaggccccccaggccctggaggagtggtgggcccccagggccccactggagagaccggccccatcggggagcggggccaccctggccccccaggccccccaggagagcagggcctgcctggagctgctgggaaggagggcgccaagggggaccccggcccccagggcatcagcggcaaggatggccctgctggcctgcggggcttccctggagagcggggcctgcccggggcccagggcgcccctggcctgaagggcggggagggcccccagggccccccaggccctgtgggcagccctggagagcggggcagcgctggaacagctggccccatcggcctgcccggccggcccggcccccagggccccccaggccctgctggggagaagggggcccctggagagaagggcccccagggccctgctggaagagatggagtgcagggccctgtgggcctgcccggccctgctggccctgctggcagccctggagaagatggagacaagggggagattggagagcccggccagaagggcagcaagggggacaagggagaaaatggccccccaggccccccaggcctgcagggccctgtgggcgcccctggcattgctggaggagatggagagcccggcccccggggccagcagggcatgtttggccagaagggagatgagggcgcccggggcttccctggccccccaggccccatcggcctgcagggcctgcccggccccccaggagagaagggagaaaatggagatgtgggccccatgggccccccaggccccccaggcccccggggcccccagggccccaatggagcagatggcccccagggccccccaggctctgtgggctctgtgggcggcgtgggggagaagggggagcctggagaggccggcaaccctggccccccaggagaggccggcgtgggcggccccaagggggagcggggggagaagggggaggccggccccccaggagctgctggccccccaggggccaagggccccccaggagatgatggccccaagggcaaccctggccctgtgggcttccctggggaccccggccccccaggagagcccggccctgctggccaggatggagtgggcggggacaagggagaagatggagaccccggccagcccggccccccaggccccagcggggaggccggccccccaggccccccaggcaagaggggccccccaggagctgctggagctgagggccggcagggcgagaagggggccaagggggaggccggggctgagggccccccaggcaagacaggccctgtgggcccccagggccctgctgggaagccaggccctgagggcctgcggggcatccctggccctgtgggggagcagggcctgcccggggctgctggccaggacggccccccaggccccatgggccccccaggcctgcccggcctgaagggggaccccggcagcaaaggagagaagggccaccctggcctcatcggcctgattggccccccaggagagcagggcgagaagggggaccggggcctgcccggcacccagggcagccctggggccaagggagatggcggcatccctggccctgctggccccctgggccccccaggccccccaggcctgcccggcccccagggccccaagggcaacaagggcagcacaggccctgctggccagaagggggacagcggcctgcccggccccccaggcagccctggccccccaggagaggtgatccagcccctgcccatcctgagcagcaagaagaccaggaggcacacagagggcatgcaggctgatgctgatgacaacatcctggactacagtgatggcatggaggagatcttcggcagcctgaacagcctgaagcaggacatcgagcacatgaagttccccatgggcacccagaccaacccagcccggacctgcaaggacctgcagctgagccacccagacttcccagatggagagtactggattgaccccaaccagggctgcagcggggacagcttcaaggtgtactgcaacttcaccagcggcggggagacctgcatctacccagacaagaagtcagaaggagtgcgcatcagctcctggcccaaggagaagccaggctcctggttcagcgagttcaagaggggcaagctgctgagctacctggatgtggagggcaacagcatcaacatggtgcagatgaccttcctgaagctgctgacagccagcgcccggcagaacttcacctaccactgccaccagagcgctgcctggtatgatgtgagcagcggcagctatgacaaggccctgcgcttcctgggcagcaatgatgaggagatgtcctatgacaacaaccccttcatcaagaccctgtatgatggctgtgccagcaggaagggctatgagaagacagtcatcgagatcaacacccccaagattgaccaggtgcccatcgtggatgtgatgatcaatgactttggagaccagaaccagaagtttggatttgaggtgggccctgtgtgcttcctgggctag

SEQ ID NO: 19126 - DNA, 4560 bp, synthetic construct
  misc_feature 1..4560: note = Description of Artificial Sequence: Synthetic coding sequence
  source 1..4560: mol_type = other DNA
atggccccctacccctgtggctgccacatcctgctgctgctcttctgctgcctggccgccgcccgggccaacctgctgaacctgaactggctgtggttcaacaatgaagacaccagccatgctgccaccaccatccctgagccccagggccccctgcctgtgcagcccacagctgacaccaccacccacgtgaccccaagaaatggcagcacagagcccgccacagcccctggcagccctgagccccccagcgagctgctggaggatggccaggacacccccaccagcgctgagagcccagatgccccagaagaaaatattgctggggtgggcgctgagatcctgaatgtggccaagggcatccgcagctttgtgcagctgtggaatgacacagtgcccacagagagcctggcccgggcagagaccctggtgctggagacccctgtgggccccctggccctggccggccccagcagcaccccccaggagaatggcaccaccctgtggcccagccggggcatccccagcagccctggggcccacaccacagaagctggcaccctgcctgcccccacccccagcccccccagcctgggccggccctgggcccccctgaccggccccagcgtgcccccacccagcagcgagcgcatcagcgaggaggtgggcctgctgcagctgctgggggaccccccaccccagcaggtgacccagacagatgatcctgatgtgggcctggcctacgtgtttggaccagatgccaacagcggccaggtggcccgctaccacttccccagcctcttcttccgggacttcagcctgctcttccacatccggcctgccacagagggccctggggtgctgtttgccatcacagacagcgcccaggccatggtgctgctgggcgtgaagctgagcggcgtgcaggacggccaccaggacatcagcctgctgtacacagagcccggggccggccagacccacacagctgccagcttccggctgcctgcctttgtgggccagtggacccacctggccctgtctgtggccggcggctttgtggccctgtatgtggactgtgaggagttccagaggatgcccctggcccggagcagccggggcctggagctggagcctggagctggcctgtttgtggcccaggccggcggcgctgaccctgacaagttccagggcgtgattgctgagctgaaggtgcggcgggacccccaggtgagccccatgcactgcctggatgaggagggagatgacagtgatggagccagcggggacagcggcagcggcctgggagatgcccgggagctgctgcgggaggagaccggggccgccctgaagccccggctgcctgcccctcctcctgtgaccaccccacccctggccggcggcagcagcacagaggacagccgctctgaggaggtggaggagcagaccaccgtggccagcctgggcgcccagaccctgcccggcagtgacagcgtgtccacctgggatggctctgtgaggaccccaggcggccgggtgaaggagggcggcctgaagggccagaagggggagcccggggtgcccggccccccaggccgggccggccccccaggcagcccctgcctgcccggccccccaggcctgccctgccctgtgagccccctgggccctgctggccctgccctgcagacagtgcccggcccccagggccccccaggccccccaggaagagatggcaccccaggaagagatggagagcccggggaccccggggaggatggcaagccaggggacaccggcccccagggcttccctggcaccccaggagatgtgggccccaagggggacaagggggaccccggggtgggggagcggggccccccaggcccccagggccccccaggccccccaggccccagcttcagacatgacaagctgaccttcatcgacatggagggcagcggctttggaggagacctggaggccctgcggggcccccggggcttccctggccccccaggccccccaggagtgcccggcctgcccggggagcccggccgcttcggcgtgaacagcagtgatgtgcccggccctgctggcctgcccggggtgcccggccgggagggccccccaggcttccctggcctgcccggccccccaggccccccaggccgggagggccccccaggccgcacaggccagaagggcagcctgggggaggccggggcccctggccacaagggcagcaagggggcccctggccctgctggggcccggggggagagcggcctggccggggcccctggccctgctggccccccaggccccccaggccccccaggccccccaggccctggcctgcctgctggctttgatgacatggagggcagcggcggccccttctggagcacagcccggtctgcagatggcccccagggccccccaggcctgcccggcctgaagggggaccccggggtgcccggcctgcccggggccaagggggaggtgggcgcagatggagtgcccggcttccctggcctgcccggccgggagggcattgctggcccccagggccccaagggggaccggggcagcagaggagagaagggggaccccgggaaggatggagtgggccagcccggcctgcccggccccccaggccccccaggccctgtggtgtatgtgtctgagcaggacggctctgtgctgtctgtgcccggccctgagggccggcccggctttgctggcttccctggccctgctggccccaagggcaacctgggcagcaagggggagcggggcagccctggccccaagggggagaagggggagcccggcagcatcttctccccagatggaggagccctgggccctgcccagaagggggccaagggggagcccggcttccggggccccccaggcccctacggccggcccggctacaagggggagatcggcttccctggccggcccggccggcccggcatgaatggcctgaagggggagaagggggagcctggagatgccagcctgggcttcggcatgaggggcatgcctggccccccaggccccccaggccccccaggccccccaggcacccctgtgtatgacagcaatgtgtttgctgagagcagcaggcctggccccccaggcctgcccggcaaccagggccccccaggccccaagggggccaagggggaggtgggccccccaggccccccaggccagttcccctttgacttcctgcagctggaggccgagatgaagggggagaagggggacagaggagatgctggccagaagggggagcggggggagcccggcggcggcggcttcttcggcagcagcctgcccggccccccaggccccccaggccccccaggcccccggggctacccaggcatccctggccccaagggggagagcatccggggccagcccggccccccaggcccccagggccccccaggcatcggctatgagggccggcagggccccccaggccccccaggccccccaggccccccatccttccctggcccccaccggcagaccatctctgtgcccggccccccaggccccccaggccccccaggccccccaggcaccatgggcgccagcagcggcgtgcggctgtgggccacccggcaggccatgctgggccaggtgcatgaggtgcctgagggctggctgatctttgtggccgagcaggaggagctgtatgtgcgggtgcagaatggcttcaggaaggtgcagctggaggcccggacccccctgccccggggcacagacaatgaggtggccgccctgcagccccctgtggtgcagctgcatgacagcaacccctacccccggcgggagcacccccaccccacagcccggccctggagggcagatgacatcctggccagccccccccggctgcctgagccccagccctacccaggggccccccaccacagcagctatgtgcacctgcggcctgcccggcccaccagccccccagcccacagccaccgggacttccagcctgtgctgcacctggtggccctgaacagccccctgagcggcggcatgaggggcatcagaggagctgacttccagtgcttccagcaggcccgggctgtgggcctggccggcaccttccgggccttcctgagcagccggctgcaggacctgtacagcatcgtgcggcgggctgacagagctgctgtgcccatcgtgaacctgaaggatgagctgctcttccccagctgggaggccctcttcagcggcagcgagggccccctgaagccaggggcccgcatcttctcctttgatggcaaggatgtgctgcggcaccccacctggccccagaagtctgtgtggcacggcagtgaccccaacggccggcggctgacagagagctactgtgagacctggaggacagaggcccccagcgccaccggccaggccagcagcctgctgggcggccgcctgctgggccagagcgctgccagctgccaccacgcctacatcgtgctgtgcattgaaaattccttcatgacagccagcaagtag

SEQ ID NO: 19127 - DNA, 5265 bp, synthetic construct
  misc_feature 1..5265: note = Description of Artificial Sequence: Synthetic coding sequence
  source 1..5265: mol_type = other DNA
atggccccctacccctgtggctgccacatcctgctgctgctcttctgctgcctggccgccgcccgggccaacctgctgaacctgaactggctgtggttcaacaatgaagacaccagccatgctgccaccaccatccctgagccccagggccccctgcctgtgcagcccacagctgacaccaccacccacgtgaccccaagaaatggcagcacagagcccgccacagcccctggcagccctgagccccccagcgagctgctggaggatggccaggacacccccaccagcgctgagagcccagatgccccagaagaaaatattgctggggtgggcgctgagatcctgaatgtggccaagggcatccgcagctttgtgcagctgtggaatgacacagtgcccacagagagcctggcccgggcagagaccctggtgctggagacccctgtgggccccctggccctggccggccccagcagcaccccccaggagaatggcaccaccctgtggcccagccggggcatccccagcagccctggggcccacaccacagaagctggcaccctgcctgcccccacccccagcccccccagcctgggccggccctgggcccccctgaccggccccagcgtgcccccacccagcagcggccgggccagcctgagcagcctgctgggcggggccccaccctggggcagcctgcaggaccctgacagccagggcctgagccctgctgctgctgcccccagccagcagctgcagaggccagatgtgcggctgcggacccccctgctgcaccccctggtgatgggcagcctgggcaagcacgccgcccccagcgccttcagcagcggcctgcccggggccctgagccaggtggccgtgaccaccctgacccgggacagcggggcctgggtgagccacgtggccaacagcgtgggccctggcctggccaacaacagcgccctgctgggcgctgaccctgaggccccagctggccgctgcctgcccctgccccccagcctgcctgtgtgtggccacctgggcatcagccgcttctggctgcccaaccacctgcaccacgagagcggggagcaggtgcgggccggggcccgggcctggggcggcctgctgcagacccactgccaccccttcctggcctggttcttctgcctgctgctggtgcccccctgtggctctgtgcccccaccagcccccccaccctgctgccagttctgtgaggccctgcaggatgcctgctggagccggctgggcggcggccgcctgcctgtggcctgtgccagcctgcccacccaggaggatggctactgtgtgctgattggccctgctgctgagcgcatcagcgaggaggtgggcctgctgcagctgctgggggaccccccaccccagcaggtgacccagacagatgatcctgatgtgggcctggcctacgtgtttggaccagatgccaacagcggccaggtggcccgctaccacttccccagcctcttcttccgggacttcagcctgctcttccacatccggcctgccacagagggccctggggtgctgtttgccatcacagattctgcccaggccatggtgctgctgggcgtgaagctgtctggagtgcaggacggccaccaggacatcagcctgctgtacacagagcctggagctggccagacccacacagctgccagcttccggctgcctgcctttgtgggccagtggacccacctggccctgtctgtggccggcggctttgtggccctgtatgtggactgtgaggagttccagaggatgcccctggcccggagcagccggggcctggagctggagcccggggccggcctgtttgtggcccaggccggcggcgctgaccctgacaagttccagggcgtgattgctgagctgaaggtgagaagagacccccaggtgagccccatgcactgcctggatgaggagggagatgacagtgatggagccagcggggacagcggcagcggcctgggagatgcccgggagctgctgcgggaggagactggagctgccctgaagccccggctgcctgcccctcctcctgtgaccaccccacccctggccggcggcagcagcacagaggacagccgctctgaggaggtggaggagcagaccaccgtggccagcctgggcgcccagaccctgcccggcagtgacagcgtgtccacctgggatggctctgtgaggacccctgggggccgggtgaaggagggcggcctgaagggccagaagggggagcccggggtgcccggccccccaggccgggccggccccccaggcagcccctgcctgcccggccccccaggcctgccctgccctgtgagccccctgggccctgctggccctgccctgcagacagtgcccggcccccagggccccccaggccccccaggaagagatggcaccccaggaagagatggagagcccggggaccctggagaagatggcaagccaggggacaccggcccccagggcttccctggcaccccaggagatgtgggccccaagggggacaagggggaccccggggtgggggagcggggccccccaggcccccagggccccccaggccccccaggccccagcttcagacatgacaagctgaccttcatcgacatggagggcagcggctttggaggagacctggaggccctgcggggcccccggggcttccctggccccccaggccccccaggagtgcccggcctgcctggagagcccggccgctttggagtgaacagcagtgatgtgcccggccctgctggcctgcccggggtgcccggccgggagggccccccaggcttccctggcctgcccggccccccaggccccccaggccgggagggccccccaggccgcacaggccagaagggcagcctgggggaggccggggcccctggccacaagggcagcaaaggagcccctggccctgctggggcccggggggagagcggcctggccggggcccctggccctgctggccccccaggccccccaggccccccaggccccccaggccctggcctgcctgctggctttgatgacatggagggcagcggcggccccttctggagcacagcccggtctgcagatggcccccagggccccccaggcctgcccggcctgaagggggaccccggggtgcccggcctgcccggggccaagggggaggtgggcgcagatggagtgcccggcttccctggcctgcccggccgggagggcattgctggcccccagggccccaagggggaccggggcagcagaggagagaagggggaccccgggaaggatggagtgggccagcccggcctgcccggccccccaggccccccaggccctgtggtgtatgtgtctgagcaggacggctctgtgctgtctgtgcccggccctgagggccggcccggctttgctggcttccctggccctgctggccccaagggcaacctgggcagcaaaggagagcggggcagccctggccccaagggggagaagggggagcccggcagcatcttctccccagatggaggagccctgggccctgcccagaagggggccaagggggagcccggcttccggggccccccaggcccctacggccggcccggctacaagggggagatcggcttccctggccggcccggccggcccggcatgaatggcctgaagggggagaagggggagcctggagatgccagcctgggcttcggcatgaggggcatgcctggccccccaggccccccaggccccccaggccccccaggcacccctgtgtatgacagcaatgtgtttgctgagagcagccggcccggccccccaggcctgcccggcaaccagggccccccaggccccaagggggccaagggggaggtgggccccccaggccccccaggccagttcccctttgacttcctgcagctggaggccgagatgaagggggagaagggggacagaggagatgctggccagaagggggagcggggggagcccggcggcggcggcttcttcggcagcagcctgcccggccccccaggccccccaggccccccaggcccccggggctacccaggcatccctggccccaagggggagagcatccggggccagcccggccccccaggcccccagggccccccaggcatcggctatgagggccggcagggccccccaggccccccaggccccccaggcccccccagcttccctggcccccaccggcagaccatctctgtgcccggccccccaggccccccaggccccccaggccccccaggcaccatgggcgccagcagtggagtgcggctgtgggccacccggcaggccatgctgggccaggtgcatgaggtgcctgagggctggctgatctttgtggccgagcaggaggagctgtatgtgcgggtgcagaatggcttcaggaaggtgcagctggaggcccggacccccctgccccggggcacagacaatgaggtggccgccctgcagccccctgtggtgcagctgcatgacagcaacccctacccccggcgggagcacccccaccccacagcccggccctggagggcagatgacatcctggccagccccccccggctgcctgagccccagccctacccaggggccccccaccacagcagctatgtgcacctgcggcctgcccggcccaccagccccccagcccacagccaccgggacttccagcctgtgctgcacctggtggccctgaacagccccctgagcggcggcatgaggggcatcagaggagctgacttccagtgcttccagcaggcccgggctgtgggcctggccggcaccttccgggccttcctgagcagccggctgcaggacctgtacagcatcgtgagaagagctgacagagctgctgtgcccatcgtgaacctgaaggatgagctgctcttccccagctgggaggccctcttcagcggcagcgagggccccctgaagccaggggcccgcatcttctcctttgatggcaaggatgtgctgcggcaccccacctggccccagaagtctgtgtggcacggcagtgaccccaatggaagaaggctgacagagagctactgtgagacctggaggacagaggcccccagcgccaccggccaggccagcagcctgctgggcggccgcctgctgggccagagcgctgccagctgccaccacgcctacatcgtgctgtgcatcgagaacagcttcatgacagccagcaagtag

SEQ ID NO: 19128 - DNA, 4020 bp, synthetic construct
  misc_feature 1..4020: note = Description of Artificial Sequence: Synthetic coding sequence
  source 1..4020: mol_type = other DNA
atggccccccgctgcccctggccctggcccaggagaagaaggctgctggatgtgctggcccccctggtgctgctgctgggcgtgcgggccgccagcgctgagcctgagcgcatcagcgaggaggtgggcctgctgcagctgctgggggaccccccaccccagcaggtgacccagacagatgatcctgatgtgggcctggcctacgtgtttggaccagatgccaacagcggccaggtggcccgctaccacttccccagcctcttcttccgggacttcagcctgctcttccacatccggcctgccacagagggccctggggtgctgtttgccatcacagacagcgcccaggccatggtgctgctgggcgtgaagctgagcggcgtgcaggacggccaccaggacatcagcctgctgtacacagagcccggggccggccagacccacacagctgccagcttccggctgcctgcctttgtgggccagtggacccacctggccctgtctgtggccggcggctttgtggccctgtatgtggactgtgaggagttccagaggatgcccctggcccggagcagccggggcctggagctggagcctggagctggcctgtttgtggcccaggccggcggcgctgaccctgacaagttccagggcgtgattgctgagctgaaggtgcggcgggacccccaggtgagccccatgcactgcctggatgaggagggagatgacagtgatggagccagcggggacagcggcagcggcctgggagatgcccgggagctgctgcgggaggagaccggggccgccctgaagccccggctgcctgcccctcctcctgtgaccaccccacccctggccggcggcagcagcacagaggacagccgctctgaggaggtggaggagcagaccaccgtggccagcctgggcgcccagaccctgcccggcagtgacagcgtgtccacctgggatggctctgtgaggaccccaggcggccgggtgaaggagggcggcctgaagggccagaagggggagcccggggtgcccggccccccaggccgggccggccccccaggcagcccctgcctgcccggccccccaggcctgccctgccctgtgagccccctgggccctgctggccctgccctgcagacagtgcccggcccccagggccccccaggccccccaggaagagatggcaccccaggaagagatggagagcccggggaccccggggaggatggcaagccaggggacaccggcccccagggcttccctggcaccccaggagatgtgggccccaagggggacaagggggaccccggggtgggggagcggggccccccaggcccccagggccccccaggccccccaggccccagcttcagacatgacaagctgaccttcatcgacatggagggcagcggctttggaggagacctggaggccctgcggggcccccggggcttccctggccccccaggccccccaggagtgcccggcctgcccggggagcccggccgcttcggcgtgaacagcagtgatgtgcccggccctgctggcctgcccggggtgcccggccgggagggccccccaggcttccctggcctgcccggccccccaggccccccaggccgggagggccccccaggccgcacaggccagaagggcagcctgggggaggccggggcccctggccacaagggcagcaagggggcccctggccctgctggggcccggggggagagcggcctggccggggcccctggccctgctggccccccaggccccccaggccccccaggccccccaggccctggcctgcctgctggctttgatgacatggagggcagcggcggccccttctggagcacagcccggtctgcagatggcccccagggccccccaggcctgcccggcctgaagggggaccccggggtgcccggcctgcccggggccaagggggaggtgggcgcagatggagtgcccggcttccctggcctgcccggccgggagggcattgctggcccccagggccccaagggggaccggggcagcagaggagagaagggggaccccgggaaggatggagtgggccagcccggcctgcccggccccccaggccccccaggccctgtggtgtatgtgtctgagcaggacggctctgtgctgtctgtgcccggccctgagggccggcccggctttgctggcttccctggccctgctggccccaagggcaacctgggcagcaagggggagcggggcagccctggccccaagggggagaagggggagcccggcagcatcttctccccagatggaggagccctgggccctgcccagaagggggccaagggggagcccggcttccggggccccccaggcccctacggccggcccggctacaagggggagatcggcttccctggccggcccggccggcccggcatgaatggcctgaagggggagaagggggagcctggagatgccagcctgggcttcggcatgaggggcatgcctggccccccaggccccccaggccccccaggccccccaggcacccctgtgtatgacagcaatgtgtttgctgagagcagcaggcctggccccccaggcctgcccggcaaccagggccccccaggccccaagggggccaagggggaggtgggccccccaggccccccaggccagttcccctttgacttcctgcagctggaggccgagatgaagggggagaagggggacagaggagatgctggccagaagggggagcggggggagcccggcggcggcggcttcttcggcagcagcctgcccggccccccaggccccccaggccccccaggcccccggggctacccaggcatccctggccccaagggggagagcatccggggccagcccggccccccaggcccccagggccccccaggcatcggctatgagggccggcagggccccccaggccccccaggccccccaggccccccatccttccctggcccccaccggcagaccatctctgtgcccggccccccaggccccccaggccccccaggccccccaggcaccatgggcgccagcagcggcgtgcggctgtgggccacccggcaggccatgctgggccaggtgcatgaggtgcctgagggctggctgatctttgtggccgagcaggaggagctgtatgtgcgggtgcagaatggcttcaggaaggtgcagctggaggcccggacccccctgccccggggcacagacaatgaggtggccgccctgcagccccctgtggtgcagctgcatgacagcaacccctacccccggcgggagcacccccaccccacagcccggccctggagggcagatgacatcctggccagccccccccggctgcctgagccccagccctacccaggggccccccaccacagcagctatgtgcacctgcggcctgcccggcccaccagccccccagcccacagccaccgggacttccagcctgtgctgcacctggtggccctgaacagccccctgagcggcggcatgaggggcatcagaggagctgacttccagtgcttccagcaggcccgggctgtgggcctggccggcaccttccgggccttcctgagcagccggctgcaggacctgtacagcatcgtgcggcgggctgacagagctgctgtgcccatcgtgaacctgaaggatgagctgctcttccccagctgggaggccctcttcagcggcagcgagggccccctgaagccaggggcccgcatcttctcctttgatggcaaggatgtgctgcggcaccccacctggccccagaagtctgtgtggcacggcagtgaccccaacggccggcggctgacagagagctactgtgagacctggaggacagaggcccccagcgccaccggccaggccagcagcctgctgggcggccgcctgctgggccagagcgctgccagctgccaccacgcctacatcgtgctgtgcattgaaaattccttcatgacagccagcaagtag

SEQ ID NO: 19129 - DNA, 4020 bp, synthetic construct
  misc_feature 1..4020: note = Description of Artificial Sequence: Synthetic coding sequence
  source 1..4020: mol_type = other DNA
atggccccccgctgcccctggccctggcccaggagaagaaggctgctggatgtgctggcccccctggtgctgctgctgggcgtgcgggccgccagcgctgagcctgagcgcatcagcgaggaggtgggcctgctgcagctgctgggggaccccccaccccagcaggtgacccagacagatgatcctgatgtgggcctggcctacgtgtttggaccagatgccaacagcggccaggtggcccgctaccacttccccagcctcttcttccgggacttcagcctgctcttccacatccggcctgccacagagggccctggggtgctgtttgccatcacagacagcgcccaggccatggtgctgctgggcgtgaagctgagcggcgtgcaggacggccaccaggacatcagcctgctgtacacagagcccggggccggccagacccacacagctgccagcttccggctgcctgcctttgtgggccagtggacccacctggccctgtctgtggccggcggctttgtggccctgtatgtggactgtgaggagttccagaggatgcccctggcccggagcagccggggcctggagctggagcctggagctggcctgtttgtggcccaggccggcggcgctgaccctgacaagttccagggcgtgattgctgagctgaaggtgcggcgggacccccaggtgagccccatgcactgcctggatgaggagggagatgacagtgatggagccagcggggacagcggcagcggcctgggagatgcccgggagctgctgcgggaggagaccggggccgccctgaagccccggctgcctgcccctcctcctgtgaccaccccacccctggccggcggcagcagcacagaggacagccgctctgaggaggtggaggagcagaccaccgtggccagcctgggcgcccagaccctgcccggcagtgacagcgtgtccacctgggatggctctgtgaggaccccaggcggccgggtgaaggagggcggcctgaagggccagaagggggagcccggggtgcccggccccccaggccgggccggccccccaggcagcccctgcctgcccggccccccaggcctgccctgccctgtgagccccctgggccctgctggccctgccctgcagacagtgcccggcccccagggccccccaggccccccaggaagagatggcaccccaggaagagatggagagcctgtgagcccccacgtgccccccagccctggggacaccggcccccagggcttccctggcaccccaggagatgtgggccccaagggggacaagggggaccccggggtgggggagcggggccccccaggcccccagggccccccaggccccccaggccccagcttcagacatgacaagctgaccttcatcgacatggagggcagcggctttggaggagacctggaggccctgcggggcccccggggcttccctggccccccaggccccccaggagtgcccggcctgcccggggagcccggccgcttcggcgtgaacagcagtgatgtgcccggccctgctggcctgcccggggtgcccggccgggagggccccccaggcttccctggcctgcccggccccccaggccccccaggccgggagggccccccaggccgcacaggccagaagggcagcctgcagggcgctggggcccctggggtgcagggcagcaagggggcccctggccctgctggggcccggggggagagcggcctggccggggcccctggccctgctggccccccaggccccccaggccccccaggccccccaggccctggcctgcctgctggctttgatgacatggagggcagcggcggccccttctggagcacagcccggtctgcagatggcccccaggagcccccagccctgcacggcatcggcggggaccccggggtgcccggcctgcccggggccaagggggaggtgggcgcagatggagtgcccggcttccctggcctgcccggccgggagggcattgctggcccccagggccccaagggggaccggggcagcagaggagagaagggggaccccgggaaggatggagtgggccagcccggcctgcccggccccccaggccccccaggccctgtggtgtatgtgtctgagcaggacggctctgtgctgtctgtgcccggccctgagggccggcccggctttgctggcttccctggccctgctggccccaagggcaacctgggcagcaagggggagcggggcagccctggccccaagggggagaagggggagcccggcagcatcttctccccagatggaggagccctgggccctgcccagaagggggccaagggggagcccggcttccggggccccccaggcccctacggccggcccggctacaagggggagatcggcttccctggccggcccggccggcccggcatgaatggcctgaagggggagaagggggagcctggagatgccagcctgggcttcggcatgaggggcatgcctggccccccaggccccccaggccccccaggccccccaggcacccctgtgtatgacagcaatgtgtttgctgagagcagcaggcctggccccccaggcctgcccggcaaccagggccccccaggccccaagggggccaagggggaggtgggccccccaggccccccaggccagttcccctttgacttcctgcagctggaggccgagatgaagggggagaagggggacagaggagatgctggccagaagggggagcggggggagcccggcggcggcggcttcttcggcagcagcctgcccggccccccaggccccccaggccccccaggcccccggggctacccaggcatccctggccccaagggggagagcatccggggccagcccggccccccaggcccccagggccccccaggcatcggctatgagggccggcagggccccccaggccccccaggccccccaggccccccatccttccctggcccccaccggcagaccatctctgtgcccggccccccaggccccccaggccccccaggccccccaggcaccatgggcgccagcagcggcgtgcggctgtgggccacccggcaggccatgctgggccaggtgcatgaggtgcctgagggctggctgatctttgtggccgagcaggaggagctgtatgtgcgggtgcagaatggcttcaggaaggtgcagctggaggcccggacccccctgccccggggcacagacaatgaggtggccgccctgcagccccctgtggtgcagctgcatgacagcaacccctacccccggcgggagcacccccaccccacagcccggccctggagggcagatgacatcctggccagccccccccggctgcctgagccccagccctacccaggggccccccaccacagcagctatgtgcacctgcggcctgcccggcccaccagccccccagcccacagccaccgggacttccagcctgtgctgcacctggtggccctgaacagccccctgagcggcggcatgaggggcatcagaggagctgacttccagtgcttccagcaggcccgggctgtgggcctggccggcaccttccgggccttcctgagcagccggctgcaggacctgtacagcatcgtgcggcgggctgacagagctgctgtgcccatcgtgaacctgaaggatgagctgctcttccccagctgggaggccctcttcagcggcagcgagggccccctgaagccaggggcccgcatcttctcctttgatggcaaggatgtgctgcggcaccccacctggccccagaagtctgtgtggcacggcagtgaccccaacggccggcggctgacagagagctactgtgagacctggaggacagaggcccccagcgccaccggccaggccagcagcctgctgggcggccgcctgctgggccagagcgctgccagctgccaccacgcctacatcgtgctgtgcattgaaaattccttcatgacagccagcaagtag

SEQ ID NO: 19130 - DNA, 5265 bp, synthetic construct
  misc_feature 1..5265: note = Description of Artificial Sequence: Synthetic coding sequence
  source 1..5265: mol_type = other DNA
atggccccctacccctgtggctgccacatcctgctgctgctcttctgctgcctggccgccgcccgggccaacctgctgaacctgaactggctgtggttcaacaatgaagacaccagccatgctgccaccaccatccctgagccccagggccccctgcctgtgcagcccacagctgacaccaccacccacgtgaccccaagaaatggcagcacagagcccgccacagcccctggcagccctgagccccccagcgagctgctggaggatggccaggacacccccaccagcgctgagagcccagatgccccagaagaaaatattgctggggtgggcgctgagatcctgaatgtggccaagggcatccgcagctttgtgcagctgtggaatgacacagtgcccacagagagcctggcccgggcagagaccctggtgctggagacccctgtgggccccctggccctggccggccccagcagcaccccccaggagaatggcaccaccctgtggcccagccggggcatccccagcagccctggggcccacaccacagaagctggcaccctgcctgcccccacccccagcccccccagcctgggccggccctgggcccccctgaccggccccagcgtgcccccacccagcagcggccgggccagcctgagcagcctgctgggcggggccccaccctggggcagcctgcaggaccctgacagccagggcctgagccctgctgctgctgcccccagccagcagctgcagaggccagatgtgcggctgcggacccccctgctgcaccccctggtgatgggcagcctgggcaagcacgccgcccccagcgccttcagcagcggcctgcccggggccctgagccaggtggccgtgaccaccctgacccgggacagcggggcctgggtgagccacgtggccaacagcgtgggccctggcctggccaacaacagcgccctgctgggcgctgaccctgaggccccagctggccgctgcctgcccctgccccccagcctgcctgtgtgtggccacctgggcatcagccgcttctggctgcccaaccacctgcaccacgagagcggggagcaggtgcgggccggggcccgggcctggggcggcctgctgcagacccactgccaccccttcctggcctggttcttctgcctgctgctggtgcccccctgtggctctgtgcccccaccagcccccccaccctgctgccagttctgtgaggccctgcaggatgcctgctggagccggctgggcggcggccgcctgcctgtggcctgtgccagcctgcccacccaggaggatggctactgtgtgctgattggccctgctgctgagcgcatcagcgaggaggtgggcctgctgcagctgctgggggaccccccaccccagcaggtgacccagacagatgatcctgatgtgggcctggcctacgtgtttggaccagatgccaacagcggccaggtggcccgctaccacttccccagcctcttcttccgggacttcagcctgctcttccacatccggcctgccacagagggccctggggtgctgtttgccatcacagattctgcccaggccatggtgctgctgggcgtgaagctgtctggagtgcaggacggccaccaggacatcagcctgctgtacacagagcctggagctggccagacccacacagctgccagcttccggctgcctgcctttgtgggccagtggacccacctggccctgtctgtggccggcggctttgtggccctgtatgtggactgtgaggagttccagaggatgcccctggcccggagcagccggggcctggagctggagcccggggccggcctgtttgtggcccaggccggcggcgctgaccctgacaagttccagggcgtgattgctgagctgaaggtgagaagagacccccaggtgagccccatgcactgcctggatgaggagggagatgacagtgatggagccagcggggacagcggcagcggcctgggagatgcccgggagctgctgcgggaggagactggagctgccctgaagccccggctgcctgcccctcctcctgtgaccaccccacccctggccggcggcagcagcacagaggacagccgctctgaggaggtggaggagcagaccaccgtggccagcctgggcgcccagaccctgcccggcagtgacagcgtgtccacctgggatggctctgtgaggacccctgggggccgggtgaaggagggcggcctgaagggccagaagggggagcccggggtgcccggccccccaggccgggccggccccccaggcagcccctgcctgcccggccccccaggcctgccctgccctgtgagccccctgggccctgctggccctgccctgcagacagtgcccggcccccagggccccccaggccccccaggaagagatggcaccccaggaagagatggagagcctgtgagcccccacgtgccccccagccctggggacaccggcccccagggcttccctggcaccccaggagatgtgggccccaagggggacaagggggaccccggggtgggggagcggggccccccaggcccccagggccccccaggccccccaggccccagcttcagacatgacaagctgaccttcatcgacatggagggcagcggctttggaggagacctggaggccctgcggggcccccggggcttccctggccccccaggccccccaggagtgcccggcctgcctggagagcccggccgctttggagtgaacagcagtgatgtgcccggccctgctggcctgcccggggtgcccggccgggagggccccccaggcttccctggcctgcccggccccccaggccccccaggccgggagggccccccaggccgcacaggccagaagggcagcctgcagggcgctggggcccctggggtgcagggcagcaaaggagcccctggccctgctggggcccggggggagagcggcctggccggggcccctggccctgctggccccccaggccccccaggccccccaggccccccaggccctggcctgcctgctggctttgatgacatggagggcagcggcggccccttctggagcacagcccggtctgcagatggcccccagggccccccaggcctgcccggcctgaagggggaccccggggtgcccggcctgcccggggccaagggggaggtgggcgcagatggagtgcccggcttccctggcctgcccggccgggagggcattgctggcccccagggccccaagggggaccggggcagcagaggagagaagggggaccccgggaaggatggagtgggccagcccggcctgcccggccccccaggccccccaggccctgtggtgtatgtgtctgagcaggacggctctgtgctgtctgtgcccggccctgagggccggcccggctttgctggcttccctggccctgctggccccaagggcaacctgggcagcaaaggagagcggggcagccctggccccaagggggagaagggggagcccggcagcatcttctccccagatggaggagccctgggccctgcccagaagggggccaagggggagcccggcttccggggccccccaggcccctacggccggcccggctacaagggggagatcggcttccctggccggcccggccggcccggcatgaatggcctgaagggggagaagggggagcctggagatgccagcctgggcttcggcatgaggggcatgcctggccccccaggccccccaggccccccaggccccccaggcacccctgtgtatgacagcaatgtgtttgctgagagcagccggcccggccccccaggcctgcccggcaaccagggccccccaggccccaagggggccaagggggaggtgggccccccaggccccccaggccagttcccctttgacttcctgcagctggaggccgagatgaagggggagaagggggacagaggagatgctggccagaagggggagcggggggagcccggcggcggcggcttcttcggcagcagcctgcccggccccccaggccccccaggccccccaggcccccggggctacccaggcatccctggccccaagggggagagcatccggggccagcccggccccccaggcccccagggccccccaggcatcggctatgagggccggcagggccccccaggccccccaggccccccaggcccccccagcttccctggcccccaccggcagaccatctctgtgcccggccccccaggccccccaggccccccaggccccccaggcaccatgggcgccagcagtggagtgcggctgtgggccacccggcaggccatgctgggccaggtgcatgaggtgcctgagggctggctgatctttgtggccgagcaggaggagctgtatgtgcgggtgcagaatggcttcaggaaggtgcagctggaggcccggacccccctgccccggggcacagacaatgaggtggccgccctgcagccccctgtggtgcagctgcatgacagcaacccctacccccggcgggagcacccccaccccacagcccggccctggagggcagatgacatcctggccagccccccccggctgcctgagccccagccctacccaggggccccccaccacagcagctatgtgcacctgcggcctgcccggcccaccagccccccagcccacagccaccgggacttccagcctgtgctgcacctggtggccctgaacagccccctgagcggcggcatgaggggcatcagaggagctgacttccagtgcttccagcaggcccgggctgtgggcctggccggcaccttccgggccttcctgagcagccggctgcaggacctgtacagcatcgtgagaagagctgacagagctgctgtgcccatcgtgaacctgaaggatgagctgctcttccccagctgggaggccctcttcagcggcagcgagggccccctgaagccaggggcccgcatcttctcctttgatggcaaggatgtgctgcggcaccccacctggccccagaagtctgtgtggcacggcagtgaccccaatggaagaaggctgacagagagctactgtgagacctggaggacagaggcccccagcgccaccggccaggccagcagcctgctgggcggccgcctgctgggccagagcgctgccagctgccaccacgcctacatcgtgctgtgcatcgagaacagcttcatgacagccagcaagtag

SEQ ID NO: 19131 - DNA, 1623 bp, synthetic construct
  misc_feature 1..1623: note = Description of Artificial Sequence: Synthetic coding sequence
  source 1..1623: mol_type = other DNA
atgggccctggagagagagctgggggcggcggagatgctggaaaaggaaatgctgctgggggcggcggcggcggccgcagcgccaccacagctggcagcagagctgtgtctgccctgtgcctgctgctgtctgtgggcagcgctgctgcctgcctgctgctgggcgtgcaggccgccgccctgcagggccgggtggccgccctggaggaggagcgggagctgctgcggcgggccggccccccaggggccctggatgcctgggccgagccccacctggagcggctgctgcgggagaagctggatggcctggccaagatcagaacagcccgggaggcccccagtgaatgtgtgtgccccccaggccccccaggaagaagaggcaagccaggaagaagaggagaccccggccccccaggccagagcggcagagatggctacccaggccccctgggcctggatggcaagccaggcctgcccggccccaagggggagaagggggcccctggggactttggccccaggggggaccagggccaggatggagctgctggccccccaggccccccaggccccccaggggcccggggccccccaggggacaccgggaaggatggccccaggggggcccagggccctgctggccccaagggggagcccggccaggatggagagatgggccccaagggccccccaggccccaagggggagcccggggtgcctgggaagaagggagatgatggcacccccagccagcccggccccccaggccccaagggggagcccggctccatgggccccagaggagaaaatggagtggatggagcccctggccccaagggggagcccggccaccggggcacagatggagctgctggccccaggggggcccctggcctgaagggggagcagggcgacacagtggtgattgattatgatggccgcatcctggatgccctgaagggccccccaggcccccagggccccccaggccccccaggcatccctggggccaagggggagctgggcctgcccggggcccctggcattgatggagagaagggccccaagggccagaagggggaccccggggagcccggccctgctggcctgaagggggaggccggggagatgggcctgagcggcctgcctggagcagatggcctgaagggggagaagggggagagcgccagtgacagcctgcaggagagcctggcccagctgattgtggagcccggccccccaggccccccaggccccccaggccccatgggcctgcagggcatccagggccccaagggcctggatggagccaagggggagaagggggccagcggggagcggggccccagcggcctgcccggccctgtgggccccccaggcctcatcggcctgcccggcaccaagggggagaagggccggcctggagagcccggcctggatggcttccctggccccagaggagagaagggggacagaagtgagcggggggagaagggggagcggggcgtgcccggcaggaaaggagtgaagggccagaagggggagcccggccccccaggcctggaccagccctgccctgtgggcccagatggcctgcctgtgcccggctgctggcacaagtag

SEQ ID NO: 19132 - DNA, 930 bp, synthetic construct
  misc_feature 1..930: note = Description of Artificial Sequence: Synthetic coding sequence
  source 1..930: mol_type = other DNA
atggagagccgcagcggcatccaggccggcgtgcgctgccgggacctgggcagcctgcagcccccacccctggccctgaagcagttcagcagcctgagcctgcccagctcctgggactacagaaggctgcccccaagatgtggcttcctgtttgaggtgtctgagaccaccaaccccccagctggcaccaacagccgccacaccctgactgtgaagctggatggcctggccaagatcagaacagcccgggaggcccccagtgaatgtgtgtgccccccaggccccccaggccggcggggcaagccaggccggcggggggaccccggccccccaggccccctgggcctggatggcaagccaggcctgcccggccccaagggggagaagggggcccctggggactttggccccaggggggaccagggccaggatggagctgctggccccccaggccccccaggccccccaggggcccggggccccccaggggacaccgggaaggatggccccaggggggcccagggccctgctggccccaagggggagcccggccaggatggagagatgggccccaagggccccccaggccccaagggggagcccggggtgcctgggaagaagggagatgatggcacccccagccagcccggccccccaggccccaagggggagcccggctccatgggccccagaggagaaaatggagtggatggagcccctggccccaagggggagcccggccaccggggcacagatggagctgctggccccagaggagatgtgcgggaccccggcctgggctctgtgagcagctgcagccagaggctggccagcagcagcaagaagaatggaagtgagcccccacctggctgtgccggctgcccccggccccagggccgggccggccgccacagcggggaccggctgtag

SEQ ID NO: 19133 - DNA, 1665 bp, synthetic construct
  misc_feature 1..1665: note = Description of Artificial Sequence: Synthetic coding sequence
  source 1..1665: mol_type = other DNA
atgacagcccctggagctgctggccgctgcccccccaccacctggctgggcagcctgctgctgctggtgtgcctgctggccagccgcagcatcacagaggaggtgtctgagtactgcagccacatgattggcagcggccacctgcagagcctgcagaggctgattgacagccagatggagaccagctgccagatcacctttgaatttgtggaccaggagcagctgaaggaccctgtgtgctacctgaagaaggccttcctgctggtgcaggacatcatggaggacaccatgaggttccgggacaacaccccaaatgccatcgccatcgtgcagctgcaggagctgagcctgcggctgaagagctgcttcaccaaggactatgaggagcatgacaaggcctgtgtgaggaccttctatgagacccccctgcagctgctggagaaggtgaagaatgtgttcaatgagaccaagaacctgctggacaaggactggaacatcttcagcaagaactgcaacaacagctttgctgaatgtagcagccaggatgtggtgaccaagccagactgcaactgcctgtaccccaaggccatccccagcagtgaccctgcctctgtgagcccccaccagcccctggcccccagcatggcccctgtggccggcctgacctgggaggacagcgagggcacagagggcagcagcctgctgcccggggagcagcccctgcacacagtggaccccggcagcgccaagcagaggcctcccaggagcacctgccagagctttgagcccccagagacccctgtggtgaaggacagcaccatcggcggcagcccccagccccggcccagcgtgggcgccttcaaccctggcatggaggacatcctggacagcgccatgggcaccaactgggtgcctgaggaggccagcggggaggccagcgagatccctgtgccccagggcacagagctgagccccagcaggcctgggggcggctccatgcagacagagcccgcccggcccagcaacttcctgagcgccagcagccccctgcctgccagcgccaagggccagcagcctgcagatgtgactggaacagccctgccccgggtgggccctgtgcggcccaccggccaggactggaaccacaccccccagaagacagaccaccccagcgccctgctgcgggaccccccagagcccggcagcccccgcatcagcagcctgcggccccagggcctgagcaaccccagcaccctgagcgcccagccccagctgagccgcagccacagcagcggctctgtgctgcccctgggggagctggagggcagaagaagcacccgggacagaagaagccctgctgagcctgagggcggccctgccagcgagggcgccgcccggcccctgccccgcttcaacagcgtgcccctgacagacaccggccacgagcggcagagcgagggcagcttcagcccccagctgcaggagagcgtcttccacctgctggtgcccagcgtcatcctggtgctgctggccgtgggcggcctgctcttctaccgctggaggcggcgcagccaccaggagccccagagagctgacagccccctggagcagcctgagggcagccccctgacccaggatgaccggcaggtggagctgcctgtgtag

SEQ ID NO: 19134 - DNA, 1317 bp, synthetic construct
  misc_feature 1..1317: note = Description of Artificial Sequence: Synthetic coding sequence
  source 1..1317: mol_type = other DNA
atgacagcccctggagctgctggccgctgcccccccaccacctggctgggcagcctgctgctgctggtgtgcctgctggccagccgcagcatcacagaggaggtgtctgagtactgcagccacatgattggcagcggccacctgcagagcctgcagaggctgattgacagccagatggagaccagctgccagatcacctttgaatttgtggaccaggagcagctgaaggaccctgtgtgctacctgaagaaggccttcctgctggtgcaggacatcatggaggacaccatgaggttccgggacaacaccccaaatgccatcgccatcgtgcagctgcaggagctgagcctgcggctgaagagctgcttcaccaaggactatgaggagcatgacaaggcctgtgtgaggaccttctatgagacccccctgcagctgctggagaaggtgaagaatgtgttcaatgagaccaagaacctgctggacaaggactggaacatcttcagcaagaactgcaacaacagctttgctgaatgtagcagccaggatgtggtgaccaagccagactgcaactgcctgtaccccaaggccatccccagcagtgaccctgcctctgtgagcccccaccagcccctggcccccagcatggcccctgtggccggcctgacctgggaggacagcgagggcacagagggcagcagcctgctgcccggggagcagcccctgcacacagtggaccccggcagcgccaagcagaggcctcccaggagcacctgccagagctttgagcccccagagacccctgtggtgaaggacagcaccatcggcggcagcccccagccccggcccagcgtgggcgccttcaaccctggcatggaggacatcctggacagcgccatgggcaccaactgggtgcctgaggaggccagcggggaggccagcgagatccctgtgccccagggcacagagctgagccccagcaggcctgggggcggctccatgcagacagagcccgcccggcccagcaacttcctgagcgccagcagccccctgcctgccagcgccaagggccagcagcctgcagatgtgactggacatgagcggcagagcgagggcagcttcagcccccagctgcaggagagcgtcttccacctgctggtgcccagcgtcatcctggtgctgctggccgtgggcggcctgctcttctaccgctggaggcggcgcagccaccaggagccccagagagctgacagccccctggagcagcctgagggcagccccctgacccaggatgaccggcaggtggagctgcctgtgtag

SEQ ID NO: 19135 - DNA, 360 bp, synthetic construct
  misc_feature 1..360: note = Description of Artificial Sequence: Synthetic coding sequence
  source 1..360: mol_type = other DNA
atgacagcccctggagctgctggccgctgcccccccaccacctggctgggcagcctgctgctgctggtgtgcctgctggccagccgcagcatcacagaggaggtgtctgagtactgcagccacatgattggcagcggccacctgcagagcctgcagaggctgattgacagccagatggagaccagctgccagatcacctttgaatttgtggaccaggagcagctgaaggaccctgtgtgctacctgaagaaggccttcctgctggtgcaggacatcatggaggacaccatgaggttccgggacaacaccccaaatgccatcgccatcgtgcagctgcaggagctgagcctgcggctgtag

SEQ ID NO: 19136 - DNA, 1317 bp, synthetic construct; identical to SEQ ID NO: 19134
  misc_feature 1..1317: note = Description of Artificial Sequence: Synthetic coding sequence
  source 1..1317: mol_type = other DNA

SEQ ID NO: 19137 - DNA, 1665 bp, synthetic construct; identical to SEQ ID NO: 19133
  misc_feature 1..1665: note = Description of Artificial Sequence: Synthetic coding sequence
  source 1..1665: mol_type = other DNA

SEQ ID NO: 19138 - DNA, 771 bp, synthetic construct
  misc_feature 1..771: note = Description of Artificial Sequence: Synthetic coding sequence
  source 1..771: mol_type = other DNA
atgacagcccctggagctgctggccgctgcccccccaccacctggctgggcagcctgctgctgctggtgtgcctgctggccagccgcagcatcacagaggaggtgtctgagtactgcagccacatgattggcagcggccacctgcagagcctgcagaggctgattgacagccagatggagaccagctgccagatcacctttgaatttgtggaccaggagcagctgaaggaccctgtgtgctacctgaagaaggccttcctgctggtgcaggacatcatggaggacaccatgaggttccgggacaacaccccaaatgccatcgccatcgtgcagctgcaggagctgagcctgcggctgaagagctgcttcaccaaggactatgaggagcatgacaaggcctgtgtgaggaccttctatgagacccccctgcagctgctggagaaggtgaagaatgtgttcaatgagaccaagaacctgctggacaaggactggaacatcttcagcaagaactgcaacaacagctttgctgaatgtagcagccagggccacgagcggcagagcgagggcagcttcagcccccagctgcaggagagcgtcttccacctgctggtgcccagcgtcatcctggtgctgctggccgtgggcggcctgctcttctaccgctggaggcggcgcagccaccaggagccccagagagctgacagccccctggagcagcctgagggcagccccctgacccaggatgaccggcaggtggagctgcctgtgtag

SEQ ID NO: 19139 - DNA, 828 bp, synthetic construct
  misc_feature 1..828: note = Description of Artificial Sequence: Synthetic coding sequence
  source 1..828: mol_type = other DNA
ggcagccctggcatggccggggccctgtgtgccggccacatcgccggcctgtatggagaccggggcctggtgcccagcacccggcgggaggagcggggcggcaggaagacctggcagacaggagctgcccggccccagggcggggcccggggggccggcggcccctggcacccagacagacacccccggcccaaggagacccggggcaacctgggccccctggagaccccagcccgctgggccacccagggccctgctgcccccagcgagcccatccctggcatcaagggcaccaagggcagccctggcaacatcaaggaccagcccaggcctgccttcagcgccatcagaagaaaccccaatggaggccagaggggccacagcaccaggagcagccccaccaggaagaacagaaccaggaccaccccagctgacagcagcgccctgtacccagccaccaccaccagccccagccgctgctgccccagcggcaagagcgcctgccccagcagccccccccagggcgcccggagtgatgccccctgggcctctgtgaccccacccacccggggcagcagccgctggtgccagggcgcctggtgcttcagctgcagccgggtgaccaggagcggcctgaagaagacccccaagagggtgaccttcacccgggccctgcggcccacagccagcagcgctgccagcagcagcagccacctgcctgagcccgggaaggaccccctgccccacccccccctgtggctgccctgcagcgcctgcaagatgggcgccctgctgctgcagctgctgaagggcggcggctggctgtag

SEQ ID NO: 19140 - DNA, 738 bp, synthetic construct
  misc_feature 1..738: note = Description of Artificial Sequence: Synthetic coding sequence
  source 1..738: mol_type = other DNA
atggagggcccccggggctggctggtgctgtgtgtgctggccatcagcctggcctccatggtgacagaggacctgtgccgggccccagatggcaagaagggggaggccggccggcctggaagaagaggccggcccggcctgaagggggagcagggcgagcccggggcccctggcatcagaacaggcatccagggcctgaagggggaccagggcgagcccggccccagcggcaaccctgggaaggtgggctacccaggccccagcggccccctgggcgcccggggcatccctggcatcaagggcaccaagggcagccctggcaacatcaaggaccagcccaggcctgccttcagcgccatcagaagaaacccccccatgggcggcaatgtggtgatctttgacaccgtcatcaccaaccaggaggagccctaccagaaccacagcggccgctttgtgtgcaccgtgcccggctactactacttcaccttccaggtgctgagccagtgggagatctgcctgagcatcgtgagcagcagccggggccaggtgcggcgcagcctgggcttctgtgacaccaccaacaagggcctcttccaggtggtgtctgggggcatggtgctgcagctgcagcagggcgaccaggtgtgggtggagaaggaccccaagaagggccacatctaccagggcagcgaggccgacagcgtcttcagcggcttcctgatcttccccagcgcctag

SEQ ID NO: 19141 - DNA, 738 bp, synthetic construct; identical to SEQ ID NO: 19140
  misc_feature 1..738: note = Description of Artificial Sequence: Synthetic coding sequence
  source 1..738: mol_type = other DNA

SEQ ID NO: 19142 - DNA, 666 bp, synthetic construct
  misc_feature 1..666: note = Description of Artificial Sequence: Synthetic coding sequence
  source 1..666: mol_type = other DNA
atggagggcccccggggctggctggtgctgtgtgtgctggccatcagcctggcctccatggtgacagaggacctgtgccgggccccagatggcaagaagggggaggccggccggcctggaagaagaggccggcccggcctgaagggggagcagggcgagcccggggcccctggcatcagaacaggcatccagggcctgaagggggaccagggcgagcccggccccagcggcaaccctgggaaggtgggctacccaggccccagcggccccctgggcgcccggggcatccctggcatcaagggcaccaagggcagccctggcaacatcaaggaccagcccaggcctgccttcagcgccatcagaagaaacccccccatgggcggcaatgtggtgatctttgacaccgtcatcaccaaccaggaggagccctaccagaaccacagcggccgctttgtgtgcaccgtgcccggctactactacttcaccttccaggtgctgagccagtgggagatctgcctgagcatcgtgagcagcagccggggccaggtgcggcgcagcctgggcttctgtgacaccaccaacaagggcctcttccaggtggtgtctgggggcatggtgctgcagctgcagcagggcgaccaggtgtgggtggagaaggacccctag

SEQ ID NO: 19143 - DNA, 1050 bp, synthetic construct
  misc_feature 1..1050: note = Description of Artificial Sequence: Synthetic coding sequence
  source 1..1050: mol_type = other DNA
atgacagctgcctccatgggccctgtgcgggtggcctttgtggtgctgctggccctgtgcagcaggcctgctgtgggccagaactgcagcggcccctgccgctgcccagatgagcccgccccccgctgcccagctggggtgtccctggtgctggatggctgcggctgctgccgggtgtgtgccaagcagctgggggagctgtgcacagagcgggacccctgtgacccccacaagggcctcttctgccacttcggcagccctgccaacaggaagattggagtgtgcacagccaaggatggagccccctgcatctttggaggcaccgtgtaccgcagcggggagagcttccagagcagctgcaagtaccagtgcacctgcctggatggagctgtgggctgcatgcccctgtgcagcatggatgtgcggctgcccagcccagactgccccttcccccggcgggtgaagctgcccgggaagtgctgtgaggagtgggtgtgtgatgagcccaaggaccagacagtggtgggccctgccctggccgcctaccgcctggaggacaccttcggccctgaccccaccatgatccgggccaactgcctggtgcagaccacagagtggagcgcctgcagcaagacctgtggcatgggcatcagcaccagggtgaccaatgacaatgccagctgccgcctggagaagcagagccggctgtgcatggtgcggccctgtgaggccgacctggaggagaacatcaagaagggcaagaagtgcatccgcacccccaagatcagcaagcccatcaagtttgagctgagcggctgcacctccatgaagacctaccgggccaagttctgtggggtgtgcacagatggccgctgctgcaccccccacaggaccaccaccctgcctgtggagttcaagtgcccagatggagaggtgatgaagaagaacatgatgttcatcaagacctgtgcctgccactacaactgccctggggacaatgacatctttgagagcctgtactacaggaagatgtatggagacatggcctag

SEQ ID NO: 19144 - DNA, 2238 bp, synthetic construct
  misc_feature 1..2238: note = Description of Artificial Sequence: Synthetic coding sequence
  source 1..2238: mol_type = other DNA
atggagcggcccccaggcctgcggcctggagctgggggcccctgggagatgagggagcggctgggcactggaggctttggaaatgtgtgcctgtaccagcaccgggagctggacctgaagatcgccatcaagagctgccgcctggagctgagcaccaagaaccgggagcgctggtgccacgagatccagatcatgaagaagctgaaccacgccaacgtggtgaaggcctgtgatgtgcctgaggagctgaacatcctgattcatgatgtgcccctgctggccatggagtactgcagcggcggggacctgaggaagctgctgaacaagccagagaactgctgcggcctgaaggagagccagatcctgagcctgctgagtgacatcggcagcggcatccgctacctgcacgagaacaagatcatccaccgggacctgaagccagagaacatcgtgctgcaggatgtgggcggcaagatcatccacaagatcatcgacctgggctacgccaaggatgtggaccagggcagcctgtgcaccagctttgtgggcaccctgcagtacctggcccctgagctgtttgagaacaagccctacacagccaccgtggactactggagctttggcaccatggtgtttgaatgtattgctggctaccggcccttcctgcaccacctgcagcccttcacctggcatgagaagatcaagaagaaggaccccaagtgcatctttgcctgtgaggagatgtctggagaggtgcgcttcagcagccacctgccccagcccaacagcctgtgcagcctggtggtggagcccatggagaactggctgcagctgatgctgaactgggacccccagcagaggggcggccctgtggacctgaccctgaagcagccccgctgctttgtgctgatggaccacatcctgaacctgaagatcgtgcacatcctgaacatgaccagcgccaagatcatctccttcctgctgcccccagatgagagcctgcacagcctgcagagcagaattgagcgggagaccggcatcaacacaggcagccaggagctgctgtctgagaccggcatcagcctggaccccaggaagccagccagccagtgtgtgctggatggagtgcggggctgtgacagctacatggtgtacctgtttgacaagagcaagacagtgtatgagggcccctttgccagccgcagcctgagtgactgtgtgaactacatcgtgcaggacagcaagatccagctgcccatcatccagctgaggaaggtgtgggccgaggccgtgcactacgtgtctggcctgaaggaggactacagccgcctcttccagggccagagagctgccatgctgagcctgctgcgctacaatgccaacctgaccaagatgaagaacaccctcatcagcgccagccagcagctgaaggccaagctggagttcttccacaagagcatccagctggacctggagcgctacagcgagcagatgacctacggcatcagcagcgagaagatgctgaaggcctggaaggagatggaggagaaggccatccactacgccgaggtgggcgtgattggctacctggaggaccagatcatgagcctgcatgctgagatcatggagctgcagaagagcccctatggaagacggcagggcgacctgatggagagcctggagcagagggccatcgacctgtacaagcagctgaagcaccggcccagcgaccacagctacagcgacagcacagagatggtgaagatcatcgtgcacacagtgcagagccaggacagagtgctgaaggagctgtttggccacctgagcaagctgctgggctgcaagcagaagatcatcgacctgctgcccaaggtggaggtggccctgagcaacatcaaggaggccgacaacacagtgatgttcatgcagggcaagaggcagaaggagatctggcacctgctgaagatcgcctgcacccagagcagcgcccggagcctggtgggcagcagcctggagggcgctgtgaccccccagaccagcgcctggctgccccccaccagcgctgagcatgaccacagcctgagctgtgtggtgaccccccaggatggagagaccagcgcccagatgattgaggagaacctgaactgcctgggccacctgagcaccatcatccacgaggccaatgaggagcagggcaacagcatgatgaacctggactggagctggctgacagaatag

SEQ ID NO: 19145 - DNA, 1653 bp, synthetic construct
  misc_feature 1..1653: note = Description of Artificial Sequence: Synthetic coding sequence
  source 1..1653: mol_type = other DNA
atgtggaaggccagcgctggccatgctgtgtccatcgcccaggatgatgctggagcagatgactgggagacagatcctgactttgtgaatgatgtgtctgagaaggagcagcgctggggcgccaagacagtgcagggcagcggccaccaggagcacatcaacatccacaagctgcgggagaatgtgttccaggagcaccagaccctgaaggagaaggagctggagaccggccccaaggccagccacggctacggcggcaagtttggagtggagcaggacaggatggacaagtctgctgtgggccacgagtaccagagcaagctgagcaagcactgcagccaggtggacagcgtgcggggctttggaggcaagtttggagtgcagatggacagagtggaccagagcgctgtgggctttgagtaccagggcaagacagagaagcacgccagccagaaggactacagcagcggctttggaggcaagtatggagtgcaggccgacagagtggacaagtctgctgtgggctttgactaccagggcaagacagagaagcatgagagccagagggactacagcaaaggatttggaggcaagtatggaattgacaaggacaaggtggacaagtctgctgtgggctttgagtaccagggcaagacagagaagcatgagagccagaaggactatgtgaagggctttggaggcaagtttggagtgcagacagaccggcaggacaagtgtgccctgggctgggaccaccaggagaagctgcagctgcacgagagccagaaggactacaagacaggctttggaggcaagtttggagtgcagagcgagcggcaggacagcgctgctgtgggctttgactacaaggagaagctggccaagcatgagagccagcaggactacagcaagggctttggaggcaagtatggagtgcagaaggacaggatggacaagaatgccagcacctttgaagatgtgacccaggtgagcagcgcctaccagaagacagtgcctgtggaggccgtgaccagcaagaccagcaacatccgggccaactttgagaacctggccaaggagaaggagcaggaggacaggaggaaggccgaggccgagcgggcccagaggatggccaaggagcggcaggagcaggaggaggcccggaggaagctggaggagcaggcccgggccaagacccagaccccacctgtgtccccagccccccagcccacagaggagcggctgcccagcagccctgtgtatgaagatgctgccagcttcaaggccgagctgagctaccggggccctgtgtctggaacagagcctgagcctgtgtacagcatggaggccgctgactaccgggaggccagcagccagcagggcctggcctatgccacagaggccgtgtatgagagcgctgaggcccctggccactacccagctgaggacagcacctatgatgaatatgaaaatgacctgggcatcacagctgtggccctgtatgactaccaggccgctggagatgatgagatcagctttgatcctgatgacatcatcaccaacatcgagatgattgatgatggctggtggaggggcgtgtgcaagggccgctatggcctcttccctgccaactacgtggagctgcggcagtag

SEQ ID NO: 19146 - DNA, 1542 bp, synthetic construct
  misc_feature 1..1542: note = Description of Artificial Sequence: Synthetic coding sequence
  source 1..1542: mol_type = other DNA
atgtggaaggccagcgctggccatgctgtgtccatcgcccaggatgatgctggagcagatgactgggagacagatcctgactttgtgaatgatgtgtctgagaaggagcagcgctggggcgccaagacagtgcagggcagcggccaccaggagcacatcaacatccacaagctgcgggagaatgtgttccaggagcaccagaccctgaaggagaaggagctggagaccggccccaaggccagccacggctacggcggcaagtttggagtggagcaggacaggatggacaagtctgctgtgggccacgagtaccagagcaagctgagcaagcactgcagccaggtggacagcgtgcggggctttggaggcaagtttggagtgcagatggacagagtggaccagagcgctgtgggctttgagtaccagggcaagacagagaagcacgccagccagaaggactacagcagcggctttggaggcaagtatggagtgcaggccgacagagtggacaagtctgctgtgggctttgactaccagggcaagacagagaagcatgagagccagagggactacagcaaaggatttggaggcaagtatggaattgacaaggacaaggtggacaagtctgctgtgggctttgagtaccagggcaagacagagaagcatgagagccagaaggactatgtgaagggctttggaggcaagtttggagtgcagacagaccggcaggacaagtgtgccctgggctgggaccaccaggagaagctgcagctgcacgagagccagaaggactacagcaaaggatttggaggcaagtatggagtgcagaaggacaggatggacaagaatgccagcacctttgaagatgtgacccaggtgtcctctgcctaccagaagacagtgcctgtggaggccgtgaccagcaagaccagcaacatccgggccaactttgagaacctggccaaggagaaggagcaggaggacaggaggaaggccgaggccgagcgggcccagaggatggccaaggagcggcaggagcaggaggaggcccggaggaagctggaggagcaggcccgggccaagacccagaccccacctgtgtccccagccccccagcccacagaggagcggctgcccagcagccctgtgtatgaagatgctgccagcttcaaggccgagctgagctaccggggccctgtgtctggaacagagcctgagcctgtgtacagcatggaggccgctgactaccgggaggccagcagccagcagggcctggcctatgccacagaagctgtgtatgaatctgctgaggcccctggccactacccagctgaggacagcacctatgatgaatatgaaaatgacctgggcatcacagctgtggccctgtatgactaccaggccgctggagatgatgagatcagctttgatcctgatgacatcatcaccaacatcgagatgattgatgatggctggtggaggggcgtgtgcaagggccgctatggcctcttccctgccaactacgtggagctgcggcagtag

SEQ ID NO: 19147 - DNA, 1905 bp, synthetic construct
  misc_feature 1..1905: note = Description of Artificial Sequence: Synthetic coding sequence
  source 1..1905: mol_type = other DNA
atgtggaaggccagcgctggccatgctgtgtccatcgcccaggatgatgctggagcagatgactgggagacagatcctgactttgtgaatgatgtgtctgagaaggagcagcgctggggcgccaagacagtgcagggcagcggccaccaggagcacatcaacatccacaagctgcgggagaatgtgttccaggagcaccagaccctgaaggagaaggagctggagaccggccccaaggccagccacggctacggcggcaagtttggagtggagcaggacaggatggacaagtctgctgtgggccacgagtaccagagcaagctgagcaagcactgcagccaggtggacagcgtgcggggctttggaggcaagtttggagtgcagatggacagagtggaccagagcgctgtgggctttgagtaccagggcaagacagagaagcacgccagccagaaggactacagcagcggctttggaggcaagtatggagtgcaggccgacagagtggacaagtctgctgtgggctttgactaccagggcaagacagagaagcatgagagccagagggactacagcaaaggatttggaggcaagtatggaattgacaaggacaaggtggacaagtctgctgtgggctttgagtaccagggcaagacagagaagcatgagagccagaaggactatgtgaagggctttggaggcaagtttggagtgcagacagaccggcaggacaagtgtgccctgggctgggaccaccaggagaagctgcagctgcacgagagccagaaggactacagcaaaggatttggaggcaagtatggagtgcagaaggacaggatggacaagaatgccagcacctttgaagatgtgacccaggtgtcctctgcctaccagaagacagtgcctgtggaggccgtgaccagcaagaccagcaacatccgggccaactttgagaacctggccaaggagaaggagcaggaggacaggaggaaggccgaggccgagcgggcccagaggatggccaaggagcggcaggagcaggaggaggcccggaggaagctggaggagcaggcccgggccaagacccagaccccacctgtgtccccagccccccagcccacagaggagcggctgcccagcagccctgtgtatgaagatgctgccagcttcaaggccgagctgagctaccggggccctgtgtctggaacagagcctgagcctgtgtacagcatggaggccgctgactaccgggaggccagcagccagcagggcctggcctatgccacagaagctgtgtatgaatctgctgaggcccctggccactacccagctgaggacagcacctatgatgaatatgaaaatgacctgggcatcacagctgtggccctgtatgactaccaggccgctggagatgatgagatcagctttgatcctgatgacatcatcaccaacatcgagatgattgatgatggctggtggaggggcgtgtgcaagggccgcttccgggagctggccttcagctgtgtgcgggtggccctggtgcccatcaagtgcagccgggacctgcccggccaggcccggggcctgcggagcgccctgtggagggtgggcaggaaggactgccccaggagaggagccagcagccgggtgtccctgctgggcagaagaggcctgggcctgatggaggtgaaccctgagctgagccaccctgagcacaggagctgccacgtgcgctgggagatctgcctgtgccacacagtgacagcccggcgcatcaggaagctgatctccttcctgcggagccgggaggccggccctgtgcccagctgcagccaggtgggcggcgtgtccttccagaaggtgacctggaagtgcctgggcacctgggtgcctgagtgcccctag

SEQ ID NO: 19148 - DNA, 945 bp, synthetic construct
  misc_feature 1..945: note = Description of Artificial Sequence: Synthetic coding sequence
  source 1..945: mol_type = other DNA
atggacaagaatgccagcacctttgaagatgtgacccaggtgagcagcgcctaccagaagacagtgcctgtggaggccgtgaccagcaagaccagcaacatccgggccaactttgagaacctggccaaggagaaggagcaggaggacaggaggaaggccgaggccgagcgggcccagaggatggccaaggagcggcaggagcaggaggaggcccggaggaagctggaggagcaggcccgggccaagacccagaccccacctgtgtccccagccccccagcccacagaggagcggctgcccagcagccctgtgtatgaagatgctgccagcttcaaggccgagctgagctaccggggccctgtgtctggaacagagcctgagcctgtgtacagcatggaggccgctgactaccgggaggccagcagccagcagggcctggcctatgccacagaggccgtgtatgagagcgctgaggcccctggccactacccagctgaggacagcacctatgatgaatatgaaaatgacctgggcatcacagctgtggccctgtatgactaccaggccgctggagatgatgagatcagctttgatcctgatgacatcatcaccaacatcgagatgattgatgatggctggtggaggggcgtgtgcaagggccgcttccgggagctggccttcagctgtgtgcgggtggccctggtgcccatcaagtgcagccgggacctgcccggccaggcccggggcctgcggagcgccctgtggagggtgggcaggaaggactgcccccggcggggggccagcagccgggtgtccctgctgggccggcggggcctgggcctgatggaggtgaaccctgagctgagccaccctgagcacaggagctgccacgtgcgctgggagatctgcctgtgccacacagtgacagcccggcgcatcagatag

SEQ ID NO: 19149 - DNA, 1761 bp, synthetic construct
  misc_feature 1..1761: note = Description of Artificial Sequence: Synthetic coding sequence
  source 1..1761: mol_type = other DNA
atgggcgtgaatgctgtgcactggttcaggaagggcctgcggctgcatgacaacccagccctgaaggagtgcatccagggcgctgacaccatccgctgtgtgtacatcctggacccctggtttgctggcagcagcaatgtgggcatcaaccgctggaggttcctgctgcagtgcctggaggacctggatgccaacctgaggaagctgaacagccgcctcttcgtcatccggggccagcctgcagatgtgttccccaggctcttcaaggagtggaacatcaccaagctgagcattgaatatgacagcgagccctttgggaaggagagagatgctgccatcaagaagctggccacagaggccggcgtggaggtgattgtgcgcatcagccacaccctgtatgacctggacaagatcatcgagctgaatggaggccagccccccctgacctacaagcgcttccagaccctcatcagcaagatggagcccctggagatccctgtggagaccatcaccagcgaggtgattgagaagtgcaccacccccctgagtgatgaccatgatgagaagtatggagtgcccagcctggaggagctgggctttgacacagatggcctgagcagcgctgtgtggccaggaggagaaacagaggccctgacccggctggagcggcacctggagaggaaggcctgggtggccaactttgagcggcccaggatgaatgccaacagcctgctggccagccccaccggcctgagcccctacctgcgcttcggctgcctgagctgccgcctcttctacttcaagctgacagacctgtacaagaaggtgaagaagaacagcagcccccccctgagcctgtatggccagctgctgtggagggagttcttctacacagctgccaccaacaaccccaggtttgacaagatggagggcaaccccatctgtgtgcagatcccctgggacaagaaccctgaggccctggccaagtgggccgagggccgcacaggcttcccctggattgatgccatcatgacccagctgcggcaggagggctggatccaccacctggcccggcatgctgtggcctgcttcctgaccaggggggacctgtggatctcctgggaggagggcatgaaggtgtttgaggagctgctgctggatgctgactggagcatcaatgccggctcctggatgtggctgagctgcagcagcttcttccagcagttcttccactgctactgccctgtgggcttcggccgcaggacagaccccaatggagactacatccgccgctacctgcctgtgctgcggggcttccctgccaagtacatctatgacccctggaatgcccctgagggcatccagaaggtggccaagtgcctgattggagtgaactaccccaagcccatggtgaaccacgccgaggccagccggctgaacattgaaagaatgaagcagatctaccagcagctgagccgctaccggggcctgggcctgctggcctctgtgcccagcaaccccaatggaaatggaggcttcatgggctacagcgctgagaacatccctggctgcagcagcagcggcagctgcagccagggcagcggcatcctgcactacgcccatggagacagccagcagacccacctgctgaagcagggccgcagctccatgggcaccggcctgagcggcggcaagaggcccagccaggaggaggacacccagagcatcggccccaaggtgcagaggcagagcaccaactag

SEQ ID NO: 19150 - DNA, 582 bp, synthetic construct
  misc_feature 1..582: note = Description of Artificial Sequence: Synthetic coding sequence
  source 1..582: mol_type = other DNA
atgctggaggtgggctgcggctgcctggtggtgcccttcttcaacttcttccactgctactgccctgtgggctttggaagaagaacagaccccaacggggactacatccgccgctacctgcctgtgctgcggggcttccctgccaagtacatctatgacccctggaatgcccctgagggcatccagaaggtggccaagtgcctgattggagtgaactaccccaagcccatggtgaaccacgccgaggccagccggctgaacatcgagaggatgaagcagatctaccagcagctgagccgctaccggggcctgggcctgctggcctctgtgcccagcaaccccaatggaaatggaggcttcatgggctacagcgctgagaacatccctggctgcagcagcagcggcagctgcagccagggcagcggcatcctgcactacgcccacggggacagccagcagacccacctgctgaagcagggccgcagctccatgggcaccggcctgagcggcggcaagaggcccagccaggaggaggacacccagagcatcggccccaaggtgcagaggcagagcaccaactag

SEQ ID NO: 19151 - DNA, 1323 bp, synthetic construct
  misc_feature 1..1323: note = Description of Artificial Sequence: Synthetic coding sequence
  source 1..1323: mol_type = other DNA
atgggcagcagccacctgctgaacaagggcctgcccctgggcgtgcggccccccatcatgaatggccccctgcacccccggcccctggtggccctgctggatggccgggactgcaccgtggagatgcccatcctgaaggatgtggccaccgtggccttctgtgatgcccagagcacccaggagatccacgagaaggtgctgaatgaggccgtgggcgccctgatgtaccacaccatcaccctgacccgggaggacctggagaagttcaaggccctgcgcatcatcgtgcgcatcggcagcggctttgacaacatcgacatcaagtctgctggggacctgggcattgctgtgtgcaatgtgcctgctgcctctgtggaggagacagctgacagcaccctgtgccacatcctgaacctgtacagaagagccacctggctgcaccaggccctgcgggagggcaccagggtgcagagcgtggagcagatccgggaggtggccagcggggccgcccgcatccggggggagaccctgggcatcatcggcctgggccgggtgggccaggccgtggccctgcgggccaaggccttcggcttcaacgtgctcttctatgacccctacctgagtgatggagtggagcgggccctgggcctgcagagggtgtccaccctgcaggacctgctcttccacagcgactgtgtgaccctgcactgcggcctgaatgagcacaaccaccacctgatcaatgacttcaccgtgaagcagatgaggcagggcgccttcctggtgaacacagcccggggcggcctggtggatgagaaggccctggcccaggccctgaaggagggccgcatcagaggagctgccctggatgtgcatgagagcgagcccttctccttcagccagggccccctgaaggatgcccccaacctgatctgcacccctcatgctgcctggtacagcgagcaggccagcattgagatgagggaggaggccgcccgggagatccggcgggccatcaccggccgcatcccagacagcctgaagaactgtgtgaacaaggaccacctgacagctgccacccactgggcctccatggaccctgctgtggtgcaccctgagctgaatggagctgcctaccgctacccacctggggtggtgggcgtggcccccaccggcatcccagctgctgtggagggcatcgtgcccagcgccatgagcctgagccacggcctgccccctgtggcccacccccctcatgcccccagccctggccagacagtgaagccagaggccgaccgggaccacgccagtgaccagctgtag

SEQ ID NO: 19152 - DNA, 1290 bp, synthetic construct
  misc_feature 1..1290: note = Description of Artificial Sequence: Synthetic coding sequence
  source 1..1290: mol_type = other DNA
atgtctggagtgcggccccccatcatgaatggccccctgcacccccggcccctggtggccctgctggatggccgggactgcaccgtggagatgcccatcctgaaggatgtggccaccgtggccttctgtgatgcccagagcacccaggagatccacgagaaggtgctgaatgaagctgtgggcgccctgatgtaccacaccatcaccctgacccgggaggacctggagaagttcaaggccctgcgcatcatcgtgagaattggcagcggctttgacaacatcgacatcaagtctgctggggacctgggcattgctgtgtgcaatgtgcctgctgcctctgtggaggagacagctgacagcaccctgtgccacatcctgaacctgtaccgccgggccacctggctgcaccaggccctgcgggagggcaccagggtgcagagcgtggagcagatccgggaggtggccagcggggccgcccgcatccggggggagaccctgggcatcatcggcctgggccgggtgggccaggccgtggccctgcgggccaaggccttcggcttcaacgtgctcttctatgacccctacctgagtgatggagtggagcgggccctgggcctgcagagggtgtccaccctgcaggacctgctcttccacagcgactgtgtgaccctgcactgcggcctgaatgagcacaaccaccacctgatcaatgacttcaccgtgaagcagatgaggcagggcgccttcctggtgaacacagcccggggcggcctggtggatgagaaggccctggcccaggccctgaaggagggccgcatccggggggccgccctggatgtgcatgaaagtgagcccttctccttcagccagggccccctgaaggatgcccccaacctgatctgcacccctcatgctgcctggtacagcgagcaggccagcattgagatgagggaggaggccgcccgggagatcagaagagccatcaccggccgcatcccagacagcctgaagaactgtgtgaacaaggaccacctgacagctgccacccactgggcctccatggaccctgctgtggtgcaccctgagctgaatggagctgcctaccgctacccacctggggtggtgggcgtggcccccaccggcatcccagctgctgtggagggcatcgtgcccagcgccatgagcctgagccacggcctgccccctgtggcccaccccccccacgcccccagccctggccagacagtgaagccagaggccgaccgggaccacgccagtgaccagctgtag

SEQ ID NO: 19153 - DNA, 438 bp, synthetic construct
  misc_feature 1..438: note = Description of Artificial Sequence: Synthetic coding sequence
  source 1..438: mol_type = other DNA
atgtctggagtgcggccccccatcatgaatggccccctgcacccccggcccctggtggccctgctggatggccgggactgcaccgtggagatgcccatcctgaaggatgtggccaccgtggccttctgtgatgcccagagcacccaggagatccacgagaaggtgctgaatgaagctgtgggcgccctgatgtaccacaccatcaccctgacccgggaggacctggagaagttcaaggccctgcgcatcatcgtgagaattggcagcggctttgacaacatcgacatcaagtctgctggggacctgggcattgctgtgtgcaatgtgcctgctgcctctgtggaggagacagctgacagcaccctgtgccacatcctgaacctgtaccgccgggccacctggctgcaccaggccctgcgggagggcaccagggtgtag

SEQ ID NO: 19154 - DNA, 516 bp, synthetic construct
  misc_feature 1..516: note = Description of Artificial Sequence: Synthetic coding sequence
  source 1..516: mol_type = other DNA
atgtctggagtgcggccccccatcatgaatggccccctgcacccccggcccctggtggccctgctggatggccgggactgcaccgtggagatgcccatcctgaaggatgtggccaccgtggccttctgtgatgcccagagcacccaggagatccacgagaaggtgctgaatgaagctgtgggcgccctgatgtaccacaccatcaccctgacccgggaggacctggagaagttcaaggccctgcgcatcatcgtgagaattggcagcggctttgacaacatcgacatcaagtctgctggggacctgggcattgctgtgtgcaatgtgcctgctgcctctgtggaggagacagctgacagcaccctgtgccacatcctgaacctgtaccgccgggccacctggctgcaccaggccctgcgggagggcaccagggtgcagagcgtggagcagatccgggaggtggccagcggggccgcccgcatccggggggagaccctgggcatcatcggcctgtag

SEQ ID NO: 19155 - DNA, 2958 bp, synthetic construct
  misc_feature 1..2958: note = Description of Artificial Sequence: Synthetic coding sequence
  source 1..2958: mol_type = other DNA
atgcctgtgcccagccgccacatcaacatcggccgcagccagagctgggatgctgctggctggtatgagggcccctgggagaatgctgagagcctgcggcccctgggcagaagaagcagcctgacctatggaacagctgagggcacctggtttgagcccaaccaccggccccaggatgctgccctgcctgtggccgctgagccctacctgtaccgggaggccgtgtacaacagcgtggccgccaggaagggcagcaccccagacttcaccttctatgacagccggcaggccgtgatgagcggccgcagccccctgctgccccgggagtactacagcgaccccagcggggccgcccgggtgcccaaggagccccccctgtacagagaccccggggtgtccaggcctgtgcccagctatggagtgctgggcagcaggacctcctgggaccccatgcagggccgcagccctgccctgcaggatgctggccacctgtacagagaccccggcggcaagatgatcccccagggccggcagacccagagcagagctgccagccctggccgctatggccgggagcagcctgacacccgctacggggctgaggtgcctgcctaccccctgagccaggtgttcagtgacatcagcgagcggcccattgatcctgccccagcccggcaggtggcccccacctgcctggtggtggaccccagcagcgctgctgcccctgagggcagcactggagtggcccctggggccctgaacagaggctacggccctgcccgggagagcatccccagcaagatggcctatgagacctatgaagctgacctgagcaccttccagggccctgggggcaagaggacagtgctgcctgagttcctggccttcctgcgggcagagggcctggccgaggccaccctgggcgccctgctgcagcagggctttgacagccctgctgtgctggccaccctggaggatgctgacatcaagtctgtggcccccaacctgggccaggcccgggtgctgagccggctggccaacagctgcaggacagagatgcagctgcggcggcaggacagaggaggccccctgccccgggcccggagcagcagcttcagccacaggtctgagctgctgcacggggacctggccagcctgggcgctgctgcccccctgcagacagccagccccagggctggggaccctgcccggcggcccagcagcgcccccagccagcacctgctggagacagctgccacctacagcgcccctggggtgggcacccacgccccccacttccccagcaacagcggctacagcagccccaccccctgtgccctgacagcccggctgagccccacctaccccctgcaggccggcgtggccctgaccaaccctggccccagcaaccccctgcaccctggccccaggacagcctacagcacagcctacacagtgcccatggagctgctgaagcgggagagaaatgtggccgccagccccctgcccagcccccacggcagcccccaggtgctgaggaagccaggggcccccctgggccccagcaccctgcccccagccagccagagcctgcacaccccccacagcccctaccagaaggtggccaggagaactggagcccccatcatcgtgtccaccatgctggcccctgagcccagcatccggccccagatcatgaatggccccctgcacccccggcccctggtggccctgctggatggccgggactgcaccgtggagatgcccatcctgaaggacctggccaccgtggccttctgtgatgcccagagcacccaggagatccacgagaaggtgctgaatgaggccgtgggcgccatgatgtaccacaccatcaccctgacccgggaggacctggagaagttcaaggccctgcgggtgattgtgcgcatcggcagcggctatgacaacgtggacatcaaggccgccggggagctgggcattgctgtgtgcaacatccccagcgctgctgtggaggagacagctgacagcaccatctgccacatcctgaacctgtacagaagaaacacctggctgtaccaggccctgcgggagggcaccagggtgcagagcgtggagcagatccgggaggtggccagcggggccgcccgcatccggggggagaccctgggcctcatcggcttcggccgcacaggccaggccgtggccgtgcgggccaaggccttcggcttcagcgtcatcttctatgacccctacctgcaggacggcatcgagaggagcctgggcgtgcagagggtgtacaccctgcaggacctgctgtaccagagcgactgtgtgtccctgcactgcaacctgaatgagcacaaccaccacctgatcaatgacttcaccatcaagcagatgaggcagggcgccttcctggtgaatgctgcccggggcggcctggtggatgagaaggccctggcccaggccctgaaggagggccgcatcagaggagctgccctggatgtgcatgagagcgagcccttctcctttgcccagggccccctgaaggatgcccccaacctgatctgcaccccccacacagcctggtacagcgagcaggccagcctggagatgagggaggccgccgccacagagatccggcgggccatcaccggccgcatccctgagagcctgaggaactgtgtgaacaaggagttctttgtgaccagcgccccctggagcgtgattgaccagcaggccatccaccctgagctgaatggagccacctaccgctacccacctggcatcgtgggcgtggcccctgggggcctgcctgctgccatggagggcatcatccctgggggcatccctgtgacccacaacctgcccaccgtggcccaccccagccaggcccccagccccaaccagcccaccaagcatggagacaaccgggagcaccccaatgagcagtag

SEQ ID NO: 19156 - DNA, 1338 bp, synthetic construct
  misc_feature 1..1338: note = Description of Artificial Sequence: Synthetic coding sequence
  source 1..1338: mol_type = other DNA
atggccctggtggacaagcacaaggtgaagaggcagaggctggaccgcatctgtgagggcatccggccccagatcatgaatggccccctgcacccccggcccctggtggccctgctggatggccgggactgcaccgtggagatgcccatcctgaaggacctggccaccgtggccttctgtgatgcccagagcacccaggagatccacgagaaggtgctgaatgaggccgtgggcgccatgatgtaccacaccatcaccctgacccgggaggacctggagaagttcaaggccctgcgggtgattgtgcgcatcggcagcggctatgacaacgtggacatcaaggccgccggggagctgggcattgctgtgtgcaacatccccagcgctgctgtggaggagacagctgacagcaccatctgccacatcctgaacctgtacagaagaaacacctggctgtaccaggccctgcgggagggcaccagggtgcagagcgtggagcagatccgggaggtggccagcggggccgcccgcatccggggggagaccctgggcctcatcggcttcggccgcacaggccaggccgtggccgtgcgggccaaggccttcggcttcagcgtcatcttctatgacccctacctgcaggacggcatcgagaggagcctgggcgtgcagagggtgtacaccctgcaggacctgctgtaccagagcgactgtgtgtccctgcactgcaacctgaatgagcacaaccaccacctgatcaatgacttcaccatcaagcagatgaggcagggcgccttcctggtgaatgctgcccggggcggcctggtggatgagaaggccctggcccaggccctgaaggagggccgcatcagaggagctgccctggatgtgcatgagagcgagcccttctcctttgcccagggccccctgaaggatgcccccaacctgatctgcaccccccacacagcctggtacagcgagcaggccagcctggagatgagggaggccgccgccacagagatccggcgggccatcaccggccgcatccctgagagcctgaggaactgtgtgaacaaggagttctttgtgaccagcgccccctggagcgtgattgaccagcaggccatccaccctgagctgaatggagccacctaccgctacccacctggcatcgtgggcgtggcccctgggggcctgcctgctgccatggagggcatcatccctgggggcatccctgtgacccacaacctgcccaccgtggcccaccccagccaggcccccagccccaaccagcccaccaagcatggagacaaccgggagcaccccaatgagcagtag

SEQ ID NO: 19157 - DNA, 1338 bp, synthetic construct; identical to SEQ ID NO: 19156
  misc_feature 1..1338: note = Description of Artificial Sequence: Synthetic coding sequence
  source 1..1338: mol_type = other DNA

SEQ ID NO: 19158 - DNA, 1338 bp, synthetic construct; identical to SEQ ID NO: 19156
  misc_feature 1..1338: note = Description of Artificial Sequence: Synthetic coding sequence
  source 1..1338: mol_type = other DNA

SEQ ID NO: 19159 - DNA, 12 bp, synthetic construct
  misc_feature 1..12: note = Description of Artificial Sequence: Synthetic coding sequence
  source 1..12: mol_type = other DNA
atggccctgtag

SEQ ID NO: 19160 - DNA, 1338 bp, synthetic construct; identical to SEQ ID NO: 19156
  misc_feature 1..1338: note = Description of Artificial Sequence: Synthetic coding sequence
  source 1..1338: mol_type = other DNA

SEQ ID NO: 19161 - DNA, 2331 bp, synthetic construct
  misc_feature 1..2331: note = Description of Artificial Sequence: Synthetic coding sequence
  source 1..2331: mol_type = other DNA
atgagcagcaccaggagccagaacccccacggcctgaagcagatcggcctggaccagatctgggatgacctgcgggccggcatccagcaggtgtacacccggcagagcatggccaagagccgctacatggagctgtacacccacgtgtacaactactgcacctctgtgcaccagagcaaccaggcccggggagctggggtgccccccagcaagagcaagaagggccagacccctgggggcgcccagtttgtgggcctggagctgtacaagaggctgaaggagttcctgaagaactacctgaccaacctgctgaaggatggagaggacctgatggatgagagcgtgctgaagttctacacccagcagtgggaggactaccgcttcagcagcaaggtgctgaatggcatctgtgcctacctgaacagacactgggtgcggcgggagtgtgatgagggcaggaagggcatctatgagatctacagcctggccctggtgacctggagggactgcctcttccggcccctgaacaagcaggtgaccaatgctgtgctgaagctgattgagaaggagagaaatggagagaccatcaacaccaggctcatcagcggcgtggtgcagagctatgtggagctgggcctgaatgaagatgatgcctttgccaagggccccaccctgactgtgtacaaggagagctttgagagccagttcctggccgacacagagcgcttctacacccgggagagcacagagttcctgcagcagaaccctgtgacagagtacatgaagaaggccgaggcccggctgctggaggagcagaggagagtgcaggtgtacctgcacgagagcacccaggatgagctggccaggaaatgtgagcaggtgctgattgagaagcacctggagatcttccacacagagttccagaacctgctggatgctgacaagaatgaagacctgggccgcatgtacaacctggtgagccgcatccaggacggcctgggggagctgaagaagctgctggagacccacatccacaaccagggcctggccgccatcgagaagtgtggggaggccgccctgaatgaccccaagatgtatgtgcagacagtgctggatgtgcacaagaagtacaatgccctggtgatgtctgccttcaacaatgatgctggctttgtggccgccctggacaaggcctgtggccgcttcatcaacaacaatgctgtgaccaagatggcccagagcagcagcaagagccctgagctgctggcccgctactgtgacagcctgctgaagaagagcagcaagaaccctgaggaggccgagctggaggacaccctgaaccaggtgatggtggtgttcaagtacatcgaggacaaggatgtgttccagaagttctacgccaagatgctggccaagaggctggtgcaccagaacagcgccagtgatgatgctgaggcctccatgatcagcaagctgaagcaggcctgtggctttgagtacaccagcaagctgcagaggatgttccaggacattggagtgtccaaggacctgaatgagcagttcaagaagcacctgaccaacagcgagcccctggacctggacttcagcatccaggtgctgagcagcggctcctggcccttccagcagagctgcacctttgccctgcccagcgagctggagaggagctaccagcgcttcaccgccttctacgccagccgccacagcggcaggaagctgacctggctgtaccagctgagcaaaggagagctggtgaccaactgcttcaagaaccgctacaccctgcaggccagcaccttccagatggccatcctgctgcagtacaacacagaagatgcctacacagtgcagcagctgacagacagcacccagatcaagatggacatcctggcccaggtgctgcagatcctgctgaagagcaagctgctggtgctggaggatgaaaatgccaacgtggatgaggtggagctgaagccagacaccctcatcaagctgtacctgggctacaagaacaagaagctgcgggtgaacatcaacgtgcccatgaagacagagcagaagcaggagcaggagaccacccacaagaacatcgaggaggacaggaagctgctgatccaggccgccatcgtgcgcatcatgaagatgaggaaggtgctgaagcaccagcagctgctgggggaggtgctgacccagctgagcagccgcttcaagccccgggtgcctgtgatcaagaagtgcatcgacatcctgattgagaaggagtacctggagcgggtggatggagagaaggacacctacagctacctggcctag

SEQ ID NO: 19162 - DNA, 2331 bp, synthetic construct; identical to SEQ ID NO: 19161
  misc_feature 1..2331: note = Description of Artificial Sequence: Synthetic coding sequence
  source 1..2331: mol_type = other DNA

SEQ ID NO: 19163 - DNA, 2112 bp, synthetic construct
  misc_feature 1..2112: note = Description of Artificial Sequence: Synthetic coding sequence
  source 1..2112: mol_type = other DNA
atgagcagcaccaggagccagaacccccacggcctgaagcagatcggcctggaccagatctgggatgacctgcgggccggcatccagcaggtgtacacccggcagagcatggccaagagccgctacatggagctgtacacccagcagtgggaggactaccgcttcagcagcaaggtgctgaatggcatctgtgcctacctgaacagacactgggtgagaagagaatgtgatgagggcaggaagggcatctatgagatctacagcctggccctggtgacctggagggactgcctcttccggcccctgaacaagcaggtgaccaatgctgtgctgaagctgattgagaaggagagaaatggagagaccatcaacaccaggctcatctctggagtggtgcagagctatgtggagctgggcctgaatgaagatgatgcctttgccaagggccccaccctgactgtgtacaaggagagctttgagagccagttcctggccgacacagagcgcttctacacccgggagagcacagagttcctgcagcagaaccctgtgacagagtacatgaagaaggccgaggcccggctgctggaggagcagaggagagtgcaggtgtacctgcacgagagcacccaggatgagctggccaggaaatgtgagcaggtgctgattgagaagcacctggagatcttccacacagagttccagaacctgctggatgctgacaagaatgaagacctgggccgcatgtacaacctggtgagccgcatccaggacggcctgggggagctgaagaagctgctggagacccacatccacaaccagggcctggccgccattgaaaaatgtggggaggccgccctgaatgaccccaagatgtatgtgcagacagtgctggatgtgcacaagaagtacaatgccctggtgatgtctgccttcaacaatgatgctggctttgtggccgccctggacaaggcctgtggccgcttcatcaacaacaatgctgtgaccaagatggcccagagcagcagcaagagccctgagctgctggcccgctactgtgacagcctgctgaagaagagcagcaagaaccctgaggaggccgagctggaggacaccctgaaccaggtgatggtggtgttcaagtacatcgaggacaaggatgtgttccagaagttctacgccaagatgctggccaagaggctggtgcaccagaacagcgccagtgatgatgctgaggcctccatgatcagcaagctgaagcaggcctgtggctttgagtacaccagcaagctgcagaggatgttccaggacatcggcgtgtccaaggacctgaatgagcagttcaagaagcacctgaccaacagcgagcccctggacctggacttcagcatccaggtgctgagcagcggctcctggcccttccagcagagctgcacctttgccctgcccagcgagctggagaggagctaccagcgcttcaccgccttctacgccagccgccacagcggcaggaagctgacctggctgtaccagctgagcaagggggagctggtgaccaactgcttcaagaaccgctacaccctgcaggccagcaccttccagatggccatcctgctgcagtacaacacagaagatgcctacacagtgcagcagctgacagacagcacccagatcaagatggacatcctggcccaggtgctgcagatcctgctgaagagcaagctgctggtgctggaggatgaaaatgccaacgtggatgaggtggagctgaagccagacaccctcatcaagctgtacctgggctacaagaacaagaagctgcgggtgaacatcaacgtgcccatgaagacagagcagaagcaggagcaggagaccacccacaagaacatcgaggaggacaggaagctgctgatccaggccgccatcgtgcgcatcatgaagatgaggaaggtgctgaagcaccagcagctgctgggggaggtgctgacccagctgagcagccgcttcaagccccgggtgcctgtgatcaagaagtgcatcgacatcctgattgagaaggagtacctggagcgggtggatggagagaaggacacctacagctacctggcctag

SEQ ID NO: 19164 - DNA, 1824 bp, synthetic construct
  misc_feature 1..1824: note = Description of Artificial Sequence: Synthetic coding sequence
  source 1..1824: mol_type = other DNA
atggagctgtacacccacgtgtacaactactgcacctctgtgcaccagagcaaccaggcccggggagctggggtgccccccagcaagagcaagaagggccagacccctgggggcgcccagtttgtgggcctggagctgtacaagaggctgaaggagttcctgaagaactacctgaccaacctgctgaaggatggagaggacctgatggatgagagcgtgctgaagttctacacccagcagtgggaggactaccgcttcagcagcaaggtgctgaatggcatctgtgcctacctgaacagacactgggtgcggcgggagtgtgatgagggcaggaagggcatctatgagatctacagcctggccctggtgacctggagggactgcctcttccggcccctgaacaagcaggtgaccaatgctgtgctgaagctgattgagaaggagagaaatggagagaccatcaacaccaggctcatcagcggcgtggtgcagagctatgtggagctgggcctgaatgaagatgatgcctttgccaagggccccaccctgactgtgtacaaggagagctttgagagccagttcctggccgacacagagcgcttctacacccgggagagcacagagttcctgcagcagaaccctgtgacagagtacatgaagaaggccgaggcccggctgctggaggagcagaggagagtgcaggtgtacctgcacgagagcacccaggatgagctggccaggaaatgtgagcaggtgctgattgagaagcacctggagatcttccacacagagttccagaacctgctggatgctgacaagaatgaagacctgggccgcatgtacaacctggtgagccgcatccaggacggcctgggggagctgaagaagctgctggagacccacatccacaaccagggcctggccgccatcgagaagtgtggggaggccgccctgaatgaccccaagatgtatgtgcagacagtgctggatgtgcacaagaagtacaatgccctggtgatgtctgccttcaacaatgatgctggctttgtggccgccctggacaaggcctgtggccgcttcatcaacaacaatgctgtgaccaagatggcccagagcagcagcaagagccctgagctgctggcccgctactgtgacagcctgctgaagaagagcagcaagaaccctgaggaggccgagctggaggacaccctgaaccaggtgatggtggtgttcaagtacatcgaggacaaggatgtgttccagaagttctacgccaagatgctggccaagaggctggtgcaccagaacagcgccagtgatgatgctgaggcctccatgatcagcaagctgaagcaggcctgtggctttgagtacaccagcaagctgcagaggatgttccaggacattggagtgtccaaggacctgaatgagcagttcaagaagcacctgaccaacagcgagcccctggacctggacttcagcatccaggtgctgagcagcggctcctggcccttccagcagagctgcacctttgccctgcccagcgagctggagaggagctaccagcgcttcaccgccttctacgccagccgccacagcggcaggaagctgacctggctgtaccagctgagcaaaggagagctggtgaccaactgcttcaagaaccgctacaccctgcaggccagcaccttccagatggccatcctgctgcagtacaacacagaagatgcctacacagtgcagcagctgacagacagcacccagatcaagatggacatcctggcccaggtgctgcagatcctgctgaagagcaagctgctgtag

SEQ ID NO: 19165 - DNA, 2121 bp, synthetic construct
  misc_feature 1..2121: note = Description of Artificial Sequence: Synthetic coding sequence
  source 1..2121: mol_type = other DNA
atgagcctgaagccccgggtggtggactttgatgagacctggaacaagctgctgaccaccatcaaggctgtggtgatgctggagtatgtggagcgggccacctggaatgaccgcttcagtgacatctatgccctgtgtgtggcctacccagagcccctgggggagcggctgtacacagagaccaagatcttcctggagaaccacgtgcgccacctgcacaagagggtgctggagagcgaggagcaggtgctggtgatgtaccaccgctactgggaggagtacagcaaaggagctgactacatggactgcctgtaccgctacctgaacacccagttcatcaagaagaacaagctgacagaagctgacctgcagtatggctatggaggagtggacatgaatgagcccctgatggagattggagagctggccctggacatgtggaggaagctgatggtggagcccctgcaggccatcctgatccgcatgctgctgcgggagatcaagaatgaccggggcggggaggaccccaaccagaaggtgatccacggcgtcatcaacagctttgtgcacgtggagcagtacaagaagaagttccccctgaagttctaccaggagatctttgagagccccttcctgacagaaacaggagagtactacaagcaggaggccagcaacctgctgcaggagagcaactgcagccagtacatggagaaggtgctgggccgcctgaaggatgaggagatccgctgcaggaagtacctgcaccccagcagctacaccaaggtgattcatgagtgccagcagaggatggtggccgaccacctgcagttcctgcacgccgagtgccacaacatcatccggcaggagaagaagaatgacatggccaacatgtatgtgctgctgcgggctgtgtccacaggcctgccccacatgatccaggagctgcagaaccacatccatgatgagggcctgcgggccaccagcaacctgacccaggagaacatgcccaccctgtttgtggagagcgtgctggaggtgcacggcaagtttgtgcagctgatcaacacagtgctgaatggagaccagcacttcatgtctgccctggacaaggccctgacctctgtggtgaactaccgggagcccaagtctgtgtgcaaggcccctgagctgctggccaagtactgtgacaacctgctgaagaagagcgccaagggcatgacagaaaatgaggtggaggaccggctgaccagcttcatcaccgtcttcaagtacattgatgacaaggatgtgttccagaagttctacgccaggatgctggccaagaggctcatccacggcctgtccatgtccatggattctgaggaggccatgatcaacaagctgaagcaggcctgtggctatgagttcaccagcaagctgcacaggatgtacacagacatgtctgtgtctgctgacctgaacaacaagttcaacaacttcatcaagaaccaggacacagtgattgacctgggcatctccttccagatctacgtgctgcaggccggggcctggcccctgacccaggcccccagcagcacctttgccatcccccaggagctggagaagtctgtgcagatgtttgagctgttctacagccagcacttcagcggcaggaagctgacctggctgcactacctgtgcacaggagaggtgaagatgaactacctgggcaagccctacgtggccatggtgaccacctaccagatggctgtgctgctggccttcaacaacagcgagaccgtgtcctacaaggagctgcaggacagcacccagatgaatgagaaggagctgaccaagaccatcaagagcctgctggatgtgaagatgatcaaccatgattctgagaaggaggacattgatgctgagagcagcttcagcctgaacatgaacttcagcagcaagaggaccaagttcaagatcaccacctccatgcagaaggacaccccccaggtgatcagccagagccgggcccgcttcaaccccagcatctccatgatcaagaagtgcatcgaggtgctgattgacaagcagtacatcgagaggagccaggccagcgcagatgagtacagctatgtggcctag

SEQ ID NO: 19166 - DNA, 2121 bp, synthetic construct; identical to SEQ ID NO: 19165
  misc_feature 1..2121: note = Description of Artificial Sequence: Synthetic coding sequence
  source 1..2121: mol_type = other DNA

SEQ ID NO: 19167 - DNA, 2238 bp, synthetic construct
  misc_feature 1..2238: note = Description of Artificial Sequence: Synthetic coding sequence
  source 1..2238: mol_type = other DNA
atgagcctgaagccccgggtggtggactttgatgagacctggaacaagctgctgaccaccatcaaggctgtggtgatgctggagtatgtggagcgggccacctggaatgaccgcttcagtgacatctatgccctgtgtgtggcctacccagagcccctgggggagcggctgtacacagagaccaagatcttcctggagaaccacgtgcgccacctgcacaagagggtgctggagagcgaggagcaggtgctggtgatgtaccaccgctactgggaggagtacagcaaaggagctgactacatggactgcctgtaccgctacctgaacacccagttcatcaagaagaacaagctgacagaagctgacctgcagtatggctatggaggagtggacatgaatgagcccctgatggagattggagagctggccctggacatgtggaggaagctgatggtggagcccctgcaggccatcctgatccgcatgctgctgcgggagatcaagaatgaccggggcggggaggaccccaaccagaaggtgatccacggcgtcatcaacagctttgtgcacgtggagcagtacaagaagaagttccccctgaagttctaccaggagatctttgagagccccttcctgacagaaacaggagagtactacaagcaggaggccagcaacctgctgcaggagagcaactgcagccagtacatggagaaggtgctgggccgcctgaaggatgaggagatccgctgcaggaagtacctgcaccccagcagctacaccaaggtgattcatgagtgccagcagaggatggtggccgaccacctgcagttcctgcacgccgagtgccacaacatcatccggcaggagaagaagaatgacatggccaacatgtatgtgctgctgcgggctgtgtccacaggcctgccccacatgatccaggagctgcagaaccacatccatgatgagggcctgcgggccaccagcaacctgacccaggagaacatgcccaccctgtttgtggagagcgtgctggaggtgcacggcaagtttgtgcagctgatcaacacagtgctgaatggagaccagcacttcatgtctgccctggacaaggccctgacctctgtggtgaactaccgggagcccaagtctgtgtgcaaggcccctgagctgctggccaagtactgtgacaacctgctgaagaagagcgccaagggcatgacagaaaatgaggtggaggaccggctgaccagcttcatcaccgtcttcaagtacattgatgacaaggatgtgttccagaagttctacgccaggatgctggccaagaggctcatccacggcctgtccatgtccatggattctgaggaggccatgatcaacaagctgaagcaggcctgtggctatgagttcaccagcaagctgcacaggatgtacacagacatgtctgtgtctgctgacctgaacaacaagttcaacaacttcatcaagaaccaggacacagtgattgacctgggcatctccttccagatctacgtgctgcaggccggggcctggcccctgacccaggcccccagcagcacctttgccatcccccaggagctggagaagtctgtgcagatgtttgagctgttctacagccagcacttcagcggcaggaagctgacctggctgcactacctgtgcacaggagaggtgaagatgaactacctgggcaagccctacgtggccatggtgaccacctaccagatggctgtgctgctggccttcaacaacagcgagaccgtgtcctacaaggagctgcaggacagcacccagatgaatgagaaggagctgaccaagaccatcaagagcctgctggatgtgaagatgatcaaccatgattctgagaaggaggacattgatgctgagagcagcttcagcctgaacatgaacttcagcagcaagaggaccaagttcaagatcaccacctccatgcagaaggacaccccccaggagatggagcagaccaggtctgctgtggatgaggacaggaagatgtacctgcaggccgccatcgtgcgcatcatgaaggccaggaaggtgctgcggcacaatgccctgatccaggaggtgatcagccagagccgggcccgcttcaaccccagcatctccatgatcaagaagtgcatcgaggtgctgattgacaagcagtacatcgagaggagccaggccagcgcagatgagtacagctatgtggcctag

SEQ ID NO: 19168 - DNA, 2238 bp, synthetic construct; identical to SEQ ID NO: 19167
  misc_feature 1..2238: note = Description of Artificial Sequence: Synthetic coding sequence
  source 1..2238: mol_type = other DNA

SEQ ID NO: 19169 - DNA, 2238 bp, synthetic construct; identical to SEQ ID NO: 19167
  misc_feature 1..2238: note = Description of Artificial Sequence: Synthetic coding sequence
  source 1..2238: mol_type = other DNA

SEQ ID NO: 19170 - DNA, 2067 bp, synthetic construct
  misc_feature 1..2067: note = Description of Artificial Sequence: Synthetic coding sequence
  source 1..2067: mol_type = other DNA
atgctgtatgtgtggcccatcctgaaccccctggagaaggacttcatccagaagctgcgcttcttctggaagatcatgtttggcatctgcatccgctactgggaggagtacagcaaaggagctgactacatggactgcctgtaccgctacctgaacacccagttcatcaagaagaacaagctgacagaggccgacctgcagtatggctacggcggcgtggacatgaatgagcccctgatggagatcggggagctggccctggacatgtggaggaagctgatggtggagcccctgcaggccatcctgatccgcatgctgctgcgggagatcaagaatgacagaggaggagaggaccccaaccagaaggtgattcatggagtcatcaacagctttgtgcacgtggagcagtacaagaagaagttccccctgaagttctaccaggagatctttgagagccccttcctgacagagaccggggagtactacaagcaggaggccagcaacctgctgcaggagagcaactgcagccagtacatggagaaggtgctgggccgcctgaaggatgaggagatccgctgcaggaagtacctgcaccccagcagctacaccaaggtgattcatgagtgccagcagaggatggtggccgaccacctgcagttcctgcatgctgagtgccacaacatcatccggcaggagaagaagaatgacatggccaacatgtatgtgctgctgcgggctgtgtccacaggcctgccccacatgatccaggagctgcagaaccacatccatgatgagggcctgcgggccaccagcaacctgacccaggagaacatgcccaccctgtttgtggagagcgtgctggaggtgcacggcaagtttgtgcagctgatcaacacagtgctgaatggagaccagcacttcatgtctgccctggacaaggccctgacctctgtggtgaactaccgggagcccaagtctgtgtgcaaggcccctgagctgctggccaagtactgtgacaacctgctgaagaagagcgccaagggcatgacagaaaatgaggtggaggaccggctgaccagcttcatcaccgtcttcaagtacattgatgacaaggatgtgttccagaagttctacgccaggatgctggccaagaggctcatccacggcctgtccatgtccatggacagcgaggaggccatgatcaacaagctgaagcaggcctgtggctatgagttcaccagcaagctgcacaggatgtacacagacatgtctgtgtctgctgacctgaacaacaagttcaacaacttcatcaagaaccaggacaccgtcatcgacctgggcatctccttccagatctacgtgctgcaggccggggcctggcccctgacccaggcccccagcagcacctttgccatcccccaggagctggagaagtctgtgcagatgtttgagctgttctacagccagcacttcagcggcaggaagctgacctggctgcactacctgtgcaccggggaggtgaagatgaactacctgggcaagccctacgtggccatggtgaccacctaccagatggctgtgctgctggccttcaacaacagcgagaccgtgtcctacaaggagctgcaggacagcacccagatgaatgagaaggagctgaccaagaccatcaagagcctgctggatgtgaagatgatcaaccacgacagcgagaaggaggacattgatgctgagagcagcttcagcctgaacatgaacttcagcagcaagaggaccaagttcaagatcaccacctccatgcagaaggacaccccccaggagatggagcagaccaggtctgctgtggatgaggacaggaagatgtacctgcaggccgccatcgtgcgcatcatgaaggccaggaaggtgctgcggcacaatgccctgatccaggaggtgatcagccagagccgggcccgcttcaaccccagcatctccatgatcaagaagtgcatcgaggtgctgattgacaagcagtacatcgagaggagccaggccagcgcagatgagtacagctatgtggcctag

SEQ ID NO: 19171 - DNA, 651 bp, synthetic construct
  misc_feature 1..651: note = Description of Artificial Sequence: Synthetic coding sequence
  source 1..651: mol_type = other DNA
atgagcctgaagccccgggtggtggactttgatgagacctggaacaagctgctgaccaccatcaaggctgtggtgatgctggagtatgtggagcgggccacctggaatgaccgcttcagtgacatctatgccctgtgtgtggcctacccagagcccctgggggagcggctgtacacagagaccaagatcttcctggagaaccacgtgcgccacctgcacaagagggtgctggagagcgaggagcaggtgctggtgatgtaccaccgctactgggaggagtacagcaaaggagctgactacatggactgcctgtaccgctacctgaacacccagttcatcaagaagaacaagctgacagaagctgacctgcagtatggctatggaggagtggacatgaatgagcccctgatggagattggagagctggccctggacatgtggaggaagctgatggtggagcccctgcaggccatcctgatccgcatgctgctgcgggagatcaagaatgaccggggcggggaggaccccaaccagaaggtgatccacggcgtcatcaacagctttgtgcacgtggagcagtacaagaagaagttccccctgaagttctaccaggagatctttgagagccccttcctgacagaaacaggatag

SEQ ID NO: 19172 - DNA, 2295 bp, synthetic construct
  misc_feature 1..2295: note = Description of Artificial Sequence: Synthetic coding sequence
  source 1..2295: mol_type = other DNA
atgtacagagtgacctggagcaccttctggctgcgcttccagcactacacctgcaccatgagcctgaagccccgggtggtggactttgatgagacctggaacaagctgctgaccaccatcaaggctgtggtgatgctggagtatgtggagcgggccacctggaatgaccgcttcagtgacatctatgccctgtgtgtggcctacccagagcccctgggggagcggctgtacacagagaccaagatcttcctggagaaccacgtgcgccacctgcacaagagggtgctggagagcgaggagcaggtgctggtgatgtaccaccgctactgggaggagtacagcaaaggagctgactacatggactgcctgtaccgctacctgaacacccagttcatcaagaagaacaagctgacagaggccgacctgcagtatggctacggcggcgtggacatgaatgagcccctgatggagatcggggagctggccctggacatgtggaggaagctgatggtggagcccctgcaggccatcctgatccgcatgctgctgcgggagatcaagaatgacagaggaggagaggaccccaaccagaaggtgattcatggagtcatcaacagctttgtgcacgtggagcagtacaagaagaagttccccctgaagttctaccaggagatctttgagagccccttcctgacagagaccggggagtactacaagcaggaggccagcaacctgctgcaggagagcaactgcagccagtacatggagaaggtgctgggccgcctgaaggatgaggagatccgctgcaggaagtacctgcaccccagcagctacaccaaggtgattcatgagtgccagcagaggatggtggccgaccacctgcagttcctgcatgctgagtgccacaacatcatccggcaggagaagaagaatgacatggccaacatgtatgtgctgctgcgggctgtgtccacaggcctgccccacatgatccaggagctgcagaaccacatccatgatgagggcctgcgggccaccagcaacctgacccaggagaacatgcccaccctgtttgtggagagcgtgctggaggtgcacggcaagtttgtgcagctgatcaacacagtgctgaatggagaccagcacttcatgtctgccctggacaaggccctgacctctgtggtgaactaccgggagcccaagtctgtgtgcaaggcccctgagctgctggccaagtactgtgacaacctgctgaagaagagcgccaagggcatgacagaaaatgaggtggaggaccggctgaccagcttcatcaccgtcttcaagtacattgatgacaaggatgtgttccagaagttctacgccaggatgctggccaagaggctcatccacggcctgtccatgtccatggacagcgaggaggccatgatcaacaagctgaagcaggcctgtggctatgagttcaccagcaagctgcacaggatgtacacagacatgtctgtgtctgctgacctgaacaacaagttcaacaacttcatcaagaaccaggacaccgtcatcgacctgggcatctccttccagatctacgtgctgcaggccggggcctggcccctgacccaggcccccagcagcacctttgccatcccccaggagctggagaagtctgtgcagatgtttgagctgttctacagccagcacttcagcggcaggaagctgacctggctgcactacctgtgcaccggggaggtgaagatgaactacctgggcaagccctacgtggccatggtgaccacctaccagatggctgtgctgctggccttcaacaacagcgagaccgtgtcctacaaggagctgcaggacagcacccagatgaatgagaaggagctgaccaagaccatcaagagcctgctggatgtgaagatgatcaaccacgacagcgagaaggaggacattgatgctgagagcagcttcagcctgaacatgaacttcagcagcaagaggaccaagttcaagatcaccacctccatgcagaaggacaccccccaggagatggagcagaccaggtctgctgtggatgaggacaggaagatgtacctgcaggccgccatcgtgcgcatcatgaaggccaggaaggtgctgcggcacaatgccctgatccaggaggtgatcagccagagccgggcccgcttcaaccccagcatctccatgatcaagaagtgcatcgaggtgctgattgacaagcagtacatcgagaggagccaggccagcgcagatgagtacagctatgtggcctag

SEQ ID NO: 19173 - DNA, 2307 bp, synthetic construct
  misc_feature 1..2307: note = Description of Artificial Sequence: Synthetic coding sequence
  source 1..2307: mol_type = other DNA
atgagcaacctgagcaagggcaccggcagcaggaaggacaccaagatgaggatccgggccttccccatgaccatggatgagaagtatgtgaacagcatctgggacctgctgaagaatgccatccaggagatccagaggaagaacaacagcggcctgagctttgaggagctgtacagaaatgcctacaccatggtgctgcacaagcatggagagaagctgtacacaggcctgcgggaggtggtgacagagcacctgatcaacaaggtgagagaagatgtgctgaacagcctgaacaacaacttcctgcagaccctgaaccaggcctggaatgaccaccagacagccatggtgatgatccgggacatcctgatgtacatggacagagtgtatgtgcagcagaacaacgtggagaatgtgtacaacctgggcctcatcatcttccgggaccaggtggtgcgctatggctgcatccgggaccacctgcggcagaccctgctggacatgattgcccgggagaggaagggggaggtggtggacagaggagccatcagaaatgcctgccagatgctgatgatcctgggcctggagggccgctctgtgtatgaagaagattttgaggcccccttcctggagatgtctgctgagttcttccagatggagagccagaagttcctggctgaaaattctgcctctgtgtacatcaagaaggtggaggcccgcatcaatgaggagattgagcgggtgatgcactgcctggacaagagcacagaggagcccatcgtgaaggtggtggagcgggagctgatcagcaagcacatgaagaccatcgtggagatggagaacagcggcctggtgcacatgctgaagaatggcaagacagaggacctgggctgcatgtacaagctgttcagccgggtgcccaacggcctgaagaccatgtgtgagtgcatgagcagctacctgcgggagcagggcaaggccctggtgtctgaggagggggagggcaagaaccctgtggactacatccagggcctgctggacctgaagagcagatttgaccgcttcctgctggagagcttcaacaatgacaggctcttcaagcagaccatcgccggggactttgagtacttcctgaacctgaacagccgcagccctgagtacctgagcctcttcattgatgacaagctgaagaagggcgtgaagggcctgacagagcaggaggtggagaccatcctggacaaggccatggtgctcttccgcttcatgcaggagaaggatgtgtttgagcgctactacaagcagcacctggcccggcggctgctgaccaacaagtctgtgtctgatgacagcgagaagaacatgatcagcaagctgaagacagaatgtggctgccagttcaccagcaagctggagggcatgttccgggacatgagcatcagcaacaccaccatggatgagttccggcagcacctgcaggccaccggggtgtccctgggcggcgtggacctgactgtgcgggtgctgaccaccggctactggcccacccagagcgccacccccaagtgcaacatccccccagcccccaggcatgcctttgagatcttccgccgcttctacctggccaagcacagcggccggcagctgaccctgcagcaccacatgggcagcgctgacctgaatgccaccttctacggccctgtgaagaaggaggatggcagcgaggtgggcgtgggcggggcccaggtgacaggcagcaacaccaggaagcacatcctgcaggtgtccaccttccagatgaccatcctgatgctgttcaacaaccgggagaagtacacctttgaggagatccagcaggagacagacatccctgagcgggagctggtgcgggccctgcagagcctggcctgtgggaagcccacccagagggtgctgaccaaggagcccaagagcaaggagattgaaaatggccacatcttcaccgtgaatgaccagttcaccagcaagctgcaccgggtgaagatccagacagtggccgccaagcagggcgagagtgaccctgagaggaaggagacccggcagaaggtggatgatgacaggaagcatgaaattgaagctgccatcgtgcgcatcatgaagagcaggaagaagatgcagcacaacgtgctggtggccgaggtgacccagcagctgaaggcccgcttcctgcccagccctgtggtgatcaagaagagaattgagggcctgattgagcgggagtacctggcccggaccccagaggacaggaaggtgtacacctacgtggcctag

SEQ ID NO: 19174 - DNA, 2109 bp, synthetic construct
  misc_feature 1..2109: note = Description of Artificial Sequence: Synthetic coding sequence
  source 1..2109: mol_type = other DNA
atgagcaacctgagcaagggcaccggcagcaggaaggacaccaagatgaggatccgggccttccctgtgagagaagatgtgctgaacagcctgaacaacaacttcctgcagaccctgaaccaggcctggaatgaccaccagacagccatggtgatgatccgggacatcctgatgtacatggacagagtgtatgtgcagcagaacaacgtggagaatgtgtacaacctgggcctcatcatcttccgggaccaggtggtgcgctatggctgcatccgggaccacctgcggcagaccctgctggacatgattgcccgggagaggaagggggaggtggtggacagaggagccatcagaaatgcctgccagatgctgatgatcctgggcctggagggccgctctgtgtatgaagaagattttgaggcccccttcctggagatgtctgctgagttcttccagatggagagccagaagttcctggctgaaaattctgcctctgtgtacatcaagaaggtggaggcccgcatcaatgaggagattgagcgggtgatgcactgcctggacaagagcacagaggagcccatcgtgaaggtggtggagcgggagctgatcagcaagcacatgaagaccatcgtggagatggagaacagcggcctggtgcacatgctgaagaatggcaagacagaggacctgggctgcatgtacaagctgttcagccgggtgcccaacggcctgaagaccatgtgtgagtgcatgagcagctacctgcgggagcagggcaaggccctggtgtctgaggagggggagggcaagaaccctgtggactacatccagggcctgctggacctgaagagcagatttgaccgcttcctgctggagagcttcaacaatgacaggctcttcaagcagaccatcgccggggactttgagtacttcctgaacctgaacagccgcagccctgagtacctgagcctcttcattgatgacaagctgaagaagggcgtgaagggcctgacagagcaggaggtggagaccatcctggacaaggccatggtgctcttccgcttcatgcaggagaaggatgtgtttgagcgctactacaagcagcacctggcccggcggctgctgaccaacaagtctgtgtctgatgacagcgagaagaacatgatcagcaagctgaagacagaatgtggctgccagttcaccagcaagctggagggcatgttccgggacatgagcatcagcaacaccaccatggatgagttccggcagcacctgcaggccaccggggtgtccctgggcggcgtggacctgactgtgcgggtgctgaccaccggctactggcccacccagagcgccacccccaagtgcaacatccccccagcccccaggcatgcctttgagatcttccgccgcttctacctggccaagcacagcggccggcagctgaccctgcagcaccacatgggcagcgctgacctgaatgccaccttctacggccctgtgaagaaggaggatggcagcgaggtgggcgtgggcggggcccaggtgacaggcagcaacaccaggaagcacatcctgcaggtgtccaccttccagatgaccatcctgatgctgttcaacaaccgggagaagtacacctttgaggagatccagcaggagacagacatccctgagcgggagctggtgcgggccctgcagagcctggcctgtgggaagcccacccagagggtgctgaccaaggagcccaagagcaaggagattgaaaatggccacatcttcaccgtgaatgaccagttcaccagcaagctgcaccgggtgaagatccagacagtggccgccaagcagggcgagagtgaccctgagaggaaggagacccggcagaaggtggatgatgacaggaagcatgaaattgaagctgccatcgtgcgcatcatgaagagcaggaagaagatgcagcacaacgtgctggtggccgaggtgacccagcagctgaaggcccgcttcctgcccagccctgtggtgatcaagaagagaattgagggcctgattgagcgggagtacctggcccggaccccagaggacaggaaggtgtacacctacgtggcctag

SEQ ID NO: 19175 - DNA, 2235 bp, synthetic construct
  misc_feature 1..2235: note = Description of Artificial Sequence: Synthetic coding sequence
  source 1..2235: mol_type = other DNA
atggatgagaagtatgtgaacagcatctgggacctgctgaagaatgccatccaggagatccagaggaagaacaacagcggcctgagctttgaggagctgtacagaaatgcctacaccatggtgctgcacaagcatggagagaagctgtacacaggcctgcgggaggtggtgacagagcacctgatcaacaaggtgagagaagatgtgctgaacagcctgaacaacaacttcctgcagaccctgaaccaggcctggaatgaccaccagacagccatggtgatgatccgggacatcctgatgtacatggacagagtgtatgtgcagcagaacaacgtggagaatgtgtacaacctgggcctcatcatcttccgggaccaggtggtgcgctatggctgcatccgggaccacctgcggcagaccctgctggacatgattgcccgggagaggaagggggaggtggtggacagaggagccatcagaaatgcctgccagatgctgatgatcctgggcctggagggccgctctgtgtatgaagaagattttgaggcccccttcctggagatgtctgctgagttcttccagatggagagccagaagttcctggctgaaaattctgcctctgtgtacatcaagaaggtggaggcccgcatcaatgaggagattgagcgggtgatgcactgcctggacaagagcacagaggagcccatcgtgaaggtggtggagcgggagctgatcagcaagcacatgaagaccatcgtggagatggagaacagcggcctggtgcacatgctgaagaatggcaagacagaggacctgggctgcatgtacaagctgttcagccgggtgcccaacggcctgaagaccatgtgtgagtgcatgagcagctacctgcgggagcagggcaaggccctggtgtctgaggagggggagggcaagaaccctgtggactacatccagggcctgctggacctgaagagcagatttgaccgcttcctgctggagagcttcaacaatgacaggctcttcaagcagaccatcgccggggactttgagtacttcctgaacctgaacagccgcagccctgagtacctgagcctcttcattgatgacaagctgaagaagggcgtgaagggcctgacagagcaggaggtggagaccatcctggacaaggccatggtgctcttccgcttcatgcaggagaaggatgtgtttgagcgctactacaagcagcacctggcccggcggctgctgaccaacaagtctgtgtctgatgacagcgagaagaacatgatcagcaagctgaagacagaatgtggctgccagttcaccagcaagctggagggcatgttccgggacatgagcatcagcaacaccaccatggatgagttccggcagcacctgcaggccaccggggtgtccctgggcggcgtggacctgactgtgcgggtgctgaccaccggctactggcccacccagagcgccacccccaagtgcaacatccccccagcccccaggcatgcctttgagatcttccgccgcttctacctggccaagcacagcggccggcagctgaccctgcagcaccacatgggcagcgctgacctgaatgccaccttctacggccctgtgaagaaggaggatggcagcgaggtgggcgtgggcggggcccaggtgacaggcagcaacaccaggaagcacatcctgcaggtgtccaccttccagatgaccatcctgatgctgttcaacaaccgggagaagtacacctttgaggagatccagcaggagacagacatccctgagcgggagctggtgcgggccctgcagagcctggcctgtgggaagcccacccagagggtgctgaccaaggagcccaagagcaaggagattgaaaatggccacatcttcaccgtgaatgaccagttcaccagcaagctgcaccgggtgaagatccagacagtggccgccaagcagggcgagagtgaccctgagaggaaggagacccggcagaaggtggatgatgacaggaagcatgaaattgaagctgccatcgtgcgcatcatgaagagcaggaagaagatgcagcacaacgtgctggtggccgaggtgacccagcagctgaaggcccgcttcctgcccagccctgtggtgatcaagaagagaattgagggcctgattgagcgggagtacctggcccggaccccagaggacaggaaggtgtacacctacgtggcctag

SEQ ID NO: 19176 - DNA, 2235 bp, synthetic construct; identical to SEQ ID NO: 19175
  misc_feature 1..2235: note = Description of Artificial Sequence: Synthetic coding sequence
  source 1..2235: mol_type = other DNA

SEQ ID NO: 19177 - DNA, 1398 bp, synthetic construct
  misc_feature 1..1398: note = Description of Artificial Sequence: Synthetic coding sequence
  source 1..1398: mol_type = other DNA
atggagaccggcttccctgccatcatgtacccaggcagcttcatcggcggctggggcgaggagtacctgtcctgggagggccctggcctgcctgactttgtgttccagcagcagcctgtggagagcgaggccatgcactgcagcaaccccaagagcggcgtggtgctggccaccgtggcccggggcccagatgcctgccagatcctgacccgggcccccctgggccaggaccccccccagaggacagtgctgggcctgctgacagccaacggccagtacagaaggacctgtggccagggcatcacccgcatccgctgctacagcggctctgaaaatgccttccccccagctgggaagaaggccctgcctgactgtggggtgcaggagccccccaagcagggctttgacatctacatggatgagctggagcagggcgaccgggacagctgcagcgtgcgggagggcatggcctttgaagatgtgtatgaggtggacaccggcaccctgaagagtgacctgcacttcctgctggacttcaacacagtgagccccatgctggtggacagcagcctgctgagccagagcgaggacatcagcagcctgggcacagatgtgatcaacgtgacagaatatgcagaggagatctaccagtacctgcgggaggccgagatccgccaccggcccaaggcccactacatgaagaagcagcctgacatcacagagggcatgaggaccatcctggtggactggctggtggaggtgggggaggagtacaagctgcgggcagagaccctgtacctggccgtgaacttcctggaccgcttcctgagctgcatgtctgtgctgcggggcaagctgcagctggtgggcacagctgccatgctgctggccagcaaatatgaggagatctacccacctgaggtggatgaatttgtgtacatcacagatgacacctacaccaagaggcagctgctgaagatggagcacctgctgctgaaggtgctggcctttgacctgactgtgcccaccaccaaccagttcctgctgcagtacctgcggcggcagggcgtgtgtgtgaggacagagaacctggccaagtatgtggccgagctgagcctgctggaggccgaccccttcctgaagtacctgcccagcctgattgctgctgctgccttctgcctggccaactacacagtgaacaagcacttctggccagagaccctggccgccttcaccggctacagcctgtctgaaattgtgccctgcctgtctgagctgcacaaggcctacctggacatcccccaccggccccagcaggccatccgggagaagtacaaggccagcaagtacctgtgtgtgtccctgatggagcccccagctgtgctgctgctgcagtag

SEQ ID NO: 19178 - DNA, 1395 bp, synthetic construct
  misc_feature 1..1395: note = Description of Artificial Sequence: Synthetic coding sequence
  source 1..1395: mol_type = other DNA
atggagaccggcttccctgccatcatgtacccaggcagcttcatcggcggctggggcgaggagtacctgtcctgggagggccctggcctgcctgactttgtgttccagcagcctgtggagagcgaggccatgcactgcagcaaccccaagtctggagtggtgctggccaccgtggcccggggcccagatgcctgccagatcctgacccgggcccccctgggccaggaccccccccagaggacagtgctgggcctgctgacagccaacggccagtacagaaggacctgtggccagggcatcacccgcatccgctgctacagcggctctgaaaatgccttccccccagctgggaagaaggccctgcctgactgtggggtgcaggagccccccaagcagggctttgacatctacatggatgagctggagcagggcgaccgggacagctgcagcgtgcgggagggcatggcctttgaagatgtgtatgaggtggacaccggcaccctgaagagtgacctgcacttcctgctggacttcaacacagtgagccccatgctggtggacagcagcctgctgagccagagcgaggacatcagcagcctgggcacagatgtgatcaacgtgacagaatatgcagaggagatctaccagtacctgcgggaggccgagatccgccaccggcccaaggcccactacatgaagaagcagcctgacatcacagagggcatgaggaccatcctggtggactggctggtggaggtgggggaggagtacaagctgcgggcagagaccctgtacctggccgtgaacttcctggaccgcttcctgagctgcatgtctgtgctgcggggcaagctgcagctggtgggcacagctgccatgctgctggccagcaaatatgaggagatctacccacctgaggtggatgaatttgtgtacatcacagatgacacctacaccaagaggcagctgctgaagatggagcacctgctgctgaaggtgctggcctttgacctgactgtgcccaccaccaaccagttcctgctgcagtacctgcggcggcagggcgtgtgtgtgaggacagagaacctggccaagtatgtggccgagctgagcctgctggaggccgaccccttcctgaagtacctgcccagcctgattgctgctgctgccttctgcctggccaactacacagtgaacaagcacttctggccagagaccctggccgccttcaccggctacagcctgtctgagatcgtgccctgcctgtctgagctgcacaaggcctacctggacatcccccaccggccccagcaggccatccgggagaagtacaaggccagcaagtacctgtgtgtgtccctgatggagcccccagctgtgctgctgctgcagtag

SEQ ID NO: 19179 - DNA, 1266 bp, synthetic construct
  misc_feature 1..1266: note = Description of Artificial Sequence: Synthetic coding sequence
  source 1..1266: mol_type = other DNA
atgcactgcagcaaccccaagagcggcgtggtgctggccaccgtggcccggggcccagatgcctgccagatcctgacccgggcccccctgggccaggaccccccccagaggacagtgctgggcctgctgacagccaacggccagtacagaaggacctgtggccagggcatcacccgcatccgctgctacagcggctctgaaaatgccttccccccagctgggaagaaggccctgcctgactgtggggtgcaggagccccccaagcagggctttgacatctacatggatgagctggagcagggcgaccgggacagctgcagcgtgcgggagggcatggcctttgaagatgtgtatgaggtggacaccggcaccctgaagagtgacctgcacttcctgctggacttcaacacagtgagccccatgctggtggacagcagcctgctgagccagagcgaggacatcagcagcctgggcacagatgtgatcaacgtgacagaatatgcagaggagatctaccagtacctgcgggaggccgagatccgccaccggcccaaggcccactacatgaagaagcagcctgacatcacagagggcatgaggaccatcctggtggactggctggtggaggtgggggaggagtacaagctgcgggcagagaccctgtacctggccgtgaacttcctggaccgcttcctgagctgcatgtctgtgctgcggggcaagctgcagctggtgggcacagctgccatgctgctggccagcaaatatgaggagatctacccacctgaggtggatgaatttgtgtacatcacagatgacacctacaccaagaggcagctgctgaagatggagcacctgctgctgaaggtgctggcctttgacctgactgtgcccaccaccaaccagttcctgctgcagtacctgcggcggcagggcgtgtgtgtgaggacagagaacctggccaagtatgtggccgagctgagcctgctggaggccgaccccttcctgaagtacctgcccagcctgattgctgctgctgccttctgcctggccaactacacagtgaacaagcacttctggccagagaccctggccgccttcaccggctacagcctgtctgaaattgtgccctgcctgtctgagctgcacaaggcctacctggacatcccccaccggccccagcaggccatccgggagaagtacaaggccagcaagtacctgtgtgtgtccctgatggagcccccagctgtgctgctgctgcagtag

SEQ ID NO: 19180 - DNA, 1266 bp, synthetic construct; identical to SEQ ID NO: 19179
  misc_feature 1..1266: note = Description of Artificial Sequence: Synthetic coding sequence
  source 1..1266: mol_type = other DNA

SEQ ID NO: 19181 - DNA, 1299 bp, synthetic construct
  misc_feature 1..1299: note = Description of Artificial Sequence: Synthetic coding sequence
  source 1..1299: mol_type = other DNA
atgctgggcaacagcgcccctggccctgccacccgggaggccggcagcgccctgctggccctgcagcagacagccctgcaggaggaccaggagaacatcaaccctgagaaggccgcccctgtgcagcagcccaggacccgggccgccctggccgtgctgaagagcggcaacccccggggcctggcccagcagcagaggcccaagacccggcgggtggcccccctgaaggacctgcctgtgaatgatgagcacgtgacagtgcccccctggaaggccaacagcaagcagcctgccttcaccatccacgtggatgaggccgagaaggaggcccagaagaagccagctgagagccagaagattgaaagagaagatgccctggccttcaacagcgccatcagcctgcccggccccaggaagcccctggtgcccctggactaccccatggatggcagctttgagagcccccacaccatggacatgagcatcatcctggaggatgagaagcctgtgtctgtgaatgaggtgcctgactaccacgaggacatccacacctacctgcgggagatggaggtgaagtgcaagcccaaggtgggctacatgaagaagcagcctgacatcaccaacagcatgagggccatcctggtggactggctggtggaggtgggggaggagtacaagctgcagaatgagaccctgcacctggccgtgaactacatcgaccgcttcctgagctccatgtctgtgctgcggggcaagctgcagctggtgggcacagctgccatgctgctggccagcaagtttgaggagatctacccacctgaggtggccgagtttgtgtacatcacagatgacacctacaccaagaagcaggtgctgaggatggagcacctggtgctgaaggtgctgacctttgacctggccgcccccaccgtgaaccagttcctgacccagtacttcctgcaccagcagcctgccaactgcaaggtggagagcctggccatgttcctgggggagctgagcctgattgatgctgacccctacctgaagtacctgcccagcgtgattgctggggccgccttccacctggccctgtacacagtgacaggccagagctggccagagagcctcatcaggaagacaggctacaccctggagagcctgaagccctgcctgatggacctgcaccagacctacctgaaggccccccagcacgcccagcagagcatccgggagaagtacaagaacagcaagtaccatggagtgtccctgctgaaccccccagagaccctgaacctgtag

SEQ ID NO: 19182 - DNA, 1302 bp, synthetic construct
  misc_feature 1..1302: note = Description of Artificial Sequence: Synthetic coding sequence
  source 1..1302: mol_type = other DNA
atggccctgcgggtgaccaggaacagcaagatcaatgctgagaacaaggccaagatcaacatggccggggccaagagggtgcccacagccccagctgccaccagcaagccaggcctgcggcccaggacagccctgggggacatcggcaacaaggtgtctgagcagctgcaggccaagatgcccatgaagaaggaggccaagcccagcgccaccgggaaggtgattgacaagaagctgcccaagcccctggagaaggtgcccatgctggtgcctgtgcctgtgtctgagcctgtgcctgagcctgagcctgagcctgagcctgagcctgtgaaggaggagaagctgagccctgagcccatcctggtggacacagccagccccagccccatggagaccagcggctgtgccccagctgaggaggacctgtgccaggccttcagtgatgtgatcctggccgtgaatgatgtggatgctgaagatggagctgaccccaacctgtgcagtgaatatgtgaaggacatctatgcctacctgcggcagctggaggaggagcaggccgtgcggcccaagtacctgctgggccgggaggtgacaggcaacatgagggccatcctgattgactggctggtgcaggtgcagatgaagttccggctgctgcaggagaccatgtacatgacagtgtccatcatcgaccgcttcatgcagaacaactgtgtgcccaagaagatgctgcagctggtgggcgtgacagccatgttcatcgccagcaaatatgaggagatgtacccacctgagatcggggactttgcctttgtgacagacaacacctacaccaagcaccagatccggcagatggagatgaagatcctgcgggccctgaactttggcctgggccggcccctgcccctgcacttcctgcggcgggccagcaagatcggggaggtggatgtggagcagcacaccctggccaagtacctgatggagctgaccatgctggactatgacatggtgcacttcccccccagccagattgctgctggggccttctgcctggccctgaagatcctggacaacggggagtggacccccaccctgcagcactacctgagctacacagaggagagcctgctgcctgtgatgcagcacctggccaagaatgtggtgatggtgaaccagggcctgaccaagcacatgacagtgaagaacaagtatgccaccagcaagcacgccaagatcagcaccctgccccagctgaacagcgccctggtgcaggacctggccaaggctgtggccaaggtgtag

SEQ ID NO: 19183 - DNA, 1191 bp, synthetic construct
  misc_feature 1..1191: note = Description of Artificial Sequence: Synthetic coding sequence
  source 1..1191: mol_type = other DNA
atggccctgcgggtgaccaggaacagcaagatcaatgctgagaacaaggccaagatcaacatggccggggccaagagggtgcccacagccccagctgccaccagcaagccaggcctgcggcccaggacagccctgggggacatcggcaacaaggtgtctgagcagctgcaggccaagatgcccatgaagaaggaggccaagcccagcgccaccgggaaggtgattgacaagaagctgcccaagcccctggagaaggtgcccatgctggtgcctgtgcctgtgtctgagcctgtgcctgagcctgagcctgagcctgagcctgagcctgtgaaggaggagaagctgagccctgagcccatcctggtggacacagccagccccagccccatggagaccagcggctgtgccccagctgaggaggacctgtgccaggccttcagtgatgtgatcctggccgtgaatgatgtggatgctgaagatggagctgaccccaacctgtgcagtgaatatgtgaaggacatctatgcctacctgcggcagctggaggaggagcaggccgtgcggcccaagtacctgctgggccgggaggtgacaggcaacatgagggccatcctgattgactggctggtgcaggtgcagatgaagttccggctgctgcaggagaccatgtacatgacagtgtccatcatcgaccgcttcatgcagaacaactgtgtgcccaagaagatgctgcagctggtgggcgtgacagccatgttcatcgccagcaaatatgaggagatgtacccacctgagatcggggactttgcctttgtgacagacaacacctacaccaagcaccagatccggcagatggagatgaagatcctgcgggccctgaactttggcctgggccggcccctgcccctgcacttcctgcggcgggccagcaagatcggggaggtggatgtggagcagcacaccctggccaagtacctgatggagctgaccatgctggactatgacatggtgcacttcccccccagccagattgctgctggggccttctgcctggccctgaagatcctggacaacggggagtggacagtgaagaacaagtatgccaccagcaagcacgccaagatcagcaccctgccccagctgaacagcgccctggtgcaggacctggccaaggctgtggccaaggtgtag

SEQ ID NO: 19184 - DNA, 1206 bp, synthetic construct
  misc_feature 1..1206: note = Description of Artificial Sequence: Synthetic coding sequence
  source 1..1206: mol_type = other DNA
atggccctgcgggtgaccaggaacagcaagatcaatgctgagaacaaggccaagatcaacatggccggggccaagagggtgcccacagccccagctgccaccagcaagccaggcctgcggcccaggacagccctgggggacatcggcaacaaggtgtctgagcagctgcaggccaagatgcccatgaagaaggaggccaagcccagcgccaccgggaaggtgattgacaagaagctgcccaagcccctggagaaggtgcccatgctggtgcctgtgcctgtgtctgagcctgtgcctgagcctgagcctgagcctgagcctgagcctgtgaaggaggagaagctgagccctgagcccatcctggtggacacagccagccccagccccatggagaccagcggctgtgccccagctgaggaggacctgtgccaggccttcagtgatgtgatcctggccgtgaatgatgtggatgctgaagatggagctgaccccaacctgtgcagtgaatatgtgaaggacatctatgcctacctgcggcagctggaggaggagcaggccgtgcggcccaagtacctgctgggccgggaggtgacaggcaacatgagggccatcctgattgactggctggtgcaggtgcagatgaagttccggctgctgcaggagaccatgtacatgacagtgtccatcatcgaccgcttcatgcagaacaactgtgtgcccaagaagatgctgcagctggtgggcgtgacagccatgttcatcgccagcaaatatgaggagatgtacccacctgagatcggggactttgcctttgtgacagacaacacctacaccaagcaccagatccggcagatggagatgaagatcctgcgggccctgaactttggcctgggccggcccctgcccctgcacttcctgcggcgggccagcaagatcggggaggtggatgtggagcagcacaccctggccaagtacctgatggagctgaccatgctggactatgacatggtgcacttcccccccagccagattgctgctggggccttctgcctggccctgaagatcctggacaacggggagtggacccccaccctgcagcactacctgagctacacagaggagagcctgctgcctgtgatgcagcacctggccaagaatgtggtgatggtgaaccagggcctgaccaagcacatggtgtcccagtag

SEQ ID NO: 19185 - DNA, 1197 bp, synthetic construct
  misc_feature 1..1197: note = Description of Artificial Sequence: Synthetic coding sequence
  source 1..1197: mol_type = other DNA
atggccctgctgcggcggcccaccgtgtccagtgacctggagaacatcgacaccggggtgaacagcaaggtgaagagccacgtgaccatcagaagaacagtgctggaggagatcggcaacagagtgaccacccgggccgcccaggtggccaagaaggcccagaacaccaaggtgcctgtgcagcccaccaagaccaccaacgtgaacaagcagctgaagcccacagcctctgtgaagcctgtgcagatggagaagctggcccccaagggccccagccccaccccagaagatgtgtccatgaaggaggagaacctgtgccaggccttcagtgatgccctgctgtgcaagattgaggacatcgacaatgaagactgggagaacccccagctgtgcagcgactatgtgaaggacatctaccagtacctgcggcagctggaggtgctgcagagcatcaacccccacttcctggatggccgggacatcaatggccgcatgagggccatcctggtggactggctggtgcaggtgcacagcaagttccggctgctgcaggagaccctgtacatgtgtgtgggcatcatggaccgcttcctgcaggtgcagcctgtgtccaggaagaagctgcagctggtgggcatcacagccctgctgctggccagcaaatatgaggagatgttcagccccaacattgaagattttgtgtacatcacagacaatgcctacaccagcagccagatccgggagatggagaccctcatcctgaaggagctgaagtttgagctgggccggcccctgcccctgcacttcctgcggcgggccagcaaggccggggaggtggatgtggagcagcacaccctggccaagtacctgatggagctgaccctgattgattatgacatggtgcactaccaccccagcaaggtggccgctgctgccagctgcctgagccagaaggtgctgggccagggcaagtggaacctgaagcagcagtactacacaggctacacagaaaatgaggtgctggaggtgatgcagcacatggccaagaatgtggtgaaggtgaatgaaaacctgaccaagttcatcgccatcaagaacaagtatgccagcagcaagctgctgaagatctccatgatcccccagctgaacagcaaggctgtgaaggacctggccagccccctgattggccgctcctag

SEQ ID NO: 19186 - DNA, 432 bp, synthetic construct
  misc_feature 1..432: note = Description of Artificial Sequence: Synthetic coding sequence
  source 1..432: mol_type = other DNA
atggccggcaacttctggcagagcagccactacctgcagtggatcctggacaagcaggacctgctgaaggagcggcagaaggacctgaagttcctgtctgaggaggagtactggaagctgcagatcttcttcaccaacgtcatccaggccctgggggagcacctgaagctgcggcagcaggtgattgccacagccaccgtgtacttcaagcgcttctacgcccgctacagcctgaagagcattgatcctgtgctgatggcccccacctgtgtgttcctggccagcaaggtggaggagtttggagtggtgagcaacacccggctgattgctgctgccacctctgtgtgcaagtgcaagaagtacatctgcttcaaggatgtgatcctgaagaaggcccctgagtacatcgacttcttcttcttcagcctgtag

SEQ ID NO: 19187 - DNA, 852 bp, synthetic construct
  misc_feature 1..852: note = Description of Artificial Sequence: Synthetic coding sequence
  source 1..852: mol_type = other DNA
atggccggcaacttctggcagagcagccactacctgcagtggatcctggacaagcaggacctgctgaaggagcggcagaaggacctgaagttcctgtctgaggaggagtactggaagctgcagatcttcttcaccaacgtcatccaggccctgggggagcacctgaagctgcggcagcaggtgattgccacagccaccgtgtacttcaagcgcttctacgcccgctacagcctgaagagcattgatcctgtgctgatggcccccacctgtgtgttcctggccagcaaggtggaggagtttggagtggtgagcaacacccggctgattgctgctgccacctctgtgctgaagacccgcttctcctatgccttccccaaggagttcccctacaggatgaaccacatcctggagtgtgagttctacctgctggagctgatggactgctgcctgattgtgtaccacccctaccggcccctgctgcagtatgtgcaggacatgggccaggaggacatgctgctgcccctggcctggagaattgtgaatgacacctacagaacagacctgtgcctgctgtacccacccttcatgattgccctggcctgcctgcacgtggcctgtgtggtgcagcagaaggatgcccggcagtggtttgctgagctgtctgtggacatggagaagatcctggagatcatccgggtcatcctgaagctgtatgagcagtggaagaactttgatgagaggaaggagatggccaccatcctgagcaagatgcccaagcccaagcccccacccaacagcgagggggagcagggccccaacggcagccagaacagcagctacagccagagctag

SEQ ID NO: 19188 - DNA, 597 bp, synthetic construct
  misc_feature 1..597: note = Description of Artificial Sequence: Synthetic coding sequence
  source 1..597: mol_type = other DNA
atggcccccacctgtgtgttcctggccagcaaggtggaggagtttggagtggtgagcaacacccggctgattgctgctgccacctctgtgctgaagacccgcttctcctatgccttccccaaggagttcccctacaggatgaaccacatcctggagtgtgagttctacctgctggagctgatggactgctgcctgattgtgtaccacccctaccggcccctgctgcagtatgtgcaggacatgggccaggaggacatgctgctgcccctggcctggagaattgtgaatgacacctacagaacagacctgtgcctgctgtacccacccttcatgattgccctggcctgcctgcacgtggcctgtgtggtgcagcagaaggatgcccggcagtggtttgctgagctgtctgtggacatggagaagatcctggagatcatccgggtcatcctgaagctgtatgagcagtggaagaactttgatgagaggaaggagatggccaccatcctgagcaagatgcccaagcccaagcccccacccaacagcgagggggagcagggccccaacggcagccagaacagcagctacagccagagctag

SEQ ID NO: 19189 - DNA, 597 bp, synthetic construct; identical to SEQ ID NO: 19188
  misc_feature 1..597: note = Description of Artificial Sequence: Synthetic coding sequence
  source 1..597: mol_type = other DNA

SEQ ID NO: 19190 - DNA, 489 bp, synthetic construct
  misc_feature 1..489: note = Description of Artificial Sequence: Synthetic coding sequence
  source 1..489: mol_type = other DNA
atggcccccacctgtgtgttcctggccagcaaggtggaggagtttggagtggtgagcaacacccggctgattgctgctgccacctctgtgctgaagacccgcttctcctatgccttccccaaggagttcccctacaggatgaaccacatcctggagtgtgagttctacctgctggagctgatggactgctgcctgattgtgtaccacccctaccggcccctgctgcagtatgtgcaggacatgggccaggaggacatgctgctgcccctggcctggagaattgtgaatgacacctacagaacagacctgtgcctgctgtacccacccttcatgattgccctggcctgcctgcacgtggcctgtgtggtgcagcagaaggatgcccggcagtggtttgctgagctgtctgtggacatggagaagatcctggagatcatccgggtcatcctgaagctgtatgagcagtggaagaactttgatgagaggtag

SEQ ID NO: 19191 - DNA, 2283 bp, synthetic construct
  misc_feature 1..2283: note = Description of Artificial Sequence: Synthetic coding sequence
  source 1..2283: mol_type = other DNA
atgagcacagtggaggaggacagcgacacagtgacagtggagaccgtgaacagcgtgaccctgacccaggacacagagggcaacctgatcctgcactgcccccagaatgaagcagatgaaattgattctgaggacagcattgagcccccccacaagaggctgtgcctgagcagtgaagatgaccagagcattgatgacagcaccccctgcatctctgtggtggccctgcccctgtctgaaaatgaccagagctttgaggtgaccatgacagccaccacagaggtggctgatgatgaggtgacagagggcaccgtgacccagatccagatcctgcagaatgagcagctggatgagatcagccccctgggcaatgaggaggtgtctgctgtgtcccaggcctggttcaccaccaaggaggacaaggacagcctgaccaacaagggccacaagtggaagcagggcatgtggagcaaggaggagattgacatcctgatgaacaacatcgagcgctacctgaaggcccggggcatcaaggatgccacagagatcatctttgagatgagcaaggatgagaggaaggacttctaccgcaccatcgcctggggcctgaaccggcccctgtttgctgtgtaccgccgggtgctgaggatgtatgatgacagaaatcatgtgggcaagtacaccccagaggagattgagaagctgaaggagctgcgcatcaagcacggcaatgactgggccaccatcggggccgccctgggccgcagcgccagctctgtgaaggaccgctgccgcctgatgaaggacacctgcaacacaggcaagtggacagaggaggaggagaagaggctggccgaggtggtgcatgagctgaccagcacagagcccggggacatcgtgacccagggcgtgtcctgggccgctgtggccgagcgggtgggcaccaggtctgagaagcagtgccgcagcaagtggctgaactacctgaactggaagcagagcggcggcacagagtggaccaaggaggatgagatcaacctgatcctgagaattgctgagctggatgtggctgatgaaaatgacatcaactgggacctgctggccgagggctggagctctgtgcgcagcccccagtggctgcggagcaagtggtggaccatcaagaggcagatcgccaaccacaaggatgtgtccttccctgtgctgatcaagggcctgaagcagctgcacgagaaccagaagaacaaccccaccctgctggagaacaagagcggcagcggcgtgcccaacagcaacaccaacagctctgtgcagcacgtgcagatccgggtggcccggctggaggacaacacagccatcagcagcagccccatggccgccctgcagatccctgtgcagatcacccacgtgagcagcgctgacagccctgccaccgtggacagcgagaccatcaccctgaacagcggcaccctgcagacctttgagatcctgcccagcttccacctgcagcccaccggcaccccaggcacctacctgctgcagaccagcagcagccagggcctgcccctgaccctgacagccagccccaccgtgaccctgacagctgctgccccagccagccctgagcagatcatcgtgcacgccctgagccctgagcacctgctgaacaccagtgacaacgtgacagtgcagtgccacacccccagggtcatcatccagacagtggccacagaggacatcaccagcagcatcagccaggccgagctgactgtggacagcgacatccagagcagtgacttccctgagcccccagatgccctggaggccgacaccttcccagatgagatccaccaccccaagatgacagtggagcccagcttcaatgatgcccacgtgtccaagttcagtgaccagaacagcacagagctgatgaacagcgtgatggtgaggacagaggaggagatcagtgacacagacctgaagcaggaggagagccccagcgacctggccagcgcctacgtgacagagggcctggagagccccaccatcgaggagcaggtggaccagaccattgatgatgagaccatcctgattgtgcccagcccccacggcttcatccaggccagtgatgtgattgacacagagagcgtgctgcccctgaccaccctgacagaccccatcctgcagcaccaccaggaggagagcaacatcatcggcagcagcctgggcagccctgtgtctgaggacagcaaggatgtggaggacctggtgaactgccactag

SEQ ID NO: 19192 - DNA, 858 bp, synthetic construct
  misc_feature 1..858: note = Description of Artificial Sequence: Synthetic coding sequence
  source 1..858: mol_type = other DNA
atgagcacagtggaggaggacagcgacacagtgacagtggagaccgtgaacagcgtgaccctgacccaggacacagagggcaacctgatcctgcactgcccccagaatgaagcagatgaaattgattctgaggacagcattgagcccccccacaagaggctgtgcctgagcagtgaagatgaccagagcattgatgacagcaccccctgcatctctgtggtggccctgcccctgtctgaaaatgaccagagctttgaggtgaccatgacagccaccacagaggtggctgatgatgaggtgacagagggcaccgtgacccagatccagatcctgcagaatgagcagctggatgagatcagccccctgggcaatgaggaggtgtctgctgtgtcccaggcctggttcaccaccaaggaggacaaggacagcctgaccaacaagggccacaagtggaagcagggcatgtggagcaaggaggagattgacatcctgatgaacaacatcgagcgctacctgaaggcccggggcatcaaggatgccacagagatcatctttgagatgagcaaggatgagaggaaggacttctaccgcaccatcgcctggggcctgaaccggcccctgtttgctgtgtaccgccgggtgctgaggatgtatgatgacagaaatcatgtgggcaagtacaccccagaggagattgagaagctgaaggagaagaaggccatcgccgcctgcttcttcttcacccaccggcagctgtggacccccaagaagggccacaccttcaagctgtggctgagcaagtactgctgcccccagctgcccaaccagagcaatggcaagaagaagaatgaggagtag

SEQ ID NO: 19193 - DNA, 2283 bp, synthetic construct; identical to SEQ ID NO: 19191
  misc_feature 1..2283: note = Description of Artificial Sequence: Synthetic coding sequence
  source 1..2283: mol_type = other DNA

SEQ ID NO: 19194 - DNA, 735 bp, synthetic construct
  misc_feature 1..735: note = Description of Artificial Sequence: Synthetic coding sequence
  source 1..735: mol_type = other DNA
atgagcacagtggaggaggacagcgacacagtgacagtggagaccgtgaacagcgtgaccctgacccaggacacagagggcaacctgatcctgcactgcccccagaatgtgtctgaaaatgaccagagctttgaggtgaccatgacagccaccacagaggtggctgatgatgaggtgacagagggcaccgtgacccagatccagatcctgcagaatgagcagctggatgagatcagccccctgggcaatgaggaggtgtctgctgtgtcccaggcctggttcaccaccaaggaggacaaggacagcctgaccaacaagggccacaagtggaagcagggcatgtggagcaaggaggagattgacatcctgatgaacaacatcgagcgctacctgaaggcccggggcatcaaggatgccacagagatcatctttgagatgagcaaggatgagaggaaggacttctaccgcaccatcgcctggggcctgaaccggcccctgtttgctgtgtacagaagagtgctgaggatgtatgatgacaggaaccacgtgggcaagtacaccccagaggagattgagaagctgaaggagaagaaggccatcgccgcctgcttcttcttcacccaccggcagctgtggacccccaagaagggccacaccttcaagctgtggctgagcaagtactgctgcccccagctgcccaaccagagcaatggcaagaagaagaatgaggagtag

SEQ ID NO: 19195 - DNA, 819 bp, synthetic construct
  misc_feature 1..819: note = Description of Artificial Sequence: Synthetic coding sequence
  source 1..819: mol_type = other DNA
atgagcacagtggaggaggacagcgacacagtgacagtggagaccgtgaacagcgtgaccctgacccaggacacagagggcaacctgatcctgcactgcccccagaatgaagcagatgaaattgattctgaggacagcattgagcccccccacaagaggctgtgcctgagcagtgaagatgaccagagcattgatgacagcaccccctgcatctctgtggtggccctgcccctgtctgaaaatgaccagagctttgaggtgaccatgacagccaccacagaggtggctgatgatgaggtgacagagggcaccgtgacccagatccagatcctgcagaatgagcagctggatgagatcagccccctgggcaatgaggaggtgtctgctgtgtcccaggcctggttcaccaccaaggaggacaaggacagcctgaccaacaagggccacaagtggaagcagggcatgtggagcaaggaggagattgacatcctgatgaacaacatcgagcgctacctgaaggcccggggcatcaaggatgccacagagatcatctttgagatgagcaaggatgagaggaaggacttctaccgcaccatcgcctggggcctgaaccggcccctgtttgctgtgtaccgccgggtgctgaggatgtatgatgacagaaatcatgtgggcaagtacaccccagaggagattgagaagctgaaggagcagctgtggacccccaagaagggccacaccttcaagctgtggctgagcaagtactgctgcccccagctgcccaaccagagcaatggcaagaagaagaatgaggagtag

SEQ ID NO: 19196 - DNA, 2073 bp, synthetic construct
  misc_feature 1..2073: note = Description of Artificial Sequence: Synthetic coding sequence
  source 1..2073: mol_type = other DNA
atgagcacagtggaggaggacagcgacacagtgacagtggagaccgtgaacagcgtgaccctgacccaggacacagagggcaacctgatcctgcactgcccccagaatgaagcagatgaaattgattctgaggacagcattgagcccccccacaagaggctgtgcctgagcagtgaagatgaccagagcattgatgacagcaccccctgcatctctgtggtggccctgcccctgtctgaaaatgaccagagctttgaggtgaccatgacagccaccacagaggtggctgatgatgaggtgacagagggcaccgtgacccagatccagatcctgcagaatgagcagctggatgagatcagccccctgggcaatgaggaggtgtctgctgtgtcccaggcctggttcaccaccaaggaggacaaggacagcctgaccaacaagggccacaagtggaagcagggcatgtggagcaaggaggagattgacatcctgatgaacaacatcgagcgctacctgaaggcccggggcatcaaggatgccacagagatcatctttgagatgagcaaggatgagaggaaggacttctaccgcaccatcgcctggggcctgaaccggcccctgtttgctgtgtaccgccgggtgctgaggatgtatgatgacagaaatcatgtgggcaagtacaccccagaggagattgagaagctgaaggagctgcgcatcaagcacggcaatgactgggccaccatcggggccgccctgggccgcagcgccagctctgtgaaggaccgctgccgcctgatgaaggacacctgcaacacaggcaagtggacagaggaggaggagaagaggctggccgaggtggtgcatgagctgaccagcacagagcccggggacatcgtgacccagggcgtgtcctgggccgctgtggccgagcgggtgggcaccaggtctgagaagcagtgccgcagcaagtggctgaactacctgaactggaagcagagcggcggcacagagtggaccaaggaggatgagatcaacctgatcctgagaattgctgagctggatgtggctgatgaaaatgacatcaactgggacctgctggccgagggctggagctctgtgcgcagcccccagtggctgcggagcaagtggtggaccatcaagaggcagatcgccaaccacaaggatgtgtccttccctgccagcgctgacagccctgccaccgtggacagcgagaccatcaccctgaacagcggcaccctgcagacctttgagatcctgcccagcttccacctgcagcccaccggcaccccaggcacctacctgctgcagaccagcagcagccagggcctgcccctgaccctgacagccagccccaccgtgaccctgacagctgctgccccagccagccctgagcagatcatcgtgcacgccctgagccctgagcacctgctgaacaccagtgacaacgtgacagtgcagtgccacacccccagggtcatcatccagacagtggccacagaggacatcaccagcagcatcagccaggccgagctgactgtggacagcgacatccagagcagtgacttccctgagcccccagatgccctggaggccgacaccttcccagatgagatccaccaccccaagatgacagtggagcccagcttcaatgatgcccacgtgtccaagttcagtgaccagaacagcacagagctgatgaacagcgtgatggtgaggacagaggaggagatcagtgacacagacctgaagcaggaggagagccccagcgacctggccagcgcctacgtgacagagggcctggagagccccaccatcgaggagcaggtggaccagaccattgatgatgagaccatcctgattgtgcccagcccccacggcttcatccaggccagtgatgtgattgacacagagagcgtgctgcccctgaccaccctgacagaccccatcctgcagcaccaccaggaggagagcaacatcatcggcagcagcctgggcagccctgtgtctgaggacagcaaggatgtggaggacctggtgaactgccactag

SEQ ID NO: 19197 - DNA, 1485 bp, synthetic construct
  misc_feature 1..1485: note = Description of Artificial Sequence: Synthetic coding sequence
  source 1..1485: mol_type = other DNA
atgaaggacacctgcaacacaggcaagtggacagaggaggaggagaagaggctggccgaggtggtgcatgagctgaccagcacagagcccggggacatcgtgacccagggcgtgtcctgggccgctgtggccgagcgggtgggcaccaggtctgagaagcagtgccgcagcaagtggctgaactacctgaactggaagcagagcggcggcacagagtggaccaaggaggatgagatcaacctgatcctgagaattgctgagctggatgtggctgatgaaaatgacatcaactgggacctgctggccgagggctggagctctgtgcgcagcccccagtggctgcggagcaagtggtggaccatcaagaggcagatcgccaaccacaaggatgtgtccttccctgtgctgatcaagggcctgaagcagctgcacgagaaccagaagaacaaccccaccctgctggagaacaagagcggcagcggcgtgcccaacagcaacaccaacagctctgtgcagcacgtgcagatccgggtggcccggctggaggacaacacagccatcagcagcagccccatggccgccctgcagatccctgtgcagatcacccacgtgagcagcgctgacagccctgccaccgtggacagcgagaccatcaccctgaacagcggcaccctgcagacctttgagatcctgcccagcttccacctgcagcccaccggcaccccaggcacctacctgctgcagaccagcagcagccagggcctgcccctgaccctgacagccagccccaccgtgaccctgacagctgctgccccagccagccctgagcagatcatcgtgcacgccctgagccctgagcacctgctgaacaccagtgacaacgtgacagtgcagtgccacacccccagggtcatcatccagacagtggccacagaggacatcaccagcagcatcagccaggccgagctgactgtggacagcgacatccagagcagtgacttccctgagcccccagatgccctggaggccgacaccttcccagatgagatccaccaccccaagatgacagtggagcccagcttcaatgatgcccacgtgtccaagttcagtgaccagaacagcacagagctgatgaacagcgtgatggtgaggacagaggaggagatcagtgacacagacctgaagcaggaggagagccccagcgacctggccagcgcctacgtgacagagggcctggagagccccaccatcgaggagcaggtggaccagaccattgatgatgagaccatcctgattgtgcccagcccccacggcttcatccaggccagtgatgtgattgacacagagagcgtgctgcccctgaccaccctgacagaccccatcctgcagcaccaccaggaggagagcaacatcatcggcagcagcctgggcagccctgtgtctgaggacagcaaggatgtggaggacctggtgaactgccactag

SEQ ID NO: 19198 - DNA, 111 bp, synthetic construct
  misc_feature 1..111: note = Description of Artificial Sequence: Synthetic coding sequence
  source 1..111: mol_type = other DNA
atgagcacagtggaggaggacagcgacacagtgacagtggagaccgtgaacagcgtgaccctgacccaggacacagagggcaacctgatcctgcactgcccccagaactag

SEQ ID NO: 19199 - DNA, 33 bp, synthetic construct
  misc_feature 1..33: note = Description of Artificial Sequence: Synthetic coding sequence
  source 1..33: mol_type = other DNA
atgacagccaccacagaggtggctgatgactag

SEQ ID NO: 19200 - DNA, 111 bp, synthetic construct; identical to SEQ ID NO: 19198
  misc_feature 1..111: note = Description of Artificial Sequence: Synthetic coding sequence
  source 1..111: mol_type = other DNA

SEQ ID NO: 19201 - DNA, 735 bp, synthetic construct; identical to SEQ ID NO: 19194
  misc_feature 1..735: note = Description of Artificial Sequence: Synthetic coding sequence
  source 1..735: mol_type = other DNA

SEQ ID NO: 19202 - DNA, 582 bp, synthetic construct
  misc_feature 1..582: note = Description of Artificial Sequence: Synthetic coding sequence
  source 1..582: mol_type = other DNA
atgagcacagtggaggaggacagcgacacagtgacagtggagaccgtgaacagcgtgaccctgacccaggacacagagggcaacctgatcctgcactgcccccagaatgaagcagatgaaattgattctgaggacagcattgagcccccccacaagaggctgtgcctgagcagtgaagatgaccagagcattgatgacagcaccccctgcatctctgtggtggccctgcccctgtctgaaaatgaccagagctttgaggtgaccatgacagccaccacagaggtggctgatgatgaggtgacagagggcaccgtgacccagatccagatcctgcagaatgagcagctggatgagatcagccccctgggcaatgaggaggtgtctgctgtgtcccaggcctggttcaccaccaaggaggacaaggacagcctgaccaacaagggccacaagtggaagcagggcatgtggagcaaggaggagattgacatcctgatgaacaacatcgagcgctacctgaaggcccggggcatcaaggatgccacagagatcatctttgagatgagcaaggatgagaggaagtag

SEQ ID NO: 19203 - DNA, 84 bp, synthetic construct
  misc_feature 1..84: note = Description of Artificial Sequence: Synthetic coding sequence
  source 1..84: mol_type = other DNA
atgagcacagtggaggaggacagcgacacagtgacagtggagaccgtgaacagcgtgaccctgacccaggacacagagggctag

SEQ ID NO: 19204 - DNA, 444 bp, synthetic construct
  misc_feature 1..444: note = Description of Artificial Sequence: Synthetic coding sequence
  source 1..444: mol_type = other DNA
atgagcacagtggaggaggacagcgacacagtgacagtggagaccgtgaacagcgtgaccctgacccaggacacagagggcaacctgatcctgcactgcccccagaatgaagcagatgaaattgattctgaggacagcattgagcccccccacaagaggctgtgcctgagcagtgaagatgaccagagcattgatgacagcaccccctgcatctctgtggtggccctgcccctgtctgaaaatgaccagagctttgaggtgaccatgacagccaccacagaggtggctgatgatgaggtgacagagggcaccgtgacccagatccagatcctgcagaatgagcagctggatgagatcagccccctgggcaatgaggaggtgtctgctgtgtcccaggcctggttcaccaccaaggaggacaaggacagcctgaccaacaagtag

SEQ ID NO: 19205 - DNA, 222 bp, synthetic construct
  misc_feature 1..222: note = Description of Artificial Sequence: Synthetic coding sequence
  source 1..222: mol_type = other DNA
atgagcacagtggaggaggacagcgacacagtgacagtggagaccgtgaacagcgtgaccctgacccaggacacagagggcaacctgatcctgcactgcccccagaatgaagcagatgaaattgattctgaggacagcattgagcccccccacaagaggctgtgcctgagcagtgaagatgaccagagcattgatgacagcaccccctgcatctctgtgtag

SEQ ID NO: 19206 - DNA, 2019 bp, synthetic construct
  misc_feature 1..2019: note = Description of Artificial Sequence: Synthetic coding sequence
  source 1..2019: mol_type = other DNA
atgacagccaccacagaggtggctgatgatgaggtgacagagggcaccgtgacccagatccagatcctgcagaatgagcagctggatgagatcagccccctgggcaatgaggaggtgtctgctgtgtcccaggcctggttcaccaccaaggaggacaaggacagcctgaccaacaagggccacaagtggaagcagggcatgtggagcaaggaggagattgacatcctgatgaacaacatcgagcgctacctgaaggcccggggcatcaaggatgccacagagatcatctttgagatgagcaaggatgagaggaaggacttctaccgcaccatcgcctggggcctgaaccggcccctgtttgctgtgtaccgccgggtgctgaggatgtatgatgacagaaatcatgtgggcaagtacaccccagaggagattgagaagctgaaggagctgcgcatcaagcacggcaatgactgggccaccatcggggccgccctgggccgcagcgccagctctgtgaaggaccgctgccgcctgatgaaggacacctgcaacacaggcaagtggacagaggaggaggagaagaggctggccgaggtggtgcatgagctgaccagcacagagcccggggacatcgtgacccagggcgtgtcctgggccgctgtggccgagcgggtgggcaccaggtctgagaagcagtgccgcagcaagtggctgaactacctgaactggaagcagagcggcggcacagagtggaccaaggaggatgagatcaacctgatcctgagaattgctgagctggatgtggctgatgaaaatgacatcaactgggacctgctggccgagggctggagctctgtgcgcagcccccagtggctgcggagcaagtggtggaccatcaagaggcagatcgccaaccacaaggatgtgtccttccctgtgctgatcaagggcctgaagcagctgcacgagaaccagaagaacaaccccaccctgctggagaacaagagcggcagcggcgtgcccaacagcaacaccaacagctctgtgcagcacgtgcagatccgggtggcccggctggaggacaacacagccatcagcagcagccccatggccgccctgcagatccctgtgcagatcacccacgtgagcagcgctgacagccctgccaccgtggacagcgagaccatcaccctgaacagcggcaccctgcagacctttgagatcctgcccagcttccacctgcagcccaccggcaccccaggcacctacctgctgcagaccagcagcagccagggcctgcccctgaccctgacagccagccccaccgtgaccctgacagctgctgccccagccagccctgagcagatcatcgtgcacgccctgagccctgagcacctgctgaacaccagtgacaacgtgacagtgcagtgccacacccccagggtcatcatccagacagtggccacagaggacatcaccagcagcatcagccaggccgagctgactgtggacagcgacatccagagcagtgacttccctgagcccccagatgccctggaggccgacaccttcccagatgagatccaccaccccaagatgacagtggagcccagcttcaatgatgcccacgtgtccaagttcagtgaccagaacagcacagagctgatgaacagcgtgatggtgaggacagaggaggagatcagtgacacagacctgaagcaggaggagagccccagcgacctggccagcgcctacgtgacagagggcctggagagccccaccatcgaggagcaggtggaccagaccattgatgatgagaccatcctgattgtgcccagcccccacggcttcatccaggccagtgatgtgattgacacagagagcgtgctgcccctgaccaccctgacagaccccatcctgcagcaccaccaggaggagagcaacatcatcggcagcagcctgggcagccctgtgtctgaggacagcaaggatgtggaggacctggtgaactgccactag

SEQ ID NO: 19207 - DNA, 291 bp, synthetic construct
  misc_feature 1..291: note = Description of Artificial Sequence: Synthetic coding sequence
  source 1..291: mol_type = other DNA
atgagcacagtggaggaggacagcgacacagtgacagtggagaccgtgaacagcgtgaccctgacccaggacacagagggcaacctgatcctgcactgcccccagaatgaagcagatgaaattgattctgaggacagcattgagcccccccacaagaggctgtgcctgagcagtgaagatgaccagagcattgatgacagcaccccctgcatctctgtggtggccctgcccctgtctgaaaatgaccagagctttgaggtgaccatgacagccaccacagaggtggcctag

SEQ ID NO: 19208 - DNA, 171 bp, synthetic construct
  misc_feature 1..171: note = Description of Artificial Sequence: Synthetic coding sequence
  source 1..171: mol_type = other DNA
atgagcacagtggaggaggacagcgacacagtgacagtggagaccgtgaacagcgtgaccctgacccaggacacagagggcaacctgatcctgcactgcccccagaatgaagcagatgaaattgattctgaggacagcattgagcccccccacaagaggctgtgcctgtag

SEQ ID NO: 19209 - DNA, 858 bp, synthetic construct; identical to SEQ ID NO: 19192
  misc_feature 1..858: note = Description of Artificial Sequence: Synthetic coding sequence
  source 1..858: mol_type = other DNA

SEQ ID NO: 19210 - DNA, 150 bp, synthetic construct
  misc_feature 1..150: note = Description of Artificial Sequence: Synthetic coding sequence
  source 1..150: mol_type = other DNA
atgagcacagtggaggaggacagcgacacagtgacagtggagaccgtgaacagcgtgaccctgacccaggacacagagggcaacctgatcctgcactgcccccagaatgaagcagatgaaattgattctgaggacagcattgagccctag

SEQ ID NO: 19211 - DNA, 330 bp, synthetic construct
  misc_feature 1..330: note = Description of Artificial Sequence: Synthetic coding sequence
  source 1..330: mol_type = other DNA
atgagcacagtggaggaggacagcgacacagtgacagtggagaccgtgaacagcgtgaccctgacccaggacacagagggcaacctgatcctgcactgcccccagaatgaagcagatgaaattgattctgaggacagcattgagcccccccacaagaggctgtgcctgagcagtgaagatgaccagagcattgatgacagcaccccctgcatctctgtggtggccctgcccctgtctgaaaatgaccagagctttgaggtgaccatgacagccaccacagaggtggctgatgatgaggtgacagagggcaccgtgacccagatccagtag

SEQ ID NO: 19212 - DNA, 276 bp, synthetic construct
  misc_feature 1..276: note = Description of Artificial Sequence: Synthetic coding sequence
  source 1..276: mol_type = other DNA
atgagcacagtggaggaggacagcgacacagtgacagtggagaccgtgaacagcgtgaccctgacccaggacacagagggcaacctgatcctgcactgcccccagaatgaagcagatgaaattgattctgaggacagcattgagcccccccacaagaggctgtgcctgagcagtgaagatgaccagagcattgatgacagcaccccctgcatctctgtggtggccctgcccctgtctgaaaatgaccagagctttgaggtgaccatgacagcctag

SEQ ID NO: 19213 - DNA, 1647 bp, synthetic construct
  misc_feature 1..1647: note = Description of Artificial Sequence: Synthetic coding sequence
  source 1..1647: mol_type = other DNA
atggccactggagccaatgccacccccctggacttccccagcaagaagaggaagaggagccgctggaaccaggacaccatggagcagaagacagtcatccctggcatgcccaccgtcatccccccaggcctgacccgggagcaggagcgggcctacatcgtgcagctgcagatcgaggacctgaccaggaagctgaggactggagacctgggcatcccccccaacccagaagatagaagccccagccctgagcccatctacaacagcgagggcaagaggctgaacacccgggagttccgcaccaggaagaagctggaggaggagcggcacaacctgatcacagagatggtggccctgaacccagacttcaagcccccagctgactacaagcccccagccaccagggtgtctgacaaggtgatgatcccccaggatgagtacccagagatcaactttgtgggcctgctgattggcccccggggcaacaccctgaagaacatcgagaaggagtgcaatgccaagatcatgatccggggcaagggctctgtgaaggagggcaaggtgggcaggaaggatggccagatgctgcctggagaagatgagcccctgcacgccctggtgacagccaacaccatggagaatgtgaagaaggctgtggagcagatccggaacatcctgaagcagggcatcgagaccccagaggaccagaatgacctgaggaagatgcagctgcgggagctggcccggctgaatggcaccctgcgggaggatgacaaccgcatcctgcggccctggcagagcagcgagaccaggagcatcaccaacaccaccgtgtgcaccaagtgtggcggggccggccacatcgccagtgactgcaagttccagaggcctggggacccccagagcgcccaggacaaggccaggatggacaaggagtacctgagcctgatggccgagctgggggaggcccctgtgcctgcctctgtgggcagcaccagcggccctgccaccacccccctggccagcgcccccaggcctgctgccccagccaacaaccccccaccacccagcctgatgagcaccacccagagccggcccccctggatgaacagcggccccagcgagagccggccctaccacggcatgcatggaggcggccctgggggccctgggggcggcccccacagcttcccccaccccctgcccagcctgactggaggccacggcggccaccccatgcagcacaaccccaacggccccccaccaccctggatgcagcccccacctccacccatgaaccagggcccccaccccccaggccaccacggccccccacccatggaccagtacctgggcagcacccctgtgggcagcggcgtgtaccgcctgcaccagggcaagggcatgatgcctcctccacccatgggcatgatgcctcctcctcctcctccacccagcggccagcccccacctccacccagcggccccctgcccccctggcagcagcagcagcagcagcccccacctcctcctccacccagcagctccatggccagcagcacccccctgccctggcagcagaggagcctgcctgctgctgccatggcccgggccatgagggtgaggaccttccgggcccactggtag

SEQ ID NO: 19214 - DNA, 486 bp, synthetic construct
  misc_feature 1..486: note = Description of Artificial Sequence: Synthetic coding sequence
  source 1..486: mol_type = other DNA
atggagcaccagctgctgtgctgtgaggtggagaccatccggcgggcctacccagatgccaacctgctgaatgacagagtgctgcgggccatgctgaaggccgaggagacctgtgcccccagcgtgtcctacttcaagtgtgtgcagacctttgtggccctgtgtgccacagatgtgaagttcatcagcaaccccccatccatggtggccgccggctctgtggtggccgctgtgcagggcctgaacctgcggagccccaacaacttcctgagctactaccgcctgacccgcttcctgagcagggtcatcaagtgtgaccctgactgcctgcgggcctgccaggagcagatcgaggccctgctggagagcagcctgcggcaggcccagcagaacatggaccccaaggctgctgaggaggaggaggaggaggaggaggaggtggacctggcctgcacccccacagatgtgagagatgtggacatctag

SEQ ID NO: 19215 - DNA, 870 bp, synthetic construct
  misc_feature 1..870: note = Description of Artificial Sequence: Synthetic coding sequence
  source 1..870: mol_type = other DNA
atggagctgctgtgccacgaggtggaccctgtgcggcgggctgtgcgggacaggaacctgctgagagatgacagagtgctgcagaacctgctgaccatcgaggagcgctacctgccccagtgcagctacttcaagtgtgtgcagaaggacatccagccctacatgaggaggatggtggccacctggatgctggaggtgtgtgaggagcagaagtgtgaggaggaggtgttccccctggccatgaactacctggaccgcttcctggccggcgtgcccacccccaagagccacctgcagctgctgggcgctgtgtgcatgttcctggccagcaagctgaaggagaccagccccctgacagctgagaagctgtgcatctacacagacaacagcatcaagccccaggagctgctggagtgggagctggtggtgctgggcaagctgaagtggaacctggccgctgtgacccctcatgacttcatcgagcacatcctgaggaagctgccccagcagcgggagaagctgagcctcatcaggaagcacgcccagaccttcatcgccctgtgtgccacagacttcaagtttgccatgtacccacccagcatgattgccaccggctctgtgggcgccgccatctgtggcctgcagcaggatgaggaggtgagcagcctgacctgtgatgccctgacagagctgctggccaagatcaccaacacagatgtggactgcctgaaggcctgccaggagcagatcgaggccgtgctgctgaacagcctgcagcagtaccggcaggaccagagagatggcagcaagtcagaagatgagctggaccaggccagcacccccacagatgtgcgggacatcgacctgtag

SEQ ID NO: 19216 - DNA, 729 bp, synthetic construct
  misc_feature 1..729: note = Description of Artificial Sequence: Synthetic coding sequence
  source 1..729: mol_type = other DNA
atgaagtctgctgggggcagcggccgcagcctgctgcccagcccccgggtgtgtgaggagcagagatgtgaggaggaggtgttccccctggccatgaactacctggaccgctacctgagctgtgtgcccaccaggaaggcccagctgcagctgctgggcgctgtgtgcatgctgctggccagcaagctgcgggagaccacccccctgaccatcgagaagctgtgcatctacacagaccatgctgtgagcccccggcagctgcgggactgggaggtgctggtgctgggcaagctgaagtgggacctggccgccgtcatcgcccatgacttcctggccttcatcctgcaccggctgagcctgccccgggaccggcaggccctggtgaagaagcacgcccagaccttcctggccctgtgtgccacagactacacctttgccatgtacccacccagcatgattgccaccggcagcatcggggctgctgtgcagggcctgggcgcctgcagcatgtctggagatgagctgacagagctgctggccggcatcactggaacagaggtggactgcctgcgggcctgccaggagcagattgaagctgccctgcgggagagcctgcgggaggccagccagaccagcagcagccctgcccccaaggccccccggggcagcagcagccagggccccagccagaccagcacccccacagatgtgacagccatccacctgtag

SEQ ID NO: 19217 - DNA, 636 bp, synthetic construct
  misc_feature 1..636: note = Description of Artificial Sequence: Synthetic coding sequence
  source 1..636: mol_type = other DNA
atgaactacctggaccgctacctgagctgtgtgcccaccaggaaggcccagctgcagctgctgggcgctgtgtgcatgctgctggccagcaagctgcgggagaccacccccctgaccatcgagaagctgtgcatctacacagaccatgctgtgagcccccggcagctgcgggactgggaggtgctggtgctgggcaagctgaagtgggacctggccgctgtgattgcccatgacttcctggccttcatcctgcaccggctgagcctgccccgggaccggcaggccctggtgaagaagcacgcccagaccttcctggccctgtgtgccacagactacacctttgccatgtacccacccagcatgattgccaccggcagcattggagctgctgtgcagggcctgggcgcctgcagcatgtctggagatgagctgacagagctgctggccggcatcaccggcacagaggtggactgcctgcgggcctgccaggagcagatcgaggccgccctgcgggagagcctgcgggaggccagccagaccagcagcagccctgcccccaaggccccccggggcagcagcagccagggccccagccagaccagcacccccacagatgtgacagccatccacctgtag

SEQ ID NO: 19218 - DNA, 879 bp, synthetic construct
  misc_feature 1..879: note = Description of Artificial Sequence: Synthetic coding sequence
  source 1..879: mol_type = other DNA
atggagctgctgtgctgtgagggcaccaggcatgcccccagggctggccctgacccccggctgctgggggaccagagggtgctgcagagcctgctgcggctggaggagcgctacgtgccccgggccagctacttccagtgtgtgcagcgggagatcaagccccacatgaggaagatgctggcctactggatgctggaggtgtgtgaggagcagagatgtgaggaggaggtgttccccctggccatgaactacctggaccgctacctgagctgtgtgcccaccaggaaggcccagctgcagctgctgggcgctgtgtgcatgctgctggccagcaagctgcgggagaccacccccctgaccatcgagaagctgtgcatctacacagaccatgctgtgagcccccggcagctgcgggactgggaggtgctggtgctgggcaagctgaagtgggacctggccgccgtcatcgcccatgacttcctggccttcatcctgcaccggctgagcctgccccgggaccggcaggccctggtgaagaagcacgcccagaccttcctggccctgtgtgccacagactacacctttgccatgtacccacccagcatgattgccaccggcagcatcggggctgctgtgcagggcctgggcgcctgcagcatgtctggagatgagctgacagagctgctggccggcatcactggaacagaggtggactgcctgcgggcctgccaggagcagattgaagctgccctgcgggagagcctgcgggaggccagccagaccagcagcagccctgcccccaaggccccccggggcagcagcagccagggccccagccagaccagcacccccacagatgtgacagccatccacctgtag

SEQ ID NO: 19219 - DNA, 663 bp, synthetic construct
  misc_feature 1..663: note = Description of Artificial Sequence: Synthetic coding sequence
  source 1..663: mol_type = other DNA
atggagctgctgtgctgtgagggcaccaggcatgcccccagggctggccctgacccccggctgctgggggaccagagggtgctgcagagcctgctgcggctggaggagcgctacgtgccccgggccagctacttccagtgtgtgcagcgggagatcaagccccacatgaggaagatgctggcctactggatgctggaggactgggaggtgctggtgctgggcaagctgaagtgggacctggccgccgtcatcgcccatgacttcctggccttcatcctgcaccggctgagcctgccccgggaccggcaggccctggtgaagaagcacgcccagaccttcctggccctgtgtgccacagactacacctttgccatgtacccacccagcatgattgccaccggcagcatcggggctgctgtgcagggcctgggcgcctgcagcatgtctggagatgagctgacagagctgctggccggcatcactggaacagaggtggactgcctgcgggcctgccaggagcagattgaagctgccctgcgggagagcctgcgggaggccagccagaccagcagcagccctgcccccaaggccccccggggcagcagcagccagggccccagccagaccagcacccccacagatgtgacagccatccacctgtag

SEQ ID NO: 19220 - DNA, 291 bp, synthetic construct
  misc_feature 1..291: note = Description of Artificial Sequence: Synthetic coding sequence
  source 1..291: mol_type = other DNA
atgtacccacccagcatgattgccaccggcagcatcggggctgctgtgcagggcctgggcgcctgcagcatgtctggagatgagctgacagagctgctggccggcatcactggaacagaggtggactgcctgcgggcctgccaggagcagattgaagctgccctgcgggagagcctgcgggaggccagccagaccagcagcagccctgcccccaaggccccccggggcagcagcagccagggccccagccagaccagcacccccacagatgtgacagccatccacctgtag

SEQ ID NO: 19221 - DNA, 132 bp, synthetic construct
  misc_feature 1..132: note = Description of Artificial Sequence: Synthetic coding sequence
  source 1..132: mol_type = other DNA
atgaactacctggaccgctacctgagctgtgtgcccaccaggaaggcccagctgcagctgctgggcgctgtgtgcatgctgctggccagcaagctgcgggagaccacccccctgaccatcgagaagctgtag

SEQ ID NO: 19222 - DNA, 357 bp, synthetic construct
  misc_feature 1..357: note = Description of Artificial Sequence: Synthetic coding sequence
  source 1..357: mol_type = other DNA
atgaactacctggaccgctacctgagctgtgtgcccaccaggaaggcccagctgcagctgctgggcgctgtgtgcatgctgctggccagcaagctgcgggagaccacccccctgaccatcgagaagctgtgcatctacacagaccatgctgtgagcccccggcagctgcgggactgggaggtgctggtgctgggcaagctgaagtgggacctggccgctgtgattgcccatgacttcctggccttcatcctgcaccggctgagcctgccccgggaccggcaggccctggtgaagaagcacgcccagaccttcctggccctgtgtgccacagactacacctttgccatgtacccctag

SEQ ID NO: 19223 - DNA, 33 bp, synthetic construct
  misc_feature 1..33: note = Description of Artificial Sequence: Synthetic coding sequence
  source 1..33: mol_type = other DNA
atgtacccacccagcatgattgccactggatag

SEQ ID NO: 19224 - DNA, 636 bp, synthetic construct; identical to SEQ ID NO: 19217
  misc_feature 1..636: note = Description of Artificial Sequence: Synthetic coding sequence
  source 1..636: mol_type = other DNA

SEQ ID NO: 19225 - DNA, 1233 bp, synthetic construct
  misc_feature 1..1233: note = Description of Artificial Sequence: Synthetic coding sequence
  source 1..1233: mol_type = other DNA
atgccccgggagcggcgggagagagatgccaaggagcgggacaccatgaaggaggatggaggagctgagttcagcgcccggagcaggaagaggaaggccaacgtgaccgtcttcctgcaggaccctgatgaggagatggccaagattgacagaacagcccgggaccagtgtggcagccagccctgggacaacaatgctgtgtgtgccgacccctgcagcctcatccccaccccagacaaggaggatgatgacagagtgtaccccaacagcacctgcaagccccgcatcatcgcccccagccggggcagccccctgcctgtgctgtcctgggccaaccgggaggaggtgtggaagatcatgctgaacaaggagaagacctacctgcgggaccagcacttcctggagcagcaccccctgctgcagcccaagatgagggccatcctgctggactggctgatggaggtgtgtgaggtgtacaagctgcaccgggagaccttctacctggcccaggacttctttgaccgctacatggccacccaggagaatgtggtgaagaccctgctgcagctgattggcatcagcagcctcttcatcgccgccaagctggaggagatctacccacccaagctgcaccagtttgcctacgtgacagatggagcctgcagcggagatgagatcctgaccatggagctgatgatcatgaaggccctgaagtggaggctgagccccctgaccatcgtgtcctggctgaatgtgtacatgcaggtggcctacctgaatgacctgcacgaggtgctgctgccccagtacccccagcagatcttcatccagattgctgagctgctggacctgtgtgtgctggatgtggactgcctggagttcccctacggcatcctggccgccagcgccctgtaccacttcagcagcagcgagctgatgcagaaggtgtctggctaccagtggtgtgacatcgagaactgtgtgaagtggatggtgccctttgccatggtgatccgggagaccggcagcagcaagctgaagcacttccggggcgtggctgatgaagatgcccacaacatccagacccaccgggacagcctggacctgctggacaaggcccgggccaagaaggccatgctgtctgagcagaacagagccagccccctgcccagcggcctgctgaccccaccccagagcggcaagaagcagagcagcggccctgagatggcctag

SEQ ID NO: 19226 - DNA, 1104 bp, synthetic construct
  misc_feature 1..1104: note = Description of Artificial Sequence: Synthetic coding sequence
  source 1..1104: mol_type = other DNA
atgccccgggagcggcgggagagagatgccaaggagcgggacaccatgaaggaggatggaggagctgagttcagcgcccggagcaggaagaggaaggccaacgtgaccgtcttcctgcaggaccctgatgaggagatggccaagattgacagaacagcccgggaccagtgtggcagccagccctgggacaacaatgctgtgtgtgccgacccctgcagcctcatccccaccccagacaaggaggatgatgacagagtgtaccccaacagcacctgcaagccccgcatcatcgcccccagccggggcagccccctgcctgtgctgtcctgggccaaccgggaggaggtgtggaagatcatgctgaacaaggagaagacctacctgcgggaccagcacttcctggagcagcaccccctgctgcagcccaagatgagggccatcctgctggactggctgatggaggtgtccctgagcctgcctgagatctacccacccaagctgcaccagtttgcctacgtgacagatggagcctgcagcggagatgagatcctgaccatggagctgatgatcatgaaggccctgaagtggaggctgagccccctgaccatcgtgtcctggctgaatgtgtacatgcaggtggcctacctgaatgacctgcacgaggtgctgctgccccagtacccccagcagatcttcatccagattgctgagctgctggacctgtgtgtgctggatgtggactgcctggagttcccctacggcatcctggccgccagcgccctgtaccacttcagcagcagcgagctgatgcagaaggtgtctggctaccagtggtgtgacatcgagaactgtgtgaagtggatggtgccctttgccatggtgatccgggagaccggcagcagcaagctgaagcacttccggggcgtggctgatgaagatgcccacaacatccagacccaccgggacagcctggacctgctggacaaggcccgggccaagaaggccatgctgtctgagcagaacagagccagccccctgcccagcggcctgctgaccccaccccagagcggcaagaagcagagcagcggccctgagatggcctag

SEQ ID NO: 19227 - DNA, 1188 bp, synthetic construct
  misc_feature 1..1188: note = Description of Artificial Sequence: Synthetic coding sequence
  source 1..1188: mol_type = other DNA
atgaaggaggatggcggcgctgagttcagcgcccggagcaggaagaggaaggccaacgtgacagtgttcctgcaggaccctgatgaggagatggccaagattgacagaacagcccgggaccagtgtggcagccagccctgggacaacaatgctgtgtgtgccgacccctgcagcctcatccccaccccagacaaggaggatgatgacagagtgtaccccaacagcacctgcaagccccgcatcatcgcccccagccggggcagccccctgcctgtgctgtcctgggccaaccgggaggaggtgtggaagatcatgctgaacaaggagaagacctacctgcgggaccagcacttcctggagcagcaccccctgctgcagcccaagatgagggccatcctgctggactggctgatggaggtgtgtgaggtgtacaagctgcaccgggagaccttctacctggcccaggacttctttgaccgctacatggccacccaggagaatgtggtgaagaccctgctgcagctgattggcatcagcagcctcttcatcgccgccaagctggaggagatctacccacccaagctgcaccagtttgcctacgtgacagatggagcctgcagcggagatgagatcctgaccatggagctgatgatcatgaaggccctgaagtggaggctgagccccctgaccatcgtgtcctggctgaatgtgtacatgcaggtggcctacctgaatgacctgcacgaggtgctgctgccccagtacccccagcagatcttcatccagattgctgagctgctggacctgtgtgtgctggatgtggactgcctggagttcccctacggcatcctggccgccagcgccctgtaccacttcagcagcagcgagctgatgcagaaggtgtctggctaccagtggtgtgacatcgagaactgtgtgaagtggatggtgccctttgccatggtgatccgggagaccggcagcagcaagctgaagcacttccggggcgtggctgatgaagatgcccacaacatccagacccaccgggacagcctggacctgctggacaaggcccgggccaagaaggccatgctgtctgagcagaacagagccagccccctgcccagcggcctgctgaccccaccccagagcggcaagaagcagagcagcggccctgagatggcctag

SEQ ID NO: 19228 - DNA, 2106 bp, synthetic construct
  misc_feature 1..2106: note = Description of Artificial Sequence: Synthetic coding sequence
  source 1..2106: mol_type = other DNA
aggacctcctggcccagcgagctggccgctgagaagggcaactttgaagctgctgtgaagctgggcatcgcctacctgtacaatgaaggcctgtctgtgtctgatgaggcccgggcagaggtgaatggcctgaaggccagccgcttcttcagcctggccgagcggctgaatgtgggcgccgcccccttcatctggctgttcatccggcccccctggagcgtgtctggcagctgctgcaaggctgtggtgcatgagagcctgcgggcagagtgccagctgcagaggacccacaaggccagcatcctgcactgcctgggccgggtgctgagcctgtttgaagatgaggagaagcagcagcaggcccatgacctgtttgaggaggccgcccaccagggctgcctgaccagcagctacctgctgtgggagagtgacagaagaacagatgtgtctgaccccggccgctgcctgcacagcttcaggaagctgcgggactatgctgccaagggctgctgggaggcccagctgagcctggccaaggcctgtgccaatgccaaccagctgggcctggaggtgcgggccagcagcgagatcgtgtgccagctgttccaggccagccaggccgtgtccaagcagcaggtgttttctgtgcagaagggcctgaatgacaccatgagatacatcctgattgactggctggtggaggtggccaccatgaaggacttcaccagcctgtgcctgcacctgactgtggagtgtgtggaccgctacctgcggcggcggctggtgccccgctaccgcctgcagctgctgggcatcgcctgcatggtgatctgcacccgcttcatcagcaaggagatcctgaccatccgggaggccgtgtggctgacagacaacacctacaagtatgaggacctggtgaggatgatgggagagatcgtgtctgccctggagggcaagatccgggtgcccaccgtggtggactacaaggaggtgctgctgaccctggtgcctgtggagctgcggacccagcacctgtgcagcttcctgtgtgagctgagcctgctgcacaccagcctgagcgcctatgccccagcccggctggccgccgccgccctgctgctggcccggctgacccacggccagacccagccctggaccacccagctgtgggacctgaccggcttctcctatgaggacctgatcccctgtgtgctgagcctgcacaagaagtgcttccatgatgatgcccccaaggactaccggcaggtgtccctgacagctgtgaagcagagatttgaggacaagagatatggagagatcagccaggaggaggtgctgagctacagccagctgtgtgccgccctgggcgtgacccaggacagcccagacccccccaccttcctgagcactggagagatccacgccttcctgagcagccccagcggccgccgcaccaagaggaagcgggagaacagcctgcaggaggaccggggcagctttgtgaccacccccacagctgagctgagcagccaggaggagaccctgctgggcagcttcctggactggagcctggactgctgcagcggctatgaaggagaccaggagagcgagggggagaaggagggagatgtgacagcccccagcggcatcctggatgtgacagtggtgtacctgaaccctgagcagcactgctgccaggagagcagtgatgaggaggcctgcccagaggacaagggcccccaggacccccaggccctggccctggacacccagatcccagccaccccaggccccaagcccctggtgaggaccagccgggagcccgggaaggatgtgaccaccagcggctacagctctgtgtccacagccagccccaccagctctgtggatggcggcctgggcgccctgccccagcccacctctgtgctgagcctggacagcgacagccacacccagccctgccaccaccaggccaggaagagctgcctgcagtgcaggcctcccagccccccagagagctctgtgccccagcagcaggtgaagaggatcaacctgtgcatccacagcgaggaggaggacatgaacctgggcctggtgcggctgtag

SEQ ID NO: 19229 - DNA, 2361 bp, synthetic construct
  misc_feature 1..2361: note = Description of Artificial Sequence: Synthetic coding sequence
  source 1..2361: mol_type = other DNA
atgggcagcggaggagtggtgcactgccgctgtgccaagtgcttctgctaccccaccaagaggcgcatcagaagaagacccaggaacctgaccatcctgagcctgcctgaagatgtgctcttccacatcctgaagtggctgtctgtggaggacatcctggccgtgcgggctgtgcacagccagctgaaggacctggtggacaaccacgcctctgtgtgggcctgtgccagcttccaggagctgtggcccagccctggcaacctgaagctgtttgaaagagctgctgagaagggcaactttgaggccgctgtgaagctgggcatcgcctacctgtacaatgaaggcctgtctgtgtctgatgaggcccgggcagaggtgaatggcctgaaggccagccgcttcttcagcctggccgagcggctgaatgtgggcgccgcccccttcatctggctgttcatccggcccccctggagcgtgtctggcagctgctgcaaggctgtggtgcatgagagcctgcgggcagagtgccagctgcagaggacccacaaggccagcatcctgcactgcctgggccgggtgctgagcctgtttgaagatgaggagaagcagcagcaggcccatgacctgtttgaggaggccgcccaccagggctgcctgaccagcagctacctgctgtgggagagtgacagaagaacagatgtgtctgaccccggccgctgcctgcacagcttcaggaagctgcgggactatgctgccaagggctgctgggaggcccagctgagcctggccaaggcctgtgccaatgccaaccagctgggcctggaggtgcgggccagcagcgagatcgtgtgccagctgttccaggccagccaggccgtgtccaagcagcaggtgttttctgtgcagaagggcctgaatgacaccatgagatacatcctgattgactggctggtggaggtggccaccatgaaggacttcaccagcctgtgcctgcacctgactgtggagtgtgtggaccgctacctgcggcggcggctggtgccccgctaccgcctgcagctgctgggcatcgcctgcatggtgatctgcacccgcttcatcagcaaggagatcctgaccatccgggaggccgtgtggctgacagacaacacctacaagtatgaggacctggtgaggatgatgggagaaattgtgtctgccctggagggcaagatccgggtgcccaccgtggtggactacaaggaggtgctgctgaccctggtgcctgtggagctgcggacccagcacctgtgcagcttcctgtgtgagctgagcctgctgcacaccagcctgagcgcctatgccccagcccggctggccgctgctgccctgctgctggcccggctgacccacggccagacccagccctggaccacccagctgtgggacctgaccggcttctcctatgaagatctcatcccctgtgtgctgagcctgcacaagaagtgcttccatgatgatgcccccaaggactaccggcaggtgtccctgacagctgtgaagcagagatttgaggacaagcgctacggggagatcagccaggaggaggtgctgagctacagccagctgtgtgccgccctgggcgtgacccaggacagcccagacccccccaccttcctgagcactggagagatccacgccttcctgagcagccccagcggccgccgcaccaagaggaagcgggagaacagcctgcaggaggaccggggcagctttgtgaccacccccacagctgagctgagcagccaggaggagaccctgctgggcagcttcctggactggagcctggactgctgcagcggctatgaaggagaccaggagagcgagggggagaaggagggagatgtgacagcccccagcggcatcctggatgtgacagtggtgtacctgaaccctgagcagcactgctgccaggagagcagtgatgaggaggcctgcccagaagataaaggcccccaggacccccaggccctggccctggacacccagatcccagccaccccaggccccaagcccctggtgaggaccagccgggagcccgggaaggatgtgaccaccagcggctacagctctgtgtccacagccagccccaccagctctgtggatggcggcctgggcgccctgccccagcccacctctgtgctgagcctggacagcgacagccacacccagccctgccaccaccaggccaggaagagctgcctgcagtgccggccccccagccccccagagagctctgtgccccagcagcaggtgaagaggatcaacctgtgcatccacagcgaggaggaggacatgaacctgggcctggtgcggctgtag

SEQ ID NO: 19230 - DNA, 888 bp, synthetic construct
  misc_feature 1..888: note = Description of Artificial Sequence: Synthetic coding sequence
  source 1..888: mol_type = other DNA
atgattgaggtgctgaccaccacagacagccagaagctgctgcaccagctgaatgccctgctggagcaggagagccgctgccagcccaaggtgtgtggcctgcggctgattgaaagtgcccatgacaatggcctgaggatgacagcccggctgcgggactttgaggtgaaggacctgctgagcctgacccagttcttcggctttgacacagagaccttcagcctggccgtgaacctgctggaccgcttcctgagcaagatgaaggtgcagcccaagcacctgggctgtgtgggcctgagctgcttctacctggccgtgaagagcattgaggaggagagaaatgtgcccctggccacagacctgatccgcatcagccagtaccgcttcaccgtgtctgacctgatgaggatggagaagatcgtgctggagaaggtgtgctggaaggtgaaggccaccacagccttccagttcctgcagctgtactacagcctgctgcaggagaacctgcccctggagaggaggaacagcatcaactttgagcggctggaggcccagctgaaggcctgccactgccgcatcatcttcagcaaggccaagcccagcgtgctggccctgagcatcatcgccctggagatccaggcccagaagtgtgtggagctgacagagggcattgaatgtctgcagaagcacagcaagatcaatggccgggacctgaccttctggcaggagctggtgtccaagtgcctgacagagtacagcagcaacaagtgcagcaagcccaacgtgcagaagctgaagtggatcgtgtctggccgcacagcccggcagctgaagcacagctactaccgcatcacccacctgcccaccatccctgagatggtgccctag

SEQ ID NO: 19231 - DNA, 888 bp, synthetic construct; identical to SEQ ID NO: 19230
  misc_feature 1..888: note = Description of Artificial Sequence: Synthetic coding sequence
  source 1..888: mol_type = other DNA

SEQ ID NO: 19232 - DNA, 411 bp, synthetic construct
  misc_feature 1..411: note = Description of Artificial Sequence: Synthetic coding sequence
  source 1..411: mol_type = other DNA
atgattgaggtgctgaccaccacagacagccagaagctgctgcaccagctgaatgccctgctggagcaggagagccgctgccagcccaaggtgtgtggcctgcggctgattgaaagtgcccatgacaatggcctgaggatgacagcccggctgcgggactttgaggtgaaggacctgctgagcctgacccagttcttcggctttgacacagagaccttcagcctggccgtgaacctgctggaccgcttcctgagcaagatgaaggtgcagcccaagcacctgggctgtgtgggcctgagctgcttctacctggccgtgaagagcattgaggaggagagaaatgtgcccctggccacagacctgatccgcatcagccagtaccgcttcaccgtgtctgacctgatgaggtag

SEQ ID NO: 19233 - DNA, 411 bp, synthetic construct; identical to SEQ ID NO: 19232
  misc_feature 1..411: note = Description of Artificial Sequence: Synthetic coding sequence
  source 1..411: mol_type = other DNA

SEQ ID NO: 19234 - DNA, 504 bp, synthetic construct
  misc_feature 1..504: note = Description of Artificial Sequence: Synthetic coding sequence
  source 1..504: mol_type = other DNA
atgtctgccaaggacctgatgaggatggagaagatcgtgctggagaaggtgtgctggaaggtgaaggccaccacagccttccagttcctgcagctgtactacagcctgctgcaggagaacctgcccctggagaggaggaacagcatcaactttgagcggctggaggcccagctgaaggcctgccactgccgcatcatcttcagcaaggccaagcccagcgtgctggccctgagcatcatcgccctggagatccaggcccagaagtgtgtggagctgacagagggcattgaatgtctgcagaagcacagcaagatcaatggccgggacctgaccttctggcaggagctggtgtccaagtgcctgacagagtacagcagcaacaagtgcagcaagcccaacgtgcagaagctgaagtggatcgtgtctggccgcacagcccggcagctgaagcacagctactaccgcatcacccacctgcccaccatccctgagatggtgccctag

SEQ ID NO: 19235 - DNA, 348 bp, synthetic construct
  misc_feature 1..348: note = Description of Artificial Sequence: Synthetic coding sequence
  source 1..348: mol_type = other DNA
atgattgaggtgctgaccaccacagacagccagaagctgctgcaccagctgaatgccctgctggagcaggagagccgctgccagcccaaggtgtgtggcctgcggctgattgaaagtgcccatgacaatggcctgaggatgacagcccggctgcgggactttgaggtgaaggacctgctgagcctgacccagttcttcggctttgacacagagaccttcagcctggccgtgaacctgctggaccgcttcctgagcaagatgaaggtgcagcccaagcacctgggctgtgtgggcctgagctgcttctacctggccgtgaagagcattgaggaggagagaaatgtgtag

SEQ ID NO: 19236 - DNA, 486 bp, synthetic construct
  misc_feature 1..486: note = Description of Artificial Sequence: Synthetic coding sequence
  source 1..486: mol_type = other DNA
atgaggatggagaagatcgtgctggagaaggtgtgctggaaggtgaaggccaccacagccttccagttcctgcagctgtactacagcctgctgcaggagaacctgcccctggagaggaggaacagcatcaactttgagcggctggaggcccagctgaaggcctgccactgccgcatcatcttcagcaaggccaagcccagcgtgctggccctgagcatcatcgccctggagatccaggcccagaagtgtgtggagctgacagagggcattgaatgtctgcagaagcacagcaagatcaatggccgggacctgaccttctggcaggagctggtgtccaagtgcctgacagagtacagcagcaacaagtgcagcaagcccaacgtgcagaagctgaagtggatcgtgtctggccgcacagcccggcagctgaagcacagctactaccgcatcacccacctgcccaccatccctgagatggtgccctag

SEQ ID NO: 19237 - DNA, 486 bp, synthetic construct; identical to SEQ ID NO: 19236
  misc_feature 1..486: note = Description of Artificial Sequence: Synthetic coding sequence
  source 1..486: mol_type = other DNA

SEQ ID NO: 19238 - DNA, 105 bp, synthetic construct
  misc_feature 1..105: note = Description of Artificial Sequence: Synthetic coding sequence
  source 1..105: mol_type = other DNA
atgattgaggtgctgaccaccacagacagccagaagctgctgcaccagctgaatgccctgctggagcaggagagccgctgccagcccaagaggcacttcctgtag

SEQ ID NO: 19239 - DNA, 1035 bp, synthetic construct
  misc_feature 1..1035: note = Description of Artificial Sequence: Synthetic coding sequence
  source 1..1035: mol_type = other DNA
atgaaggacctgggcgctgagcacctggccggccacgagggcgtgcagctgctgggcctgctgaatgtgtacctggagcaggaggagcgcttccagccccgggagaagggcctgagcctgattgaggccaccccagaaaatgacaacaccctgtgccccggcctgagaaatgccaaggtggaggacctgcggagcctggccaacttcttcggcagctgcacagagacctttgtgctggccgtgaacatcctggaccgcttcctggccctgatgaaggtgaagcccaagcacctgagctgcattggagtgtgcagcttcctgctggccgcccgcatcgtggaggaggactgcaacatccccagcacccatgatgtgatccgcatcagccagtgcaagtgcacagccagtgacatcaagaggatggagaagatcatcagcgagaagctgcactatgagctggaggccaccacagccctgaacttcctgcacctgtaccacaccatcatcctgtgccacaccagcgagaggaaggagatcctgagcctggacaagctggaggcccagctgaaggcctgcaactgccgcctcatcttcagcaaggccaagcccagcgtgctggccctgtgcctgctgaacctggaggtggagaccctgaagtctgtggagctgctggagatcctgctgctggtgaagaagcacagcaagatcaatgacacagagttcttctactggagggagctggtgtccaagtgcctggccgagtacagcagccctgagtgctgcaagccagacctgaagaagctggtgtggatcgtgtccagaagaacagcccagaacctgcacaacagctactacagcgtgcctgagctgcccaccatccctgagggcggctgctttgatgagagcgagagcgaggacagctgtgaggacatgagctgtggggaggagagcctgagcagcagcccccccagcgaccaggagtgcaccttcttcttcaacttcaaggtggcccagaccctgtgcttccccagctag

SEQ ID NO: 19240 - DNA, 1035 bp, synthetic construct
  misc_feature 1..1035: note = Description of Artificial Sequence: Synthetic coding sequence
  source 1..1035: mol_type = other DNA
atgaaggacctgggcgctgagcacctggccggccacgagggcgtgcagctgctgggcctgctgaatgtgtacctggagcaggaggagcgcttccagccccgggagaagggcctgagcctgattgaggccaccccagaaaatgacaacaccctgtgccccggcctgagaaatgccaaggtggaggacctgcggagcctggccaacttcttcggcagctgcacagagacctttgtgctggccgtgaacatcctggaccgcttcctggccctgatgaaggtgaagcccaagcacctgagctgcattggagtgtgcagcttcctgctggccgcccgcatcgtggaggaggactgcaacatccccagcacccatgatgtgatccgcatcagccagtgcaagtgcacagccagtgacatcaagaggatggagaagatcatcagcgagaagctgcactatgagctggaggccaccacagccctgaacttcctgcacctgtaccacaccatcatcctgtgccacaccagcgagaggaaggagatcctgagcctggacaagctggaggcccagctgaaggcctgcaactgccgcctcatcttcagcaaggccaagcccagcgtgctggccctgtgcctgctgaacctggaggtggagaccctgaagtctgtggagctgctggagatcctgctgctggtgaagaagcacagcaagatcaatgacacagagttcttctactggagggagctggtgtccaagtgcctggccgagtacagcagccctgagtgctgcaagccagacctgaagaagctggtgtggatcgtgtccagaagaacagcccagaacctgcacaacagctactacagcgtgcctgagctgcccaccatccctgagggcggctgctttgatgagagcgagagctctgtggcccaggccggcgtgcagtggccagacctgagcagcttccagcccccacccacccgcttcaagcgcttcagctgcctgagcctgcggagctcctgggactacagctcctggacctag

SEQ ID NO: 19241 - DNA, 1035 bp, synthetic construct; identical to SEQ ID NO: 19239
  misc_feature 1..1035: note = Description of Artificial Sequence: Synthetic coding sequence
  source 1..1035: mol_type = other DNA

SEQ ID NO: 19242 - DNA, 1035 bp, synthetic construct; identical to SEQ ID NO: 19239
  misc_feature 1..1035: note = Description of Artificial Sequence: Synthetic coding sequence
  source 1..1035: mol_type = other DNA

SEQ ID NO: 19243 - DNA, 483 bp, synthetic construct
  misc_feature 1..483: note = Description of Artificial Sequence: Synthetic coding sequence
  source 1..483: mol_type = other DNA
atgaaggacctgggcgctgagcacctggccggccacgagggcgtgcagctgctgggcctgctgaatgtgtacctggagcaggaggagcgcttccagccccgggagaagggcctgagcctgattgaggccaccccagaaaatgacaacaccctgtgccccggcctgagaaatgccaaggtggaggacctgcggagcctggccaacttcttcggcagctgcacagagacctttgtgctggccgtgaacatcctggaccgcttcctggccctgatgaaggtgaagcccaagcacctgagctgcattggagtgtgcagcttcctgctggccgcccgcatcgtggaggaggactgcaacatccccagcacccatgatgtgatccgcatcagccagtgcaagtgcacagccagtgacatcaagaggatggagaagatcatcagcgagaagctgcactatgagctggaggccaccacagccctgaactag

SEQ ID NO: 19244 - DNA, 972 bp, synthetic construct
  misc_feature 1..972: note = Description of Artificial Sequence: Synthetic coding sequence
  source 1..972: mol_type = other DNA
atgtaccacaacagcagccagaagaggcactggaccttcagcagcgaggagcagctggcccggctgcgggcagatgccaacaggaagttccgctgcaaggctgtggccaacgggaaggtgctgcccaatgaccctgtgttcctggagccccatgaggagatgaccctgtgcaagtactatgagaagaggctgctggagttctgcagcgtcttcaagccagccatgcccaggtctgtggtgggcacagcctgcatgtacttcaagcgcttctacctgaacaacagcgtgatggagtaccacccccgcatcatcatgctgacctgtgccttcctggcctgcaaggtggatgagttcaacgtgagcagcccccagtttgtgggcaacctgcgggagagccccctgggccaggagaaggccctggagcagatcctggagtatgagctgctgctgatccagcagctgaacttccacctgattgtgcacaacccctaccggccctttgagggcttcctgattgacctgaagacccgctaccccatcctggagaaccctgagatcctgaggaagacagcagatgacttcctgaaccgcatcgccctgacagatgcctacctgctgtacacccccagccagatcgccctgacagccatcctgagcagcgccagccgggccggcatcaccatggagagctacctgtctgagagcctgatgctgaaggagaacagaacctgcctgagccagctgctggacatcatgaagtccatgaggaacctggtgaagaagtatgagccccccaggtctgaggaggtggccgtgctgaagcagaagctggagcgctgccacagcgctgagctggccctgaatgtcatcaccaagaagaggaagggctatgaagatgatgattatgtgtccaagaagagcaagcatgaggaggaggagtggacagatgatgacctggtggagagcctgtag

SEQ ID NO: 19245 - DNA, 768 bp, synthetic construct
  misc_feature 1..768: note = Description of Artificial Sequence: Synthetic coding sequence
  source 1..768: mol_type = other DNA
atgcccaggtctgtggtgggcacagcctgcatgtacttcaagcgcttctacctgaacaacagcgtgatggagtaccacccccgcatcatcatgctgacctgtgccttcctggcctgcaaggtggatgagttcaacgtgagcagcccccagtttgtgggcaacctgcgggagagccccctgggccaggagaaggccctggagcagatcctggagtatgagctgctgctgatccagcagctgaacttccacctgattgtgcacaacccctaccggccctttgagggcttcctgattgacctgaagacccgctaccccatcctggagaaccctgagatcctgaggaagacagcagatgacttcctgaaccgcatcgccctgacagatgcctacctgctgtacacccccagccagatcgccctgacagccatcctgagcagcgccagccgggccggcatcaccatggagagctacctgtctgagagcctgatgctgaaggagaacagaacctgcctgagccagctgctggacatcatgaagtccatgaggaacctggtgaagaagtatgagccccccaggtctgaggaggtggccgtgctgaagcagaagctggagcgctgccacagcgctgagctggccctgaatgtcatcaccaagaagaggaagggctatgaagatgatgattatgtgtccaagaagagcaagcatgaggaggtgtgcttcacccccaagatgaacagcaagctgttcctgctgtacatcctggtgtag

SEQ ID NO: 19246 - DNA, 750 bp, synthetic construct
  misc_feature 1..750: note = Description of Artificial Sequence: Synthetic coding sequence
  source 1..750: mol_type = other DNA
atgcccaggtctgtggtgggcacagcctgcatgtacttcaagcgcttctacctgaacaacagcgtgatggagtaccacccccgcatcatcatgctgacctgtgccttcctggcctgcaaggtggatgagttcaacgtgagcagcccccagtttgtgggcaacctgcgggagagccccctgggccaggagaaggccctggagcagatcctggagtatgagctgctgctgatccagcagctgaacttccacctgattgtgcacaacccctaccggccctttgagggcttcctgattgacctgaagacccgctaccccatcctggagaaccctgagatcctgaggaagacagcagatgacttcctgaaccgcatcgccctgacagatgcctacctgctgtacacccccagccagatcgccctgacagccatcctgagcagcgccagccgggccggcatcaccatggagagctacctgtctgagagcctgatgctgaaggagaacagaacctgcctgagccagctgctggacatcatgaagtccatgaggaacctggtgaagaagtatgagccccccaggtctgaggaggtggccgtgctgaagcagaagctggagcgctgccacagcgctgagctggccctgaatgtcatcaccaagaagaggaagggctatgaagatgatgattatgtgtccaagaagagcaagcatgaggaggaggagtggacagatgatgacctggtggagagcctgtag

SEQ ID NO: 19247 - DNA, 1053 bp, synthetic construct
  misc_feature 1..1053: note = Description of Artificial Sequence: Synthetic coding sequence
  source 1..1053: mol_type = other DNA
atggtgaccccctgccccaccagccccagcagccctgctgcccgggccggccggcgggacaatgaccagaacctgcgggcccctgtgaagaagagcagaagaccccggctgcggaggaagcagcccctgcaccccctgaacccctgccccctgcccggggacagcggcatctgtgacctgtttgagagccccagcagcggcagtgatggagctgagagccccagcgctgcccggggcggcagccccctgcccggccctgcccagcctgtggcccagctggacctgcagaccttccgggactatggccagagctgctacgccttcaggaaggcccaggagagccacttccacccccgggaggccctggcccggcagccccaggtgacagctgagagccgctgcaagctgctgtcctggctgatccctgtgcaccggcagtttggcctgagctttgagagcctgtgcctgactgtgaacaccctggaccgcttcctgaccaccacccctgtggccgctgactgcttccagctgctgggcgtgaccagcctgctgattgcctgcaagcaggtggaggtgcaccccccccgggtgaagcagctgctggccctgtgctgcggggccttcagccggcagcagctgtgcaacctggagtgcatcgtgctgcacaagctgcacttcaccctgggcgcccccaccatctccttcttcctggagcacttcacccacgcccgggtggaggccggccaggccgaggccagcgaggccctggaggcccaggccctggcccggggcgtggccgagctgagcctggccgactatgccttcaccagctacagccccagcctgctggccatctgctgcctggccctggccgacaggatgctgcgggtgtccaggcctgtggacctgcggctgggggaccaccctgaggccgccctggaggactgcatgggcaagctgcagctgctggtggccatcaacagcaccagcctgacccacatgctgcctgtgcagatctgtgagaagtgcagcctgccccccagcagcaagtag

SEQ ID NO: 19248 - DNA, 2181 bp, synthetic construct
  misc_feature 1..2181: note = Description of Artificial Sequence: Synthetic coding sequence
  source 1..2181: mol_type = other DNA
atggagggggagaggaagaacaacaacaagcgctggtacttcacccgggagcagctggagaacagccccagcagaagatttggagtggaccctgacaaggagctgagctaccggcagcaggccgccaacctgctgcaggacatgggccagaggctgaatgtgtcccagctgaccatcaacacagccatcgtgtacatgcaccgcttctacatgatccagagcttcacccagtttcctggcaacagcgtggccccagctgccctcttcctggccgccaaggtggaggagcagcccaagaagctggagcacgtgatcaaggtggcccacacctgcctgcacccccaggagagcctgcctgacaccaggtctgaggcctacctgcagcaggtgcaggacctggtgatcctggagagcatcatcctgcagaccctgggctttgagctgaccatcgaccacccccacacccacgtggtgaagtgcacccagctggtgcgggccagcaaggacctggcccagaccagctacttcatggccaccaacagcctgcacctgaccaccttcagcctgcagtacaccccacctgtggtggcctgtgtgtgcatccacctggcctgcaagtggagcaactgggagatccctgtgtccacagatggcaagcactggtgggagtatgtggatgccaccgtgaccctggagctgctggatgagctgacccatgagttcctgcagatcctggagaagacccccaaccggctgaagaggatctggaactggagggcctgtgaggccgccaagaagaccaaggcagatgaccggggcacagatgagaagaccagcgagcagaccatcctgaacatgatcagccagagcagcagtgacaccaccatcgccggcctgatgtccatgagcaccagcaccaccagcgctgtgcccagcctgcctgtgtctgaggagagcagcagcaacctgacctctgtggagatgctgcccgggaagcgctggctgagcagccagcccagcttcaagctggagcccacccagggccacaggaccagcgagaacctggccctgactggagtggaccacagcctgccccaggacggcagcaatgccttcatcagccagaagcagaacagcaagtctgtgcccagcgccaaggtgtccctgaaggagtaccgggccaagcatgctgaggagctggccgcccagaagaggcagctggagaacatggaggccaacgtgaagagccagtatgcctatgctgcccagaacctgctgagccaccacgacagccacagcagcgtcatcctgaagatgcccatcgagggctctgaaaatcctgagcggcccttcctggagaaggctgacaagacagccctgaagatgagaattcctgtggccggcggggacaaggccgccagcagcaagccagaggagatcaagatgaggatcaaggtgcacgccgctgctgacaagcacaacagcgtggaggacagcgtgaccaagagccgggagcacaaggagaagcacaagacccaccccagcaaccaccaccaccaccacaaccaccacagccacaagcacagccacagccagctgcctgtgggcactggaaacaagaggcctggggaccccaagcacagcagccagaccagcaacctggcccacaagacctacagcctgagcagcagcttcagcagcagcagcagcaccaggaagaggggccccagcgaggagaccggcggcgctgtgtttgaccacccagccaagatcgccaagagcaccaagagcagcagcctgaacttctccttccccagcctgcccaccatgggccagatgcctggccacagcagtgacaccagcggcctgtccttcagccagcccagctgcaagaccagggtgccccacagcaagctggacaagggccccaccggggccaacggccacaacaccacccagaccatcgactaccaggacacagtgaacatgctgcacagcctgctgagcgcccagggcgtgcagcccacccagcccacagcctttgaatttgtgcggccctacagcgactacctgaaccccaggtctgggggcatcagcagccgcagcggcaacacagacaagccccggcccccacccctgcccagcgagcccccaccacccctgccccccctgcccaagtag

SEQ ID NO: 19249 - DNA, 723 bp, synthetic construct
  misc_feature 1..723: note = Description of Artificial Sequence: Synthetic coding sequence
  source 1..723: mol_type = other DNA
atggaggactacaccaagattgagaagatcggggagggcacctatggagtggtgtacaagggccgccacaagaccaccggccaggtggtggccatgaagaagatccggctggagagcgaggaggagggcgtgcccagcacagccatccgggagatcagcctgctgaaggagctgcggcaccccaacatcgtgtccctgcaggatgtgctgatgcaggacagccggctgtacctgatctttgagttcctgtccatggacctgaagaagtacctggacagcatccccccaggccagtacatggacagcagcctggtgaaggtggtgaccctgtggtaccgcagccctgaggtgctgctgggcagcgcccgctacagcacccctgtggacatctggagcatcggcaccatctttgctgagctggccaccaagaagcccctcttccacggggacagcgagattgaccagctgttccgcatcttccgggccctgggcacccccaacaatgaggtgtggccagaggtggagagcctgcaggactacaagaacaccttccccaagtggaagccaggcagcctggccagccacgtgaagaacctggatgaaaatggcctggacctgctgagcaagatgctgatctatgaccctgccaagaggatcagcggcaagatggccctgaaccacccctacttcaatgacctggacaaccagatcaagaagatgtag

SEQ ID NO: 19250 - DNA, 723 bp, synthetic construct; identical to SEQ ID NO: 19249
  misc_feature 1..723: note = Description of Artificial Sequence: Synthetic coding sequence
  source 1..723: mol_type = other DNA

SEQ ID NO: 19251 - DNA, 894 bp, synthetic construct
  misc_feature 1..894: note = Description of Artificial Sequence: Synthetic coding sequence
  source 1..894: mol_type = other DNA
atggaggactacaccaagattgagaagatcggggagggcacctatggagtggtgtacaagggccgccacaagaccaccggccaggtggtggccatgaagaagatccggctggagagcgaggaggagggcgtgcccagcacagccatccgggagatcagcctgctgaaggagctgcggcaccccaacatcgtgtccctgcaggatgtgctgatgcaggacagccggctgtacctgatctttgagttcctgtccatggacctgaagaagtacctggacagcatccccccaggccagtacatggacagcagcctggtgaagagctacctgtaccagatcctgcagggcatcgtgttctgccacagccggcgggtgctgcaccgggacctgaagccccagaacctgctgattgatgacaagggcaccatcaagctggccgactttggcctggcccgggccttcggcatccccatccgggtgtacacccatgaggtggtgaccctgtggtaccgcagccctgaggtgctgctgggcagcgcccgctacagcacccctgtggacatctggagcatcggcaccatctttgctgagctggccaccaagaagcccctcttccatggagacagcgagattgaccagctgttccgcatcttccgggccctgggcacccccaacaatgaggtgtggccagaggtggagagcctgcaggactacaagaacaccttccccaagtggaagccaggcagcctggccagccacgtgaagaacctggatgaaaatggcctggacctgctgagcaagatgctgatctatgaccctgccaagaggatcagcggcaagatggccctgaaccacccctacttcaatgacctggacaaccagatcaagaagatgtag

SEQ ID NO: 19252 - DNA, 894 bp, synthetic construct
  misc_feature 1..894: note = Description of Artificial Sequence: Synthetic coding sequence
  source 1..894: mol_type = other DNA
atggaggactacaccaagattgagaagatcggggagggcacctatggagtggtgtacaagggccgccacaagaccaccggccaggtggtggccatgaagaagatccggctggagagcgaggaggagggcgtgcccagcacagccatccgggagatcagcctgctgaaggagctgcggcaccccaacatcgtgtccctgcaggatgtgctgatgcaggacagccggctgtacctgatctttgagttcctgtccatggacctgaagaagtacctggacagcatccccccaggccagtacatggacagcagcctggtgaagagctacctgtaccagatcctgcagggcatcgtgttctgccacagccggcgggtgctgcaccgggacctgaagccccagaacctgctgattgatgacaagggcaccatcaagctggccgactttggcctggcccgggccttcggcatccccatccgggtgtacacccatgaggccatcaccctgtggtaccgcagccctgaggtgctgctgggcagcgcccgctacagcacccctgtggacatctggagcatcggcaccatctttgctgagctggccaccaagaagcccctcttccatggagacagcgagattgaccagctgttccgcatcttccgggccctgggcacccccaacaatgaggtgtggccagaggtggagagcctgcaggactacaagaacaccttccccaagtggaagccaggcagcctggccagccacgtgaagaacctggatgaaaatggcctggacctgctgagcaagatgctgatctatgaccctgccaagaggatcagcggcaagatggccctgaaccacccctacttcaatgacctggacaaccagatcaagaagatgtag

SEQ ID NO: 19253 - DNA, 570 bp, synthetic construct
  misc_feature 1..570: note = Description of Artificial Sequence: Synthetic coding sequence
  source 1..570: mol_type = other DNA
atggaggactacaccaagattgagaagatcggggagggcacctatggagtggtgtacaagggccgccacaagaccaccggccaggtggtggccatgaagaagatccggctggagagcgaggaggagggcgtgcccagcacagccatccgggagatcagcctgctgaaggagctgcggcaccccaacatcgtgtccctgcaggatgtgctgatgcaggacagccggctgtacctgatctttgagttcctgtccatggacctgaagaagtacctggacagcatccccccaggccagtacatggacagcagcctggtgaagagctacctgtaccagatcctgcagggcatcgtgttctgccacagccggcgggtgctgcaccgggacctgaagccccagaacctgctgattgatgacaagggcaccatcaagctggccgactttggcctggcccgggccttcggcatccccatccgggtgtacacccatgaggccatcaccctgtggtaccgcagccctgaggtgctgctgggcagcgcccgctacagcacccctgtggacatctggagctag

SEQ ID NO: 19254 - DNA, 897 bp, synthetic construct
  misc_feature 1..897: note = Description of Artificial Sequence: Synthetic coding sequence
  source 1..897: mol_type = other DNA
atggagaacttccagaaggtggagaagatcggggagggcacctatggagtggtgtacaaggccaggaacaagctgaccggggaggtggtggccctgaagaagatccggctggacacagaaacagaaggagtgcccagcacagccatccgggagatcagcctgctgaaggagctgaaccaccccaacatcgtgaagctgctggatgtgatccacacagagaacaagctgtacctggtgtttgagttcctgcaccaggacctgaagaagttcatggatgccagcgccctgaccggcatccccctgcccctcatcaagagctacctgttccagctgctgcagggcctggccttctgccacagccaccgggtgctgcaccgggacctgaagccccagaacctgctgatcaacacagaaggagccatcaagctggccgactttggcctggcccgggccttcggcgtgcctgtgaggacctacacccatgaggtggtgaccctgtggtaccgggcccctgagatcctgctgggctgcaagtactacagcacagctgtggacatctggagcctgggctgcatctttgctgagatggtgacccggcgggccctcttccctggggacagcgagattgaccagctgttccgcatcttccgcaccctgggcaccccagatgaggtggtgtggccaggagtgacctccatgccagactacaagcccagcttccccaagtgggcccggcaggacttcagcaaggtggtgccccccctggatgaagatggccgcagcctgctgagccagatgctgcactatgaccccaacaagaggatcagcgccaaggccgccctggcccaccccttcttccaggatgtgaccaagcctgtgccccacctgcggctgtag

SEQ ID NO: 19255 - DNA, 795 bp, synthetic construct
  misc_feature 1..795: note = Description of Artificial Sequence: Synthetic coding sequence
  source 1..795: mol_type = other DNA
atggagaacttccagaaggtggagaagatcggggagggcacctatggagtggtgtacaaggccaggaacaagctgaccggggaggtggtggccctgaagaagatccggctggacacagaaacagaaggagtgcccagcacagccatccgggagatcagcctgctgaaggagctgaaccaccccaacatcgtgaagctgctggatgtgatccacacagagaacaagctgtacctggtgtttgagttcctgcaccaggacctgaagaagttcatggatgccagcgccctgaccggcatccccctgcccctcatcaagagctacctgttccagctgctgcagggcctggccttctgccacagccaccgggtgctgcaccgggacctgaagccccagaacctgctgatcaacacagaaggagccatcaagctggccgactttggcctggcccgggccttcggcgtgcctgtgaggacctacacccatgaggtgacccggcgggccctcttccctggggacagcgagattgaccagctgttccgcatcttccgcaccctgggcaccccagatgaggtggtgtggccaggagtgacctccatgccagactacaagcccagcttccccaagtgggcccggcaggacttcagcaaggtggtgccccccctggatgaagatggccgcagcctgctgagccagatgctgcactatgaccccaacaagaggatcagcgccaaggccgccctggcccaccccttcttccaggatgtgaccaagcctgtgccccacctgcggctgtag

SEQ ID NO: 19256 - DNA, 348 bp, synthetic construct
  misc_feature 1..348: note = Description of Artificial Sequence: Synthetic coding sequence
  source 1..348: mol_type = other DNA
atgagctacaagcccaacctggccgcccacatgcctgctgctgccctgaatgctgctggctctgtgcacagccccagcacctccatggccaccagcagccagtaccggcagctgctgagtgactatggcccccccagcctgggctacacccagggcactggaaacagccaggtgccccagagcaaatatgcagagctgctggccatcatcgaggagctgggcaaggagatccggcccacctacgccggcagcaagagcgccatggagcggctgaagaggggcatcatccacgcccggggcctggtgcgggagtgcctggccgagacagaaagaaatgcccggagctag

SEQ ID NO: 19257 - DNA, 912 bp, synthetic construct
  misc_feature 1..912: note = Description of Artificial Sequence: Synthetic coding sequence
  source 1..912: mol_type = other DNA
atggccaccagccgctatgagcctgtggccgagattggagtgggcgcctatggaacagtgtacaaggcccgggacccccacagcggccactttgtggccctgaagtctgtgcgggtgcccaatggaggcggcggcggcggcggcctgcccatcagcacagtgcgggaggtggccctgctgcggcggctggaggcctttgagcaccccaacgtggtgcggctgatggatgtgtgtgccaccagcaggacagaccgggagatcaaggtgaccctggtgtttgaacatgtggaccaggacctgcggacctacctggacaaggcccctcctcctggcctgcctgctgagaccatcaaggacctgatgaggcagttcctgcggggcctggacttcctgcacgccaactgcatcgtgcaccgggacctgaagccagagaacatcctggtgaccagcggcggcaccgtgaagctggccgactttggcctggcccgcatctacagctaccagatggccctgacccctgtggtggtgaccctgtggtaccgggcccctgaggtgctgctgcagagcacctacgccacccctgtggacatgtggagcgtgggctgcatctttgctgagatgttccggaggaagcccctcttctgtggcaacagcgaggccgaccagctgggcaagatctttgacctgattggcctgcccccagaagatgactggcccagagatgtgtccctgcccaggggggccttccccccccggggccccaggcctgtgcagagcgtggtgcctgagatggaggagagcggggcccagctgctgctggagatgctgaccttcaacccccacaagaggatcagcgccttccgggccctgcagcacagctacctgcacaaggatgagggcaaccctgagtag

SEQ ID NO: 19258 - DNA, 336 bp, synthetic construct
  misc_feature 1..336: note = Description of Artificial Sequence: Synthetic coding sequence
  source 1..336: mol_type = other DNA
atggccaccagccgctatgagcctgtggccgagattggagtgggcgcctatggaacagtgtacaaggcccgggacccccacagcggccactttgtggccctgaagtctgtgcgggtgcccaatggaggcggcggcggcggcggcctgcccatcagcacagtgcgggaggtggccctgctgcggcggctggaggcctttgagcaccccaacgtggtgcggctgatggatgtgtgtgccaccagcaggacagaccgggagatcaagcgctgctttgtggagagcctgagctctgtggagaccctgaagcccacctcctgggccaagagcctgacctag

SEQ ID NO: 19259 - DNA, 552 bp, synthetic construct
  misc_feature 1..552: note = Description of Artificial Sequence: Synthetic coding sequence
  source 1..552: mol_type = other DNA
atgaggcagttcctgcggggcctggacttcctgcacgccaactgcatcgtgcaccgggacctgaagccagagaacatcctggtgaccagcggcggcaccgtgaagctggccgactttggcctggcccgcatctacagctaccagatggccctgacccctgtggtggtgaccctgtggtaccgggcccctgaggtgctgctgcagagcacctacgccacccctgtggacatgtggagcgtgggctgcatctttgctgagatgttccggaggaagcccctcttctgtggcaacagcgaggccgaccagctgggcaagatctttgacctgattggcctgcccccagaagatgactggcccagagatgtgtccctgcccaggggggccttccccccccggggccccaggcctgtgcagagcgtggtgcctgagatggaggagagcggggcccagctgctgctggagatgctgaccttcaacccccacaagaggatcagcgccttccgggccctgcagcacagctacctgcacaaggatgagggcaaccctgagtag

SEQ ID NO: 19260 - skipped

SEQ ID NO: 19261 - DNA, 612 bp, synthetic construct
  misc_feature 1..612: note = Description of Artificial Sequence: Synthetic coding sequence
  source 1..612: mol_type = other DNA
atggccaccagccgctatgagcctgtggccgagattggagtgggcgcctatggaacagtgtacaaggcccgggacccccacagcggccactttgtggccctgaagtctgtgcgggtgcccaatggaggcggcggcggcggcggcctgcccatcagcacagtgcgggaggtggccctgctgcggcggctggaggcctttgagcaccccaacgtggtgcggctgatggatgtgtgtgccaccagcaggacagaccgggagatcaaggtgaccctggtgtttgaacatgtggaccaggacctgcggacctacctggacaaggcccctcctcctggcctgcctgctgagaccatcaaggacctgatgaggcagttcctgcggggcctggacttcctgcacgccaactgcatcgtgcaccgggacctgaagccagagaacatcctggtgaccagcggcggcaccgtgaagctggccgactttggcctggcccgcatctacagctaccagatggccctgacccctgtggtggtgaccctgtggtaccgggcccctgaggtgctgctgcagagcacctacgccacccctgtggacatgtggagcgtgggctgcatctag

SEQ ID NO: 19262 - DNA, 513 bp, synthetic construct
  misc_feature 1..513: note = Description of Artificial Sequence: Synthetic coding sequence
  source 1..513: mol_type = other DNA
atggccaccagccgctatgagcctgtggccgagattggagtgggcgcctatggaacagtgtacaaggcccgggacccccacagcggccactttgtggccctgaagtctgtgcgggtgcccaatggaggcggcggcggcggcggcctgcccatcagcacagtgcgggaggtggccctgctgcggcggctggaggcctttgagcaccccaacgtggtgcggctgatggatgtgtgtgccaccagcaggacagaccgggagatcaaggtgaccctggtgtttgaacatgtggaccaggacctgcggacctacctggacaaggcccctcctcctggcctgcctgctgagaccatcaaggacctgatgaggcagttcctgcggggcctggacttcctgcacgccaactgcatcgtgcaccgggacctgaagccagagaacatcctggtgaccagcggcggcaccgtgaagctggccgactttggcctggcccgcatctacagctaccagatggcctag

SEQ ID NO: 19263 - DNA, 348 bp, synthetic construct
  misc_feature 1..348: note = Description of Artificial Sequence: Synthetic coding sequence
  source 1..348: mol_type = other DNA
atggccaccagccgctatgagcctgtggccgagattggagtgggcgcctatggaacagtgtacaaggcccgggacccccacagcggccactttgtggccctgaagtctgtgcgggtgcccaatggaggcggcggcggcggcggcctgcccatcagcacagtgcgggaggtggccctgctgcggcggctggaggcctttgagcaccccaacgtggtgcggctgatggatgtgtgtgccaccagcaggacagaccgggagatcaaggtgaccctggtgtttgaacatgtggaccaggacctgcggacctacctggacaaggcccctcctcctggcctgcctgctgagtag

SEQ ID NO: 19264 - DNA, 924 bp, synthetic construct
  misc_feature 1..924: note = Description of Artificial Sequence: Synthetic coding sequence
  source 1..924: mol_type = other DNA
atgggcaccgtgctgagcctgagccccagctacaggaaggccaccctgtttgaagatggagctgccaccgtgggccactacacagctgtgcagaacagcaagaatgccaaggacaagaacctgaagaggcacagcatcatctctgtgctgccctggaagagaattgtggccgtgtctgccaagaagaagaacagcaagaaggtgcagcccaacagcagctaccagaacaacatcacccacctgaacaatgaaaacctgaagaagagcctgagctgtgccaacctgagcacctttgcccagcccccaccagcccagcccccagcccccccagccagccagctgagcggcagccagacaggaggcagcagctctgtgaagaaggccccccaccctgctgtgaccagcgctggcacccccaagagggtgattgtgcaggccagcaccagcgagctgctgcgctgcctgggggagttcctgtgccgccgctgctaccgcctgaagcacctgagccccacagatcctgtgctgtggctgcggtctgtggacaggagcctgctgctgcagggctggcaggaccagggcttcatcaccccagccaacgtggtgttcctgtacatgctgtgcagagatgtgatcagcagcgaggtgggcagtgaccacgagctgcaggccgtgctgctgacctgcctgtacctgagctacagctacatgggaaatgagatctcctaccccctgaagcccttcctggtggagagctgcaaggaggccttctgggaccgctgcctgagcgtcatcaacctgatgagcagcaagatgctgcagatcaatgctgacccccactacttcacccaggtgttcagtgacctgaagaatgaaagtggccaggaggacaagaagaggctgctgctgggcctggacagatag

SEQ ID NO: 19265 - DNA, 981 bp, synthetic construct
  misc_feature 1..981: note = Description of Artificial Sequence: Synthetic coding sequence
  source 1..981: mol_type = other DNA
atggagaaggatggcctgtgcagagctgaccagcagtatgaatgtgtggccgagattggagagggcgcctacggcaaggtgttcaaggcccgggacctgaagaatggaggccgctttgtggccctgaagagggtgcgggtgcagacaggagaggagggcatgcccctgagcaccatccgggaggtggccgtgctgcggcacctggagacctttgagcaccccaacgtggtgcggctgtttgatgtgtgcaccgtgtccaggacagaccgggagaccaagctgaccctggtgtttgagcacgtggaccaggacctgaccacctacctggacaaggtgcctgagcccggggtgcccacagagaccatcaaggacatgatgttccagctgctgcggggcctggacttcctgcacagccaccgggtggtgcaccgggacctgaagccccagaacatcctggtgaccagcagcggccagatcaagctggccgactttggcctggcccgcatctacagcttccagatggccctgacctctgtggtggtgaccctgtggtaccgggcccctgaggtgctgctgcagagcagctatgccacccctgtggacctgtggagcgtgggctgcatctttgctgagatgttccggaggaagcccctcttccggggcagcagtgatgtggaccagctgggcaagatcctggatgtgattggcctgcccggggaggaggactggcccagagatgtggccctgccccggcaggccttccacagcaagagcgcccagcccatcgagaagtttgtgacagacattgatgagctgggcaaggacctgctgctgaagtgcctgaccttcaacccagccaagaggatcagcgcctacagcgccctgagccacccctacttccaggacctggagcgctgcaaggagaacctggacagccacctgccccccagccagaacaccagcgagctgaacacagcctag

SEQ ID NO: 19266 - DNA, 981 bp, synthetic construct; identical to SEQ ID NO: 19265
  misc_feature 1..981: note = Description of Artificial Sequence: Synthetic coding sequence
  source 1..981: mol_type = other DNA

SEQ ID NO: 19267 - DNA, 1041 bp, synthetic construct
  misc_feature 1..1041: note = Description of Artificial Sequence: Synthetic coding sequence
  source 1..1041: mol_type = other DNA
atggccctggatgtgaagagccgggccaagagatatgagaagctggacttcctgggggagggccagtttgccaccgtgtacaaggcccgggacaagaacaccaaccagatcgtggccatcaagaagatcaagctgggccacaggtctgaggccaaggatggcatcaacagaacagccctgcgggagatcaagctgctgcaggagctgagccaccccaacatcatcggcctgctggatgccttcggccacaagagcaacatcagcctggtgtttgacttcatggagacagacctggaggtgatcatcaaggacaacagcctggtgctgacccccagccacatcaaggcctacatgctgatgaccctgcagggcctggagtacctgcaccagcactggatcctgcaccgggacctgaagcccaacaacctgctgctggatgaaaatggagtgctgaagctggccgactttggcctggccaagagctttggcagccccaacagagcctacacccaccaggtggtgacccgctggtaccgggcccctgagctgctgtttggagccaggatgtatggagtgggcgtggacatgtgggccgtgggctgcatcctggccgagctgctgctgcgggtgcccttcctgcccggggacagcgacctggaccagctgacccgcatctttgagaccctgggcacccccacagaggagcagtggccagacatgtgcagcctgcctgactatgtgaccttcaagagcttccctggcatccccctgcaccacatcttctctgctgctggagatgacctgctggacctgatccagggcctcttcctgttcaacccctgtgcccgcatcacagccacccaggccctgaagatgaagtacttcagcaacagacctggccccaccccaggctgccagctgccccggcccaactgccctgtggagaccctgaaggagcagagcaacccagccctggccatcaagaggaagaggacagaggccctggagcagggcggcctgcccaagaagctgatcttctag

SEQ ID NO: 19268 - DNA, 1395 bp, synthetic construct
  misc_feature 1..1395: note = Description of Artificial Sequence: Synthetic coding sequence
  source 1..1395: mol_type = other DNA
atggactatgacttcaaggtgaagctgagcagcgagcgggagcgggtggaggacctgtttgaatatgagggctgcaaggtgggccggggcacctacggccacgtgtacaaggccaagaggaaggatggcaaggatgacaaggactatgccctgaagcagatcgagggcaccggcatctccatgtctgcctgccgggagatcgccctgctgcgggagctgaagcaccccaacgtcatcagcctgcagaaggtgttcctgagccatgctgacaggaaggtgtggctgctgtttgattatgcagagcatgacctgtggcacatcatcaagttccaccgggccagcaaggccaacaagaagcctgtgcagctgccccggggcatggtgaagagcctgctgtaccagatcctggatggcatccactacctgcacgccaactgggtgctgcaccgggacctgaagccagccaacatcctggtgatgggagagggccctgagcggggccgggtgaagattgctgacatgggctttgcccggctcttcaacagccccctgaagcccctggccgacctggaccctgtggtggtgaccttctggtaccgggcccctgagctgctgctgggcgcccggcactacaccaaggccatcgacatctgggccatcggctgcatctttgctgagctgctgaccagcgagcccatcttccactgccggcaggaggacatcaagaccagcaacccctaccaccacgaccagctggaccgcatcttcaacgtgatgggcttccctgctgacaaggactgggaggacatcaagaagatgcctgagcacagcaccctgatgaaggacttcagaagaaacacctacaccaactgcagcctcatcaagtacatggagaagcacaaggtgaagccagacagcaaggccttccacctgctgcagaagctgctgaccatggaccccatcaagaggatcaccagcgagcaggccatgcaggacccctacttcctggaggaccccctgcccaccagtgatgtgtttgctggctgccagatcccctaccccaagcgggagttcctgacagaggaggagccagatgacaagggggacaagaagaaccagcagcagcagcagggcaacaaccacaccaatggaacaggccaccctggcaaccaggacagcagccacacccagggcccccccctgaagaaggtgcgggtggtgccccccaccaccaccagcggcggcctcatcatgaccagtgactaccagaggagcaacccccatgctgcctaccccaaccctggccccagcaccagccagccccagagctccatgggctacagcgccaccagccagcagcccccccagtacagccaccagacccaccgctactag

SEQ ID NO: 19269 - DNA, 495 bp, synthetic construct
  misc_feature 1..495: note = Description of Artificial Sequence: Synthetic coding sequence
  source 1..495: mol_type = other DNA
atggactatgacttcaaggtgaagctgagcagcgagcgggagcgggtggaggacctgtttgaatatgagggctgcaaggtgggccggggcacctacggccacgtgtacaaggccaagaggaaggatggcaaggatgacaaggactatgccctgaagcagatcgagggcaccggcatctccatgtctgcctgccgggagatcgccctgctgcgggagctgaagcaccccaacgtcatcagcctgcagaaggtgttcctgagccatgctgacaggaaggtgtggctgctgtttgattatgcagagcatgacctgtggcacatcatcaagttccaccgggccagcaaggccaacaagaagcctgtgcagctgccccggggcatggtgaagagcctgctgtaccagatcctggatggcatccactacctgcacgccaactgggtgctgcaccgggacctgctgacctgggccctgcctgactacctgatccacctgtag

SEQ ID NO: 19270 - DNA, 1119 bp, synthetic construct
  misc_feature 1..1119: note = Description of Artificial Sequence: Synthetic coding sequence
  source 1..1119: mol_type = other DNA
atggccaagcagtatgattctgtggagtgccccttctgtgatgaggtgtccaaatatgagaagctggccaagattggccagggcaccttcggggaggtgttcaaggcccggcacaggaagacaggccagaaggtggccctgaagaaggtgctgatggagaatgagaaggagggcttccccatcacagccctgcgggagatcaagatcctgcagctgctgaagcatgaaaatgtggtgaacctgattgagatctgcaggaccaaggccagcccctacaaccgctgcaagggcagcatctacctggtgtttgacttctgtgaacatgacctggccggcctgctgagcaatgtgctggtgaagttcaccctgtctgagatcaagagggtgatgcagatgctgctgaatggcctgtactacatccacaggaacaagatcctgcaccgggacatgaaggccgccaacgtgctgatcaccagagatggagtgctgaagctggccgactttggcctggcccgggccttcagcctggccaagaacagccagcccaaccgctacaccaacagagtggtgaccctgtggtaccggcccccagagctgctgctgggggagcgggactatggcccccccatcgacctgtggggcgccggctgcatcatggccgagatgtggaccaggagccccatcatgcagggcaacacagagcagcaccagctggccctgatcagccagctgtgtggcagcatcaccccagaggtgtggcccaacgtggacaactatgagctgtatgagaagctggagctggtgaagggccagaagaggaaggtgaaggaccggctgaaggcctacgtgcgggacccctatgccctggacctgattgacaagctgctggtgctggaccctgcccagagaattgacagtgatgatgccctgaaccacgacttcttctggagcgaccccatgcccagcgacctgaagggcatgctgagcacccacctgacctccatgtttgagtacctggccccacccaggaggaagggcagccagatcacccagcagagcaccaaccagagcaggaacccagccaccaccaaccagacagaatttgagagggtcttctag

SEQ ID NO: 19271 - DNA, 1470 bp, synthetic construct
  misc_feature 1..1470: note = Description of Artificial Sequence: Synthetic coding sequence
  source 1..1470: mol_type = other DNA
atgcagagagatgccccaccccgggccccagccccagccccccggctgcctgccccacccatcggggccgccgccagcagcggcggcggcggcggcggcggcagcggcggcggcggcggcggggccagcgctgccccagcccctcctggcctgagcggcaccaccagcccccggggccctgggggcggccggcgggcagaggaggccggcagcgccccccggggcaggaagtggccctggaggaggaagtggaggggccggggcggggcctggagcgctgctgctgctggccctggggccggggctgctgctgctgccactggaggcggcggcggggccctggaggccgccatggccaagcagtatgacagcgtggagtgccccttctgtgatgaggtgtccaaatatgagaagctggccaagattggccagggcacctttggagaggtgttcaaggcccggcacaggaagacaggccagaaggtggccctgaagaaggtgctgatggagaatgagaaggagggcttccccatcacagccctgcgggagatcaagatcctgcagctgctgaagcatgaaaatgtggtgaacctgattgagatctgcaggaccaaggccagcccctacaaccgctgcaagggcagcatctacctggtgtttgacttctgtgaacatgacctggccggcctgctgagcaatgtgctggtgaagttcaccctgtctgagatcaagagggtgatgcagatgctgctgaatggcctgtactacatccacaggaacaagatcctgcaccgggacatgaaggccgccaacgtgctgatcaccagagatggagtgctgaagctggccgactttggcctggcccgggccttcagcctggccaagaacagccagcccaaccgctacaccaacagagtggtgaccctgtggtacagacctcctgagctgctgctgggggagcgggactatggcccccccatcgacctgtggggcgccggctgcatcatggccgagatgtggaccaggagccccatcatgcagggcaacacagagcagcaccagctggccctgatcagccagctgtgtggcagcatcaccccagaggtgtggcccaacgtggacaactatgagctgtatgagaagctggagctggtgaagggccagaagaggaaggtgaaggaccggctgaaggcctacgtgcgggacccctatgccctggacctgattgacaagctgctggtgctggaccctgcccagagaattgacagtgatgatgccctgaaccacgacttcttctggagcgaccccatgcccagcgacctgaagggcatgctgagcacccacctgacctccatgtttgagtacctggccccacccaggaggaagggcagccagatcacccagcagagcaccaaccagagcagaaatcctgccaccaccaaccagacagaatttgagagggtcttctag

SEQ ID NO: 19272 - DNA, 585 bp, synthetic construct
  misc_feature 1..585: note = Description of Artificial Sequence: Synthetic coding sequence
  source 1..585: mol_type = other DNA
atgcagagagatgccccaccccgggccccagccccagccccccggctgcctgccccacccatcggggccgccgccagcagcggcggcggcggcggcggcggcagcggcggcggcggcggcggggccagcgctgccccagcccctcctggcctgagcggcaccaccagcccccggggccctgggggcggccggcgggcagaggaggccggcagcgccccccggggcaggaagtggccctggaggaggaagtggaggggccggggcggggcctggagcgctgctgctgctggccctggggccggggctgctgctgctgccactggaggcggcggcggggccctggaggccgccatggccaagcagtatgacagcgtggagtgccccttctgtgatgaggtgtccaaatatgagaagctggccaagattggccagggcacctttggagaggtgttcaaggcccggcacaggaagacaggccagaaggtggccctgaagaaggtgctgatggagaatgagaaggagggcttccccatcacagccctgcgggagatcaagatcctgcagctgctgaagcatgaaaattag

SEQ ID NO: 19273 - DNA, 495 bp, synthetic construct
  misc_feature 1..495: note = Description of Artificial Sequence: Synthetic coding sequence
  source 1..495: mol_type = other DNA
atgtctgagcctgctggagatgtgcggcagaacccctgtggcagcaaggcctgcagaagactctttggacctgtggacagcgagcagctgagccgggactgtgatgccctgatggccggctgcatccaggaggcccgggagcgctggaactttgattttgtgacagagacccccctggagggggactttgcctgggagcgggtgcggggcctgggcctgcccaagctgtacctgcccaccggcccccggcggggcagagatgagctgggcggcggcagaagacctggcaccagccctgccctgctgcagggcacagctgaggaggaccacgtggacctgagcctgagctgcaccctggtgcccaggtctggagagcaggccgagggcagccctgggggccctggggacagccagggcaggaagaggcggcagacctccatgacagacttctaccacagcaagagaagactcatcttcagcaagaggaagccctag

SEQ ID NO: 19274 - DNA, 495 bp, synthetic construct; identical to SEQ ID NO: 19273
  misc_feature 1..495: note = Description of Artificial Sequence: Synthetic coding sequence
  source 1..495: mol_type = other DNA

SEQ ID NO: 19275 - DNA, 495 bp, synthetic construct; identical to SEQ ID NO: 19273
  misc_feature 1..495: note = Description of Artificial Sequence: Synthetic coding sequence
  source 1..495: mol_type = other DNA

SEQ ID NO: 19276 - DNA, 597 bp, synthetic construct
  misc_feature 1..597: note = Description of Artificial Sequence: Synthetic coding sequence
  source 1..597: mol_type = other DNA
atgtggggcgtcttccggcggcagaccacccacagcagcaacccccccctgcccggccagcagagctgctgcaaccaccgggacttcttctgcagcggggccatgtctgagcctgctggagatgtgcggcagaacccctgtggcagcaaggcctgcagaagactctttggacctgtggacagcgagcagctgagccgggactgtgatgccctgatggccggctgcatccaggaggcccgggagcgctggaactttgattttgtgacagagacccccctggagggggactttgcctgggagcgggtgcggggcctgggcctgcccaagctgtacctgcccaccggcccccggcggggcagagatgagctgggcggcggcagaagacctggcaccagccctgccctgctgcagggcacagctgaggaggaccacgtggacctgagcctgagctgcaccctggtgcccaggtctggagagcaggccgagggcagccctgggggccctggggacagccagggcaggaagaggcggcagacctccatgacagacttctaccacagcaagagaagactcatcttcagcaagaggaagccctag

SEQ ID NO: 19277 - DNA, 363 bp, synthetic construct
  misc_feature 1..363: note = Description of Artificial Sequence: Synthetic coding sequence
  source 1..363: mol_type = other DNA
atggatgacagcaaggtggtgggcggcaaggtgaagaagccaggcaagaggggcaggaagccagccaagattgacctgaaggccaagctggagaggagccggcagagcgccagagaatgtcgggccaggaagaagctgcgctaccagtacctggaggagctggtgagcagccgggagcgggccatctgtgccctgcgggaggagctggagatgtacaagcagtggtgcatggccatggaccagggcaagatccccagcgagatcaaggccctgctgactggagaggagcagaacaagagccagcagaacagcagccgccacaccaaggccggcaagacagatgccaacagcaacagctggtag

SEQ ID NO: 19278 - DNA, 444 bp, synthetic construct
  misc_feature 1..444: note = Description of Artificial Sequence: Synthetic coding sequence
  source 1..444: mol_type = other DNA
atggaggaggccagccagaggaagtggaactttgacttccagaaccacaagcccctggagggcaagtatgagtggcaggaggtggagaagggcagcctgcctgagttctactaccggccccccaggcctcccaagggggcctgcaaggtgcctgcccaggagagccaggatgtgtctggcagcaggcctgctgcccccctcatcggggccccagccaacagcgaggacacccacctggtggaccccaagacagaccccagcgacagccagacaggcctggccgagcagtgtgccggcatcaggaagaggcctgccacagatgacagcagcacccagaacaagagggccaacagaacagaagaaaatgtgtctgatggcagccccaatgccggctctgtggagcagacccccaagaagccaggcctgcggcggcggcagacctag

SEQ ID NO: 19279 - DNA, 918 bp, synthetic construct
  misc_feature 1..918: note = Description of Artificial Sequence: Synthetic coding sequence
  source 1..918: mol_type = other DNA
atggagcggctggtggcccggggcaccttccctgtgctggtgaggaccagcgcctgccgcagcctgtttggacctgtggaccacgaggagctgagccgggagctgcaggcccggctggccgagctgaatgctgaggaccagaaccgctgggactatgacttccagcaggacatgcccctgcggggccctggccgcctgcagtggacagaggtggacagcgacagcgtgcctgccttctaccgggagaccgtgcaggtgggccgctgccgcctgctgctggcccccaggcctgtggccgtggccgtggccgtgagcccccccctggagcctgctgctgagagcctggatggcctggaggaggcccctgagcagctgcccagcgtgcctgtgcctgccccagccagcaccccacctcctgtgcctgtgctggccccagccccagccccagccccagcccctgtggccgcccctgtggccgcccctgtggccgtggccgtgctggccccagccccagccccagccccagccccagccccagccccagcccctgtggccgccccagccccagccccagccccagccccagccccagccccagccccagccccagccccagatgctgccccccaggagagcgctgagcagggcgccaaccagggccagaggggccaggagcccctggccgaccagctgcacagcggcatcagcggccggcctgctgctggaacagctgctgccagcgccaatggagctgccatcaagaagctgagcggccccctcatcagtgacttctttgccaagaggaagaggtctgcccctgagaagagcagtggagatgtgcctgccccctgccccagccccagcgctgcccctggggtgggctctgtggagcagacccccaggaagaggctgaggtag

SEQ ID NO: 19280 - DNA, 951 bp, synthetic construct
  misc_feature 1..951: note = Description of Artificial Sequence: Synthetic coding sequence
  source 1..951: mol_type = other DNA
atgtctgatgccagcctgcggagcaccagcaccatggagcggctggtggcccggggcaccttccctgtgctggtgaggaccagcgcctgccgcagcctgtttggacctgtggaccacgaggagctgagccgggagctgcaggcccggctggccgagctgaatgctgaggaccagaaccgctgggactatgacttccagcaggacatgcccctgcggggccctggccgcctgcagtggacagaggtggacagcgacagcgtgcctgccttctaccgggagaccgtgcaggtgggccgctgccgcctgctgctggcccccaggcctgtggccgtggccgtggccgtgtccccacccctggagcctgctgctgagagcctggatggcctggaggaggcccctgagcagctgcccagcgtgcctgtgcctgccccagccagcaccccacctcctgtgcctgtgctggccccagccccagccccagccccagcccctgtggccgcccctgtggccgcccctgtggccgtggccgtgctggccccagccccagccccagccccagccccagccccagccccagcccctgtggccgccccagccccagccccagccccagccccagccccagccccagccccagccccagccccagatgctgccccccaggagagcgctgagcagggcgccaaccagggccagaggggccaggagcccctggccgaccagctgcacagcggcatcagcggccggcctgctgctggaacagctgctgccagcgccaacggggccgccatcaagaagctgagcggccccctcatcagtgacttctttgccaagaggaagaggtctgcccctgagaagagcagtggagatgtgcctgccccctgccccagccccagcgctgcccctggggtgggctctgtggagcagacccccaggaagaggctgaggtag

SEQ ID NO: 19281 - DNA, 951 bp, synthetic construct; identical to SEQ ID NO: 19280
  misc_feature 1..951: note = Description of Artificial Sequence: Synthetic coding sequence
  source 1..951: mol_type = other DNA

SEQ ID NO: 19282 - DNA, 918 bp, synthetic construct; identical to SEQ ID NO: 19279
  misc_feature 1..918: note = Description of Artificial Sequence: Synthetic coding sequence
  source 1..918: mol_type = other DNA

SEQ ID NO: 19283 - DNA, 504 bp, synthetic construct
  misc_feature 1..504: note = Description of Artificial Sequence: Synthetic coding sequence
  source 1..504: mol_type = other DNA
atggagcctgctgctggcagctccatggagcccagcgctgactggctggccacagctgctgcccggggccgggtggaggaggtgcgggccctgctggaggccggggccctgcccaatgcccccaacagctatggccggcggcccatccaggtgatgatgatgggcagcgcccgggtggccgagctgctgctgctgcacggggctgagcccaactgtgccgaccctgccaccctgaccaggcctgtgcatgatgctgcccgggagggcttcctggacaccctggtggtgctgcaccgggccggggcccggctggatgtgagagatgcctggggccgcctgcctgtggacctggccgaggagctgggccacagagatgtggcccgctacctgcgggctgctgctgggggcacccggggcagcaaccacgccagaattgatgctgctgagggccccagcgagatgattggcaaccacctgtgggtgtgccgcagcagacatgcctag

SEQ ID NO: 19284 - DNA, 471 bp, synthetic construct
  misc_feature 1..471: note = Description of Artificial Sequence: Synthetic coding sequence
  source 1..471: mol_type = other DNA
atggagcctgctgctggcagctccatggagcccagcgctgactggctggccacagctgctgcccggggccgggtggaggaggtgcgggccctgctggaggccggggccctgcccaatgcccccaacagctatggccggcggcccatccaggtgatgatgatgggcagcgcccgggtggccgagctgctgctgctgcacggggctgagcccaactgtgccgaccctgccaccctgaccaggcctgtgcatgatgctgcccgggagggcttcctggacaccctggtggtgctgcaccgggccggggcccggctggatgtgagagatgcctggggccgcctgcctgtggacctggccgaggagctgggccacagagatgtggcccgctacctgcgggctgctgctgggggcacccggggcagcaaccacgccagaattgatgctgctgagggccccagcgacatcccagactag

SEQ ID NO: 19285 - DNA, 522 bp, synthetic construct
  misc_feature 1..522: note = Description of Artificial Sequence: Synthetic coding sequence
  source 1..522: mol_type = other DNA
atgggccggggccgctgtgtgggccccagcctgcagctgcggggccaggagtggcgctgcagccccctggtgcccaagggcggcgctgctgctgctgagctgggccctgggggcggggagaacatggtgcggcgcttcctggtgaccctgcgcatcagaagagcctgtggccccccccgggtgcgggtgtttgtggtgcacatcccccggctgaccggggagtgggccgcccctggggccccagctgctgtggccctggtgctgatgctgctgcggagccagaggctgggccagcagcccctgcccaggaggcctggccatgatgatggccagaggcccagcggcggcgctgctgctgccccccggcggggggcccagctgcggcggcccaggcacagccaccccacccgggcccggcgctgccctgggggcctgcccggccatgctggaggagctgcccctggccgcggggctgctggccgggcccgctgcctgggccccagcgcccggggccctggatag

SEQ ID NO: 19286 - DNA, 504 bp, synthetic construct; identical to SEQ ID NO: 19283
  misc_feature 1..504: note = Description of Artificial Sequence: Synthetic coding sequence
  source 1..504: mol_type = other DNA

SEQ ID NO: 19287 - DNA, 399 bp, synthetic construct
  misc_feature 1..399: note = Description of Artificial Sequence: Synthetic coding sequence
  source 1..399: mol_type = other DNA
atggtgcggcgcttcctggtgaccctgcgcatccggcgggcctgtggccccccccgggtgcgggtgtttgtggtgcacatcccccggctgactggagagtgggccgcccctggggccccagctgctgtggccctggtgctgatgctgctgcggagccagaggctgggccagcagcccctgccccggcggcccggccatgatgatggccagaggccttctggaggagctgctgctgcccccaggagaggagcccagctgcggcggcccaggcacagccaccccacccgggcccggcgctgccctgggggcctgcccggccacgccggcggggccgcccctggaagaggagctgctggccgggcccgctgcctgggccccagcgcccggggccctggatag

SEQ ID NO: 19288 - DNA, 417 bp, synthetic construct
  misc_feature 1..417: note = Description of Artificial Sequence: Synthetic coding sequence
  source 1..417: mol_type = other DNA
atgagggaggagaacaagggcatgcccagcggcggcggcagtgatgagggcctggccagcgctgctgcccggggcctggtggagaaggtgcggcagctgctggaggccggggctgaccccaatggagtgaaccgcttcggccggcgggccatccaggtgatgatgatgggcagcgcccgggtggccgagctgctgctgctgcacggggctgagcccaactgtgccgaccctgccaccctgaccaggcctgtgcatgatgctgcccgggagggcttcctggacaccctggtggtgctgcaccgggccggggcccggctggatgtgagagatgcctggggccgcctgcctgtggacctggccgaggagcggggccacagagatgtggccggctacctgaggacagccaccggggactag

SEQ ID NO: 19289 - DNA, 237 bp, synthetic construct
  misc_feature 1..237: note = Description of Artificial Sequence: Synthetic coding sequence
  source 1..237: mol_type = other DNA
atgagggaggagaacaagggcatgcccagcggcggcggcagtgatgagggcctggccagcgctgctgcccggggcctggtggagaaggtgcggcagctgctggaggccggggctgaccccaatggagtgaaccgcttcggccggcgggccatccaggtggccggggcccctggcccccggcggcagggcgcccgggagcggggggcccggccccggcgcatcggggccggcacctag

SEQ ID NO: 19290 - DNA, 237 bp, synthetic construct; identical to SEQ ID NO: 19289
  misc_feature 1..237: note = Description of Artificial Sequence: Synthetic coding sequence
  source 1..237: mol_type = other DNA

SEQ ID NO: 19291 - DNA, 507 bp, synthetic construct
  misc_feature 1..507: note = Description of Artificial Sequence: Synthetic coding sequence
  source 1..507: mol_type = other DNA
atggccgagccctggggcaatgagctggccagcgctgctgcccggggggacctggagcagctgaccagcctgctgcagaacaacgtgaatgtgaatgcccagaatggatttggaagaacagccctgcaggtgatgaagctgggcaaccctgagatcgcccggcggctgctgctgcggggggccaacccagacctgaaggacagaactggatttgctgtgattcatgatgctgcccgggccggcttcctggacaccctgcagaccctgctggagttccaggctgatgtgaacattgaagataatgaaggcaacctgcccctgcacctggccgccaaggagggccacctgcgggtggtggagttcctggtgaagcacacagccagcaatgtgggccacaggaaccacaagggggacacagcctgtgacctggcccggctgtatggaagaaatgaggtggtgtccctgatgcaggccaatggagctggaggagccaccaacctgcagtag

SEQ ID NO: 19292 - DNA, 507 bp, synthetic construct; identical to SEQ ID NO: 19291
  misc_feature 1..507: note = Description of Artificial Sequence: Synthetic coding sequence
  source 1..507: mol_type = other DNA

SEQ ID NO: 19293 - DNA, 507 bp, synthetic construct; identical to SEQ ID NO: 19291
  misc_feature 1..507: note = Description of Artificial Sequence: Synthetic coding sequence
  source 1..507: mol_type = other DNA

SEQ ID NO: 19294 - DNA, 501 bp, synthetic construct
  misc_feature 1..501: note = Description of Artificial Sequence: Synthetic coding sequence
  source 1..501: mol_type = other DNA
atgctgctggaggaggtgcgggccggggaccggctgtctggagctgctgcccggggagatgtgcaggaggtgcggcggctgctgcaccgggagctggtgcacccagatgccctgaacagatttgggaagacagccctgcaggtgatgatgtttggcagcacagccatcgccctggagctgctgaagcagggcgccagccccaacgtgcaggacaccagcggcaccagccctgtgcatgatgctgccaggacaggcttcctggacaccctgaaggtgctggtggagcacggggctgatgtgaatgtgcctgatggcaccggggccctgcccatccacctggccgtgcaggagggccacacagctgtggtgtccttcctggccgctgagagtgacctgcacagaagagatgcccggggcctgacccccctggagctggccctgcagagaggagcccaggacctggtggacatcctgcagggccacatggtggcccccctgtag

SEQ ID NO: 19295 - DNA, 501 bp, synthetic construct; identical to SEQ ID NO: 19294
  misc_feature 1..501: note = Description of Artificial Sequence: Synthetic coding sequence
  source 1..501: mol_type = other DNA

SEQ ID NO: 19296 - DNA, 639 bp, synthetic construct
  misc_feature 1..639: note = Description of Artificial Sequence: Synthetic coding sequence
  source 1..639: mol_type = other DNA
atgaagccacccagcagcatccagaccagcgagtttgacagcagtgatgaggagcccattgaagatgagcagacccccatccacatctcctggctgagcctgagccgggtgaactgcagccagttcctgggcctgtgtgccctgcccggctgcaagttcaaggatgtgagaagaaatgtgcagaaggacacagaggagctgaagagctgtggcatccaggacatctttgtgttctgcaccagaggagagctgagcaagtacagagtgcccaacctgctggacctgtaccagcagtgtggcatcatcacccaccaccaccccatcgcagatggcggcaccccagacatcgccagctgctgtgagatcatggaggagctgaccacctgcctgaagaactacaggaagaccctcatccactgctatggaggcctgggccgcagctgcctggtggccgcctgcctgctgctgtacctgagtgacaccatcagccctgagcaggccatcgacagcctgcgggacctgcggggcagcggggccatccagaccatcaagcagtacaactacctgcacgagttccgggacaagctggccgcccacctgagcagccgggacagccagagccgctctgtgtccaggtag

SEQ ID NO: 19297 - DNA, 501 bp, synthetic construct
  misc_feature 1..501: note = Description of Artificial Sequence: Synthetic coding sequence
  source 1..501: mol_type = other DNA
atgaacccctgctgcaagttcaaggatgtgagaagaaatgtgcagaaggacacagaggagctgaagagctgtggcatccaggacatctttgtgttctgcaccagaggagagctgagcaagtacagagtgcccaacctgctggacctgtaccagcagtgtggcatcatcacccaccaccaccccatcgcagatggcggcaccccagacatcgccagctgctgtgagatcatggaggagctgaccacctgcctgaagaactacaggaagaccctcatccactgctatggaggcctgggccgcagctgcctggtggccgcctgcctgctgctgtacctgagtgacaccatcagccctgagcaggccatcgacagcctgcgggacctgcggggcagcggggccatccagaccatcaagcagtacaactacctgcacgagttccgggacaagctggccgcccacctgagcagccgggacagccagagccgctctgtgtccaggtag

SEQ ID NO: 19298 - DNA, 210 bp, synthetic construct
  misc_feature 1..210: note = Description of Artificial Sequence: Synthetic coding sequence
  source 1..210: mol_type = other DNA
atgaagccacccagcagcatccagaccagcgagtttgacagcagtgatgaggagcccattgaagatgagcagacccccatccacatctcctggctgagcctgagccgggtgaactgcagccagttcctgggcctgtgtgccctgcccggctgcaagttcaaggatgtgagaagaaatgtgcagaaggagaagaagaagaagaagaagtag

SEQ ID NO: 19299 - DNA, 624 bp, synthetic construct
  misc_feature 1..624: note = Description of Artificial Sequence: Synthetic coding sequence
  source 1..624: mol_type = other DNA
atgaagccacccagcagcatccagaccagcgagtttgacagcagtgatgaggagcccattgaagatgagcagacccccatccacatctcctggctgagcctgagccgggtgaactgcagccagttcctgggcctgtgtgccctgcccggctgcaagttcaaggatgtgagaagaaatgtgcagaaggacacagaggagctgaagagctgtggcatccaggacatctttgtgttctgcaccagaggagagctgagcaagtacagagtgcccaacctgctggacctgtaccagcagtgtggcatcatcacccaccaccaccccatcgcagatggcggcaccccagacatcgccagctgctgtgagatcatggaggagctgaccacctgcctgaagaacctcttctgctacggcggcctgggccgcagctgcctggtggccgcctgcctgctgctgtacctgagtgacaccatcagccctgagcaggccatcgacagcctgcgggacctgcggggcagcggggccatccagaccatcaagcagtacaactacctgcacgagttccgggacaagctggccgcccacctgagcagccgggacagccagagccgctctgtgtccaggtag

SEQ ID NO: 19300 - DNA, 519 bp, synthetic construct
  misc_feature 1..519: note = Description of Artificial Sequence: Synthetic coding sequence
  source 1..519: mol_type = other DNA
atgaagccacccagcagcatccagaccagctgcaagttcaaggatgtgagaagaaatgtgcagaaggacacagaggagctgaagagctgtggcatccaggacatctttgtgttctgcaccagaggagagctgagcaagtacagagtgcccaacctgctggacctgtaccagcagtgtggcatcatcacccaccaccaccccatcgcagatggcggcaccccagacatcgccagctgctgtgagatcatggaggagctgaccacctgcctgaagaactacaggaagaccctcatccactgctatggaggcctgggccgcagctgcctggtggccgcctgcctgctgctgtacctgagtgacaccatcagccctgagcaggccatcgacagcctgcgggacctgcggggcagcggggccatccagaccatcaagcagtacaactacctgcacgagttccgggacaagctggccgcccacctgagcagccgggacagccagagccgctctgtgtccaggtag

SEQ ID NO: 19301 - DNA, 2871 bp, synthetic construct
  misc_feature 1..2871: note = Description of Artificial Sequence: Synthetic coding sequence
  source 1..2871: mol_type = other DNA
atgagcagcggcctgtggagccaggagaaggtgaccagcccctactgggaggagcgcatcttctacctgctgctgcaggagtgcagcgtgacagacaagcagacccagaagctgctgaaggtgcccaagggcagcatcggccagtacatccaggacagatctgtgggccacagccgcatccccagcgccaagggcaagaagaaccagatcggcctgaagatcctggagcagccccatgctgtgctgtttgtggatgagaaggatgtggtggagatcaatgagaagttcacagagctgctgctggccatcaccaactgtgaggagcgcttcagcctcttcaagaacagaaaccggctgagcaagggcctgcagattgatgtgggctgccctgtgaaggtgcagctgcggtctggagaggagaagtttcctggggtggtgcgcttccggggccccctgctggccgagaggacagtgtctggcatcttctttggagtggagctgctggaggagggccggggccagggcttcacagatggagtgtaccagggcaagcagctgttccagtgtgatgaggactgtggggtgtttgtggccctggacaagctggagctgattgaagatgatgacacagccctggagagtgactatgccggccctggggacaccatgcaggtggagctgccccccctggagatcaacagccgggtgtccctgaaggtgggggagaccatcgagagcggcaccgtcatcttctgtgatgtgctgcccgggaaggagagcctgggctactttgtgggcgtggacatggacaaccccatcggcaactgggatggccgctttgatggagtgcagctgtgcagctttgcctgtgtggagagcaccatcctgctgcacatcaatgacatcatcccagccctgtctgagagcgtgacccaggagcggcggccccccaagctggccttcatgagcagaggagtgggggacaagggcagcagcagccacaacaagcccaaggccaccggcagcaccagtgaccccggcaacagaaacagaagtgagctgttctacaccctgaatggcagctctgtggacagccagccccagagcaagagcaagaacacctggtacattgatgaggtggccgaggaccctgccaagagcctgacagagatcagcacagactttgacaggagcagcccccccctgcagcccccacctgtgaacagcctgaccacagaaaatcgcttccacagcctgcccttcagcctgaccaagatgcccaacaccaacggcagcatcggccacagccccctgagcctgagcgcccagagcgtgatggaggagctgaacacagcccctgtgcaggagagcccccccctggccatgcctcctggcaacagccacggcctggaggtgggcagcctggccgaggtgaaggagaacccccccttctatggagtcatccgctggattggccagcccccaggcctgaatgaggtgctggccggcctggagctggaggatgaatgtgccggctgcacagatggcaccttccggggcacccgctacttcacctgtgccctgaagaaggccctgtttgtgaagctgaagagctgcaggccagacagcagatttgccagcctgcagcctgtgagcaaccagatcgagcgctgcaacagcctggcctttggaggctacctgtctgaggtggtggaggagaacaccccacccaagatggagaaggagggcctggagatcatgattggcaagaagaagggcatccagggccactacaacagctgctacctggacagcaccctcttctgcctgtttgccttcagctctgtgctggacacagtgctgctgcggcccaaggagaagaatgatgtggagtactacagcgagacccaggagctgctgaggacagagatcgtgaaccccctgcgcatctacggctacgtgtgtgccaccaagatcatgaagctgaggaagatcctggagaaggtggaggccgccagcggcttcaccagcgaggagaaggaccctgaggagttcctgaacatcctcttccaccacatcctgcgggtggagcccctgctgaagatccgctctgctggccagaaggtgcaggactgctacttctaccagatcttcatggagaagaatgagaaggtgggcgtgcccaccatccagcagctgctggagtggagcttcatcaacagcaacctgaagtttgctgaggcccccagctgcctgatcatccagatgcccaggtttgggaaggacttcaagctgttcaagaagatcttccccagcctggagctgaacatcacagacctgctggaggacaccccccggcagtgccgcatctgtggcggcctggccatgtatgagtgcagagaatgttatgatgatcctgacatctctgctgggaagatcaagcagttctgcaagacctgcaacacccaggtgcacctgcaccccaagaggctgaaccacaagtacaaccctgtgtccctgcccaaggacctgcctgactgggactggaggcatggctgcatcccctgccagaacatggagctgtttgctgtgctgtgcatcgagaccagccactacgtggcctttgtgaagtatggcaaggatgattctgcctggctgttctttgacagcatggctgacagagatggcggccagaatggcttcaacatcccccaggtgaccccctgcccagaggtgggggagtacctgaagatgagcctggaggacctgcacagcctggacagccgccgcatccagggctgtgcccggcggctgctgtgtgatgcctacatgtgcatgtaccagagccccaccatgagcctgtacaagtag

SEQ ID NO: 19302 - DNA, 2862 bp, synthetic construct
  misc_feature 1..2862: note = Description of Artificial Sequence: Synthetic coding sequence
  source 1..2862: mol_type = other DNA
atgagcagcggcctgtggagccaggagaaggtgaccagcccctactgggaggagcgcatcttctacctgctgctgcaggagtgcagcgtgacagacaagcagacccagaagctgctgaaggtgcccaagggcagcatcggccagtacatccaggacagatctgtgggccacagccgcatccccagcgccaagggcaagaagaaccagatcggcctgaagatcctggagcagccccatgctgtgctgtttgtggatgagaaggatgtggtggagatcaatgagaagttcacagagctgctgctggccatcaccaactgtgaggagcgcttcagcctcttcaagaacagaaaccggctgagcaagggcctgcagattgatgtgggctgccctgtgaaggtgcagctgcggtctggagaggagaagtttcctggggtggtgcgcttccggggccccctgctggccgagaggacagtgtctggcatcttctttggagtggagctgctggaggagggccggggccagggcttcacagatggagtgtaccagggcaagcagctgttccagtgtgatgaggactgtggggtgtttgtggccctggacaagctggagctgattgaagatgatgacacagccctggagagtgactatgccggccctggggacaccatgcaggtggagctgccccccctggagatcaacagccgggtgtccctgaaggtgggggagaccatcgagagcggcaccgtcatcttctgtgatgtgctgcccgggaaggagagcctgggctactttgtgggcgtggacatggacaaccccatcggcaactgggatggccgctttgatggagtgcagctgtgcagctttgcctgtgtggagagcaccatcctgctgcacatcaatgacatcatccctgagagcgtgacccaggagaggaggcctcccaagctggccttcatgagccggggcgtgggggacaagggcagcagcagccacaacaagcccaaggccaccggcagcaccagtgaccccggcaacagaaacagaagtgagctgttctacaccctgaatggcagctctgtggacagccagccccagagcaagagcaagaacacctggtacattgatgaggtggctgaagatcctgccaagagcctgacagagatcagcacagactttgacaggagcagcccccccctgcagcccccacctgtgaacagcctgaccacagagaaccgcttccacagcctgcccttcagcctgaccaagatgcccaacaccaacggcagcatcggccacagccccctgagcctgagcgcccagagcgtgatggaggagctgaacacagcccctgtgcaggagagcccccccctggccatgcctcctggcaacagccacggcctggaggtgggcagcctggccgaggtgaaggaaaatccacccttctacggcgtcatccgctggattggccagcccccaggcctgaatgaggtgctggccggcctggagctggaggatgaatgtgccggctgcacagatggcaccttccggggcacccgctacttcacctgtgccctgaagaaggccctgtttgtgaagctgaagagctgcaggccagacagcagatttgccagcctgcagcctgtgagcaaccagatcgagcgctgcaacagcctggccttcggcggctacctgtctgaggtggtggaggagaacaccccacccaagatggagaaggagggcctggagatcatgattggcaagaagaagggcatccagggccactacaacagctgctacctggacagcaccctcttctgcctgtttgccttcagctctgtgctggacacagtgctgctgcggcccaaggagaagaatgatgtggagtactacagcgagacccaggagctgctgaggacagaaattgtgaaccccctgcgcatctacggctacgtgtgtgccaccaagatcatgaagctgaggaagatcctggagaaggtggaggccgccagcggcttcaccagcgaggagaaggaccctgaggagttcctgaacatcctcttccaccacatcctgcgggtggagcccctgctgaagatccgctctgctggccagaaggtgcaggactgctacttctaccagatcttcatggagaagaatgagaaggtgggcgtgcccaccatccagcagctgctggagtggagcttcatcaacagcaacctgaagtttgctgaggcccccagctgcctgatcatccagatgcccaggtttgggaaggacttcaagctgttcaagaagatcttccccagcctggagctgaacatcacagacctgctggaggacaccccccggcagtgccgcatctgtggcggcctggccatgtatgaatgtcgggagtgctatgatgatcctgacatctctgctgggaagatcaagcagttctgcaagacctgcaacacccaggtgcacctgcaccccaagaggctgaaccacaagtacaaccctgtgtccctgcccaaggacctgcctgactgggactggaggcatggctgcatcccctgccagaacatggagctgtttgctgtgctgtgcatcgagaccagccactacgtggcctttgtgaagtatggcaaggatgacagcgcctggctgttctttgacagcatggctgacagagatggcggccagaatggcttcaacatcccccaggtgaccccctgcccagaggtgggggagtacctgaagatgagcctggaggacctgcacagcctggacagccgccgcatccagggctgtgcccggcggctgctgtgtgatgcctacatgtgcatgtaccagagccccaccatgagcctgtacaagtag

SEQ ID NO: 19303 - DNA, 2862 bp, synthetic construct; identical to SEQ ID NO: 19302
  misc_feature 1..2862: note = Description of Artificial Sequence: Synthetic coding sequence
  source 1..2862: mol_type = other DNA

SEQ ID NO: 19304 - DNA, 2871 bp, synthetic construct
  misc_feature 1..2871: note = Description of Artificial Sequence: Synthetic coding sequence
  source 1..2871: mol_type = other DNA
atgagcagcggcctgtggagccaggagaaggtgaccagcccctactgggaggagcgcatcttctacctgctgctgcaggagtgcagcgtgacagacaagcagacccagaagctgctgaaggtgcccaagggcagcatcggccagtacatccaggacagatctgtgggccacagccgcatccccagcgccaagggcaagaagaaccagatcggcctgaagatcctggagcagccccatgctgtgctgtttgtggatgagaaggatgtggtggagatcaatgagaagttcacagagctgctgctggccatcaccaactgtgaggagcgcttcagcctcttcaagaacagaaaccggctgagcaagggcctgcagattgatgtgggctgccctgtgaaggtgcagctgcggtctggagaggagaagtttcctggggtggtgcgcttccggggccccctgctggccgagaggacagtgtctggcatcttctttggagtggagctgctggaggagggccggggccagggcttcacagatggagtgtaccagggcaagcagctgttccagtgtgatgaggactgtggggtgtttgtggccctggacaagctggagctgattgaagatgatgacacagccctggagagtgactatgccggccctggggacaccatgcaggtggagctgccccccctggagatcaacagccgggtgtccctgaaggtgggggagaccatcgagagcggcaccgtcatcttctgtgatgtgctgcccgggaaggagagcctgggctactttgtgggcgtggacatggacaaccccatcggcaactgggatggccgctttgatggagtgcagctgtgcagctttgcctgtgtggagagcaccatcctgctgcacatcaatgacatcatcccagctgtgtctgagagcgtgacccaggagcggcggccccccaagctggccttcatgagcagaggagtgggggacaagggcagcagcagccacaacaagcccaaggccaccggcagcaccagtgaccccggcaacagaaacagaagtgagctgttctacaccctgaatggcagctctgtggacagccagccccagagcaagagcaagaacacctggtacattgatgaggtggccgaggaccctgccaagagcctgacagagatcagcacagactttgacaggagcagcccccccctgcagcccccacctgtgaacagcctgaccacagaaaatcgcttccacagcctgcccttcagcctgaccaagatgcccaacaccaacggcagcatcggccacagccccctgagcctgagcgcccagagcgtgatggaggagctgaacacagcccctgtgcaggagagcccccccctggccatgcctcctggcaacagccacggcctggaggtgggcagcctggccgaggtgaaggagaacccccccttctatggagtcatccgctggattggccagcccccaggcctgaatgaggtgctggccggcctggagctggaggatgaatgtgccggctgcacagatggcaccttccggggcacccgctacttcacctgtgccctgaagaaggccctgtttgtgaagctgaagagctgcaggccagacagcagatttgccagcctgcagcctgtgagcaaccagatcgagcgctgcaacagcctggcctttggaggctacctgtctgaggtggtggaggagaacaccccacccaagatggagaaggagggcctggagatcatgattggcaagaagaagggcatccagggccactacaacagctgctacctggacagcaccctcttctgcctgtttgccttcagctctgtgctggacacagtgctgctgcggcccaaggagaagaatgatgtggagtactacagcgagacccaggagctgctgaggacagagatcgtgaaccccctgcgcatctacggctacgtgtgtgccaccaagatcatgaagctgaggaagatcctggagaaggtggaggccgccagcggcttcaccagcgaggagaaggaccctgaggagttcctgaacatcctcttccaccacatcctgcgggtggagcccctgctgaagatccgctctgctggccagaaggtgcaggactgctacttctaccagatcttcatggagaagaatgagaaggtgggcgtgcccaccatccagcagctgctggagtggagcttcatcaacagcaacctgaagtttgctgaggcccccagctgcctgatcatccagatgcccaggtttgggaaggacttcaagctgttcaagaagatcttccccagcctggagctgaacatcacagacctgctggaggacaccccccggcagtgccgcatctgtggcggcctggccatgtatgagtgcagagaatgttatgatgatcctgacatctctgctgggaagatcaagcagttctgcaagacctgcaacacccaggtgcacctgcaccccaagaggctgaaccacaagtacaaccctgtgtccctgcccaaggacctgcctgactgggactggaggcatggctgcatcccctgccagaacatggagctgtttgctgtgctgtgcatcgagaccagccactacgtggcctttgtgaagtatggcaaggatgattctgcctggctgttctttgacagcatggctgacagagatggcggccagaatggcttcaacatcccccaggtgaccccctgcccagaggtgggggagtacctgaagatgagcctggaggacctgcacagcctggacagccgccgcatccagggctgtgcccggcggctgctgtgtgatgcctacatgtgcatgtaccagagccccaccatgagcctgtacaagtag

SEQ ID NO: 19305 - DNA, 450 bp, synthetic construct
  misc_feature 1..450: note = Description of Artificial Sequence: Synthetic coding sequence
  source 1..450: mol_type = other DNA
atggcccggagcaacctgcccctggccctgggcctggccctggtggccttctgcctgctggccctgcccagagatgcccgggcccggccccaggagaggatggtgggggagctgcgggacctgagcccagatgacccccaggtgcagaaggccgcccaggccgctgtggccagctacaacatgggcagcaacagcatctactacttccgggacacccacatcatcaaggcccagagccagctggtggccggcatcaagtacttcctgaccatggagatgggcagcacagactgcaggaagaccagggtgactggagaccacgtggacctgaccacctgccccctggccgccggggcccagcaggagaagctgcgctgtgactttgaggtgctggtggtgccctggcagaacagcagccagctgctgaagcacaactgtgtgcagatgtag

SEQ ID NO: 19306 - DNA, 504 bp, synthetic construct
  misc_feature 1..504: note = Description of Artificial Sequence: Synthetic coding sequence
  source 1..504: mol_type = other DNA
atgctgcctgagaaggccctgcacggccacccccagctgcccaggacagtgcccaccagggctgccatgagagctgctggcaccctgctggccttctgctgcctggtgctgagcaccaccggcggccccagcccagacacctgcagccaggacctgaacagccgggtgaagccaggcttccccaagaccatcaagaccaatgaccccggggtgctgcaggccgcccgctacagcgtggagaagttcaacaactgcaccaatgacatgttcctgttcaaggagagccgcatcacccgggccctggtgcagatcgtgaagggcctgaagtacatgctggaggtggagatcggccgcaccacctgcaagaagaaccagcacctgcggctggatgactgtgacttccagaccaaccacaccctgaagcagaccctgagctgctacagcgaggtgtgggtggtgccctggctgcagcactttgaggtgcctgtgctgcgctgccactag

SEQ ID NO: 19307 - DNA, 438 bp, synthetic construct
  misc_feature 1..438: note = Description of Artificial Sequence: Synthetic coding sequence
  source 1..438: mol_type = other DNA
atgagagctgctggcaccctgctggccttctgctgcctggtgctgagcaccaccggcggccccagcccagacacctgcagccaggacctgaacagccgggtgaagccaggcttccccaagaccatcaagaccaatgaccccggggtgctgcaggccgcccgctacagcgtggagaagttcaacaactgcaccaatgacatgttcctgttcaaggagagccgcatcacccgggccctggtgcagatcgtgaagggcctgaagtacatgctggaggtggagatcggccgcaccacctgcaagaagaaccagcacctgcggctggatgactgtgacttccagaccaaccacaccctgaagcagaccctgagctgctacagcgaggtgtgggtggtgccctggctgcagcactttgaggtgcctgtgctgcgctgccactag

SEQ ID NO: 19308 - DNA, 453 bp, synthetic construct
  misc_feature 1..453: note = Description of Artificial Sequence: Synthetic coding sequence
  source 1..453: mol_type = other DNA
atgctgggcgccgccctgcggcgctgtgctgtggccgccaccaccagggctgacccccggggcctgctgcacagcgcccggaccccaggccctgctgtggccatccagagcgtgcgctgctacagccacggcagccaggagacagatgaggagtttgatgcccgctgggtgacctacttcaacaagccagacattgatgcctgggagctgaggaagggcatcaacaccctggtgacctatgacatggtgcctgagcccaagatcattgatgctgccctgcgggcctgccggcggctgaatgactttgccagcacagtgcgcatcctggaggtggtgaaggacaaggccggcccccacaaggagatctacccctacgtgatccaggagctgcggcccaccctgaatgagctgggcatcagcaccccagaggagctgggcctggacaaggtgtag

SEQ ID NO: 19309 - DNA, 318 bp, synthetic construct
  misc_feature 1..318: note = Description of Artificial Sequence: Synthetic coding sequence
  source 1..318: mol_type = other DNA
atgggagatgtggagaagggcaagaagatcttcatcatgaagtgcagccagtgccacacagtggagaagggcggcaagcacaagacaggccccaacctgcacggcctgtttggaaggaagacaggccaggcccctggctacagctacacagctgccaacaagaacaagggcatcatctggggcgaggacaccctgatggagtacctggagaaccccaagaagtacatccctggcaccaagatgatctttgtgggcatcaagaagaaggaggagagagctgacctgattgcctacctgaagaaggccaccaatgaatag

SEQ ID NO: 19310 - DNA, 318 bp, synthetic construct; identical to SEQ ID NO: 19309
  misc_feature 1..318: note = Description of Artificial Sequence: Synthetic coding sequence
  source 1..318: mol_type = other DNA

SEQ ID NO: 19311 - DNA, 318 bp, synthetic construct; identical to SEQ ID NO: 19309
  misc_feature 1..318: note = Description of Artificial Sequence: Synthetic coding sequence
  source 1..318: mol_type = other DNA

SEQ ID NO: 19312 - DNA, 306 bp, synthetic construct
  misc_feature 1..306: note = Description of Artificial Sequence: Synthetic coding sequence
  source 1..306: mol_type = other DNA
atgggagatgtggagaagggcaagaagatcttcatcatgaagtgcagccagtgccacacagtggagaagggcggcaagcacaagacaggccccaacctgcacggcctgtttggaaggaagacaggccaggcccctggctacagctacacagctgccaacaagaacaagggcatcatctggggcgaggacaccctgatggagtacctggagaaccccaagaagtacatccctggcaccaagatgatctttgtgggcatcaagaagaaggaggagagagctgacctgattgcctacctgaagaagtag

SEQ ID NO: 19313 - DNA, 1632 bp, synthetic construct
  misc_feature 1..1632: note = Description of Artificial Sequence: Synthetic coding sequence
  source 1..1632: mol_type = other DNA
atgggcaccagcctgagccccaatgacccctggcccctgaaccccctgagcatccagcagaccaccctgctgctgctgctgtctgtgctggccaccgtgcacgtgggccagaggctgctgcggcagaggcggcggcagctgcggagcgcccctcctggcccctttgcctggcccctgattggaaatgctgctgctgtgggccaggccgcccacctgagctttgcccggctggccaggagatatggagatgtgttccagatccggctgggcagctgccccatcgtggtgctgaatggagagcgggccatccaccaggccctggtgcagcagggcagcgcctttgctgacaggcctgcctttgccagcttccgggtggtgtctgggggccgctccatggccttcggccactacagcgagcactggaaggtgcagaggagagctgcccacagcatgatgaggaacttcttcacccggcagcccaggagccggcaggtgctggagggccacgtgctgtctgaggcccgggagctggtggccctgctggtgcggggcagcgcagatggagccttcctggacccccggcccctgactgtggtggccgtggccaacgtgatgtctgctgtgtgcttcggctgccgctacagccatgatgatcctgagttccgggagctgctgagccacaatgaggagtttggaagaacagtgggcgccggcagcctggtggatgtgatgccctggctgcagtacttccccaaccctgtgaggacagtgttccgggagtttgagcagctgaacagaaacttcagcaacttcatcctggacaagttcctgcggcactgtgagagcctgcggcctggagctgccccccgggacatgatggatgccttcatcctgtctgctgagaagaaggctgctggggacagccatggaggaggagcccggctggacctggagaatgtgcctgccaccatcacagacatctttggagccagccaggacaccctgagcacagccctgcagtggctgctgctgctcttcacccgctacccagatgtgcagaccagggtgcaggccgagctggaccaggtggtgggccgggaccggctgccctgcatgggagaccagcccaacctgccctacgtgctggccttcctgtatgaggccatgaggttcagcagctttgtgcctgtgaccatcccccacgccaccacagccaacacctctgtgctgggctaccacatccccaaggacacagtggtgtttgtgaaccagtggagcgtgaaccacgaccctgtgaagtggcccaaccctgagaactttgatcctgcccgcttcctggacaaggatggcctcatcaacaaggacctgaccagccgggtgatgatcttctctgtgggcaagaggcgctgcattggagaggagctgagcaagatgcagctgttcctgttcatcagcatcctggcccaccagtgtgacttccgggccaaccccaatgagcccgccaagatgaacttctcctatggcctgaccatcaagcccaagagcttcaaggtgaatgtgaccctgcgggagagcatggagctgctggacagcgctgtgcagaacctgcaggccaaggagacctgccagtag

SEQ ID NO: 19314 - DNA, 1632 bp, synthetic construct; identical to SEQ ID NO: 19313
  misc_feature 1..1632: note = Description of Artificial Sequence: Synthetic coding sequence
  source 1..1632: mol_type = other DNA

SEQ ID NO: 19315 - DNA, 3399 bp, synthetic construct
  misc_feature 1..3399: note = Description of Artificial Sequence: Synthetic coding sequence
  source 1..3399: mol_type = other DNA
atggagccagacagcctgctggaccaggatgacagctatgagagcccccaggagcggcccggcagcagaagaagcctgcccggcagcctgtctgagaagagccccagcatggagcccagcgctgccacccccttccgggtgacaggcttcctgagccggcggctgaagggcagcatcaagaggaccaagagccagcccaagctggacaggaaccacagcttccgccacatcctgcccggcttccgctctgctgctgctgctgctgctgacaatgaaagaagccacctgatgccccggctgaaggagagccgcagccatgagagcctgctgagccccagcagcgctgtggaggccctggacctgtccatggaggaggaggtggtgatcaagcctgtgcacagcagcatcctgggccaggactactgctttgaggtgaccaccagcagcggcagcaagtgcttcagctgccgctctgctgctgagcgggacaagtggatggagaacctgcggcgggctgtgcaccccaacaaggacaacagcagaagagtggagcacatcctgaagctgtgggtgattgaggccaaggacctgcctgccaagaagaagtacctgtgtgagctgtgcctggatgatgtgctgtatgcccggaccaccgggaagctgaagacagacaacgtgttctggggcgagcactttgagttccacaacctgccccccctgaggacagtgacagtgcacctgtaccgggagacagacaagaagaagaagaaggagagaaattcctacctgggcctggtgtccctgcctgctgcctctgtggccggccggcagtttgtggagaagtggtaccctgtggtgacccccaaccccaagggcggcaagggccctggccccatgatccgcatcaaggcccgctaccagaccatcaccatcctgcccatggagatgtacaaggagtttgctgagcacatcaccaaccactacctgggcctgtgtgccgccctggagcccatcctgagcgccaagaccaaggaggagatggccagcgccctggtgcacatcctgcagagcacaggcaaggtgaaggacttcctgacagacctgatgatgtctgaggtggacagatgtggggacaatgagcacctgatcttccgggagaacaccctggccaccaaggccatcgaggagtacctgaagctggtgggccagaagtacctgcaggatgccctgggggagttcatcaaggccctgtatgaaagtgatgagaactgtgaggtggaccccagcaagtgcagcgctgctgacctgcctgagcaccagggcaacctgaagatgtgctgtgagctggccttctgcaagatcatcaacagctactgtgtgttcccccgggagctgaaggaggtgtttgcctcctggaggcaggagtgcagcagccggggccgcccagacatcagcgagcggctcatcagcgccagcctcttcctgcgcttcctgtgcccagccatcatgagccccagcctcttcaacctgctgcaggagtacccagatgacagaacagcccggaccctgaccctcatcgccaaggtgacccagaacctggccaactttgccaagtttggcagcaaggaggagtacatgtccttcatgaaccagttcctggagcacgagtggaccaacatgcagcgcttcctgctggagatcagcaaccctgagaccctgagcaacacagctggctttgagggctacatcgacctgggccgggagctgagcagcctgcacagcctgctgtgggaggccgtgtcccagctggagcagagcatcgtgtccaagctgggccccctgccccgcatcctgagagatgtgcacacagccctgagcaccccaggcagcggccagctgcccggcaccaatgacctggccagcaccccaggcagcggcagcagcagcatctctgctggcctgcagaagatggtgattgaaaatgacctgagcggcctgattgacttcacccggctgcccagccccaccccagagaacaaggacctcttctttgtgaccaggagcagtggagtgcagcccagccctgcccggagcagcagctacagcgaggccaatgaaccagacctgcagatggccaatggaggcaagagcctgtccatggtggacctgcaggatgcccggaccctggatggagaggccggcagccctgctggcccagatgtgctgcccacagatggccaggccgccgccgcccagctggtggccggctggccagcccgggccacccctgtgaacctggccggcctggccaccgtgagaagagctggccagacccccaccaccccaggcaccagcgagggcgcccctggccggccccagctgctggcccccctgtccttccagaaccctgtgtaccagatggctgctggcctgcccctgagcccccggggcctgggggacagcggcagcgagggccacagcagcctgagcagccacagcaacagcgaggagctggccgctgctgccaagctgggcagcttcagcacagctgctgaggagctggcccggcggcctggagagctggcccggcggcagatgagcctgacagagaagggcggccagcccaccgtgccccggcagaacagcgctggcccccagaggagaattgaccagcccccacctcctcctcctcctcctcctccagccccccggggccgcaccccacccaacctgctgagcaccctgcagtacccccggcccagcagcggcaccctggccagcgccagcccagactgggtgggccccagcacccggctgcggcagcagagcagcagcagcaaaggagacagccctgagctgaagcccagggctgtgcacaagcagggccccagccctgtgagccccaatgccctggacagaacagctgcctggctgctgaccatgaatgcccagctgctggaggatgagggcctgggccctgaccccccccaccgggaccggctgcggagcaaggatgagctgagccaggccgagaaggacctggccgtgctgcaggacaagctgcgcatcagcaccaagaagctggaggagtatgagaccctcttcaagtgccaggaggagaccacccagaagctggtgctggagtaccaggcccggctggaggagggggaggagcggctgcggcggcagcaggaggacaaggacatccagatgaagggcatcatcagccggctgatgtctgtggaggaggagctgaagaaggaccacgccgagatgcaggccgctgtggacagcaagcagaagatcattgatgcccaggagaagagaattgccagcctggatgctgccaatgcccggctgatgtctgccctgacccagctgaaggagagcatgcactag

SEQ ID NO: 19316 - DNA, 3198 bp, synthetic construct
  misc_feature 1..3198: note = Description of Artificial Sequence: Synthetic coding sequence
  source 1..3198: mol_type = other DNA
atgccccggctgaaggagagccgcagccatgagagcctgctgagccccagcagcgctgtggaggccctggacctgtccatggaggaggaggtggtgatcaagcctgtgcacagcagcatcctgggccaggactactgctttgaggtgaccaccagcagcggcagcaagtgcttcagctgccgctctgctgctgagcgggacaagtggatggagaacctgcggcgggctgtgcaccccaacaaggacaacagcagaagagtggagcacatcctgaagctgtgggtgattgaggccaaggacctgcctgccaagaagaagtacctgtgtgagctgtgcctggatgatgtgctgtatgcccggaccaccgggaagctgaagacagacaacgtgttctggggcgagcactttgagttccacaacctgccccccctgaggacagtgacagtgcacctgtaccgggagacagacaagaagaagaagaaggagagaaattcctacctgggcctggtgtccctgcctgctgcctctgtggccggccggcagtttgtggagaagtggtaccctgtggtgacccccaaccccaagggcggcaagggccctggccccatgatccgcatcaaggcccgctaccagaccatcaccatcctgcccatggagatgtacaaggagtttgctgagcacatcaccaaccactacctgggcctgtgtgccgccctggagcccatcctgagcgccaagaccaaggaggagatggccagcgccctggtgcacatcctgcagagcacaggcaaggtgaaggacttcctgacagacctgatgatgtctgaggtggacagatgtggggacaatgagcacctgatcttccgggagaacaccctggccaccaaggccatcgaggagtacctgaagctggtgggccagaagtacctgcaggatgccctgggggagttcatcaaggccctgtatgaaagtgatgagaactgtgaggtggaccccagcaagtgcagcgctgctgacctgcctgagcaccagggcaacctgaagatgtgctgtgagctggccttctgcaagatcatcaacagctactgtgtgttcccccgggagctgaaggaggtgtttgcctcctggaggcaggagtgcagcagccggggccgcccagacatcagcgagcggctcatcagcgccagcctcttcctgcgcttcctgtgcccagccatcatgagccccagcctcttcaacctgctgcaggagtacccagatgacagaacagcccggaccctgaccctcatcgccaaggtgacccagaacctggccaactttgccaagtttggcagcaaggaggagtacatgtccttcatgaaccagttcctggagcacgagtggaccaacatgcagcgcttcctgctggagatcagcaaccctgagaccctgagcaacacagctggctttgagggctacatcgacctgggccgggagctgagcagcctgcacagcctgctgtgggaggccgtgtcccagctggagcagagcatcgtgtccaagctgggccccctgccccgcatcctgagagatgtgcacacagccctgagcaccccaggcagcggccagctgcccggcaccaatgacctggccagcaccccaggcagcggcagcagcagcatctctgctggcctgcagaagatggtgattgaaaatgacctgagcggcctgattgacttcacccggctgcccagccccaccccagagaacaaggacctcttctttgtgaccaggagcagtggagtgcagcccagccctgcccggagcagcagctacagcgaggccaatgaaccagacctgcagatggccaatggaggcaagagcctgtccatggtggacctgcaggatgcccggaccctggatggagaggccggcagccctgctggcccagatgtgctgcccacagatggccaggccgccgccgcccagctggtggccggctggccagcccgggccacccctgtgaacctggccggcctggccaccgtgagaagagctggccagacccccaccaccccaggcaccagcgagggcgcccctggccggccccagctgctggcccccctgtccttccagaaccctgtgtaccagatggctgctggcctgcccctgagcccccggggcctgggggacagcggcagcgagggccacagcagcctgagcagccacagcaacagcgaggagctggccgctgctgccaagctgggcagcttcagcacagctgctgaggagctggcccggcggcctggagagctggcccggcggcagatgagcctgacagagaagggcggccagcccaccgtgccccggcagaacagcgctggcccccagaggagaattgaccagcccccacctcctcctcctcctcctcctccagccccccggggccgcaccccacccaacctgctgagcaccctgcagtacccccggcccagcagcggcaccctggccagcgccagcccagactgggtgggccccagcacccggctgcggcagcagagcagcagcagcaaaggagacagccctgagctgaagcccagggctgtgcacaagcagggccccagccctgtgagccccaatgccctggacagaacagctgcctggctgctgaccatgaatgcccagctgctggaggatgagggcctgggccctgaccccccccaccgggaccggctgcggagcaaggatgagctgagccaggccgagaaggacctggccgtgctgcaggacaagctgcgcatcagcaccaagaagctggaggagtatgagaccctcttcaagtgccaggaggagaccacccagaagctggtgctggagtaccaggcccggctggaggagggggaggagcggctgcggcggcagcaggaggacaaggacatccagatgaagggcatcatcagccggctgatgtctgtggaggaggagctgaagaaggaccacgccgagatgcaggccgctgtggacagcaagcagaagatcattgatgcccaggagaagagaattgccagcctggatgctgccaatgcccggctgatgtctgccctgacccagctgaaggagcgctacagcatgcaggccagaaatggcatcagccccaccaaccccaccaagctgcagatcacagaaaatggagagttcaggaacagcagcaactgctag

SEQ ID NO: 19317 - DNA, 3210 bp, synthetic construct
  misc_feature 1..3210: note = Description of Artificial Sequence: Synthetic coding sequence
  source 1..3210: mol_type = other DNA
agccagcccaagctggacaggaaccacagcttccgccacatcctgcccggcttccgctctgctgctgctgctgctgctgacaatgaaagaagccacctgatgccccggctgaaggagagccgcagccatgagagcctgctgagccccagcagcgctgtggaggccctggacctgtccatggaggaggaggtggtgatcaagcctgtgcacagcagcatcctgggccaggactactgctttgaggtgaccaccagcagcggcagcaagtgcttcagctgccgctctgctgctgagcgggacaagtggatggagaacctgcggcgggctgtgcaccccaacaaggacaacagccggcgggtggagcacatcctgaagctgtgggtgattgaggccaaggacctgcctgccaagaagaagtacctgtgtgagctgtgcctggatgatgtgctgtatgcccggaccaccgggaagctgaagacagacaacgtgttctggggcgagcactttgagttccacaacctgccccccctgaggacagtgacagtgcacctgtaccgggagacagacaagaagaagaagaaggagaggaacagctacctgggcctggtgtccctgcctgctgcctctgtggccggccggcagtttgtggagaagtggtaccctgtggtgacccccaaccccaagggcggcaaaggacctggccccatgatccgcatcaaggcccgctaccagaccatcaccatcctgcccatggagatgtacaaggagtttgctgagcacatcaccaaccactacctgggcctgtgtgccgccctggagcccatcctgagcgccaagaccaaggaggagatggccagcgccctggtgcacatcctgcagagcacaggcaaggtgaaggacttcctgacagacctgatgatgtctgaggtggacagatgtggggacaatgagcacctgatcttccgggagaacaccctggccaccaaggccatcgaggagtacctgaagctggtgggccagaagtacctgcaggatgccctgggggagttcatcaaggccctgtatgaaagtgatgagaactgtgaggtggaccccagcaaatgttctgctgctgacctgcctgagcaccagggcaacctgaagatgtgctgtgagctggccttctgcaagatcatcaacagctactgtgtgttcccccgggagctgaaggaggtgtttgcctcctggaggcaggagtgcagcagccggggccgcccagacatcagcgagcggctcatcagcgccagcctcttcctgcgcttcctgtgcccagccatcatgagccccagcctcttcaacctgctgcaggagtacccagatgacagaacagcccggaccctgaccctgattgccaaggtgacccagaacctggccaactttgccaagtttggcagcaaggaggagtacatgtccttcatgaaccagttcctggagcacgagtggaccaacatgcagcgcttcctgctggagatcagcaaccctgagaccctgagcaacacagctggctttgagggctacatcgacctgggccgggagctgagcagcctgcacagcctgctgtgggaggccgtgtcccagctggagcagagcatcgtgtccaagctgggccccctgccccgcatcctgagagatgtgcacacagccctgagcaccccaggcagcggccagctgcccggcaccaatgacctggccagcaccccaggcagcggcagcagcagcatctctgctggcctgcagaagatggtgattgaaaatgacctgagcggcctgattgacttcacccggctgcccagccccaccccagagaacaaggacctcttctttgtgaccaggagcagcggcgtgcagcccagccctgcccggagcagcagctacagcgaggccaatgaaccagacctgcagatggccaacggcggcaagagcctgtccatggtggacctgcaggatgcccggaccctggatggagaggccggcagccctgctggcccagatgtgctgcccacagatggccaggccgctgctgcccagctggtggccggctggccagcccgggccacccctgtgaacctggccggcctggccaccgtgcggcgggccggccagacccccaccaccccaggcaccagcgagggcgcccctggccggccccagctgctggcccccctgtccttccagaaccctgtgtaccagatggccgccggcctgcccctgagcccccggggcctgggggacagcggcagcgagggccacagcagcctgagcagccacagcaacagcgaggagctggccgccgccgccaagctgggcagcttcagcacagctgctgaggagctggcccggcggcctggagagctggcccggcggcagatgagcctgacagagaagggcggccagcccaccgtgccccggcagaacagcgctggcccccagaggagaattgaccagcccccacctcctcctcctcctcctcctccagccccccggggccgcaccccacccaacctgctgagcaccctgcagtacccccggcccagcagcggcaccctggccagcgccagcccagactgggtgggccccagcacccggctgcggcagcagagcagcagcagcaagggggacagccctgagctgaagcccagggctgtgcacaagcagggccccagccctgtgagccccaatgccctggacagaacagctgcctggctgctgaccatgaatgcccagctgctggaggatgagggcctgggccctgaccccccccaccgggaccggctgcggagcaaggatgagctgagccaggccgagaaggacctggccgtgctgcaggacaagctgcgcatcagcaccaagaagctggaggagtatgagaccctcttcaagtgccaggaggagaccacccagaagctggtgctggagtaccaggcccggctggaggagggggaggagcggctgcggcggcagcaggaggacaaggacatccagatgaagggcatcatcagccggctgatgtctgtggaggaggagctgaagaaggaccatgctgagatgcaggccgctgtggacagcaagcagaagatcattgatgcccaggagaagagaattgccagcctggatgctgccaatgcccggctgatgtctgccctgacccagctgaaggagagcatgcactag

SEQ ID NO: 19318 - DNA, 876 bp, synthetic construct
  misc_feature 1..876: note = Description of Artificial Sequence: Synthetic coding sequence
  source 1..876: mol_type = other DNA
atggagccagacagcctgctggaccaggatgacagctatgagagcccccaggagcggcccggcagcagaagaagcctgcccggcagcctgtctgagaagagccccagcatggagcccagcgctgccacccccttccgggtgacaggcttcctgagccggcggctgaagggcagcatcaagaggaccaagagccagcccaagctggacaggaaccacagcttccgccacatcctgcccggcttccgctctgctgctgctgctgctgctgacaatgaaagaagccacctgatgccccggctgaaggagagccgcagccatgagagcctgctgagccccagcagcgctgtggaggccctggacctgtccatggaggaggaggtggtgatcaagcctgtgcacagcagcatcctgggccaggactactgctttgaggtgaccaccagcagcggcagcaagtgcttcagctgccgctctgctgctgagcgggacaagtggatggagaacctgcggcgggctgtgcaccccaacaaggacaacagcagaagagtggagcacatcctgaagctgtgggtgattgaggccaaggacctgcctgccaagaagaagtacctgtgtgagctgtgcctggatgatgtgctgtatgcccggaccaccgggaagctgaagacagacaacgtgttctggggcgagcactttgagttccacaacctgccccccctgaggacagtgacagtgcacctgtaccgggagacagacaagaagaagaagaaggagagaaattcctacctgggcctggtgtccctgcctgctgcctctgtggccggccggcagtttgtggagaagtggtaccctgtggtgacccccaaccccaagtag

SEQ ID NO: 19319 - DNA, 3570 bp, synthetic construct
  misc_feature 1..3570: note = Description of Artificial Sequence: Synthetic coding sequence
  source 1..3570: mol_type = other DNA
atgtctgctgggggcagcgccaggaagagcacaggccgcagcagctactactaccgcctgctgcggcggccccggctgcagaggcagaggagccgcagccgcagcaggaccaggcctgcccgggagagcccccaggagcggcccggcagcagaagaagcctgcccggcagcctgtctgagaagagccccagcatggagcccagcgctgccacccccttccgggtgacaggcttcctgagccggcggctgaagggcagcatcaagaggaccaagagccagcccaagctggacaggaaccacagcttccgccacatcctgcccggcttccgctctgctgctgctgctgctgctgacaatgaaagaagccacctgatgccccggctgaaggagagccgcagccatgagagcctgctgagccccagcagcgctgtggaggccctggacctgtccatggaggaggaggtggtgatcaagcctgtgcacagcagcatcctgggccaggactactgctttgaggtgaccaccagcagcggcagcaagtgcttcagctgccgctctgctgctgagcgggacaagtggatggagaacctgcggcgggctgtgcaccccaacaaggacaacagcagaagagtggagcacatcctgaagctgtgggtgattgaggccaaggacctgcctgccaagaagaagtacctgtgtgagctgtgcctggatgatgtgctgtatgcccggaccaccgggaagctgaagacagacaacgtgttctggggcgagcactttgagttccacaacctgccccccctgaggacagtgacagtgcacctgtaccgggagacagacaagaagaagaagaaggagagaaattcctacctgggcctggtgtccctgcctgctgcctctgtggccggccggcagtttgtggagaagtggtaccctgtggtgacccccaaccccaagggcggcaagggccctggccccatgatccgcatcaaggcccgctaccagaccatcaccatcctgcccatggagatgtacaaggagtttgctgagcacatcaccaaccactacctgggcctgtgtgccgccctggagcccatcctgagcgccaagaccaaggaggagatggccagcgccctggtgcacatcctgcagagcacaggcaaggtgaaggacttcctgacagacctgatgatgtctgaggtggacagatgtggggacaatgagcacctgatcttccgggagaacaccctggccaccaaggccatcgaggagtacctgaagctggtgggccagaagtacctgcaggatgccctgggggagttcatcaaggccctgtatgaaagtgatgagaactgtgaggtggaccccagcaagtgcagcgctgctgacctgcctgagcaccagggcaacctgaagatgtgctgtgagctggccttctgcaagatcatcaacagctactgtgtgttcccccgggagctgaaggaggtgtttgcctcctggaggcaggagtgcagcagccggggccgcccagacatcagcgagcggctcatcagcgccagcctcttcctgcgcttcctgtgcccagccatcatgagccccagcctcttcaacctgctgcaggagtacccagatgacagaacagcccggaccctgaccctcatcgccaaggtgacccagaacctggccaactttgccaagtttggcagcaaggaggagtacatgtccttcatgaaccagttcctggagcacgagtggaccaacatgcagcgcttcctgctggagatcagcaaccctgagaccctgagcaacacagctggctttgagggctacatcgacctgggccgggagctgagcagcctgcacagcctgctgtgggaggccgtgtcccagctggagcagagcatcgtgtccaagctgggccccctgccccgcatcctgagagatgtgcacacagccctgagcaccccaggcagcggccagctgcccggcaccaatgacctggccagcaccccaggcagcggcagcagcagcatctctgctggcctgcagaagatggtgattgaaaatgacctgagcggcctgattgacttcacccggctgcccagccccaccccagagaacaaggacctcttctttgtgaccaggagcagtggagtgcagcccagccctgcccggagcagcagctacagcgaggccaatgaaccagacctgcagatggccaatggaggcaagagcctgtccatggtggacctgcaggatgcccggaccctggatggagaggccggcagccctgctggcccagatgtgctgcccacagatggccaggccgccgccgcccagctggtggccggctggccagcccgggccacccctgtgaacctggccggcctggccaccgtgagaagagctggccagacccccaccaccccaggcaccagcgagggcgcccctggccggccccagctgctggcccccctgtccttccagaaccctgtgtaccagatggctgctggcctgcccctgagcccccggggcctgggggacagcggcagcgagggccacagcagcctgagcagccacagcaacagcgaggagctggccgctgctgccaagctgggcagcttcagcacagctgctgaggagctggcccggcggcctggagagctggcccggcggcagatgagcctgacagagaagggcggccagcccaccgtgccccggcagaacagcgctggcccccagaggagaattgaccagcccccacctcctcctcctcctcctcctccagccccccggggccgcaccccacccaacctgctgagcaccctgcagtacccccggcccagcagcggcaccctggccagcgccagcccagactgggtgggccccagcacccggctgcggcagcagagcagcagcagcaaaggagacagccctgagctgaagcccagggctgtgcacaagcagggccccagccctgtgagccccaatgccctggacagaacagctgcctggctgctgaccatgaatgcccagctgctggaggatgagggcctgggccctgaccccccccaccgggaccggctgcggagcaaggatgagctgagccaggccgagaaggacctggccgtgctgcaggacaagctgcgcatcagcaccaagaagctggaggagtatgagaccctcttcaagtgccaggaggagaccacccagaagctggtgctggagtaccaggcccggctggaggagggggaggagcggctgcggcggcagcaggaggacaaggacatccagatgaagggcatcatcagccggctgatgtctgtggaggaggagctgaagaaggaccacgccgagatgcaggccgctgtggacagcaagcagaagatcattgatgcccaggagaagagaattgccagcctggatgctgccaatgcccggctgatgtctgccctgacccagctgaaggagcgctacagcatgcaggccagaaatggcatcagccccaccaaccccaccaagctgcagatcacagaaaatggagagttcaggaacagcagcaactgctag

SEQ ID NO: 19320 - DNA, 690 bp, synthetic construct
  misc_feature 1..690: note = Description of Artificial Sequence: Synthetic coding sequence
  source 1..690: mol_type = other DNA
atgccccggctgaaggagagccgcagccatgagagcctgctgagccccagcagcgctgtggaggccctggacctgtccatggaggaggaggtggtgatcaagcctgtgcacagcagcatcctgggccaggactactgctttgaggtgaccaccagcagcggcagcaagtgcttcagctgccgctctgctgctgagcgggacaagtggatggagaacctgcggcgggctgtgcaccccaacaaggacaacagcagaagagtggagcacatcctgaagctgtgggtgattgaggccaaggacctgcctgccaagaagaagtacctgtgtgagctgtgcctggatgatgtgctgtatgcccggaccaccgggaagctgaagacagacaacgtgttctggggcgagcactttgagttccacaacctgccccccctgaggacagtgacagtgcacctgtaccgggagacagacaagaagaagaagaaggagagaaattcctacctgggcctggtgtccctgcctgctgcctctgtggccggccggcagtttgtggagaagtggtaccctgtggtgacccccaaccccaagggcggcaagggccctggccccatgatccgcatcaaggcccgctaccagaccatcaccatcctgcccatggagatgtacaaggagtttgctgagcacatcacctag

SEQ ID NO: 19321 - DNA, 3423 bp, synthetic construct
  misc_feature 1..3423: note = Description of Artificial Sequence: Synthetic coding sequence
  source 1..3423: mol_type = other DNA
atgagctacaactacgtggtgacagcccagaagcccacagctgtgaatggctgtgtgacaggccacttcaccagcgctgaggacctgaacctgctgattgccaagaacacccggctggagatctacgtggtgacagctgagggcctgcggcctgtgaaggaggtgggcatgtatggcaagattgctgtgatggagctgttccggcccaagggggagagcaaggacctgctcttcatcctgacagccaagtacaatgcctgcatcctggagtacaagcagagcggggagagcattgacatcatcacccgggcccatggaaatgtgcaggaccgcatcggccggcccagcgagaccggcatcatcggcatcatcgaccctgaatgtaggatgattggcctgcggctgtatgatggcctcttcaaggtgatccccctggaccgggacaacaaggagctgaaggccttcaacatccggctggaggagctgcacgtgattgatgtgaagttcctgtatggctgccaggcccccaccatctgctttgtgtaccaggacccccagggcagacatgtgaagacctatgaggtgtccctgcgggagaaggagttcaacaagggcccctggaagcaggagaatgtggaggccgaggcctccatggtgattgctgtgcctgagccctttggaggagccatcatcatcggccaggagagcatcacctaccacaatggagacaagtacctggccatcgccccacccatcatcaagcagagcaccatcgtgtgccacaacagagtggaccccaacggcagccgctacctgctgggggacatggagggccgcctcttcatgctgctgctggagaaggaggagcagatggatggcaccgtgaccctgaaggacctgcgggtggagctgctgggggagaccagcattgctgagtgcctgacctacctggacaatggagtggtgtttgtgggcagccggctgggggacagccagctggtgaagctgaatgtggacagcaatgagcagggcagctatgtggtggccatggagaccttcaccaacctgggccccatcgtggacatgtgtgtggtggacctggagcggcagggccagggccagctggtgacctgcagcggggccttcaaggagggcagcctgcgcatcatcagaaatggcatcggcatccatgaacatgccagcattgacctgcccggcatcaagggcctgtggcccctgcggagtgaccccaaccgggagacagatgacaccctggtgctgagctttgtgggccagaccagggtgctgatgctgaatggagaggaggtggaggagacagagctgatgggctttgtggatgaccagcagaccttcttctgtggaaatgtggcccaccagcagctgatccagatcaccagcgcctctgtgcggctggtgtcccaggagcccaaggccctggtgtctgagtggaaggagccccaggccaagaacatctctgtggccagctgcaacagcagccaggtggtggtggccgtgggccgggccctgtactacctgcagatccacccccaggagctgcggcagatcagccacacagagatggagcacgaggtggcctgcctggacatcacccccctgggggacagcaatggcctgagccccctgtgtgccatcggcctgtggacagacatcagcgcccgcatcctgaagctgcccagctttgagctgctgcacaaggagatgctgggcggggagatcatccccaggagcatcctgatgaccacctttgagagcagccactacctgctgtgtgccctgggagatggagccctcttctacttcggcctgaacatcgagaccggcctgctgagtgacaggaagaaggtgaccctgggcacccagcccaccgtgctgcggaccttccgcagcctgagcaccaccaacgtgtttgcctgcagcgaccggcccaccgtcatctacagcagcaaccacaagctggtgttcagcaatgtgaacctgaaggaggtgaactacatgtgccccctgaacagtgatggctacccagacagcctggccctggccaacaacagcaccctgaccatcggcaccattgatgagatccagaagctgcacatcagaacagtgcccctgtatgagagccccaggaagatctgctaccaggaggtgtcccagtgctttggagtgctgagcagccgcatcgaggtgcaggacaccagcggcggcaccacagccctgcggcccagcgccagcacccaggccctgagcagctctgtgagcagcagcaagctgttcagcagcagcacagcccctcatgagaccagctttggagaggaggtggaggtgcacaacctgctgatcatcgaccagcacacctttgaggtgctgcacgcccaccagttcctgcagaatgaatatgccctgagcctggtgtcctgcaagctgggcaaggaccccaacacctacttcatcgtgggcacagccatggtgtacccagaggaggccgagcccaagcagggccgcatcgtggtgttccagtacagtgatggcaagctgcagacagtggccgagaaggaggtgaagggagctgtgtacagcatggtggagttcaacgggaagctgctggccagcatcaacagcacagtgcggctgtatgagtggaccacagagaaggagctgaggacagagtgcaaccactacaacaacatcatggccctgtacctgaagaccaagggggacttcatcctggtgggggacctgatgaggtctgtgctgctgctggcctacaagcccatggagggcaactttgaggagatcgcccgggacttcaaccccaactggatgtctgctgtggagatcctggatgatgacaacttcctgggcgcagaaaatgccttcaacctgtttgtgtgccagaaggacagcgctgccaccacagatgaggagcggcagcacctgcaggaggtgggcctcttccacctgggggagtttgtgaatgtgttctgccacggcagcctggtgatgcagaacctgggggagaccagcacccccacccagggctctgtgctgtttggcaccgtgaatggcatgattggcctggtgaccagcctgtctgagagctggtacaacctgctgctggacatgcagaaccggctgaacaaggtgatcaagtctgtgggcaagattgagcacagcttctggaggagcttccacacagagaggaagacagagcccgccaccggcttcattgatggagacctgattgagagcttcctggacatcagccggcccaagatgcaggaggtggtggccaacctgcagtatgatgatggcagcggcatgaagcgggaggccacagcagatgacctgatcaaggtggtggaggagctgacccgcatccactag

SEQ ID NO: 19322 - DNA, 1356 bp, synthetic construct
  misc_feature 1..1356: note = Description of Artificial Sequence: Synthetic coding sequence
  source 1..1356: mol_type = other DNA
atgagctacaactacgtggtgacagcccagaagcccacagctgtgaatggctgtgtgacaggccacttcaccagcgctgaggacctgaacctgctgattgccaagaacacccggctggagatctacgtggtgacagctgagggcctgcggcctgtgaaggaggtgggcatgtatggcaagattgctgtgatggagctgttccggcccaaggccctgagcagctctgtgagcagcagcaagctgttcagcagcagcacagcccctcatgagaccagctttggagaggaggtggaggtgcacaacctgctgatcatcgaccagcacacctttgaggtgctgcacgcccaccagttcctgcagaatgaatatgccctgagcctggtgtcctgcaagctgggcaaggaccccaacacctacttcatcgtgggcacagccatggtgtacccagaggaggccgagcccaagcagggcagaattgtggtgttccagtacagtgatggcaagctgcagacagtggccgagaaggaggtgaagggagctgtgtacagcatggtggagttcaacgggaagctgctggccagcatcaacagcacagtgcggctgtatgagtggaccacagagaaggagctgaggacagagtgcaaccactacaacaacatcatggccctgtacctgaagaccaagggggacttcatcctggtgggggacctgatgaggtctgtgctgctgctggcctacaagcccatggagggcaactttgaggagatcgcccgggacttcaaccccaactggatgtctgctgtggagatcctggatgatgacaacttcctgggcgcagaaaatgccttcaacctgtttgtgtgccagaaggacagcgctgccaccacagatgaggagcggcagcacctgcaggaggtgggcctcttccacctgggggagtttgtgaatgtgttctgccacggcagcctggtgatgcagaacctgggggagaccagcacccccacccagggctctgtgctgtttggaacagtgaatggcatgattggcctggtgaccagcctgtctgagagctggtacaacctgctgctggacatgcagaaccggctgaacaaggtgatcaagtctgtgggcaagattgagcacagcttctggaggagcttccacacagagaggaagacagagcccgccaccggcttcattgatggagacctgattgagagcttcctggacatcagccggcccaagatgcaggaggtggtggccaacctgcagtatgatgatggcagcggcatgaagcgggaggccacagcagatgacctgatcaaggtggtggaggagctgacccgcatccactag

SEQ ID NO: 19323 - DNA, 441 bp, synthetic construct
  misc_feature 1..441: note = Description of Artificial Sequence: Synthetic coding sequence
  source 1..441: mol_type = other DNA
atgagctacaactacgtggtgacagcccagaagcccacagctgtgaatggctgtgtgacaggccacttcaccagcgctgaggacctgaacctgctgattgccaagaacacccggctggagatctacgtggtgacagctgagggcctgcggcctgtgaaggaggtgggcatgtatggcaagattgctgtgatggagctgttccggcccaagggggagagcaaggacctgctcttcatcctgacagccaagtacaatgcctgcatcctggagtacaagcagagcggggagagcattgacatcatcacccgggcccatggaaatgtgcaggaccgcatcggccggcccagcgagaccggcatcatcggcatcatcgaccctgaatgtaggatgattggcctgcggctgtatgatggcctcttcaaggtgatccccctggactag

SEQ ID NO: 19324 - DNA, 330 bp, synthetic construct
  misc_feature 1..330: note = Description of Artificial Sequence: Synthetic coding sequence
  source 1..330: mol_type = other DNA
atgagctacaactacgtggtgacagcccagaagcccacagctgtgaatggctgtgtgacaggccacttcaccagcgctgaggacctgaacctgctgattgccaagaacacccggctggagatctacgtggtgacagctgagggcctgcggcctgtgaaggaggtgggcatgtatggcaagattgctgtgatggagctgttccggcccaagggggagagcaaggacctgctcttcatcctgacagccaagtacaatgcctgcatcctggagtacaagcagagcggggagagcattgacatcatcacccgggcccatggaaatgtgcagtag

SEQ ID NO: 19325 - DNA, 1284 bp, synthetic construct
  misc_feature 1..1284: note = Description of Artificial Sequence: Synthetic coding sequence
  source 1..1284: mol_type = other DNA
atggcccccaagaagaggcctgagacccagaagaccagcgagatcgtgctgcggcccaggaacaagaggagccgcagccccctggagctggagcctgaggccaagaagctgtgtgccaagggcagcggccccagccgccgctgtgacagcgactgcctgtgggtgggcctggccggcccccagatcctgcccccctgccgcagcatcgtgaggaccctgcaccagcacaagctgggccgggcctcctggcccagcgtgcagcagggcctgcagcagagcttcctgcacaccctggacagctaccgcatcctgcagaaggccgccccctttgaccggcgggccaccagcctggcctggcaccccacccaccccagcacagtggccgtgggcagcaagggcggggacatcatgctgtggaactttggcatcaaggacaagcccaccttcatcaagggcattggagctgggggcagcatcaccggcctgaagttcaaccccctgaacaccaaccagttctacgccagctccatggagggcaccacccggctgcaggacttcaagggcaacatcctgcgggtgtttgccagcagtgacaccatcaacatctggttctgcagcctggatgtgtctgccagcagcaggatggtggtgactggagacaacgtgggcaatgtcatcctgctgaacatggatggcaaggagctgtggaacctgaggatgcacaagaagaaggtgacccacgtggccctgaacccctgctgtgactggttcctggccacagcctctgtggaccagacagtgaagatctgggacctgcggcaggtgcggggcaaggccagcttcctgtacagcctgccccaccgccaccctgtgaatgctgcctgcttctccccagatggagcccggctgctgaccacagaccagaagtctgagatccgggtgtacagcgccagccagtgggactgccccctgggcctcatcccccacccccaccgccacttccagcacctgacccccatcaaggccgcctggcacccccgctacaacctgattgtggtgggccgctacccagaccccaacttcaagagctgcaccccctatgagctgcggaccattgatgtgtttgatggcaacagcggcaagatgatgtgccagctgtatgaccctgagagcagcggcatcagcagcctgaatgagttcaaccccatgggagacaccctggccagcgccatgggctaccacatcctgatctggagccaggaggaggcccggaccaggaagtag

SEQ ID NO: 19326 - DNA, 717 bp, synthetic construct
  misc_feature 1..717: note = Description of Artificial Sequence: Synthetic coding sequence
  source 1..717: mol_type = other DNA
atggcccccaagaagaggcctgagacccagaagaccagcgagatcgtgctgcggcccaggaacaagaggagccgcagccccctggagctggagcctgaggccaagaagctgtgtgccaagggcagcggccccagccgccgctgtgacagcgactgcctgtgggtgggcctggccggcccccagatcctgcccccctgccgcagcatcgtgaggaccctgcaccagcacaagctgggccgggcctcctggcccagcgtgcagcagggcctgcagcagagcttcctgcacaccctggacagctaccgcatcctgcagaaggccgccccctttgaccggcgggccaccagcctggcctggcaccccacccaccccagcacagtggccgtgggcagcaagggcggggacatcatgctgtggaactttggcatcaaggacaagcccaccttcatcaagggagctgcctggcacccccgctacaacctgattgtggtgggccgctacccagaccccaacttcaagagctgcaccccctatgagctgcggaccattgatgtgtttgatggcaacagcggcaagatgatgtgccagctgtatgaccctgagagcagcggcatcagcagcctgaatgagttcaaccccatgggagacaccctggccagcgccatgggctaccacatcctgatctggagccaggaggaggcccggaccaggaagtag

SEQ ID NO: 19327 - DNA, 735 bp, synthetic construct
  misc_feature 1..735: note = Description of Artificial Sequence: Synthetic coding sequence
  source 1..735: mol_type = other DNA
atggcccccaagaagaggcctgagacccagaagaccagcgagatcgtgctgcggcccaggaacaagaggagccgcagccccctggagctggagcctgaggccaagaagctgtgtgccaagggcagcggccccagccgccgctgtgacagcgactgcctgtgggtgggcctggccggcccccagatcctgcccccctgccgcagcatcgtgaggaccctgcaccagcacaagctgggccgggcctcctggcccagcgtgcagcagggcctgcagcagagcttcctgcacaccctggacagctaccgcatcctgcagaaggccgccccctttgaccggcgggccaccagcctggcctggcaccccacccaccccagcacagtggccgtgggcagcaagggcggggacatcatgctgtggaactttggcatcaaggacaagcccaccttcatcaagggcattggagctgggggcagcatcaccggcctgaagttcaaccccctgaacaccaaccagttctacgccagctccatggagggcaccacccggctgcaggacttcaagggcaacatcctgcgggtgtttgccagcagtgacaccatcaacatctggttctgcagcctggatgtgtctgccagcagcaggatggtggtgactggagacaacgtgggcaatgtcatcctgctgaacatggatggcaaggagctggtgtctgtgcccatggagcccggcagctag

SEQ ID NO: 19328 - DNA, 1092 bp, synthetic construct
  misc_feature 1..1092: note = Description of Artificial Sequence: Synthetic coding sequence
  source 1..1092: mol_type = other DNA
atggcccccaagaagaggcctgagacccagaagaccagcgagatcgtgctgcggcccaggaacaagaggagccgcagccccctggagctggagcctgaggccaagaagctgtgtgccaagggcagcggccccagccgccgctgtgacagcgactgcctgtgggtgggcctggccggcccccagatcctgcccccctgccgcagcatcgtgaggaccctgcaccagcacaagctgggccgggcctcctggcccagcgtgcagcagattggagctgggggcagcatcaccggcctgaagttcaaccccctgaacaccaaccagttctacgccagctccatggagggcaccacccggctgcaggacttcaagggcaacatcctgcgggtgtttgccagcagtgacaccatcaacatctggttctgcagcctggatgtgtctgccagcagcaggatggtggtgactggagacaacgtgggcaatgtcatcctgctgaacatggatggcaaggagctgtggaacctgaggatgcacaagaagaaggtgacccacgtggccctgaacccctgctgtgactggttcctggccacagcctctgtggaccagacagtgaagatctgggacctgcggcaggtgcggggcaaggccagcttcctgtacagcctgccccaccgccaccctgtgaatgctgcctgcttctccccagatggagcccggctgctgaccacagaccagaagtctgagatccgggtgtacagcgccagccagtgggactgccccctgggcctcatcccccacccccaccgccacttccagcacctgacccccatcaaggccgcctggcacccccgctacaacctgattgtggtgggccgctacccagaccccaacttcaagagctgcaccccctatgagctgcggaccattgatgtgtttgatggcaacagcggcaagatgatgtgccagctgtatgaccctgagagcagcggcatcagcagcctgaatgagttcaaccccatgggagacaccctggccagcgccatgggctaccacatcctgatctggagccaggaggaggcccggaccaggaagtag

SEQ ID NO: 19329 - DNA, 1119 bp, synthetic construct
  misc_feature 1..1119: note = Description of Artificial Sequence: Synthetic coding sequence
  source 1..1119: mol_type = other DNA
atgtctgaggccggggaggccaccaccaccaccaccaccaccctgccccaggcccccacagaggccgctgctgctgccccccaggaccctgcccccaagagccctgtgggcagcggggccccccaggccgccgccccagccccagctgcccacgtggccggcaaccctggaggagatgctgccccagctgccactggaacagctgctgctgccagcctggccacagctgctggctctgaagatgctgagaagaaggtgctggccaccaaggtgctgggcaccgtgaagtggttcaacgtgagaaatggctacggcttcatcaacagaaatgacaccaaggaggatgtgtttgtgcaccagacagccatcaagaagaacaaccccaggaagtacctgcggtctgtgggagatggagagaccgtggagtttgatgtggtggagggggagaagggagctgaggccgccaacgtgacaggcccagatggagtgcctgtggagggcagccgctatgctgctgacagaagacgctaccgccggggctactacggcagaagaagaggcccccccaggaactatgctggggaggaggaggaggagggcagcggcagcagcgagggctttgatcctccagccacagaccggcagttcagcggggccaggaaccagctgcggcggccccagtaccggccccagtaccggcagaggcgcttccccccctaccacgtgggccagacctttgaccggcgcagccgggtgctgccccaccccaaccgcatccaggccggggagatcggggagatgaaggatggagtgcctgagggcgcccagctgcagggccctgtgcacaggaaccccacctaccggccccgctaccgcagccggggccccccccggcccaggcctgccccagctgtgggggaggccgaggacaaggagaaccagcaggccaccagcggccccaaccagcccagcgtgcggcggggctaccgccggccctacaactacagaagaagaccccggcccccaaatgcccccagccaggacggcaaggaggccaaggccggggaggcccccacagagaacccagccccacccacccagcagagcagcgctgagtag

SEQ ID NO: 19330 - DNA, 867 bp, synthetic construct
  misc_feature 1..867: note = Description of Artificial Sequence: Synthetic coding sequence
  source 1..867: mol_type = other DNA
atggccaatgagacccagaaggtgggcgccatccacttccccttccccttcaccccctacagcatccaggaggacttcatggccgagctgtacagagtgctggaggccggcaagattggcatctttgagagccccaccggcaccgggaagagcctgagcctcatctgtggggccctgtcctggctgcgggactttgagcagaagaagcgggaggaggaggcccggctgctggagactggaacaggccccctgcatgatgagaaggatgagagcctgtgcctgagcagcagctgtgagggcgccgccggcacccccaggcctgctggggagcccgcctgggtgacccagtttgtgcagaagaaggaggagcgggacctggtggaccggctgaaggccgagcaggcccggaggaagcagcgggaggagcggctgcagcagctgcagcaccgggtgcagctgaagtatgctgccaagaggctgcggcaggaggaggaggagcgggagaacctgctgcggctgagccgggagatgctggagaccggccctgaggccgagcggctggagcagctggagagcggggaggaggagctggtgctggccgagtatgaaagtgatgaggagaagaaggtggccagccgggcccccagtgatgccaccagcagccgccaccccccagatgccagcttccctgctgccctgaacttcctgcagaggacccggcccagctctgtgctgtctgaggacctgctgatgcagagagctgtggccaagcacccagccctgctgccctggcagatgagcagcagccccctgcggcccggcagcgagtggatgaggatgaggatgacctggaggaagaacacctag

SEQ ID NO: 19331 - DNA, 2571 bp, synthetic construct
  misc_feature 1..2571: note = Description of Artificial Sequence: Synthetic coding sequence
  source 1..2571: mol_type = other DNA
atggccaatgagacccagaaggtgggcgccatccacttccccttccccttcaccccctacagcatccaggaggacttcatggccgagctgtacagagtgctggaggccggcaagattggcatctttgagagccccaccggcaccgggaagagcctgagcctcatctgtggggccctgtcctggctgcgggactttgagcagaagaagcgggaggaggaggcccggctgctggagactggaacaggccccctgcatgatgagaaggatgagagcctgtgcctgagcagcagctgtgagggcgccgccggcacccccaggcctgctggggagcccgcctgggtgacccagtttgtgcagaagaaggaggagcgggacctggtggaccggctgaaggccgagcaggcccggaggaagcagcgggaggagcggctgcagcagctgcagcaccgggtgcagctgaagtatgctgccaagaggctgcggcaggaggaggaggagcgggagaacctgctgcggctgagccgggagatgctggagaccggccctgaggccgagcggctggagcagctggagagcggggaggaggagctggtgctggccgagtatgaaagtgatgaggagaagaaggtggccagccgggtggatgaagatgaagatgacctggaggaggagcacatcaccaagatctactactgcagcaggacccacagccagctggcccagtttgtgcatgaggtgaagaagagcccctttgggaaggatgtgcggctggtgtccctgggcagccggcagaacctgtgtgtgaatgaagatgtgaagagcctgggctctgtgcagctgatcaatgacagatgtgtggacatgcagaggagcagacatgagaagaagaagggagctgaggaggagaagcccaagagaagacggcaggagaagcaggccgcctgccccttctacaaccacgagcagatgggcctgctgagagatgaggccctggccgaggtgaaggacatggagcagctgctggccctgggcaaggaggcccgggcctgcccctactacggcagccggctggccatcccagctgcccagctggtggtgctgccctaccagatgctgctgcatgctgccacccggcaggccgccggcatccggctgcaggaccaggtggtgatcattgatgaggcccacaacctgattgacaccatcaccggcatgcacagcgtggaggtgtctggcagccagctgtgccaggcccacagccagctgctgcagtatgtggagagatatggcaagaggctgaaggccaagaacctgatgtacctgaagcagatcctgtacctgctggagaagtttgtggccgtgctgggcggcaacatcaagcagaaccccaacacccagagcctgagccagacaggaacagagctgaagaccatcaatgacttcctgttccagagccagattgacaacatcaacctcttcaaggtgcagcgctactgtgagaagtccatgatcagcaggaagctgtttggcttcacagaaagatatggagctgtgttcagcagccgggagcagcccaagctggccggcttccagcagttcctgcagagcctgcagcccaggaccacagaggccctggccgccccagcagatgagagccaggccagcaccctgcggcctgccagccccctgatgcacatccagggcttcctggccgccctgaccacagccaaccaggacggccgggtcatcctgagccggcagggcagcctgagccagagcaccctgaagttcctgctgctgaacccagctgtgcactttgcccaggtggtgaaggagtgcagagctgtggtgattgctgggggcaccatgcagcctgtgtctgacttccggcagcagctgctggcctgtgccggcgtggaggccgagcgggtggtggagttcagctgtggccacgtgatccccccagacaacatcctgcccctggtgatctgcagcggcatcagcaaccagcccctggagttcaccttccagaagcgggagctgccccagatgatcttccaggagcccaagagcgcccaccaggtggagcaggtgctgctggcctacagccgctgcatccaggcctgtggccaggagcggggccaggtgactggagccctgctgctgtctgtggtgggcggcaagatgtctgagggcatcaacttcagtgacaacctgggccgctgtgtggtgatggtgggcatgcccttccccaacatccgctctgctgagctgcaggagaagatggcctacctggaccagaccctgccccgggcccctggccaggcccctcctgggaaggccctggtggagaacctgtgcatgaaggctgtgaaccagagcatcggccgggccatccgccaccagaaggactttgcctctgtggtgctgctggaccagagatatgcccggccccctgtgctggccaagctgcctgcctggatccgggcccgggtggaggtgaaggccaccttcggccctgccatcgctgctgtgcagaagttccaccgggagaagagcgccagcagctag

SEQ ID NO: 19332 - DNA, 1671 bp, synthetic construct
  misc_feature 1..1671: note = Description of Artificial Sequence: Synthetic coding sequence
  source 1..1671: mol_type = other DNA
gaggaggagcccctgtggcagggctgcagcgctggcctgccctggctgcctgctgagaagaagaagggagctgaggaggagaagcccaagagaagacggcaggagaagcaggccgcctgccccttctacaaccacgagcagatgggcctgctgagagatgaggccctggccgaggtgaaggacatggagcagctgctggccctgggcaaggaggcccgggcctgcccctactacggcagccggctggccatcccagctgcccagctggtggtgctgccctaccagatgctgctgcacgccgccacccggcaggccgccggcatccggctgcaggaccaggtggtgatcattgatgaggcccacaacctgattgacaccatcaccggcatgcacagcgtggaggtgtctggcagccagctgtgccaggcccacagccagctgctgcagtatgtggagagatatggcaagaggctgaaggccaagaacctgatgtacctgaagcagatcctgtacctgctggagaagtttgtggccgtgctgggcggcaacatcaagcagaaccccaacacccagagcctgagccagacaggaacagagctgaagaccatcaatgacttcctgttccagagccagattgacaacatcaacctcttcaaggtgcagcgctactgtgagaagtccatgatcagcaggaagctgtttggcttcacagagcgctacggggctgtgttcagcagccgggagcagcccaagctggccggcttccagcagttcctgcagagcctgcagcccaggaccacagaggccctggccgccccagcagatgagagccaggccagcaccctgcggcctgccagccccctgatgcacatccagggcttcctggccgccctgaccacagccaaccaggacggccgggtcatcctgagccggcagggcagcctgagccagagcaccctgaagttcctgctgctgaacccagctgtgcactttgcccaggtggtgaaggaatgtagagctgtggtgattgctgggggcaccatgcagcctgtgtctgacttccggcagcagctgctggcctgtgccggcgtggaggccgagcgggtggtggagttcagctgtggccacgtgattcctccagacaacatcctgcccctggtgatctgcagcggcatcagcaaccagcccctggagttcaccttccagaagcgggagctgccccagatgatggatgaggtgggccgcatcctgtgcaacctgtgtggggtggtgcctggaggagtggtgtgcttcttccccagctatgagtacctgcggcaggtgcacgcccactgggagaagggcggcctgctgggccgcctggccgccaggaagaagatcttccaggagcccaagagcgcccaccaggtggagcaggtgctgctggcctacagccgctgcatccaggcctgtggccaggagcggggccaggtgactggagccctgctgctgtctgtggtgggcggcaagatgtctgagggcatcaacttcagtgacaacctgggccgctgtgtggtgatggtgggcatgcccttccccaacatccgctctgctgagctgcaggagaagatggcctacctggaccagaccctggccggccccagcggcacccggcgcatcctgcctgcctag

SEQ ID NO: 19333 - DNA, 2913 bp, synthetic construct
  misc_feature 1..2913: note = Description of Artificial Sequence: Synthetic coding sequence
  source 1..2913: mol_type = other DNA
atggccaatgagacccagaaggtgggcgccatccacttccccttccccttcaccccctacagcatccaggaggacttcatggccgagctgtacagagtgctggaggccggcaagattggcatctttgagagccccaccggcaccgggaagagcctgagcctcatctgtggggccctgtcctggctgcgggactttgagcagaagaagcgggaggaggaggcccggctgctggagactggaacaggccccctgcatgatgagaaggatgagagcctgtgcctgagcagcagctgtgagggcgccgccggcacccccaggcctgctggggagcccgcctgggtgacccagtttgtgcagaagaaggaggagcgggacctggtggaccggctgaaggccgagcaggcccggaggaagcagcgggaggagcggctgcagcagctgcagcaccgggtgcagctgaagtatgctgccaagaggctgcggcaggaggaggaggagcgggagaacctgctgcggctgagccgggagatgctggagaccggccctgaggccgagcggctggagcagctggagagcggggaggaggagctggtgctggccgagtatgaaagtgatgaggagaagaaggtggccagccgggtggatgaagatgaagatgacctggaggaggagcacatcaccaagatctactactgcagcaggacccacagccagctggcccagtttgtgcatgaggtgaagaagagcccctttgggaaggatgtgcggctggtgtccctgggcagccggcagaacctgtgtgtgaatgaagatgtgaagagcctgggctctgtgcagctgatcaatgacagatgtgtggacatgcagaggagcagacatgagaagaagaagggagctgaggaggagaagcccaagagaagacggcaggagaagcaggccgcctgccccttctacaaccacgagcagatgggcctgctgagagatgaggccctggccgaggtgaaggacatggagcagctgctggccctgggcaaggaggcccgggcctgcccctactacggcagccggctggccatcccagctgcccagctggtggtgctgccctaccagatgctgctgcatgctgccacccggcaggccgccggcatccggctgcaggaccaggtggtgatcattgatgaggcccacaacctgattgacaccatcaccggcatgcacagcgtggaggtgtctggcagccagctgtgccaggcccacagccagctgctgcagtatgtggagagatatggcaagaggctgaaggccaagaacctgatgtacctgaagcagatcctgtacctgctggagaagtttgtggccgtgctgggcggcaacatcaagcagaaccccaacacccagagcctgagccagacaggaacagagctgaagaccatcaatgacttcctgttccagagccagattgacaacatcaacctcttcaaggtgcagcgctactgtgagaagtccatgatcagcaggaagctgtttggcttcacagaaagatatggagctgtgttcagcagccgggagcagcccaagctggccggcttccagcagttcctgcagagcctgcagcccaggaccacagaggccctggccgccccagcagatgagagccaggccagcaccctgcggcctgccagccccctgatgcacatccagggcttcctggccgccctgaccacagccaaccaggacggccgggtcatcctgagccggcagggcagcctgagccagagcaccctgaagttcctgctgctgaacccagctgtgcactttgcccaggtggtgaaggagtgcagagctgtggtgattgctgggggcaccatgcagcctgtgtctgacttccggcagcagctgctggcctgtgccggcgtggaggccgagcgggtggtggagttcagctgtggccacgtgatccccccagacaacatcctgcccctggtgatctgcagcggcatcagcaaccagcccctggagttcaccttccagaagcgggagctgccccagatgatggatgaggtgggccgcatcctgtgcaacctgtgtggggtggtgcctgggggcgtggtgtgcttcttccccagctatgagtacctgcggcaggtgcacgcccactgggagaagggcggcctgctgggccgcctggccgccaggaagaagatcttccaggagcccaagagcgcccaccaggtggagcaggtgctgctggcctacagccgctgcatccaggcctgtggccaggagcggggccaggtgactggagccctgctgctgtctgtggtgggcggcaagatgtctgagggcatcaacttcagtgacaacctgggccgctgtgtggtgatggtgggcatgcccttccccaacatccgctctgctgagctgcaggagaagatggcctacctggaccagaccctgagccccaggcctggcaccccccgggagggcagcggcggggagcctgtgcatgagggccggcagcctgtgcaccggcagggccaccaggcccctgagggcttctgccagaggtctgcccctggccctgccatctgcccagccccctgccccggccaggccgccggcctggaccccagcccctgtggcggccagagctacctgtggcccaggcactgctgctgtgccgaggtgtccccaggagaggtgggcctcttcctgatgggcaaccacaccacagcctggaggcgggccctgcccctgagctgccccctggagaccgtgtttgtggtgggcgtggtgtgtggggaccctgtgaccaaggtgaagccccggcggcgggtgtggagccctgagtgctgccaggaccccggcactggagtgagcagcagaagaaggaagtggggcaaccctgagtag

SEQ ID NO: 19334 - DNA, 675 bp, synthetic construct
  misc_feature 1..675: note = Description of Artificial Sequence: Synthetic coding sequence
  source 1..675: mol_type = other DNA
atggccgagctgtacagagtgctggaggccggcaagattggcatctttgagagccccaccggcaccgggaagagcctgagcctcatctgtggggccctgtcctggctgcgggactttgagcagaagaagcgggaggaggaggcccggctgctggagactggaacaggccccctgcatgatgagaaggatgagagcctgtgcctgagcagcagctgtgagggcgccgccggcacccccaggcctgctggggagcccgcctgggtgacccagtttgtgcagaagaaggaggagcgggacctggtggaccggctgaaggccgagcaggcccggaggaagcagcgggaggagcggctgcagcagctgcagcaccgggtgcagctgaagtatgctgccaagaggctgcggcaggaggaggaggagcgggagaacctgctgcggctgagccgggagatgctggagaccggccctgaggccgagcggctggagcagctggagagcggggaggaggagctggtgctggccgagtatgaaagtgatgaggagaagaaggtggccagccgggtggatgaagatgaagatgacctggaggaggagcacatcaccaagatctactactgcagcaggacccacagccagctggcccagtttgtgcatgaggtgaagaagagcccctag

SEQ ID NO: 19335 - DNA, 2721 bp, synthetic construct
  misc_feature 1..2721: note = Description of Artificial Sequence: Synthetic coding sequence
  source 1..2721: mol_type = other DNA
atggccaatgagacccagaaggtgggcgccatccacttccccttccccttcaccccctacagcatccaggaggacttcatggccgagctgtacagagtgctggaggccggcaagattggcatctttgagagccccaccggcaccgggaagagcctgagcctcatctgtggggccctgtcctggctgcgggactttgagcagaagaagcgggaggaggaggcccggctgctggagactggaacaggccccctgcatgatgagaaggatgagagcctgtgcctgagcagcagctgtgagggcgccgccggcacccccaggcctgctggggagcccgcctgggtgacccagtttgtgcagaagaaggaggagcgggacctggtggaccggctgaaggccgagcaggcccggaggaagcagcgggaggagcggctgcagcagctgcagcaccgggtgcagctgaagtatgctgccaagaggctgcggcaggaggaggaggagcgggagaacctgctgcggctgagccgggagatgctggagaccggccctgaggccgagcggctggagcagctggagagcggggaggaggagctggtgctggccgagtatgaaagtgatgaggagaagaaggtggccagccgggtggatgaagatgaagatgacctggaggaggagcacatcaccaagatctactactgcagcaggacccacagccagctggcccagtttgtgcatgaggtgaagaagagcccctttgggaaggatgtgcggctggtgtccctgggcagccggcagaacctgtgtgtgaatgaagatgtgaagagcctgggctctgtgcagctgatcaatgacagatgtgtggacatgcagaggagcagacatgagaagaagaagggagctgaggaggagaagcccaagagaagacggcaggagaagcaggccgcctgccccttctacaaccacgagcagatgggcctgctgagagatgaggccctggccgaggtgaaggacatggagcagctgctggccctgggcaaggaggcccgggcctgcccctactacggcagccggctggccatcccagctgcccagctggtggtgctgccctaccagatgctgctgcatgctgccacccggcaggccgccggcatccggctgcaggaccaggtggtgatcattgatgaggcccacaacctgattgacaccatcaccggcatgcacagcgtggaggtgtctggcagccagctgtgccaggcccacagccagctgctgcagtatgtggagagatatggcaagaggctgaaggccaagaacctgatgtacctgaagcagatcctgtacctgctggagaagtttgtggccgtgctgggcggcaacatcaagcagaaccccaacacccagagcctgagccagacaggaacagagctgaagaccatcaatgacttcctgttccagagccagattgacaacatcaacctcttcaaggtgcagcgctactgtgagaagtccatgatcagcaggaagctgtttggcttcacagaaagatatggagctgtgttcagcagccgggagcagcccaagctggccggcttccagcagttcctgcagagcctgcagcccaggaccacagaggccctggccgccccagcagatgagagccaggccagcaccctgcggcctgccagccccctgatgcacatccagggcttcctggccgccctgaccacagccaaccaggacggccgggtcatcctgagccggcagggcagcctgagccagagcaccctgaagttcctgctgctgaacccagctgtgcactttgcccaggtggtgaaggagtgcagagctgtggtgattgctgggggcaccatgcagcctgtgtctgacttccggcagcagctgctggcctgtgccggcgtggaggccgagcgggtggtggagttcagctgtggccacgtgatccccccagacaacatcctgcccctggtgatctgcagcggcatcagcaaccagcccctggagttcaccttccagaagcgggagctgccccagatgatggatgaggtgggccgcatcctgtgcaacctgtgtggggtggtgcctgggggcgtggtgtgcttcttccccagctatgagtacctgcggcaggtgcacgcccactgggagaagggcggcctgctgggccgcctggccgccaggaagaagatcttccaggagcccaagagcgcccaccaggtggagcaggtgctgctggcctacagccgctgcatccaggcctgtggccaggagcggggccaggtgactggagccctgctgctgtctgtggtgggcggcaagatgtctgagggcatcaacttcagtgacaacctgggccgctgtgtggtgatggtgggcatgcccttccccaacatccgctctgctgagctgcaggagaagatggcctacctggaccagaccctgccccgggcccctggccaggcccctcctgggaaggccctggtggagaacctgtgcatgaaggctgtgaaccagagcatcggccgggccatccgccaccagaaggactttgcctctgtggtgctgctggaccagagatatgcccggccccctgtgctggccaagctgcctgcctggatccgggcccgggtggaggtgaaggccaccttcggccctgccatcgctgctgtgcagaagttccaccgggagaagagcgccagcagctag

SEQ ID NO: 19336 - DNA, 2913 bp, synthetic construct; identical to SEQ ID NO: 19333
  misc_feature 1..2913: note = Description of Artificial Sequence: Synthetic coding sequence
  source 1..2913: mol_type = other DNA

SEQ ID NO: 19337 - DNA, 4293 bp, synthetic construct
  misc_feature 1..4293: note = Description of Artificial Sequence: Synthetic coding sequence
  source 1..4293: mol_type = other DNA
atgaccgtcttccggcaggagaatgtggatgactactatgacacaggagaggagctgggcagcggccagtttgctgtggtgaagaagtgccgggagaagagcacaggcctgcagtatgctgccaagttcatcaagaagaggaggaccaagagcagcagaagaggagtgtccagagaagatattgagcgggaggtgtccatcctgaaggagatccagcaccccaacgtcatcaccctgcacgaggtgtatgagaacaagacagatgtgatcctgatcctggagctggtggccggcggggagctgtttgacttcctggccgagaaggagagcctgacagaggaggaggccacagagttcctgaagcagatcctgaatggagtgtactacctgcacagcctgcagatcgcccactttgacctgaagccagagaacatcatgctgctggacagaaatgtgcccaagccccgcatcaagatcatcgactttggcctggcccacaagattgactttggaaatgagttcaagaacatcttcggcaccccagagtttgtggcccctgagatcgtgaactatgagcccctgggcctggaggccgacatgtggagcattggagtcatcacctacatcctgctgagcggggccagccccttcctgggggacaccaagcaggagaccctggccaacgtgtctgctgtgaactatgaatttgaagatgagtacttcagcaacaccagcgccctggccaaggacttcatccggcggctgctggtgaaggaccccaagaagaggatgaccatccaggacagcctgcagcacccctggatcaagcccaaggacacccagcaggccctgagcaggaaggccagcgctgtgaacatggagaagttcaagaagtttgctgccaggaagaagtggaagcagagcgtgcggctcatcagcctgtgccagaggctgagccgctccttcctgagccgcagcaacatgtctgtggcccggagtgatgacaccctggatgaggaggacagctttgtgatgaaggccatcatccacgccatcaatgatgacaacgtgcccggcctgcagcacctgctgggcagcctgagcaactatgatgtgaaccagcccaacaagcacggcaccccacccctgctgattgctgctggctgcggcaacatccagatcctgcagctgctgatcaagaggggcagcagaattgatgtgcaggacaagggcggcagcaatgctgtgtactgggccgcccggcacggccacgtggacaccctgaagttcctgtctgaaaataaatgtcccctggatgtgaaggacaagagcggggagatggccctgcacgtggccgcccgctatggccacgcagatgtggcccagctgctgtgcagctttggcagcaaccccaacatccaggacaaggaggaggagacccccctgcactgtgccgcctggcacggctactacagcgtggccaaggccctgtgtgaggccggctgcaatgtgaacatcaagaaccgggagggggagacccccctgctgacagccagcgcccggggctaccatgacatcgtggagtgcctggccgagcacggggctgacctgaatgcctgtgacaaggatggccacatcgccctgcacctggccgtgcggcgctgccagatggaggtgatcaagaccctgctgagccagggctgctttgtggactaccaggacagacatggcaacacccccctgcacgtggcctgcaaggatggcaacatgcccatcgtggtggccctgtgtgaggccaactgcaacctggacatcagcaacaagtatggccgcacccccctgcacctggccgccaacaacggcatcctggatgtggtgcgctacctgtgcctgatgggcgcctctgtggaggccctgaccacagatggcaagacagctgaggacctggcccggtctgagcagcatgaacatgtggccggcctgctggcccggctgaggaaggacacccaccggggcctcttcatccagcagctgcggcccacccagaacctgcagccccgcatcaagctgaagctgtttggccacagcggcagcggcaagaccaccctggtggagagcctgaagtgtggcctgctgcggagcttcttcagaagaagaagaccccggctgagcagcaccaacagcagccgcttcccccccagccccctggccagcaagcccaccgtgtctgtgtccatcaacaacctgtacccaggctgtgaaaatgtgtctgtgcgcagccgctccatgatgtttgagcccggcctgaccaagggcatgctggaggtgtttgtggcccccacccaccacccccactgcagcgcagatgaccagagcaccaaggccatcgacatccagaatgcctacctgaatggagtgggggacttctctgtgtgggagttcagcggcaaccctgtgtacttctgctgctatgactactttgctgccaatgaccccaccagcatccacgtggtggtgttcagcctggaggagccctatgagatccagctgaaccaggtgatcttctggctgtccttcctgaagagcctggtgcctgtggaggagcccatcgccttcggcggcaagctgaagaaccccctgcaggtggtgctggtggccacccatgctgacatcatgaatgtgcccaggcctgctggaggagaatttggctatgacaaggacaccagcctgctgaaggagatccggaacagatttggaaatgacctgcacatcagcaacaagctgtttgtgctggatgctggggccagcggcagcaaggacatgaaggtgctgaggaaccacctgcaggagatccgcagccagatcgtgtctgtgtgcccccccatgacccacctgtgtgagaagatcatcagcaccctgcccagctggaggaagctgaatggccccaaccagctgatgagcctgcagcagtttgtgtatgatgtgcaggaccagctgaaccccctggccagcgaggaggacctgcggagaattgcccagcagctgcacagcactggagagatcaacatcatgcagagcgagaccgtgcaggatgtgctgctgctggacccccgctggctgtgcaccaacgtgctgggcaagctgctgtctgtggagaccccccgggccctgcaccactaccggggccgctacacagtggaggacatccagaggctggtgcctgacagtgatgtggaggagctgctgcagatcctggatgccatggacatctgtgcccgggacctgagcagcggcaccatggtggatgtgcctgccctgatcaagacagacaacctgcaccgctcctgggcagatgaggaggatgaggtgatggtgtatggaggagtgagaattgtgcctgtggagcacctgacccccttcccctgtggcatcttccacaaggtgcaggtgaacctgtgccgctggatccaccagcagagcacagaaggagatgctgacatccggctgtgggtgaatggctgcaagctggccaacagaggagctgagctgctggtgctgctggtgaaccacggccagggcatcgaggtgcaggtgcggggcctggagacagagaagatcaagtgctgcctgctgctggacagcgtgtgcagcaccattgaaaatgtgatggccaccaccctgcccggcctgctgactgtgaagcactacctgagcccccagcagctgcgggagcaccacgagcctgtgatgatctaccagccccgggacttcttccgggcccagaccctgaaggagaccagcctgaccaacaccatgggcggctacaaggagagcttcagcagcatcatgtgcttcggctgccatgatgtgtacagccaggccagcctgggcatggacatccacgccagtgacctgaacctgctgaccaggaggaagctgagccggctgctggaccccccagaccccctgggcaaggactggtgcctgctggccatgaacctgggcctgcctgacctggtggccaagtacaacaccagcaatggagcccccaaggacttcctgcccagccccctgcacgccctgctgcgggagtggaccacctacccagagagcacagtgggcaccctgatgagcaagctgcgggagctgggcagaagagatgctgctgacttcctgctgaaggccagctctgtgttcaagatcaacctggatggaaatggccaggaggcctatgccagcagctgcaacagcggcaccagctacaacagcatcagctctgtggtgtccaggtag

SEQ ID NO: 19338 - DNA, 4293 bp, synthetic construct; identical to SEQ ID NO: 19337
  misc_feature 1..4293: note = Description of Artificial Sequence: Synthetic coding sequence
  source 1..4293: mol_type = other DNA

SEQ ID NO: 19339 - DNA, 4368 bp, synthetic construct
  misc_feature 1..4368: note = Description of Artificial Sequence: Synthetic coding sequence
  source 1..4368: mol_type = other DNA
atgaccgtcttccggcaggagaatgtggatgactactatgacacaggagaggagctgggcagcggccagtttgctgtggtgaagaagtgccgggagaagagcacaggcctgcagtatgctgccaagttcatcaagaagaggaggaccaagagcagcagaagaggagtgtccagagaagatattgagcgggaggtgtccatcctgaaggagatccagcaccccaacgtcatcaccctgcacgaggtgtatgagaacaagacagatgtgatcctgatcctggagctggtggccggcggggagctgtttgacttcctggccgagaaggagagcctgacagaggaggaggccacagagttcctgaagcagatcctgaatggagtgtactacctgcacagcctgcagatcgcccactttgacctgaagccagagaacatcatgctgctggacagaaatgtgcccaagccccgcatcaagatcatcgactttggcctggcccacaagattgactttggaaatgagttcaagaacatcttcggcaccccagagtttgtggcccctgagatcgtgaactatgagcccctgggcctggaggccgacatgtggagcattggagtcatcacctacatcctgctgagcggggccagccccttcctgggggacaccaagcaggagaccctggccaacgtgtctgctgtgaactatgaatttgaagatgagtacttcagcaacaccagcgccctggccaaggacttcatccggcggctgctggtgaaggaccccaagaagaggatgaccatccaggacagcctgcagcacccctggatcaagcccaaggacacccagcaggccctgagcaggaaggccagcgctgtgaacatggagaagttcaagaagtttgctgccaggaagaagtggaagcagagcgtgcggctcatcagcctgtgccagaggctgagccgctccttcctgagccgcagcaacatgtctgtggcccggagtgatgacaccctggatgaggaggacagctttgtgatgaaggccatcatccacgccatcaatgatgacaacgtgcccggcctgcagcacctgctgggcagcctgagcaactatgatgtgaaccagcccaacaagcacggcaccccacccctgctgattgctgctggctgcggcaacatccagatcctgcagctgctgatcaagaggggcagcagaattgatgtgcaggacaagggcggcagcaatgctgtgtactgggccgcccggcacggccacgtggacaccctgaagttcctgtctgaaaataaatgtcccctggatgtgaaggacaagagcggggagatggccctgcacgtggccgcccgctatggccacgcagatgtggcccagctgctgtgcagctttggcagcaaccccaacatccaggacaaggaggaggagacccccctgcactgtgccgcctggcacggctactacagcgtggccaaggccctgtgtgaggccggctgcaatgtgaacatcaagaaccgggagggggagacccccctgctgacagccagcgcccggggctaccatgacatcgtggagtgcctggccgagcacggggctgacctgaatgcctgtgacaaggatggccacatcgccctgcacctggccgtgcggcgctgccagatggaggtgatcaagaccctgctgagccagggctgctttgtggactaccaggacagacatggcaacacccccctgcacgtggcctgcaaggatggcaacatgcccatcgtggtggccctgtgtgaggccaactgcaacctggacatcagcaacaagtatggccgcacccccctgcacctggccgccaacaacggcatcctggatgtggtgcgctacctgtgcctgatgggcgcctctgtggaggccctgaccacagatggcaagacagctgaggacctggcccggtctgagcagcatgaacatgtggccggcctgctggcccggctgaggaaggacacccaccggggcctcttcatccagcagctgcggcccacccagaacctgcagccccgcatcaagctgaagctgtttggccacagcggcagcggcaagaccaccctggtggagagcctgaagtgtggcctgctgcggagcttcttcagaagaagaagaccccggctgagcagcaccaacagcagccgcttcccccccagccccctggccagcaagcccaccgtgtctgtgtccatcaacaacctgtacccaggctgtgaaaatgtgtctgtgcgcagccgctccatgatgtttgagcccggcctgaccaagggcatgctggaggtgtttgtggcccccacccaccacccccactgcagcgcagatgaccagagcaccaaggccatcgacatccagaatgcctacctgaatggagtgggggacttctctgtgtgggagttcagcggcaaccctgtgtacttctgctgctatgactactttgctgccaatgaccccaccagcatccacgtggtggtgttcagcctggaggagccctatgagatccagctgaaccaggtgatcttctggctgtccttcctgaagagcctggtgcctgtggaggagcccatcgccttcggcggcaagctgaagaaccccctgcaggtggtgctggtggccacccatgctgacatcatgaatgtgcccaggcctgctggaggagaatttggctatgacaaggacaccagcctgctgaaggagatccggaacagatttggaaatgacctgcacatcagcaacaagctgtttgtgctggatgctggggccagcggcagcaaggacatgaaggtgctgaggaaccacctgcaggagatccgcagccagatcgtgtccaagaccctgcccttcaccccagacatcctggtgggcgtgcccctgtggcaccaccagaagattggaggcagccctgtgtgcccccccatgacccacctgtgtgagaagatcatcagcaccctgcccagctggaggaagctgaatggccccaaccagctgatgagcctgcagcagtttgtgtatgatgtgcaggaccagctgaaccccctggccagcgaggaggacctgcggcgcatcgcccagcagctgcacagcactggagagatcaacatcatgcagagcgagaccgtgcaggatgtgctgctgctggacccccgctggctgtgcaccaacgtgctgggcaagctgctgtctgtggagaccccccgggccctgcaccactaccggggccgctacacagtggaggacatccagaggctggtgcctgacagtgatgtggaggagctgctgcagatcctggatgccatggacatctgtgcccgggacctgagcagcggcaccatggtggatgtgcctgccctgatcaagacagacaacctgcaccgctcctgggcagatgaagaagatgaggtgatggtgtatggaggagtgcgcatcgtgcctgtggagcacctgacccccttcccctgtggcatcttccacaaggtgcaggtgaacctgtgccgctggatccaccagcagagcacagaaggagatgctgacatccggctgtgggtgaatggctgcaagctggccaacagaggagctgagctgctggtgctgctggtgaaccacggccagggcatcgaggtgcaggtgcggggcctggagacagagaagatcaagtgctgcctgctgctggacagcgtgtgcagcaccattgaaaatgtgatggccaccaccctgcccggcctgctgactgtgaagcactacctgagcccccagcagctgcgggagcaccacgagcctgtgatgatctaccagccccgggacttcttccgggcccagaccctgaaggagaccagcctgaccaacaccatgggcggctacaaggagagcttcagcagcatcatgtgcttcggctgccatgatgtgtacagccaggccagcctgggcatggacatccacgccagtgacctgaacctgctgaccaggaggaagctgagccggctgctggaccccccagaccccctgggcaaggactggtgcctgctggccatgaacctgggcctgcctgacctggtggccaagtacaacaccagcaatggagcccccaaggacttcctgcccagccccctgcacgccctgctgcgggagtggaccacctacccagagagcacagtgggcaccctgatgagcaagctgcgggagctgggcagaagagatgctgctgacttcctgctgaaggccagcagcgtcttcaagatcaacctggatggaaatggccaggaggcctatgccagcagctgcaacagcggcaccagctacaacagcatcagctctgtggtgtccaggtag

SEQ ID NO: 19340 - DNA, 4293 bp, synthetic construct; identical to SEQ ID NO: 19337
  misc_feature 1..4293: note = Description of Artificial Sequence: Synthetic coding sequence
  source 1..4293: mol_type = other DNA

SEQ ID NO: 19341 - DNA, 4095 bp, synthetic construct
  misc_feature 1..4095: note = Description of Artificial Sequence: Synthetic coding sequence
  source 1..4095: mol_type = other DNA
atgaccgtcttccggcaggagaatgtggatgactactatgacacaggagaggagctgggcagcggccagtttgctgtggtgaagaagtgccgggagaagagcacaggcctgcagtatgctgccaagttcatcaagaagaggaggaccaagagcagcagaagaggagtgtccagagaagatattgagcgggaggtgtccatcctgaaggagatccagcaccccaacgtcatcaccctgcacgaggtgtatgagaacaagacagatgtgatcctgatcctggagctggtggccggcggggagctgtttgacttcctggccgagaaggagagcctgacagaggaggaggccacagagttcctgaagcagatcctgaatggagtgtactacctgcacagcctgcagatcgcccactttgacctgaagccagagaacatcatgctgctggacagaaatgtgcccaagccccgcatcaagatcatcgactttggcctggcccacaagattgactttggaaatgagttcaagaacatcttcggcaccccagagtttgtggcccctgagatcgtgaactatgagcccctgggcctggaggccgacatgtggagcattggagtcatcacctacatcctgctgagcggggccagccccttcctgggggacaccaagcaggagaccctggccaacgtgtctgctgtgaactatgaatttgaagatgagtacttcagcaacaccagcgccctggccaaggacttcatccggcggctgctggtgaaggaccccaagaagaggatgaccatccaggacagcctgcagcacccctggatcaagcccaaggacacccagcaggccctgagcaggaaggccagcgctgtgaacatggagaagttcaagaagtttgctgccaggaagaagtggaagcagagcgtgcggctcatcagcctgtgccagaggctgagccgctccttcctgagccgcagcaacatgtctgtggcccggagtgatgacaccctggatgaggaggacagctttgtgatgaaggccatcatccacgccatcaatgatgacaacgtgcccggcctgcagcacctgctgggcagcctgagcaactatgatgtgaaccagcccaacaagcacggcaccccacccctgctgattgctgctggctgcggcaacatccagatcctgcagctgctgatcaagaggggcagcagaattgatgtgcaggacaagggcggcagcaatgctgtgtactgggccgcccggcacggccacgtggacaccctgaagttcctgtctgaaaataaatgtcccctggatgtgaaggacaagagcggggagatggccctgcacgtggccgcccgctatggccacgcagatgtggcccagctgctgtgcagctttggcagcaaccccaacatccaggacaaggaggaggagacccccctgcactgtgccgcctggcacggctactacagcgtggccaaggccctgtgtgaggccggctgcaatgtgaacatcaagaaccgggagggggagacccccctgctgacagccagcgcccggggctaccatgacatcgtggagtgcctggccgagcacggggctgacctgaatgcctgtgacaaggatggccacatcgccctgcacctggccgtgcggcgctgccagatggaggtgatcaagaccctgctgagccagggctgctttgtggactaccaggacagacatggcaacacccccctgcacgtggcctgcaaggatggcaacatgcccatcgtggtggccctgtgtgaggccaactgcaacctggacatcagcaacaagtatggccgcacccccctgcacctggccgccaacaacggcatcctggatgtggtgcgctacctgtgcctgatgggcgcctctgtggaggccctgaccacagatggcaagacagctgaggacctggcccggtctgagcagcatgaacatgtggccggcctgctggcccggctgaggaaggacacccaccggggcctcttcatccagcagctgcggcccacccagaacctgcagccccgcatcaagctgaagctgtttggccacagcggcagcggcaagaccaccctggtggagagcctgaagtgtggcctgctgcggagcttcttcagaagaagaagaccccggctgagcagcaccaacagcagccgcttcccccccagccccctggccagcaagcccaccgtgtctgtgtccatcaacaacctgtacccaggctgtgaaaatgtgtctgtgcgcagccgctccatgatgtttgagcccggcctgaccaagggcatgctggaggtgtttgtggcccccacccaccacccccactgcagcgcagatgaccagagcaccaaggccatcgacatccagaatgcctacctgaatgccttcggcggcaagctgaagaaccccctgcaggtggtgctggtggccacccatgctgacatcatgaatgtgcccaggcctgctggaggagaatttggctatgacaaggacaccagcctgctgaaggagatccggaacagatttggaaatgacctgcacatcagcaacaagctgtttgtgctggatgctggggccagcggcagcaaggacatgaaggtgctgaggaaccacctgcaggagatccgcagccagatcgtgtctgtgtgcccccccatgacccacctgtgtgagaagatcatcagcaccctgcccagctggaggaagctgaatggccccaaccagctgatgagcctgcagcagtttgtgtatgatgtgcaggaccagctgaaccccctggccagcgaggaggacctgcggagaattgcccagcagctgcacagcactggagagatcaacatcatgcagagcgagaccgtgcaggatgtgctgctgctggacccccgctggctgtgcaccaacgtgctgggcaagctgctgtctgtggagaccccccgggccctgcaccactaccggggccgctacacagtggaggacatccagaggctggtgcctgacagtgatgtggaggagctgctgcagatcctggatgccatggacatctgtgcccgggacctgagcagcggcaccatggtggatgtgcctgccctgatcaagacagacaacctgcaccgctcctgggcagatgaggaggatgaggtgatggtgtatggaggagtgagaattgtgcctgtggagcacctgacccccttcccctgtggcatcttccacaaggtgcaggtgaacctgtgccgctggatccaccagcagagcacagaaggagatgctgacatccggctgtgggtgaatggctgcaagctggccaacagaggagctgagctgctggtgctgctggtgaaccacggccagggcatcgaggtgcaggtgcggggcctggagacagagaagatcaagtgctgcctgctgctggacagcgtgtgcagcaccattgaaaatgtgatggccaccaccctgcccggcctgctgactgtgaagcactacctgagcccccagcagctgcgggagcaccacgagcctgtgatgatctaccagccccgggacttcttccgggcccagaccctgaaggagaccagcctgaccaacaccatgggcggctacaaggagagcttcagcagcatcatgtgcttcggctgccatgatgtgtacagccaggccagcctgggcatggacatccacgccagtgacctgaacctgctgaccaggaggaagctgagccggctgctggaccccccagaccccctgggcaaggactggtgcctgctggccatgaacctgggcctgcctgacctggtggccaagtacaacaccagcaatggagcccccaaggacttcctgcccagccccctgcacgccctgctgcgggagtggaccacctacccagagagcacagtgggcaccctgatgagcaagctgcgggagctgggcagaagagatgctgctgacttcctgctgaaggccagctctgtgttcaagatcaacctggatggaaatggccaggaggcctatgccagcagctgcaacagcggcaccagctacaacagcatcagctctgtggtgtccaggtag

SEQ ID NO: 19342 - DNA, 2223 bp, synthetic construct
  misc_feature 1..2223: note = Description of Artificial Sequence: Synthetic coding sequence
  source 1..2223: mol_type = other DNA
atggccacagccaacagcatcatcgtgctggatgatgatgatgaagatgaggccgccgcccagcccggccccagccaccccctgcccaatgctgccagccctggagctgaggcccccagcagcagcgagccccatggagcccggggcagcagcagcagcggcggcaagaagtgctacaagctggagaatgagaagctgtttgaggagttcctggagctgtgcaagatgcagacagctgaccaccctgaggtggtgcccttcctgtacaaccggcagcagagggcccacagcctcttcctggccagcgctgagttctgcaacatcctgagccgggtgctgagccgggcccggagcaggcctgccaagctgtatgtgtacatcaatgagctgtgcaccgtgctgaaggcccacagcgccaagaagaagctgaacctggccccagctgccaccaccagcaatgagcccagcggcaacaacccccccacccacctgagcctggaccccaccaatgctgagaacacagccagccagagccccaggacccggggcagccggcggcagatccagaggctggagcagctgctggccctgtatgtggccgagatccggcggctgcaggagaaggagctggacctgtctgagctggatgatcctgacagcgcctacctgcaggaggcccggctgaagaggaagctgatccggctgtttggccgcctgtgtgagctgaaggactgcagcagcctgaccggccgggtgattgagcagaggatcccctaccggggcacccgctacccagaggtgaacagaagaattgagcggctcatcaacaagccaggccctgacaccttcccagactatggagatgtgctgcgggctgtggagaaggctgctgcccggcacagcctgggcctgccccggcagcagctgcagctgatggcccaggatgccttcagagatgtgggcatccggctgcaggagaggaggcacctggacctgatctacaactttggctgccacctgacagatgactacagacctggggtggaccctgccctgagtgaccctgtgctggcccggcggctgagagaaaatagaagcctggccatgagccggctggatgaagtcatcagcaaatatgccatgctgcaggacaagtctgaggagggggagaggaagaagaggcgggcccggctgcagggcaccagcagccacagcgctgacaccccagaggccagcctggacagcggggagggccccagcggcatggccagccagggctgccccagcgccagcagagctgagacagatgatgaagatgatgaggagagtgatgaggaggaggaggaggaggaggaggaggaggaggaggaggccacagattctgaggaggaggaggacctggagcagatgcaggagggccaggaggatgatgaggaggaggatgaggaggaggaggccgccgccggcaaggatggagacaagagccccatgagcagcctgcagatcagcaatgagaagaacctggagcccgggaagcagatcagccgcagcagcggggagcagcagaacaagggcagaattgtgagccccagcctgctgtctgaggagcccctggcccccagcagcattgatgctgagagcaatggagagcagcctgaggagctgaccctggaggaggagagccctgtgtcccagctgtttgagctggagattgaggccctgcccctggacacccccagctctgtggagacagacatcagcagcagcaggaagcagagcgaggagcccttcaccaccgtgctggagaatggagctggcatggtgagcagcaccagcttcaacggcggcgtgagcccccacaactggggagacagcggccccccctgcaagaagagcaggaaggagaagaagcagacaggcagcggccccctgggcaacagctatgtggagcggcagaggtctgtgcatgagaagaatggcaagaagatctgcaccctgcccagcccccccagccccctggccagcctggcccctgtggccgacagcagcaccagggtggacagccccagccacggcctggtgaccagcagcctgtgcatccccagccctgcccggctgagccagaccccccacagccagccccccaggcctggcacctgcaagacctctgtggccacccagtgtgaccctgaggagatcatcgtgctgagtgacagcgactag

SEQ ID NO: 19343 - DNA, 2223 bp, synthetic construct; identical to SEQ ID NO: 19342
  misc_feature 1..2223: note = Description of Artificial Sequence: Synthetic coding sequence
  source 1..2223: mol_type = other DNA

SEQ ID NO: 19344 - DNA, 1998 bp, synthetic construct
  misc_feature 1..1998: note = Description of Artificial Sequence: Synthetic coding sequence
  source 1..1998: mol_type = other DNA
atgcagacagctgaccaccctgaggtggtgcccttcctgtacaaccggcagcagagggcccacagcctcttcctggccagcgctgagttctgcaacatcctgagccgggtgctgagccgggcccggagcaggcctgccaagctgtatgtgtacatcaatgagctgtgcaccgtgctgaaggcccacagcgccaagaagaagctgaacctggccccagctgccaccaccagcaatgagcccagcggcaacaacccccccacccacctgagcctggaccccaccaatgcagaaaatacagccagccagagccccaggacccggggcagccggcggcagatccagaggctggagcagctgctggccctgtatgtggccgagatccggcggctgcaggagaaggagctggacctgtctgagctggatgatcctgattctgcctacctgcaggaggcccggctgaagaggaagctgatccggctgtttggccgcctgtgtgagctgaaggactgcagcagcctgaccggccgggtcatcgagcagaggatcccctaccggggcacccgctacccagaggtgaacagacgcatcgagcggctcatcaacaagccaggccctgacaccttcccagactatggagatgtgctgcgggctgtggagaaggccgccgcccggcacagcctgggcctgccccggcagcagctgcagctgatggcccaggatgccttcagagatgtgggcatccggctgcaggagcggcggcacctggacctgatctacaactttggctgccacctgacagatgactacagacctggggtggaccctgccctgagtgaccctgtgctggcccggcggctgcgggagaacagaagcctggccatgagccggctggatgaggtgatcagcaaatatgccatgctgcaggacaagtctgaggagggggagaggaagaagagaagagcccggctgcagggcaccagcagccacagcgctgacaccccagaggccagcctggacagcggggagggccccagcggcatggccagccagggctgccccagcgccagcagagctgagacagatgatgaagatgatgaggagagtgatgaggaggaggaggaggaggaggaggaggaggaggaggaggccacagacagcgaggaggaggaggacctggagcagatgcaggagggccaggaggatgatgaggaggaggatgaggaggaggaggccgctgctgggaaggatggagacaagagccccatgagcagcctgcagatcagcaatgagaagaacctggagcccgggaagcagatcagccgcagcagtggagagcagcagaacaagggccgcatcgtgagccccagcctgctgtctgaggagcccctggcccccagcagcattgatgctgagagcaatggagagcagcctgaggagctgaccctggaggaggagagccctgtgtcccagctgtttgagctggagattgaggccctgcccctggacacccccagctctgtggagacagacatcagcagcagcaggaagcagagcgaggagcccttcaccaccgtgctggagaatggagctggcatggtgagcagcaccagcttcaatggaggagtgagcccccacaactggggagacagcggccccccctgcaagaagagcaggaaggagaagaagcagacaggcagcggccccctgggcaacagctatgtggagcggcagaggtctgtgcatgagaagaatggcaagaagatctgcaccctgcccagcccccccagccccctggccagcctggcccctgtggccgacagcagcaccagggtggacagccccagccacggcctggtgaccagcagcctgtgcatccccagccctgcccggctgagccagaccccccacagccagcccccccggcccggcacctgcaagacctctgtggccacccagtgtgaccctgaggagatcatcgtgctgagtgacagcgactag

SEQ ID NO: 19345 - DNA, 537 bp, synthetic construct
  misc_feature 1..537: note = Description of Artificial Sequence: Synthetic coding sequence
  source 1..537: mol_type = other DNA
atggccacagccaacagcatcatcgtgctggatgatgatgatgaagatgaggccgccgcccagcccggccccagccaccccctgcccaatgctgccagccctggagctgaggcccccagcagcagcgagccccatggagcccggggcagcagcagcagcggcggcaagaagtgctacaagctggagaatgagaagctgtttgaggagttcctggagctgtgcaagatgcagacagctgaccaccctgaggtggtgcccttcctgtacaaccggcagcagagggcccacagcctcttcctggccagcgctgagttctgcaacatcctgagccgggtgctgagccgggcccggagcaggcctgccaagctgtatgtgtacatcaatgagctgtgcaccgtgctgaaggcccacagcgccaagaagaagctgaacctggccccagctgccaccaccagcaatgagcccagcggcaacaacccccccacccacctgagcctggaccccaccaatgctgagaacacagccagccagagctag

SEQ ID NO: 19346 - DNA, 147 bp, synthetic construct
  misc_feature 1..147: note = Description of Artificial Sequence: Synthetic coding sequence
  source 1..147: mol_type = other DNA
atggccacagccaacagcatcatcgtgctggatgatgatgatgaagatgaggccgccgcccagcccggccccagccaccccctgcccaatgctgccagccctggagctgaggcccccagcagcagcgagccccatggagccaggtag

SEQ ID NO: 19347 - DNA, 393 bp, synthetic construct
  misc_feature 1..393: note = Description of Artificial Sequence: Synthetic coding sequence
  source 1..393: mol_type = other DNA
atggccacagccaacagcatcatcgtgctggatgatgatgatgaagatgaggccgccgcccagcccggccccagccaccccctgcccaatgctgccagccctggagctgaggcccccagcagcagcgagccccatggagcccggggcagcagcagcagcggcggcaagaagtgctacaagctggagaatgagaagctgtttgaggagttcctggagctgtgcaagatgcagacagctgaccaccctgaggtggtgcccttcctgtacaaccggcagcagagggcccacagcctcttcctggccagcgctgagttctgcaacatcctgagccgggtgctgagccgggcccggagcaggcctgccaagctgtatgtgtacatcaatgagctgtag

SEQ ID NO: 19348 - DNA, 2316 bp, synthetic construct
  misc_feature 1..2316: note = Description of Artificial Sequence: Synthetic coding sequence
  source 1..2316: mol_type = other DNA
ggtgtgcctgtgatcaagtggaagaaggatggcatccacctggccctgggcatggatgagaggaagcagcagctgagcaatggcagcctgctgatccagaacatcctgcacagccgccaccacaagccagatgagggcctgtaccagtgtgaggccagcctgggggacagcggcagcatcatcagcaggacagccaaggtggccgtggccggccccctgcgcttcctgagccagacagaatctgtgacagccttcatgggagacacagtgctgctgaagtgtgaggtgattggagagcccatgcccaccatccactggcagaagaaccagcaggacctgacccccatccctggggacagccgggtggtggtgctgcccagcggggccctgcagatcagccggctgcagcccggggacatcggcatctaccgctgcagcgccaggaacccagccagcagcaggactggaaatgaagctgaggtgcgcatcctgagtgaccccggcctgcaccggcagctgtacttcctgcagaggcccagcaatgtggtggccatcgagggcaaggatgctgtgctggagtgctgcgtgtctggctacccacctccttccttcacctggctgcggggggaggaggtgatccagctgcggagcaagaagtacagcctgctgggcggcagcaacctgctgatcagcaatgtgacagatgatgacagcggcatgtacacctgtgtggtgacctacaagaatgaaaacatcagcgccagcgctgagctgactgtgctggtgcccccctggttcctgaaccaccccagcaacctgtatgcctatgagagcatggacattgaatttgagtgcaccgtgtctgggaagcctgtgcccaccgtgaactggatgaagaatggagatgtggtgatccccagcgactacttccagatcgtgggcggcagcaacctgcgcatcctgggcgtggtgaagagtgatgagggcttctaccagtgtgtggccgagaatgaagctggaaatgcccagaccagcgcccagctgattgtgcccaagccagccatccccagcagctctgtgctgcccagcgcccccagagatgtggtgcctgtgctggtgagcagcagatttgtgcggctgtcctggaggcccccagctgaggccaagggcaacatccagaccttcaccgtcttcttcagccgggagggggacaaccgggagcgggccctgaacaccacccagcccggcagcctgcagctgactgtgggcaacctgaagccagaggccatgtacaccttccgggtggtggcctacaatgagtggggccctggagagagcagccagcccatcaaggtggccacccagcctgagctgcaggtgcccggccctgtggagaacctgcaggccgtgtccaccagccccaccagcatcctgatcacctgggagcccccagcctatgccaacggccctgtgcagggctaccgcctcttctgcacagaggtgtccacaggcaaggagcagaacatcgaggtggatggcctgagctacaagctggagggcctgaagaagttcacagagtacagcctgcgcttcctggcctacaacagatatggccctggggtgtccacagatgacatcaccgtggtgaccctgagtgatgtgcccagcgccccaccccagaatgtgtccctggaggtggtgaacagccgcagcatcaaggtgtcctggctgcccccaccttctggcacccagaatggcttcatcaccggctacaagatccgccacaggaagaccacccggcggggggagatggagaccctggagcccaacaacctgtggtacctgttcaccggcctggagaagggcagccagtacagcttccaggtgtctgccatgacagtgaatggaactggaccacccagcaactggtacacagctgagaccccagaaaatgacctggatgagagccaggtgcctgaccagcccagcagcctgcacgtgcggccccagaccaactgcatcatcatgtcctggaccccacccctgaaccccaacatcgtggtgcggggctacatcatcggctatggagtgggcagcccctatgcagagaccgtgcgggtggacagcaagcagcgctactacagcattgaaaggctggagagcagcagccactacgtgatcagcctgaaggccttcaacaatgctggggagggcgtgcccctgtatgagagcgccaccaccaggagcatcaccgtgagaagacacaacatcagcaagctgcacagcaaccggccccagaccaagcacaacgtgtag

SEQ ID NO: 19349 - DNA, 2694 bp, synthetic construct
  misc_feature 1..2694: note = Description of Artificial Sequence: Synthetic coding sequence
  source 1..2694: mol_type = other DNA
atgggagacacagtgctgctgaagtgtgaggtgattggagagcccatgcccaccatccactggcagaagaaccagcaggacctgacccccatccctggggacagccgggtggtggtgctgcccagcggggccctgcagatcagccggctgcagcccggggacatcggcatctaccgctgcagcgccagaaatcctgccagcagcaggactggaaatgaggccgaggtgcgcatcctgagtgaccccggcctgcaccggcagctgtacttcctgcagaggcccagcaatgtggtggccatcgagggcaaggatgctgtgctggagtgctgcgtgtctggctaccccccacccagcttcacctggctgcggggggaggaggtgatccagctgcggagcaagaagtacagcctgctgggcggcagcaacctgctgatcagcaatgtgacagatgatgattctggcatgtacacctgtgtggtgacctacaagaatgaaaacatcagcgccagcgctgagctgactgtgctggtgcccccctggttcctgaaccaccccagcaacctgtatgcctatgaatccatggacatcgagtttgaatgtactgtgtctgggaagcctgtgcccaccgtgaactggatgaagaatggagatgtggtgatccccagcgactacttccagatcgtgggcggcagcaacctgcgcatcctgggcgtggtgaagagtgatgagggcttctaccagtgtgtggctgaaaatgaggccggaaatgcccagaccagcgcccagctgattgtgcccaagccagccatccccagcagctctgtgctgcccagcgcccccagagatgtggtgcctgtgctggtgagcagcagatttgtgcggctgtcctggaggcctcctgctgaggccaagggcaacatccagaccttcaccgtcttcttcagccgggagggggacaaccgggagcgggccctgaacaccacccagcccggcagcctgcagctgactgtgggcaacctgaagccagaggccatgtacaccttccgggtggtggcctacaatgagtggggccctggagagagcagccagcccatcaaggtggccacccagcctgagctgcaggtgcccggccctgtggagaacctgcaggccgtgtccaccagccccaccagcatcctgatcacctgggagcccccagcctatgccaatggacctgtgcagggctaccgcctcttctgcacagaggtgtccacaggcaaggagcagaacatcgaggtggatggcctgagctacaagctggagggcctgaagaagttcacagagtacagcctgcgcttcctggcctacaacagatatggccctggggtgtccacagatgacatcaccgtggtgaccctgagtgatgtgcccagcgccccaccccagaatgtgtccctggaggtggtgaacagccgcagcatcaaggtgtcctggctgcccccacccagcggcacccagaatggcttcatcaccggctacaagatccgccacaggaagaccaccaggagaggagagatggagaccctggagcccaacaacctgtggtacctgttcaccggcctggagaagggcagccagtacagcttccaggtgtctgccatgacagtgaatggcaccggcccccccagcaactggtacacagctgagaccccagaaaatgacctggatgagagccaggtgcctgaccagcccagcagcctgcacgtgcggccccagaccaactgcatcatcatgtcctggaccccacccctgaaccccaacatcgtggtgcggggctacatcatcggctacggcgtgggcagcccctatgcagagaccgtgcgggtggacagcaagcagcgctactacagcattgagcggctggagagcagcagccactacgtgatcagcctgaaggccttcaacaatgctggggagggcgtgcccctgtatgaaagtgccaccaccaggagcatcacagacctgagcacccccatgctgccccctgtgggcgtgcaggccgtggccctgacccatgatgctgtgcgggtgtcctgggccgacaacagcgtgcccaagaaccagaagaccagcgaggtgcggctgtacacagtgcgctggaggaccagcttcagcgccagcgccaagtacaagtctgaggacaccaccagcctgagctacacagccaccggcctgaagcccaacaccatgtatgagttctctgtgatggtgaccaagaacagaagaagcagcacctggagcatgacagcccacgccaccacctatgaggccgcccccaccagcgcccccaaggacctgaccgtcatcacccgggagggcaagccccgggccgtcatcgtgtcctggcagccccccctggaggccaacgggaagatcacagcctacatcctcttctacaccctggacaagaacatccccattgatgactggatcatggagaccatcagcggggaccggctgacccaccagatcatggacctgaacctggacaccatgtactacttccgcatccaggccaggaacagcaagggcgtgggccccctgagtgaccccatcctcttccgcaccctgaaggtggagcacccagacaagatggccaatgaccaggacaccggggtgaccatcaacctggtgaatgaggtgctgctgggctag

SEQ ID NO: 19350 - DNA, 4344 bp, synthetic construct
  misc_feature 1..4344: note = Description of Artificial Sequence: Synthetic coding sequence
  source 1..4344: mol_type = other DNA
atggagaacagcctgcgctgtgtgtgggtgcccaagctggcctttgtgctgtttggagccagcctcttcagcgcccacctgcaggtgacaggcttccagatcaaggccttcaccgccctgcgcttcctgtctgagcccagtgatgctgtgaccatgaggggcggcaatgtgctgctggactgcagcgctgagagtgaccggggcgtgcctgtgatcaagtggaagaaggatggcatccacctggccctgggcatggatgagaggaagcagcagctgagcaatggcagcctgctgatccagaacatcctgcacagccgccaccacaagccagatgagggcctgtaccagtgtgaggccagcctgggggacagcggcagcatcatcagcaggacagccaaggtggccgtggccggccccctgcgcttcctgagccagacagagagcgtgacagccttcatgggagacacagtgctgctgaagtgtgaggtgattggagagcccatgcccaccatccactggcagaagaaccagcaggacctgacccccatccctggggacagccgggtggtggtgctgcccagcggggccctgcagatcagccggctgcagcccggggacatcggcatctaccgctgcagcgccagaaatcctgccagcagcaggactggaaatgaggccgaggtgcgcatcctgagtgaccccggcctgcaccggcagctgtacttcctgcagaggcccagcaatgtggtggccatcgagggcaaggatgctgtgctggagtgctgcgtgtctggctaccccccacccagcttcacctggctgcggggggaggaggtgatccagctgcggagcaagaagtacagcctgctgggcggcagcaacctgctgatcagcaatgtgacagatgatgattctggcatgtacacctgtgtggtgacctacaagaatgaaaacatcagcgccagcgctgagctgactgtgctggtgcccccctggttcctgaaccaccccagcaacctgtatgcctatgaatccatggacatcgagtttgaatgtactgtgtctgggaagcctgtgcccaccgtgaactggatgaagaatggagatgtggtgatccccagcgactacttccagatcgtgggcggcagcaacctgcgcatcctgggcgtggtgaagagtgatgagggcttctaccagtgtgtggctgaaaatgaggccggaaatgcccagaccagcgcccagctgattgtgcccaagccagccatccccagcagctctgtgctgcccagcgcccccagagatgtggtgcctgtgctggtgagcagcagatttgtgcggctgtcctggaggcctcctgctgaggccaagggcaacatccagaccttcaccgtcttcttcagccgggagggggacaaccgggagcgggccctgaacaccacccagcccggcagcctgcagctgactgtgggcaacctgaagccagaggccatgtacaccttccgggtggtggcctacaatgagtggggccctggagagagcagccagcccatcaaggtggccacccagcctgagctgcaggtgcccggccctgtggagaacctgcaggccgtgtccaccagccccaccagcatcctgatcacctgggagcccccagcctatgccaatggacctgtgcagggctaccgcctcttctgcacagaggtgtccacaggcaaggagcagaacatcgaggtggatggcctgagctacaagctggagggcctgaagaagttcacagagtacagcctgcgcttcctggcctacaacagatatggccctggggtgtccacagatgacatcaccgtggtgaccctgagtgatgtgcccagcgccccaccccagaatgtgtccctggaggtggtgaacagccgcagcatcaaggtgtcctggctgcccccacccagcggcacccagaatggcttcatcaccggctacaagatccgccacaggaagaccaccaggagaggagagatggagaccctggagcccaacaacctgtggtacctgttcaccggcctggagaagggcagccagtacagcttccaggtgtctgccatgacagtgaatggcaccggcccccccagcaactggtacacagctgagaccccagaaaatgacctggatgagagccaggtgcctgaccagcccagcagcctgcacgtgcggccccagaccaactgcatcatcatgtcctggaccccacccctgaaccccaacatcgtggtgcggggctacatcatcggctacggcgtgggcagcccctatgcagagaccgtgcgggtggacagcaagcagcgctactacagcattgagcggctggagagcagcagccactacgtgatcagcctgaaggccttcaacaatgctggggagggcgtgcccctgtatgaaagtgccaccaccaggagcatcacagaccccacagatcctgtggactactaccccctgctggatgacttccccacctctgtgcctgacctgagcacccccatgctgccccctgtgggcgtgcaggccgtggccctgacccatgatgctgtgcgggtgtcctgggccgacaacagcgtgcccaagaaccagaagaccagcgaggtgcggctgtacacagtgcgctggaggaccagcttcagcgccagcgccaagtacaagtctgaggacaccaccagcctgagctacacagccaccggcctgaagcccaacaccatgtatgagttctctgtgatggtgaccaagaacagaagaagcagcacctggagcatgacagcccacgccaccacctatgaggccgcccccaccagcgcccccaaggacctgaccgtcatcacccgggagggcaagccccgggccgtcatcgtgtcctggcagccccccctggaggccaacgggaagatcacagcctacatcctcttctacaccctggacaagaacatccccattgatgactggatcatggagaccatcagcggggaccggctgacccaccagatcatggacctgaacctggacaccatgtactacttccgcatccaggccaggaacagcaagggcgtgggccccctgagtgaccccatcctcttccgcaccctgaaggtggagcacccagacaagatggccaatgaccagggcagacatggagatggcggctactggcctgtggacaccaacctgattgacaggagcaccctgaatgagccccccatcggccagatgcacccccctcatggctctgtgaccccccagaagaacagcaacctgctggtgatcatcgtggtgacagtgggcgtcatcaccgtgctggtggtggtgattgtggccgtcatctgcaccaggaggagcagcgcccagcagaggaagaagagggccacccacagcgctgggaagaggaagggcagccagaaggacctgcggcccccagacctgtggatccaccacgaggagatggagatgaagaacatcgagaagcccagcggcacagatcctgctggccgggacagccccatccagagctgccaggacctgacccctgtgagccacagccagagcgagacccagctgggcagcaagagcaccagccacagcggccaggacacagaggaggccggcagctccatgagcaccctggagaggagcctggccgcccggcgggccccccgggccaagctgatgatccccatggatgcccagagcaacaacccagctgtggtgtctgccatccctgtgcccaccctggagagcgcccagtacccaggcatcctgcccagccccacctgtggctacccccacccccagttcaccctgcggcctgtgcccttccccaccctgtctgtggaccggggctttggagctggccgcagccagagcgtgtctgagggccccaccacccagcagccccccatgctgccccccagccagcctgagcacagcagcagcgaggaggcccccagcaggaccatccccacagcctgtgtgcggcccacccaccccctgcggagctttgccaaccccctgctgcccccacccatgtctgccatcgagcccaaggtgccctacacccccctgctgagccagcccggccccaccctgcccaagacccacgtgaagacagccagcctgggcctggccggcaaggcccggagccccctgctgcctgtgtctgtgcccacagcccctgaggtgtctgaggagagccacaagcccacagaggacagcgccaacgtgtatgagcaggatgacctgtctgagcagatggccagcctggagggcctgatgaagcagctgaatgccatcactggaagtgccttctag

SEQ ID NO: 19351 - DNA, 213 bp, synthetic construct
  misc_feature 1..213: note = Description of Artificial Sequence: Synthetic coding sequence
  source 1..213: mol_type = other DNA
atgaccatgaatgtgctggaggccggcaagtggaagagcatcgtgcctgcccctggagagggcctgctggccgtgctgcacatgatggtgttcacagatgccctgcaccgggagaggtctgtgaagtggcaggccggcgtgtgctacaacggcggcaaggactttgctgtgtccctggcccggcccaaggctgctgagggcattgctgactag

SEQ ID NO: 19352 - DNA, 1392 bp, synthetic construct
  misc_feature 1..1392: note = Description of Artificial Sequence: Synthetic coding sequence
  source 1..1392: mol_type = other DNA
atgtctgtggccatcaggaagaggtcctgggaggagcacgtgacccactggatgggccagcccttcaacagtgatgacaggaacacagcctgccaccacggcctggtggccgacagcctgcaggcctccatggagaaggatgccaccctgaatgtggacaggaaggagaagtgtgtgtccctgcctgactgctgccacggcagcgagctgcgggacttccctggccggcccatgggccacctgagcaaggatgtggatgaaaatgacagccatgaaggagaggaccagttcctgagcctggaggccagcacagagaccctggtgcacgtgtctgatgaggacaacaatgctgacctgtgcctgacagatgacaagcaggtgctgaacacccagggccagaagaccagcggccagcacatgatccagggcgccggcagcctggagaaggccctgcccatcatccagagcaaccaggtgagcagcaacagctggggcattgctggggagacagagctggccctggtgaaggagagcggggagaggaaggtgacagacagcatcagcaagagcctggagctgtgcaatgagatcagcctgtctgagatcaaggatgcccccaaggtgaatgctgtggacaccctgaatgtgaaggacatcgcccctgagaagcagctgctgaacagcgctgtgattgcccagcagaggaggaagccagacccccccaaggatgaaaatgaaagaagcacctgcaatgtggtgcagaatgagttcctggacaccccctgcaccaacagaggcctgcccctgctgaagacagactttggcagctgcctgctgcagccccccagctgccccaacggcatgtctgcagaaaatggcctggagaagagcggcttcagccagcaccagaacaagagcccccccaaggtgaaggcagaagatggcatgcagtgcctgcagctgaaggagaccctggccacccaggagcccacagacaaccaggtgcggctgaggaagaggaaggagatcagagaagatcgggaccgggcccggctggacagcatggtgctgctgatcatgaagctggaccagctggaccaggacattgaaaatgccctgagcaccagcagcagccccagcggcacccccaccaacctgcggagacatgtgcctgacctggagagcggcagcgagagcggggctgacaccatctctgtgaaccagaccagggtgaacctgagcagtgacacagagagcacagacctgcccagcagcacccctgtggccaacagcggcaccaagcccaagaccacagccatccagggcatcagcgagaaggagaaggccggcaagctgaccttctggttctgcttcctggccaacctcttctag

SEQ ID NO: 19353 - DNA, 5268 bp, synthetic construct
  misc_feature 1..5268: note = Description of Artificial Sequence: Synthetic coding sequence
  source 1..5268: mol_type = other DNA
atggagaccaggagcagcaagaccaggaggagcctggccagcaggaccaatgaatgccagggcaccatgtgggcccccaccagccccccagctggcagcagcagccccagccagcccacctggaagagcagcctgtacagcagcctggcctacagcgaggccttccactacagctttgctgcccggccccggcggctgacccagctggccctggcccagaggcctgagccccagctgctgcggctgcggcccagcagcctgcggacccaggacatcagccacctgctgactggagtcttcaggaacctgtacagcgctgaggtgattggagatgaggtgtctgccagcctcatcaaggcccggggctctgaaaatgaaagacatgaggagtttgtggaccagctgcagcagatccgggagctgtacaagcagaggctggatgaatttgagatgctggagcggcacatcacccaggcccaggcccgggccatcgccgagaatgaaagagtgatgagccaggccggcgtgcaggacctggagagcctggtgcggctgccccctgtgaagtctgtgagccgctggtgcatcgacagcgagctgctgaggaagcaccacctgatcagccctgaggactactacacagacacagtgcccttccacagcgcccccaagggcatcagcctgcccggctgcagcaagctgaccttcagctgtgagaagaggtctgtgcagaagaaggagctgaacaagaagctggaggacagctgcaggaagaagctggccgagtttgaagatgagctggaccacacagtggacagcctgacctggaacctgacccccaaggccaaggagaggacccgggagcccctgaagaaggccagccagcccaggaacaagaactggatgaaccacctgcgggtgccccagcgggagctggaccggctgctgctggccaggatggagagcaggaaccacttcctgaagaacccccgcttcttcccccccaacaccaggtatggaggcaagagcctggtgtttcctcccaagaagccagcccccatcggggagttccagagcacagagcctgagcagagctgtgccgacacccctgtgttcctggccaagccacccatcggcttcttcacagattatgagatcggccctgtgtatgagatggtgattgccctgcagaacaccaccaccaccagccgctacctgcgggtgctgccccccagcaccccctactttgccctgggcctgggcatgtttcctgggaagggcggcatggtggcccctggcatgacctgccagtacatcgtgcagttcttcccagactgcctgggggactttgatgacttcatcctggtggagacccagagcgcccacaccctgctgatccccctgcaggcccggcggcccccacctgtgctgaccctgagccctgtgctggactgtggctactgcctgattggaggagtgaagatgacccgcttcatctgcaagaatgtgggcttctctgtgggccgcttctgcatcatgcccaagacctcctggccacccctgtccttcaaggccatcgccaccgtgggctttgtggagcagcccccatttggcatcctgcccagcgtgtttgagctggcccctggccacgccatcctggtggaggtgctcttcagccccaagagcctgggcaaggccgagcagaccttcatcatcatgtgtgacaactgccagatcaaggagctggtgaccatcggcatcggccagctgattgccctggacctgatctacatctctggagagaagagccagcctgaccctggagagctgacagacctgacagcccagcacttcatccgctttgagcctgagaacctgcggagcacagccaggaagcagctgatcatcagaaatgccacccacgtggagctggccttctactggcagatcatgaagcccaacctgcagcccctgatgcctggagagaccttctccatggacagcatcaagtgctacccagacaaggagacagccttcagcatcatgcccaggaaaggagtgctgagcccccacacagaccacgagttcatcctgtccttcagcccccatgagctgcgggacttccacagcgtgctgcagatggtgctggaggaggtgcctgagcctgtgtcctctgaggccgagagcctgggccacagcagctacagcgtggatgatgtgattgtgctggagattgaggtgaagggctctgtggagcccttccaggtgctgctggagccctatgccctgatcatccctggagagaactacatcggcatcaacgtgaagaaggccttcaagatgtggaacaacagcaagagccccatccgctacctgtggggcaagatcagtgactgccacatcatcgaggtggagcccggcaccggggtgattgagcccagcgaggtgggggactttgagctgaacttcaccggcggcgtgcccggccccaccagccaggacctgctgtgtgaaattgaggacagccccagccctgtggtgctgcacatcgaggccgtgttcaagggccctgccctgatcatcaacgtgtctgccctgcagtttggcctgctgcggctgggccagaaggccaccaacagcatccagatcagaaatgtgtcccagctgcctgccacctggaggatgaaggagagccctgtgtccctgcaggagaggccagaagatgtgagcccctttgacatcgagcccagcagcggccagctgcacagcctgggggagtgccgggtggacatcaccctggaggccctgcactgccagcacctggagaccgtgctggagctggaggtggagaatggagcctggagctacctgcctgtgtatgcagaggtgcagaagccccacgtgtacctgcagagcagccaggtggaggtgaggaacctgtacctgggcgtgcccaccaagaccaccatcaccctcatcaatggcaccctgctgcccacccagttccactggggcaagctgctgggccaccaggccgagttctgcatggtgacagtgagccccaagcacggcctgctgggccccagcgaggagtgccagctgaagctggagctgacagcccacacccaggaggagctgacccacctggccctgccctgccacgtgtctggcatgaagaagcccctggtgctgggcatcagcggcaagccccagggcctgcaggtggccatcaccatcagcaaggagagcagtgactgcagcacagagcagtggccaggccaccccaaggagctgcggctggactttggcagcgctgtgcccctgcggaccagggtgacccggcagctgatcctgaccaacagaagccccatccgcacccgcttcagcctgaagtttgagtacttcggcagcccccagaacagcctgagcaagaagaccagcctgcccaacatgcccccagccctgctgaagacagtgaggatgcaggagcacctggccaagcgggagcagctggacttcatggagagcatgctgagccacggcaagggggccgccttcttcccccacttcagccagggcatgctgggcccctaccagcagctgtgcatcgacatcaccggctgtgccaacatgtggggcgagtactgggacaacctgatctgcaccgtgggggacctgctgcctgaggtgattcctgtgcacatggctgctgtgggctgccccatcagcagcctgcggaccaccagctacaccatcgaccaggcccagaaggagcccgccatgagatttggcacccaggtgtctggaggagacacagtgaccaggaccctgcggctgaacaacagcagcccctgtgacatccggctggactgggagacctacgtgcctgaggacaaggaggaccggctggtggagctgctggtgttctacggcccccccttccccctgcgggaccaggccggaaatgagctggtgtgcccagacaccccagagggcggctgcctgctgtggagccctggccccagcagcagcagcgagttcagccatgaaacagacagctctgtggagggcagcagcagcgccagcaacagagtggcccagaagctgatcagcgtcatcctgcaggcccatgaaggagtgcccagcggccacctgtactgcatcagccccaagcaggtggtggtgcctgctgggggcagcagcaccatctacatctccttcacccccatggtgctgagccctgagatcctgcacaaggtggagtgcaccggctacgccctgggcttcatgagcctggacagcaaggtggagcgggagatccctgggaagaggcaccggctgcaggactttgctgtgggccccctgaagctggacctgcacagctatgtgcggcctgcccagctgtctgtggagctggactatggaggctccatggagttccagtgccaggccagtgacctgatccctgagcagccctgcagcggcgtgctgtctgagctggtgaccacccaccacctgaagctgaccaacaccacagagatcccccactacttccggctgatggtgtcccggcccttctctgtgtcccaggatggagccagccaggaccaccgggcccctggccctggccagaagcaggagtgtgaggaggagacagccagcgctgacaagcagctggtgctgcaggcccaggagaacatgctggtgaatgtgtccttcagcctgagcctggagctgctgagctaccagaagctgcctgctgaccagaccctgcccggggtggacatccagcagagcgccagcggggagcgggagatggtgttcacccagaacctgctgctggagtacaccaaccagaccacccaggtggtgcccctgcgggctgtggtggccgtgcctgagctgcagctgagcacctcctgggtggactttggcacctgctttgtgtcccagcagagggtgcgggaggtgtacctgatgaacctgagcggctgccgcagctactggaccatgctgatgggccagcaggagcccgccaaggctgctgtggccttccgggtgagccccaacagcggcctgctggaggcccggagcgccaatgccccacccaccagcatcgccctgcaggtgttcttcaccgcccggagcagcgagctgtatgagagcaccatggtggtggagggcgtgctgggggagaagagctgcaccctgcggctgcggggccagggcagctatgatgagcgctacatgctgccccaccagccctag

SEQ ID NO: 19354 - DNA, 5337 bp, synthetic construct
  misc_feature 1..5337: note = Description of Artificial Sequence: Synthetic coding sequence
  source 1..5337: mol_type = other DNA
atggagaccaggagcagcaagaccaggaggagcctggccagcaggaccaatgaatgccagggcaccatgtgggcccccaccagccccccagctggcagcagcagccccagccagcccacctggaagagcagcctgtacagcagcctggcctacagcgaggccttccactacagctttgctgcccggccccggcggctgacccagctggccctggcccagaggcctgagccccagctgctgcggctgcggcccagcagcctgcggacccaggacatcagccacctgctgactggagtcttcaggaacctgtacagcgctgaggtgattggagatgaggtgtctgccagcctcatcaaggcccggggctctgaaaatgaaagacatgaggagtttgtggaccagctgcagcagatccgggagctgtacaagcagaggctggatgaatttgagatgctggagcggcacatcacccaggcccaggcccgggccatcgccgagaatgaaagagtgatgagccaggccggcgtgcaggacctggagagcctggtgcggctgccccctgtgaagtctgtgagccgctggtgcatcgacagcgagctgctgaggaagcaccacctgatcagccctgaggactactacacagacacagtgcccttccacagcgcccccaagggcatcagcctgcccggctgcagcaagctgaccttcagctgtgagaagaggtctgtgcagaagaaggagctgaacaagaagctggaggacagctgcaggaagaagctggccgagtttgaagatgagctggaccacacagtggacagcctgacctggaacctgacccccaaggccaaggagaggacccgggagcccctgaagaaggccagccagcccaggaacaagaactggatgaaccacctgcgggtgccccagcgggagctggaccggctgctgctggccaggatggagagcaggaaccacttcctgaagaacccccgcttcttcccccccaacaccaggtatggaggcaagagcctggtgtttcctcccaagaagccagcccccatcggggagttccagagcacagagcctgagcagagctgtgccgacacccctgtgttcctggccaagccacccatcggcttcttcacagattatgagatcggccctgtgtatgagatggtgattgccctgcagaacaccaccaccaccagccgctacctgcgggtgctgccccccagcaccccctactttgccctgggcctgggcatgtttcctgggaagggcggcatggtggcccctggcatgacctgccagtacatcgtgcagttcttcccagactgcctgggggactttgatgacttcatcctggtggagacccagagcgcccacaccctgctgatccccctgcaggcccggcggcccccacctgtgctgaccctgagccctgtgctggactgtggctactgcctgattggaggagtgaagatgacccgcttcatctgcaagaatgtgggcttctctgtgggccgcttctgcatcatgcccaagacctcctggccacccctgtccttcaaggccatcgccaccgtgggctttgtggagcagcccccatttggcatcctgcccagcgtgtttgagctggcccctggccacgccatcctggtggaggtgctcttcagccccaagagcctgggcaaggccgagcagaccttcatcatcatgtgtgacaactgccagatcaaggagctggtgaccatcggcatcggccagctgattgccctggacctgatctacatctctggagagaagagccagcctgaccctggagagctgacagacctgacagcccagcacttcatccgctttgagcctgagaacctgcggagcacagccaggaagcagctgatcatcagaaatgccacccacgtggagctggccttctactggcagatcatgaagcccaacctgcagcccctgatgcctggagagaccttctccatggacagcatcaagtgctacccagacaaggagacagccttcagcatcatgcccaggaaaggagtgctgagcccccacacagaccacgagttcatcctgtccttcagcccccatgagctgcgggacttccacagcgtgctgcagatggtgctggaggaggtgcctgagcctgtgtcctctgaggccgagagcctgggccacagcagctacagcgtggatgatgtgattgtgctggagattgaggtgaagggctctgtggagcccttccaggtgctgctggagccctatgccctgatcatccctggagagaactacatcggcatcaacgtgaagaaggccttcaagatgtggaacaacagcaagagccccatccgctacctgtggggcaagatcagtgactgccacatcatcgaggtggagcccggcaccggggtgattgagcccagcgaggtgggggactttgagctgaacttcaccggcggcgtgcccggccccaccagccaggacctgctgtgtgaaattgaggacagccccagccctgtggtgctgcacatcgaggccgtgttcaagggccctgccctgatcatcaacgtgtctgccctgcagtttggcctgctgcggctgggccagaaggccaccaacagcatccagatcagaaatgtgtcccagctgcctgccacctggaggatgaaggagagccctgtgtccctgcaggagaggccagaagatgtgagcccctttgacatcgagcccagcagcggccagctgcacagcctgggggagtgccgggtggacatcaccctggaggccctgcactgccagcacctggagaccgtgctggagctggaggtggagaatggagcctggagctacctgcctgtgtatgcagaggtgcagaagccccacgtgtacctgcagagcagccaggtggaggtgaggaacctgtacctgggcgtgcccaccaagaccaccatcaccctcatcaatggcaccctgctgcccacccagttccactggggcaagctgctgggccaccaggccgagttctgcatggtgacagtgagccccaagcacggcctgctgggccccagcgaggagtgccagctgaagctggagctgacagcccacacccaggaggagctgacccacctggccctgccctgccacgtgtctggcatgaagaagcccctggtgctgggcatcagcggcaagccccagggcctgcaggtggccatcaccatcagcaaggagagcagtgactgcagcacagagcagtggccaggccaccccaaggagctgcggctggactttggcagcgctgtgcccctgcggaccagggtgacccggcagctgatcctgaccaacagaagccccatccgcacccgcttcagcctgaagtttgagtacttcggcagcccccagaacagcctgagcaagaagaccagcctgcccaacatgcccccagccctgctgaagacagtgaggatgcaggagcacctggccaagcgggagcagctggacttcatggagagcatgctgagccacggcaagggggccgccttcttcccccacttcagccagggcatgctgggcccctaccagcagctgtgcatcgacatcaccggctgtgccaacatgtggggcgagtactgggacaacctgatctgcaccgtgggggacctgctgcctgaggtgattcctgtgcacatggctgctgtgggctgccccatcagcagcctgcggaccaccagctacaccatcgaccaggcccagaaggagcccgccatgagatttggcacccaggtgtctggaggagacacagtgaccaggaccctgcggctgaacaacagcagcccctgtgacatccggctggactgggagacctacgtgcctgaggacaaggaggaccggctggtggagctgctggtgttctacggcccccccttccccctgcgggaccaggccggaaatgagctggtgtgcccagacaccccagagggcggctgcctgctgtggagccctggccccagcagcagcagcgagttcagccatgaaacagacagctctgtggagggcagcagcagcgccagcaacagagtggcccagaagctgatcagcgtcatcctgcaggcccatgaaggagtgcccagcggccacctgtactgcatcagccccaagcaggtggtggtgcctgctgggggcagcagcaccatctacatctccttcacccccatggtgctgagccctgagatcctgcacaaggtggagtgcaccggctacgccctgggcttcatgagcctggacagcaaggtggagcgggagatccctgggaagaggcaccggctgcaggactttgctgtgggccccctgaagctggacctgcacagctatgtgcggcctgcccagctgtctgtggagctggactatggaggctccatggagttccagtgccaggccagtgacctgatccctgagcagccctgcagcggcgtgctgtctgagctggtgaccacccaccacctgaagctgaccaacaccacagagatcccccactacttccggctgatggtgtcccggcccttctctgtgtcccaggatggagccagccaggaccaccgggcccctggccctggccagaagcaggagtgtgaggaggagacagccagcgctgacaagcagctggtgctgcaggcccaggagaacatgctggtgaatgtgtccttcagcctgagcctggagctgctgagctaccagaagctgcctgctgaccagaccctgcccggggtggacatccagcagagcgccagcggggagcgggagatggtgttcacccagaacctgctgctggagtacaccaaccagaccacccaggtggtgcccctgcgggctgtggtggccgtgcctgagctgcagctgagcacctcctgggtggactttggcacctgctttgtgtcccagcagagggtgcgggaggtgtacctgatgaacctgagcggctgccgcagctactggaccatgctgatgggcgtggtgtcctgcaccagcccccgctggtggtggaaggtgtgcagcgtgcgcagccctgccccctgtggcagcggggccaaggcccccatgatgagggacacctgctgcctgaccagccctgaggccccaccccagcccagcgcccctggccccagctggaggaagaacatcgcccagggcctgggcgccgccctgcagcacaaggacacagacctgggcacctggggccccctgggcagctcctggaatggaagaacacccttccacaacggcctgagcctgggcccccatgacatgagcagcgagctgacctag

SEQ ID NO: 19355 - DNA, 5277 bp, synthetic construct
  misc_feature 1..5277: note = Description of Artificial Sequence: Synthetic coding sequence
  source 1..5277: mol_type = other DNA
atggagaccaggagcagcaagaccaggaggagcctggccagcaggaccaatgaatgccagggcaccatgtgggcccccaccagccccccagctggcagcagcagccccagccagcccacctggaagagcagcctgtacagcagcctggcctacagcgaggccttccactacagctttgctgcccggccccggcggctgacccagctggccctggcccagaggcctgagccccagctgctgcggctgcggcccagcagcctgcggacccaggacatcagccacctgctgactggagtcttcaggaacctgtacagcgctgaggtgattggagatgaggtgtctgccagcctcatcaaggcccggggctctgaaaatgaaagacatgaggagtttgtggaccagctgcagcagatccgggagctgtacaagcagaggctggatgaatttgagatgctggagcggcacatcacccaggcccaggcccgggccatcgccgagaatgaaagagtgatgagccaggccggcgtgcaggacctggagagcctggtgcggctgccccctgtgaagtctgtgagccgctggtgcatcgacagcgagctgctgaggaagcaccacctgatcagccctgaggactactacacagacacagtgcccttccacagcgcccccaagggcatcagcctgcccggctgcagcaagctgaccttcagctgtgagaagaggtctgtgcagaagaaggagctgaacaagaagctggaggacagctgcaggaagaagctggccgagtttgaagatgagctggaccacacagtggacagcctgacctggaacctgacccccaaggccaaggagaggacccgggagcccctgaagaaggccagccagcccaggaacaagaactggatgaaccacctgcgggtgccccagcgggagctggaccggctgctgctggccaggatggagagcaggaaccacttcctgaagaacccccgcttcttcccccccaacaccaggtatggaggcaagagcctggtgtttcctcccaagaagccagcccccatcggggagttccagagcacagagcctgagcagagctgtgccgacacccctgtgttcctggccaagccacccatcggcttcttcacagattatgagatcggccctgtgtatgagatggtgattgccctgcagaacaccaccaccaccagccgctacctgcgggtgctgccccccagcaccccctactttgccctgggcctgggcatgtttcctgggaagggcggcatggtggcccctggcatgacctgccagtacatcgtgcagttcttcccagactgcctgggggactttgatgacttcatcctggtggagacccagagcgcccacaccctgctgatccccctgcaggcccggcggcccccacctgtgctgaccctgagccctgtgctggactgtggctactgcctgattggaggagtgaagatgacccgcttcatctgcaagaatgtgggcttctctgtgggccgcttctgcatcatgcccaagacctcctggccacccctgtccttcaaggccatcgccaccgtgggctttgtggagcagcccccatttggcatcctgcccagcgtgtttgagctggcccctggccacgccatcctggtggaggtgctcttcagccccaagagcctgggcaaggccgagcagaccttcatcatcatgtgtgacaactgccagatcaaggagctggtgaccatcggcatcggccagctgattgccctggacctgatctacatctctggagagaagagccagcctgaccctggagagctgacagacctgacagcccagcacttcatccgctttgagcctgagaacctgcggagcacagccaggaagcagctgatcatcagaaatgccacccacgtggagctggccttctactggcagatcatgaagcccaacctgcagcccctgatgcctggagagaccttctccatggacagcatcaagtgctacccagacaaggagacagccttcagcatcatgcccaggaaaggagtgctgagcccccacacagaccacgagttcatcctgtccttcagcccccatgagctgcgggacttccacagcgtgctgcagatggtgctggaggaggtgcctgagcctgtgtcctctgaggccgagagcctgggccacagcagctacagcgtggatgatgtgattgtgctggagattgaggtgaagggctctgtggagcccttccaggtgctgctggagccctatgccctgatcatccctggagagaactacatcggcatcaacgtgaagaaggccttcaagatgtggaacaacagcaagagccccatccgctacctgtggggcaagatcagtgactgccacatcatcgaggtggagcccggcaccggggtgattgagcccagcgaggtgggggactttgagctgaacttcaccggcggcgtgcccggccccaccagccaggacctgctgtgtgaaattgaggacagccccagccctgtggtgctgcacatcgaggccgtgttcaagggccctgccctgatcatcaacgtgtctgccctgcagtttggcctgctgcggctgggccagaaggccaccaacagcatccagatcagaaatgtgtcccagctgcctgccacctggaggatgaaggagagccctgtgtccctgcaggagaggccagaagatgtgagcccctttgacatcgagcccagcagcggccagctgcacagcctgggggagtgccgggtggacatcaccctggaggccctgcactgccagcacctggagaccgtgctggagctggaggtggagaatggagcctggagctacctgcctgtgtatgcagaggtgcagaagccccacgtgtacctgcagagcagccaggtggaggtgaggaacctgtacctgggcgtgcccaccaagaccaccatcaccctcatcaatggcaccctgctgcccacccagttccactggggcaagctgctgggccaccaggccgagttctgcatggtgacagtgagccccaagcacggcctgctgggccccagcgaggagtgccagctgaagctggagctgacagcccacacccaggaggagctgacccacctggccctgccctgccacgtgtctggcatgaagaagcccctggtgctgggcatcagcggcaagccccagggcctgcaggtggccatcaccatcagcaaggagagcagtgactgcagcgtcttcagcacagagcagtggccaggccaccccaaggagctgcggctggactttggatctgctgtgcccctgcggaccagggtgacccggcagctgatcctgaccaacagaagccccatccgcacccgcttcagcctgaagtttgagtacttcggcagcccccagaacagcctgagcaagaagaccagcctgcccaacatgcccccagccctgctgaagacagtgaggatgcaggagcacctggccaagcgggagcagctggacttcatggagagcatgctgagccatggaaaaggagctgccttcttcccccacttcagccagggcatgctgggcccctaccagcagctgtgcatcgacatcaccggctgtgccaacatgtggggcgagtactgggacaacctgatctgcaccgtgggggacctgctgcctgaggtgattcctgtgcacatggctgctgtgggctgccccatcagcagcctgcggaccaccagctacaccatcgaccaggcccagaaggagcccgccatgagatttggcacccaggtgtctggaggagacacagtgaccaggaccctgcggctgaacaacagcagcccctgtgacatccggctggactgggagacctacgtgcctgaggacaaggaggaccggctggtggagctgctggtgttctacggcccccccttccccctgcgggaccaggccggaaatgagctggtgtgcccagacaccccagagggcggctgcctgctgtggagccctggccccagcagcagcagcgagttcagccatgaaacagacagctctgtggagggcagcagcagcgccagcaacagagtggcccagaagctgatcagcgtcatcctgcaggcccacgagggcgtgcccagcggccacctgtactgcatcagccccaagcaggtggtggtgcctgctgggggcagcagcaccatctacatctccttcacccccatggtgctgagccctgagatcctgcacaaggtggagtgcaccggctacgccctgggcttcatgagcctggacagcaaggtggagcgggagatccctgggaagaggcaccggctgcaggactttgctgtgggccccctgaagctggacctgcacagctatgtgcggcctgcccagctgtctgtggagctggactatggaggctccatggagttccagtgccaggccagtgacctgatccctgagcagccctgcagcggcgtgctgtctgagctggtgaccacccaccacctgaagctgaccaacaccacagagatcccccactacttccggctgatggtgtcccggcccttctctgtgtcccaggatggagccagccaggaccaccgggcccctggccctggccagaagcaggagtgtgaggaggagacagccagcgctgacaagcagctggtgctgcaggcccaggagaacatgctggtgaatgtgtccttcagcctgagcctggagctgctgagctaccagaagctgcctgctgaccagaccctgcccggggtggacatccagcagagcgccagcggggagcgggagatggtgttcacccagaacctgctgctggagtacaccaaccagaccacccaggtggtgcccctgcgggctgtggtggccgtgcctgagctgcagctgagcacctcctgggtggactttggcacctgctttgtgtcccagcagagggtgcgggaggtgtacctgatgaacctgagcggctgccgcagctactggaccatgctgatgggccagcaggagcccgccaaggctgctgtggccttccgggtgagccccaacagcggcctgctggaggcccggagcgccaatgccccacccaccagcatcgccctgcaggtgttcttcaccgcccggagcagcgagctgtatgagagcaccatggtggtggagggcgtgctgggggagaagagctgcaccctgcggctgcggggccagggcagctatgatgagcgctacatgctgccccaccagccctag

SEQ ID NO: 19356 - DNA, 237 bp, synthetic construct
  misc_feature 1..237: note = Description of Artificial Sequence: Synthetic coding sequence
  source 1..237: mol_type = other DNA
atgaggccctgcatctggatccacgtgcacctgaagccaccctgccgcctggtggagctgctgcccttcagcagcgccctgcagggcctgagccacctgagcctgggcaccaccctgcccgtcatcctgcctgagagaaatgaggagcagaacctgcaggagctgagccacaatgctgacaagtaccagatgggagactgctgcaaggaggagattgatgacagcatcttctactag

SEQ ID NO: 19357 - DNA, 2940 bp, synthetic construct
  misc_feature 1..2940: note = Description of Artificial Sequence: Synthetic coding sequence
  source 1..2940: mol_type = other DNA
atgaggggctaccatggagaccggggcagccaccccaggcctgccaggtttgctgaccagcagcacatggatgtgggccctgctgcccgggccccctacctgctgggcagccgggaggccttcagcacagagccccgcttctgtgccccccgggccggcctgggccacatcagccctgagggccccctgagcctgtctgagggccccagcgtgggccctgagggcggccctgctggggccggcgtgggcggcggcagcagcaccttccccaggatgtacccaggccagggcccctttgacacctgtgaggactgtgtgggccacccccagggcaagggggccccccggctgccccccaccctgctggaccagtttgagaagcagctgcctgtgcagcaggacggcttccacaccctgccctaccagaggggccctgctggggccggccctggccctgcccctggcaccggcacagcccctgagcccaggtctgagagccccagccgcatccgccacctggtgcacagcgtgcagaagctgtttgccaagagccacagcctggaggcccctgggaagagggactacaacggccccaaggccgagggccggggcggcagcggcggggacagctacccaggccctggcagcggcggcccccacaccagccaccaccaccaccaccaccaccaccaccaccaccaccagagccgccacggcaagaggagcaagagcaaggacagaaaaggagatggccgccaccaggccaagagcacaggctggtggagcagtgatgacaacctggacagcgacagcggcttcctggccggcggccggcccccaggagagcccggcggccccttctgcctggagggcccagatggcagctacagagacctgtccttcaagggccgcagcggcggcagcgagggccgctgcctggcctgcaccggcatgtccatgagcctggatggccagagcgtgaagaggtctgcctggcacaccatgatggtgtcccagggcagagatggctacccaggagctggccctgggaagggcctgctgggccctgagaccaaggccaaggcccggacctaccactacctgcaggtgccccaggatgactggggcggctaccccaccggcggcaaggatggagagatcccctgcaggaggatgaggagcggcagctacatcaaggccatgggagatgaggagagcggggacagtgatggcagccccaagaccagccccaaggctgtggcccggcgcttcaccaccaggaggagcagctctgtggaccaggcccgcatcaactgctgcgtgcccccacgcatccaccccaggagcagcatccctggctacagccgcagcctgaccaccggccagctgagtgatgagctgaaccagcagctggaggccgtgtgtggctctgtgtttggagagctggagagccaggccgtggatgccctggacctgcccggctgcttcaggatgaggagccacagctacctgcgggccatccaggccggctgcagccaggatgatgactgcctgcccctgctggccaccccagctgctgtgtctggccggcccggcagcagcttcaacttcaggaaggcccccccacccatccccccaggcagccaggccccaccccgcatcagcatcacagcccagagcagcacagacagcgcccacgagagcttcaccgctgctgagggccctgcccggcgctgcagcagcgcagatggcctggatggccctgccatgggcgcccggaccctggagctggcccctgtgcccccccgggccagccccaagccacccaccctcatcatcaagaccatccctggccgggaggagctgcggagcctggcccggcagaggaagtggaggcccagcattggagtgcaggtggagaccatcagtgacagcgacacagagaacagaagccggcgggagttccacagcattggagtgcaggtggaggaggacaagagaagagcccgcttcaagaggagcaacagcgtgacagctggggtgcaggccgacctggagctggagggcctggccggcctggccaccgtggccacagaggacaaggccctgcagtttggccgctccttccagagacatgccagcgagccccagcccggcccccgggcccccacctacagcgtcttcagaacagtgcacacccagggccagtgggcctaccgggagggctaccccctgccctatgagcccccagccacagatggcagccctggccctgccccagcccccaccccaggccctggggccggccggcgggacagctggattgagcggggcagccgcagcctgcctgattctggccgggccagcccctgccccagagatggagagtggttcatcaagatgctgcgggcagaggtggagaagctggagcactggtgccagcagatggagcgggaggctgaagattatgagctgcctgaggagatcctggagaagatccgctctgctgtgggcagcacccagctgctgctgagccagaaggtgcagcagttcttccggctgtgccagcagagcatggaccccacagccttccctgtgcccaccttccaggacctggccggcttctgggacctgctgcagctgagcattgaagatgtgaccctgaagttcctggagctgcagcagctgaaggccaacagctggaagctgctggagcccaaggaggagaagaaggtgcccccacccatccccaagaagcccctgcggggccggggcgtgcctgtgaaggagaggagcctggacagcgtggaccggcagaggcaggaggccaggaagaggctgctggccgccaagagagctgccagcttccgccacagcagcgccacagagagcgctgacagcattgagatctacatccctgaggcccagacccggctgtag

SEQ ID NO: 19358 - DNA, 5358 bp, synthetic construct
  misc_feature 1..5358: note = Description of Artificial Sequence: Synthetic coding sequence
  source 1..5358: mol_type = other DNA
atgggcatcagcaccgtcatcctggagatgtgcctgctgtggggccaggtgctgagcactggaggctggatccccaggaccacagattatgccagcctcatccccagcgaggtgcccctggaccccaccgtggccgagggcagccccttccccagcgagagcaccctggagagcacagtggccgagggcagccccatcagcctggagagcaccctggagagcacagtggccgagggcagcctcatccccagcgagagcaccctggagagcacagtggccgagggcagtgacagcggcctggccctgcggctggtgaatggagatggccgctgccagggccgggtggagatcctgtaccggggctcctggggcaccgtgtgtgatgacagctgggacaccaatgatgccaacgtggtgtgccggcagctgggctgcggctgggccatgtctgcccctggaaatgcctggtttggccagggcagcggccccatcgccctggatgatgtgcgctgcagcggccacgagagctacctgtggagctgcccccacaacggctggctgagccacaactgtggccatggagaagatgctggggtcatctgcagcgctgcccagccccagagcaccctgcggcctgagagctggcctgtgcgcatcagcccccctgtgcccacagagggcagcgagagcagcctggccctgcggctggtgaatggaggagaccgctgccggggccgggtggaggtgctgtaccggggctcctggggcaccgtgtgtgatgactactgggacaccaatgatgccaacgtggtgtgccggcagctgggctgcggctgggccatgtctgcccctggaaatgcccagtttggccagggcagcggccccatcgtgctggatgatgtgcgctgcagcggccacgagagctacctgtggagctgcccccacaacggctggctgacccacaactgtggccacagtgaagatgctggggtcatctgcagcgccccccagagccggcccacccccagcccagacacctggcccaccagccacgccagcacagctggccctgagagcagcctggccctgcggctggtgaatggaggagaccgctgccagggccgggtggaggtgctgtaccggggctcctggggcaccgtgtgtgatgacagctgggacaccagtgatgccaacgtggtgtgccggcagctgggctgcggctgggccaccagcgcccctggaaatgcccgcttcggccagggcagcggccccatcgtgctggatgatgtgcgctgcagcggctatgagagctacctgtggagctgcccccacaacggctggctgagccacaactgccagcacagtgaagatgctggggtcatctgcagcgctgcccacagctggagcacccccagcccagacaccctgcccaccatcaccctgcctgccagcacagtgggcagcgagagcagcctggccctgcggctggtgaatggaggagaccgctgccagggccgggtggaggtgctgtaccagggctcctggggcaccgtgtgtgatgacagctgggacaccaatgatgccaacgtggtgtgccggcagctgggctgcggctgggccatgtctgcccctggaaatgccaggtttggccagggcagcggccccatcgtgctggatgatgtgcgctgcagcggccacgagagctacctgtggagctgcccccacaacggctggctgagccacaactgtggccacagtgaagatgctggggtcatctgcagcgccagccagagccggcccacccccagcccagacacctggcccaccagccacgccagcacagctggcagcgagagcagcctggccctgcggctggtgaatggaggagaccgctgccagggccgggtggaggtgctgtaccggggctcctggggcaccgtgtgtgatgactactgggacaccaatgatgccaacgtggtgtgccggcagctgggctgcggctgggccatgtctgcccctggaaatgcccgcttcggccagggcagcggccccatcgtgctggatgatgtgcgctgcagcggccacgagagctacctgtggagctgcccccacaacggctggctgagccacaactgtggccaccatgaagatgctggggtcatctgcagcgccagccagagccagcccacccccagcccagacacctggcccaccagccacgccagcacagctggcagcgagagcagcctggccctgcggctggtgaatggaggagaccgctgccagggccgggtggaggtgctgtaccggggctcctggggcaccgtgtgtgatgactactgggacaccaatgatgccaacgtggtgtgccggcagctgggctgcggctgggccaccagcgcccctggaaatgccaggtttggccagggcagcggccccatcgtgctggatgatgtgcgctgcagcggccacgagagctacctgtggagctgcccccacaacggctggctgagccacaactgtggccaccatgaagatgctggggtcatctgcagcgccagccagagccagcccacccccagcccagacacctggcccaccagccgggccagcacagctggcagcgagagcaccctggccctgcggctggtgaatggaggagaccgctgccggggccgggtggaggtgctgtaccagggctcctggggcaccgtgtgtgatgactactgggacaccaatgatgccaacgtggtgtgccggcagctgggctgcggctgggccatgtctgcccctggaaatgcccagtttggccagggcagcggccccatcgtgctggatgatgtgcgctgcagcggccacgagagctacctgtggagctgcccccacaacggctggctgagccacaactgtggccaccatgaagatgctggggtcatctgcagcgctgcccagagccagagcacccccaggccagacacctggctgaccaccaacctgcctgccctgactgtgggcagcgagagcagcctggccctgcggctggtgaatggaggagaccgctgccggggccgggtggaggtgctgtaccggggctcctggggcaccgtgtgtgatgacagctgggacaccaatgatgccaacgtggtgtgccggcagctgggctgcggctgggccatgtctgcccctggaaatgccaggtttggccagggcagcggccccatcgtgctggatgatgtgcgctgcagcggaaatgaaagctacctgtggagctgcccccacaagggctggctgacccacaactgtggccaccatgaagatgctggggtcatctgcagcgccacccagatcaacagcaccaccacagactggtggcaccccaccaccaccaccacagcccggcccagcagcaactgtggcggcttcctgttctacgccagcggcaccttcagcagccccagctacccagcctactaccccaacaatgccaagtgtgtgtgggagattgaggtgaacagcggctaccgcatcaacctgggcttcagcaacctgaagctggaggcccaccacaactgcagctttgattatgtggagatctttgatggcagcctgaacagcagcctgctgctgggcaagatctgcaatgacacccggcagatcttcaccagcagctacaacaggatgaccatccacttcagaagtgacatctccttccagaacacaggcttcctggcctggtacaacagcttccccagtgatgccaccctgcggctggtgaacctgaacagcagctatggcctgtgtgccggccgggtggagatctaccatggaggcacctggggcaccgtgtgtgatgacagctggaccatccaggaggccgaggtggtgtgccggcagctgggctgcggccgggctgtgtctgccctgggcaatgcctactttggaagtggcagcggccccatcaccctggatgatgtggagtgcagcggcacagagagcaccctgtggcagtgcaggaacagaggctggttcagccacaactgcaaccacagagaagatgctggggtcatctgcagcggcaaccacctgagcaccccagcccccttcctgaacatcacccggcccaacacagactacagctgtggcggcttcctgagccagcccagcggggacttcagcagccccttctacccaggcaactaccccaacaatgccaagtgtgtgtgggacatcgaggtgcagaacaactacagagtgaccgtcatcttcagagatgtgcagctggagggcggctgcaactatgactacatcgaggtgtttgatggcccctaccgcagcagccccctgattgcccgggtgtgtgatggagcccggggcagcttcaccagcagcagcaacttcatgagcatccgcttcatcagtgaccacagcatcacccggcggggcttccgggcagagtactacagcagccccagcaatgacagcaccaacctgctgtgcctgcccaaccacatgcaggcctctgtgagccgcagctacctgcagagcctgggcttcagcgccagtgacctggtgatcagcacctggaatggctactatgaatgtcggccccagatcacccccaacctggtgatcttcaccatcccctacagcggctgcggcaccttcaagcaggccgacaatgacaccatcgactacagcaacttcctgacagctgctgtgtctgggggcatcatcaagagaagaacagacctgcgcatccacgtgtcctgcaggatgctgcagaacacctgggtggacaccatgtacatcgccaatgacaccatccacgtggccaacaacaccatccaggtggaggaggtgcagtatggcaactttgatgtgaacatctccttctacaccagcagcagcttcctgtaccctgtgaccagccggccctactacgtggacctgaaccaggacctgtatgtgcaggccgagatcctgcacagtgatgctgtgctgaccctgtttgtggacacctgtgtggccagcccctacagcaatgacttcaccagcctgacctatgacctgatccgcagcggctgtgtgagagatgacacctacggcccctacagcagccccagcctgagaattgcccgcttccgcttccgggccttccacttcctgaaccgcttccccagcgtgtacctgcgctgcaagatggtggtgtgccgggcctatgaccccagcagccgctgctaccggggctgtgtgctgcggagcaagagagatgtgggcagctaccaggagaaggtggatgtggtgctgggccccatccagctgcagaccccaccaagaagagaggaggagcccaggtag

SEQ ID NO: 19359 - DNA, 5358 bp, synthetic construct; identical to SEQ ID NO: 19358
  misc_feature 1..5358: note = Description of Artificial Sequence: Synthetic coding sequence
  source 1..5358: mol_type = other DNA

SEQ ID NO: 19360 - DNA, 7242 bp, synthetic construct
  misc_feature 1..7242: note = Description of Artificial Sequence: Synthetic coding sequence
  source 1..7242: mol_type = other DNA
atgggcatcagcaccgtcatcctggagatgtgcctgctgtggggccaggtgctgagcactggaggctggatccccaggaccacagattatgccagcctcatccccagcgaggtgcccctggaccccaccgtggccgagggcagccccttccccagcgagagcaccctggagagcacagtggccgagggcagccccatcagcctggagagcaccctggagagcacagtggccgagggcagcctcatccccagcgagagcaccctggagagcacagtggccgagggcagtgacagcggcctggccctgcggctggtgaatggagatggccgctgccagggccgggtggagatcctgtaccggggctcctggggcaccgtgtgtgatgacagctgggacaccaatgatgccaacgtggtgtgccggcagctgggctgcggctgggccatgtctgcccctggaaatgcctggtttggccagggcagcggccccatcgccctggatgatgtgcgctgcagcggccacgagagctacctgtggagctgcccccacaacggctggctgagccacaactgtggccatggagaagatgctggggtcatctgcagcgctgcccagccccagagcaccctgcggcctgagagctggcctgtgcgcatcagcccccctgtgcccacagagggcagcgagagcagcctggccctgcggctggtgaatggaggagaccgctgccggggccgggtggaggtgctgtaccggggctcctggggcaccgtgtgtgatgactactgggacaccaatgatgccaacgtggtgtgccggcagctgggctgcggctgggccatgtctgcccctggaaatgcccagtttggccagggcagcggccccatcgtgctggatgatgtgcgctgcagcggccacgagagctacctgtggagctgcccccacaacggctggctgacccacaactgtggccacagtgaagatgctggggtcatctgcagcgccccccagagccggcccacccccagcccagacacctggcccaccagccacgccagcacagctggccctgagagcagcctggccctgcggctggtgaatggaggagaccgctgccagggccgggtggaggtgctgtaccggggctcctggggcaccgtgtgtgatgacagctgggacaccagtgatgccaacgtggtgtgccggcagctgggctgcggctgggccaccagcgcccctggaaatgcccgcttcggccagggcagcggccccatcgtgctggatgatgtgcgctgcagcggctatgagagctacctgtggagctgcccccacaacggctggctgagccacaactgccagcacagtgaagatgctggggtcatctgcagcgctgcccacagctggagcacccccagcccagacaccctgcccaccatcaccctgcctgccagcacagtgggcagcgagagcagcctggccctgcggctggtgaatggaggagaccgctgccagggccgggtggaggtgctgtaccggggctcctggggcaccgtgtgtgatgacagctgggacaccaatgatgccaacgtggtgtgccggcagctgggctgcggctgggccatgctggcccctggaaatgccaggtttggccagggcagcggccccatcgtgctggatgatgtgcgctgcagcggaaatgaaagctacctgtggagctgcccccacaacggctggctgagccacaactgtggccacagtgaagatgctggggtcatctgcagcggccctgagagcagcctggccctgcggctggtgaatggaggagaccgctgccagggccgggtggaggtgctgtaccggggctcctggggcaccgtgtgtgatgacagctgggacaccaatgatgccaacgtggtgtgccggcagctgggctgcggctgggccaccagcgcccctggaaatgccaggtttggccagggcagcggccccatcgtgctggatgatgtgcgctgcagcggccacgagagctacctgtggagctgccccaacaacggctggctgagccacaactgtggccaccatgaagatgctggggtcatctgcagcgctgcccagagccgcagcacccccaggccagacaccctgagcaccatcaccctgccccccagcacagtgggcagcgagagcagcctgaccctgcggctggtgaatggaagtgaccgctgccagggccgggtggaggtgctgtaccggggctcctggggcaccgtgtgtgatgacagctgggacaccaatgatgccaacgtggtgtgccggcagctgggctgcggctgggccaccagcgcccctggaaatgcccgcttcggccagggcagcggccccatcgtgctggatgatgtgcgctgcagcggccacgagagctacctgtggagctgcccccacaacggctggctgagccacaactgtggccaccatgaagatgctggggtcatctgcagcgtgtcccagagccggcccacccccagcccagacacctggcccaccagccacgccagcacagctggccctgagagcagcctggccctgcggctggtgaatggaggagaccgctgccagggccgggtggaggtgctgtaccggggctcctggggcaccgtgtgtgatgacagctgggacaccagtgatgccaacgtggtgtgccggcagctgggctgcggctgggccaccagcgcccctggaaatgccaggtttggccagggcagcggccccatcgtgctggatgatgtgcgctgcagcggctatgagagctacctgtggagctgcccccacaacggctggctgagccacaactgccagcacagtgaagatgctggggtcatctgcagcgctgcccacagctggagcacccccagcccagacaccctgcccaccatcaccctgcctgccagcacagtgggcagcgagagcagcctggccctgcggctggtgaatggaggagaccgctgccagggccgggtggaggtgctgtaccagggctcctggggcaccgtgtgtgatgacagctgggacaccaatgatgccaacgtggtgtgccggcagctgggctgcggctgggccatgtctgcccctggaaatgcccgcttcggccagggcagcggccccatcgtgctggatgatgtgcgctgcagcggccacgagagctacctgtggagctgcccccacaacggctggctgagccacaactgtggccacagtgaagatgctggggtcatctgcagcgccagccagagccggcccacccccagcccagacacctggcccaccagccacgccagcacagctggcagcgagagcagcctggccctgcggctggtgaatggaggagaccgctgccagggccgggtggaggtgctgtaccggggctcctggggcaccgtgtgtgatgactactgggacaccaatgatgccaacgtggtgtgccggcagctgggctgcggctgggccatgtctgcccctggaaatgccaggtttggccagggcagcggccccatcgtgctggatgatgtgcgctgcagcggccacgagagctacctgtggagctgcccccacaacggctggctgagccacaactgtggccaccatgaagatgctggggtcatctgcagcgccagccagagccagcccacccccagcccagacacctggcccaccagccacgccagcacagctggcagcgagagcagcctggccctgcggctggtgaatggaggagaccgctgccagggccgggtggaggtgctgtaccggggctcctggggcaccgtgtgtgatgactactgggacaccaatgatgccaacgtggtgtgccggcagctgggctgcggctgggccaccagcgcccctggaaatgcccgcttcggccagggcagcggccccatcgtgctggatgatgtgcgctgcagcggccacgagagctacctgtggagctgcccccacaacggctggctgagccacaactgtggccaccatgaagatgctggggtcatctgcagcgccagccagagccagcccacccccagcccagacacctggcccaccagccacgccagcacagctggcagcgagagcagcctggccctgcggctggtgaatggaggagaccgctgccagggccgggtggaggtgctgtaccggggctcctggggcaccgtgtgtgatgactactgggacaccaatgatgccaacgtggtgtgccggcagctgggctgcggctgggccaccagcgcccctggaaatgccaggtttggccagggcagcggccccatcgtgctggatgatgtgcgctgcagcggccacgagagctacctgtggagctgcccccacaacggctggctgagccacaactgtggccaccatgaagatgctggggtcatctgcagcgccagccagagccagcccacccccagcccagacacctggcccaccagccgggccagcacagctggcagcgagagcaccctggccctgcggctggtgaatggaggagaccgctgccggggccgggtggaggtgctgtaccagggctcctggggcaccgtgtgtgatgactactgggacaccaatgatgccaacgtggtgtgccggcagctgggctgcggctgggccatgtctgcccctggaaatgcccagtttggccagggcagcggccccatcgtgctggatgatgtgcgctgcagcggccacgagagctacctgtggagctgcccccacaacggctggctgagccacaactgtggccaccatgaagatgctggggtcatctgcagcgctgcccagagccagagcacccccaggccagacacctggctgaccaccaacctgcctgccctgactgtgggcagcgagagcagcctggccctgcggctggtgaatggaggagaccgctgccggggccgggtggaggtgctgtaccggggctcctggggcaccgtgtgtgatgacagctgggacaccaatgatgccaacgtggtgtgccggcagctgggctgcggctgggccatgtctgcccctggaaatgccaggtttggccagggcagcggccccatcgtgctggatgatgtgcgctgcagcggaaatgaaagctacctgtggagctgcccccacaagggctggctgacccacaactgtggccaccatgaagatgctggggtcatctgcagcgccacccagatcaacagcaccaccacagactggtggcaccccaccaccaccaccacagcccggcccagcagcaactgtggcggcttcctgttctacgccagcggcaccttcagcagccccagctacccagcctactaccccaacaatgccaagtgtgtgtgggagattgaggtgaacagcggctaccgcatcaacctgggcttcagcaacctgaagctggaggcccaccacaactgcagctttgattatgtggagatctttgatggcagcctgaacagcagcctgctgctgggcaagatctgcaatgacacccggcagatcttcaccagcagctacaacaggatgaccatccacttcagaagtgacatctccttccagaacacaggcttcctggcctggtacaacagcttccccagtgatgccaccctgcggctggtgaacctgaacagcagctatggcctgtgtgccggccgggtggagatctaccatggaggcacctggggcaccgtgtgtgatgacagctggaccatccaggaggccgaggtggtgtgccggcagctgggctgcggccgggctgtgtctgccctgggcaatgcctactttggaagtggcagcggccccatcaccctggatgatgtggagtgcagcggcacagagagcaccctgtggcagtgcaggaacagaggctggttcagccacaactgcaaccacagagaagatgctggggtcatctgcagcggcaaccacctgagcaccccagcccccttcctgaacatcacccggcccaacacagactacagctgtggcggcttcctgagccagcccagcggggacttcagcagccccttctacccaggcaactaccccaacaatgccaagtgtgtgtgggacatcgaggtgcagaacaactacagagtgaccgtcatcttcagagatgtgcagctggagggcggctgcaactatgactacatcgaggtgtttgatggcccctaccgcagcagccccctgattgcccgggtgtgtgatggagcccggggcagcttcaccagcagcagcaacttcatgagcatccgcttcatcagtgaccacagcatcacccggcggggcttccgggcagagtactacagcagccccagcaatgacagcaccaacctgctgtgcctgcccaaccacatgcaggcctctgtgagccgcagctacctgcagagcctgggcttcagcgccagtgacctggtgatcagcacctggaatggctactatgaatgtcggccccagatcacccccaacctggtgatcttcaccatcccctacagcggctgcggcaccttcaagcaggccgacaatgacaccatcgactacagcaacttcctgacagctgctgtgtctgggggcatcatcaagagaagaacagacctgcgcatccacgtgtcctgcaggatgctgcagaacacctgggtggacaccatgtacatcgccaatgacaccatccacgtggccaacaacaccatccaggtggaggaggtgcagtatggcaactttgatgtgaacatctccttctacaccagcagcagcttcctgtaccctgtgaccagccggccctactacgtggacctgaaccaggacctgtatgtgcaggccgagatcctgcacagtgatgctgtgctgaccctgtttgtggacacctgtgtggccagcccctacagcaatgacttcaccagcctgacctatgacctgatccgcagcggctgtgtgagagatgacacctacggcccctacagcagccccagcctgagaattgcccgcttccgcttccgggccttccacttcctgaaccgcttccccagcgtgtacctgcgctgcaagatggtggtgtgccgggcctatgaccccagcagccgctgctaccggggctgtgtgctgcggagcaagagagatgtgggcagctaccaggagaaggtggatgtggtgctgggccccatccagctgcagaccccaccaagaagagaggaggagcccaggtag

SEQ ID NO: 19361 - DNA, 5358 bp, synthetic construct; identical to SEQ ID NO: 19358
  misc_feature 1..5358: note = Description of Artificial Sequence: Synthetic coding sequence
  source 1..5358: mol_type = other DNA

SEQ ID NO: 19362 - DNA, 7242 bp, synthetic construct; identical to SEQ ID NO: 19360
  misc_feature 1..7242: note = Description of Artificial Sequence: Synthetic coding sequence
  source 1..7242: mol_type = other DNA

SEQ ID NO: 19363 - DNA, 7242 bp, synthetic construct; identical to SEQ ID NO: 19360
  misc_feature 1..7242: note = Description of Artificial Sequence: Synthetic coding sequence
  source 1..7242: mol_type = other DNA

SEQ ID NO: 19364 - DNA, 7212 bp, synthetic construct
  misc_feature 1..7212: note = Description of Artificial Sequence: Synthetic coding sequence
  source 1..7212: mol_type = other DNA
atgggcatcagcaccgtcatcctggagatgtgcctgctgtggggccaggtgctgagcactggaggctggatccccaggaccacagattatgccagcctcatccccagcgaggtgcccctggaccccaccgtggccgagggcagccccttccccagcgagagcaccctggagagcacagtggccgagggcagccccatcagcctggagagcaccctggagagcacagtggccgagggcagcctcatccccagcgagagcaccctggagagcacagtggccgagggcagtgacagcggcctggccctgcggctggtgaatggagatggccgctgccagggccgggtggagatcctgtaccggggctcctggggcaccgtgtgtgatgacagctgggacaccaatgatgccaacgtggtgtgccggcagctgggctgcggctgggccatgtctgcccctggaaatgcctggtttggccagggcagcggccccatcgccctggatgatgtgcgctgcagcggccacgagagctacctgtggagctgcccccacaacggctggctgagccacaactgtggccatggagaagatgctggggtcatctgcagcgctgcccagccccagagcaccctgcggcctgagagctggcctgtgcgcatcagcccccctgtgcccacagagggcagcgagagcagcctggccctgcggctggtgaatggaggagaccgctgccggggccgggtggaggtgctgtaccggggctcctggggcaccgtgtgtgatgactactgggacaccaatgatgccaacgtggtgtgccggcagctgggctgcggctgggccatgtctgcccctggaaatgcccagtttggccagggcagcggccccatcgtgctggatgatgtgcgctgcagcggccacgagagctacctgtggagctgcccccacaacggctggctgacccacaactgtggccacagtgaagatgctggggtcatctgcagcgccccccagagccggcccacccccagcccagacacctggcccaccagccacgccagcacagctggccctgagagcagcctggccctgcggctggtgaatggaggagaccgctgccagggccgggtggaggtgctgtaccggggctcctggggcaccgtgtgtgatgacagctgggacaccagtgatgccaacgtggtgtgccggcagctgggctgcggctgggccaccagcgcccctggaaatgcccgcttcggccagggcagcggccccatcgtgctggatgatgtgcgctgcagcggctatgagagctacctgtggagctgcccccacaacggctggctgagccacaactgccagcacagtgaagatgctggggtcatctgcagcgacaccctgcccaccatcaccctgcctgccagcacagtgggcagcgagagcagcctggccctgcggctggtgaatggaggagaccgctgccagggccgggtggaggtgctgtaccggggctcctggggcaccgtgtgtgatgacagctgggacaccaatgatgccaacgtggtgtgccggcagctgggctgcggctgggccatgctggcccctggaaatgccaggtttggccagggcagcggccccatcgtgctggatgatgtgcgctgcagcggaaatgaaagctacctgtggagctgcccccacaacggctggctgagccacaactgtggccacagtgaagatgctggggtcatctgcagcggccctgagagcagcctggccctgcggctggtgaatggaggagaccgctgccagggccgggtggaggtgctgtaccggggctcctggggcaccgtgtgtgatgacagctgggacaccaatgatgccaacgtggtgtgccggcagctgggctgcggctgggccaccagcgcccctggaaatgccaggtttggccagggcagcggccccatcgtgctggatgatgtgcgctgcagcggccacgagagctacctgtggagctgccccaacaacggctggctgagccacaactgtggccaccatgaagatgctggggtcatctgcagcgctgcccagagccgcagcacccccaggccagacaccctgagcaccatcaccctgccccccagcacagtgggcagcgagagcagcctgaccctgcggctggtgaatggaagtgaccgctgccagggccgggtggaggtgctgtaccggggctcctggggcaccgtgtgtgatgacagctgggacaccaatgatgccaacgtggtgtgccggcagctgggctgcggctgggccaccagcgcccctggaaatgcccgcttcggccagggcagcggccccatcgtgctggatgatgtgcgctgcagcggccacgagagctacctgtggagctgcccccacaacggctggctgagccacaactgtggccaccatgaagatgctggggtcatctgcagcgtgtcccagagccggcccacccccagcccagacacctggcccaccagccacgccagcacagctggccctgagagcagcctggccctgcggctggtgaatggaggagaccgctgccagggccgggtggaggtgctgtaccggggctcctggggcaccgtgtgtgatgacagctgggacaccagtgatgccaacgtggtgtgccggcagctgggctgcggctgggccaccagcgcccctggaaatgccaggtttggccagggcagcggccccatcgtgctggatgatgtgcgctgcagcggctatgagagctacctgtggagctgcccccacaacggctggctgagccacaactgccagcacagtgaagatgctggggtcatctgcagcgctgcccacagctggagcacccccagcccagacaccctgcccaccatcaccctgcctgccagcacagtgggcagcgagagcagcctggccctgcggctggtgaatggaggagaccgctgccagggccgggtggaggtgctgtaccagggctcctggggcaccgtgtgtgatgacagctgggacaccaatgatgccaacgtggtgtgccggcagctgggctgcggctgggccatgtctgcccctggaaatgcccgcttcggccagggcagcggccccatcgtgctggatgatgtgcgctgcagcggccacgagagctacctgtggagctgcccccacaacggctggctgagccacaactgtggccacagtgaagatgctggggtcatctgcagcgccagccagagccggcccacccccagcccagacacctggcccaccagccacgccagcacagctggcagcgagagcagcctggccctgcggctggtgaatggaggagaccgctgccagggccgggtggaggtgctgtaccggggctcctggggcaccgtgtgtgatgactactgggacaccaatgatgccaacgtggtgtgccggcagctgggctgcggctgggccatgtctgcccctggaaatgccaggtttggccagggcagcggccccatcgtgctggatgatgtgcgctgcagcggccacgagagctacctgtggagctgcccccacaacggctggctgagccacaactgtggccaccatgaagatgctggggtcatctgcagcgccagccagagccagcccacccccagcccagacacctggcccaccagccacgccagcacagctggcagcgagagcagcctggccctgcggctggtgaatggaggagaccgctgccagggccgggtggaggtgctgtaccggggctcctggggcaccgtgtgtgatgactactgggacaccaatgatgccaacgtggtgtgccggcagctgggctgcggctgggccaccagcgcccctggaaatgcccgcttcggccagggcagcggccccatcgtgctggatgatgtgcgctgcagcggccacgagagctacctgtggagctgcccccacaacggctggctgagccacaactgtggccaccatgaagatgctggggtcatctgcagcgccagccagagccagcccacccccagcccagacacctggcccaccagccacgccagcacagctggcagcgagagcagcctggccctgcggctggtgaatggaggagaccgctgccagggccgggtggaggtgctgtaccggggctcctggggcaccgtgtgtgatgactactgggacaccaatgatgccaacgtggtgtgccggcagctgggctgcggctgggccaccagcgcccctggaaatgccaggtttggccagggcagcggccccatcgtgctggatgatgtgcgctgcagcggccacgagagctacctgtggagctgcccccacaacggctggctgagccacaactgtggccaccatgaagatgctggggtcatctgcagcgccagccagagccagcccacccccagcccagacacctggcccaccagccgggccagcacagctggcagcgagagcaccctggccctgcggctggtgaatggaggagaccgctgccggggccgggtggaggtgctgtaccagggctcctggggcaccgtgtgtgatgactactgggacaccaatgatgccaacgtggtgtgccggcagctgggctgcggctgggccatgtctgcccctggaaatgcccagtttggccagggcagcggccccatcgtgctggatgatgtgcgctgcagcggccacgagagctacctgtggagctgcccccacaacggctggctgagccacaactgtggccaccatgaagatgctggggtcatctgcagcgctgcccagagccagagcacccccaggccagacacctggctgaccaccaacctgcctgccctgactgtgggcagcgagagcagcctggccctgcggctggtgaatggaggagaccgctgccggggccgggtggaggtgctgtaccggggctcctggggcaccgtgtgtgatgacagctgggacaccaatgatgccaacgtggtgtgccggcagctgggctgcggctgggccatgtctgcccctggaaatgccaggtttggccagggcagcggccccatcgtgctggatgatgtgcgctgcagcggaaatgaaagctacctgtggagctgcccccacaagggctggctgacccacaactgtggccaccatgaagatgctggggtcatctgcagcgccacccagatcaacagcaccaccacagactggtggcaccccaccaccaccaccacagcccggcccagcagcaactgtggcggcttcctgttctacgccagcggcaccttcagcagccccagctacccagcctactaccccaacaatgccaagtgtgtgtgggagattgaggtgaacagcggctaccgcatcaacctgggcttcagcaacctgaagctggaggcccaccacaactgcagctttgattatgtggagatctttgatggcagcctgaacagcagcctgctgctgggcaagatctgcaatgacacccggcagatcttcaccagcagctacaacaggatgaccatccacttcagaagtgacatctccttccagaacacaggcttcctggcctggtacaacagcttccccagtgatgccaccctgcggctggtgaacctgaacagcagctatggcctgtgtgccggccgggtggagatctaccatggaggcacctggggcaccgtgtgtgatgacagctggaccatccaggaggccgaggtggtgtgccggcagctgggctgcggccgggctgtgtctgccctgggcaatgcctactttggaagtggcagcggccccatcaccctggatgatgtggagtgcagcggcacagagagcaccctgtggcagtgcaggaacagaggctggttcagccacaactgcaaccacagagaagatgctggggtcatctgcagcggcaaccacctgagcaccccagcccccttcctgaacatcacccggcccaacacagactacagctgtggcggcttcctgagccagcccagcggggacttcagcagccccttctacccaggcaactaccccaacaatgccaagtgtgtgtgggacatcgaggtgcagaacaactacagagtgaccgtcatcttcagagatgtgcagctggagggcggctgcaactatgactacatcgaggtgtttgatggcccctaccgcagcagccccctgattgcccgggtgtgtgatggagcccggggcagcttcaccagcagcagcaacttcatgagcatccgcttcatcagtgaccacagcatcacccggcggggcttccgggcagagtactacagcagccccagcaatgacagcaccaacctgctgtgcctgcccaaccacatgcaggcctctgtgagccgcagctacctgcagagcctgggcttcagcgccagtgacctggtgatcagcacctggaatggctactatgaatgtcggccccagatcacccccaacctggtgatcttcaccatcccctacagcggctgcggcaccttcaagcaggccgacaatgacaccatcgactacagcaacttcctgacagctgctgtgtctgggggcatcatcaagagaagaacagacctgcgcatccacgtgtcctgcaggatgctgcagaacacctgggtggacaccatgtacatcgccaatgacaccatccacgtggccaacaacaccatccaggtggaggaggtgcagtatggcaactttgatgtgaacatctccttctacaccagcagcagcttcctgtaccctgtgaccagccggccctactacgtggacctgaaccaggacctgtatgtgcaggccgagatcctgcacagtgatgctgtgctgaccctgtttgtggacacctgtgtggccagcccctacagcaatgacttcaccagcctgacctatgacctgatccgcagcggctgtgtgagagatgacacctacggcccctacagcagccccagcctgagaattgcccgcttccgcttccgggccttccacttcctgaaccgcttccccagcgtgtacctgcgctgcaagatggtggtgtgccgggcctatgaccccagcagccgctgctaccggggctgtgtgctgcggagcaagagagatgtgggcagctaccaggagaaggtggatgtggtgctgggccccatccagctgcagaccccaccaagaagagaggaggagcccaggtag

SEQ ID NO: 19365 - DNA, 1680 bp, synthetic construct
  misc_feature 1..1680: note = Description of Artificial Sequence: Synthetic coding sequence
  source 1..1680: mol_type = other DNA
atgaccatccacttcagaagtgacatctccttccagaacacaggcttcctggcctggtacaacagcttccccagtgatgccaccctgcggctggtgaacctgaacagcagctatggcctgtgtgccggccgggtggagatctaccatggaggcacctggggcaccgtgtgtgatgacagctggaccatccaggaggccgaggtggtgtgccggcagctgggctgcggccgggctgtgtctgccctgggcaatgcctactttggaagtggcagcggccccatcaccctggatgatgtggagtgcagcggcacagagagcaccctgtggcagtgcaggaacagaggctggttcagccacaactgcaaccacagagaagatgctggggtcatctgcagcggcaaccacctgagcaccccagcccccttcctgaacatcacccggcccaacacagactacagctgtggcggcttcctgagccagcccagcggggacttcagcagccccttctacccaggcaactaccccaacaatgccaagtgtgtgtgggacatcgaggtgcagaacaactacagagtgaccgtcatcttcagagatgtgcagctggagggcggctgcaactatgactacatcgaggtgtttgatggcccctaccgcagcagccccctgattgcccgggtgtgtgatggagcccggggcagcttcaccagcagcagcaacttcatgagcatccgcttcatcagtgaccacagcatcacccggcggggcttccgggcagagtactacagcagccccagcaatgacagcaccaacctgctgtgcctgcccaaccacatgcaggcctctgtgagccgcagctacctgcagagcctgggcttcagcgccagtgacctggtgatcagcacctggaatggctactatgaatgtcggccccagatcacccccaacctggtgatcttcaccatcccctacagcggctgcggcaccttcaagcaggccgacaatgacaccatcgactacagcaacttcctgacagctgctgtgtctgggggcatcatcaagagaagaacagacctgcgcatccacgtgtcctgcaggatgctgcagaacacctgggtggacaccatgtacatcgccaatgacaccatccacgtggccaacaacaccatccaggtggaggaggtgcagtatggcaactttgatgtgaacatctccttctacaccagcagcagcttcctgtaccctgtgaccagccggccctactacgtggacctgaaccaggacctgtatgtgcaggccgagatcctgcacagtgatgctgtgctgaccctgtttgtggacacctgtgtggccagcccctacagcaatgacttcaccagcctgacctatgacctgatccgcagcggctgtgtgagagatgacacctacggcccctacagcagccccagcctgagaattgcccgcttccgcttccgggccttccacttcctgaaccgcttccccagcgtgtacctgcgctgcaagatggtggtgtgccgggcctatgaccccagcagccgctgctaccggggctgtgtgctgcggagcaagagagatgtgggcagctaccaggagaaggtggatgtggtgctgggccccatccagctgcagaccccaccaagaagagaggaggagcccaggtag

SEQ ID NO: 19366 - DNA, 3402 bp, synthetic construct
  misc_feature 1..3402: note = Description of Artificial Sequence: Synthetic coding sequence
  source 1..3402: mol_type = other DNA
atgggcatcagcaccgtcatcctggagatgtgcctgctgtggggccaggtgctgagcactggaggctggatccccaggaccacagattatgccagcctcatccccagcgaggtgcccctggaccccaccgtggccgagggcagccccttccccagcgagagcaccctggagagcacagtggccgagggcagccccatcagcctggagagcaccctggagagcacagtggccgagggcagcctcatccccagcgagagcaccctggagagcacagtggccgagggcagtgacagcggcctggccctgcggctggtgaatggagatggccgctgccagggccgggtggagatcctgtaccggggctcctggggcaccgtgtgtgatgacagctgggacaccaatgatgccaacgtggtgtgccggcagctgggctgcggctgggccatgtctgcccctggaaatgcctggtttggccagggcagcggccccatcgccctggatgatgtgcgctgcagcggccacgagagctacctgtggagctgcccccacaacggctggctgagccacaactgtggccatggagaagatgctggggtcatctgcagcgccccccagagccggcccacccccagcccagacacctggcccaccagccacgccagcacagctggcagcgagagcagcctggccctgcggctggtgaatggaggagaccgctgccagggccgggtggaggtgctgtaccggggctcctggggcaccgtgtgtgatgactactgggacaccaatgatgccaacgtggtgtgccggcagctgggctgcggctgggccaccagcgcccctggaaatgcccgcttcggccagggcagcggccccatcgtgctggatgatgtgcgctgcagcggccacgagagctacctgtggagctgcccccacaacggctggctgagccacaactgtggccaccatgaagatgctggggtcatctgcagcgccagccagagccagcccacccccagcccagacacctggcccaccagccgggccagcacagctggcagcgagagcaccctggccctgcggctggtgaatggaggagaccgctgccggggccgggtggaggtgctgtaccagggctcctggggcaccgtgtgtgatgactactgggacaccaatgatgccaacgtggtgtgccggcagctgggctgcggctgggccatgtctgcccctggaaatgcccagtttggccagggcagcggccccatcgtgctggatgatgtgcgctgcagcggccacgagagctacctgtggagctgcccccacaacggctggctgagccacaactgtggccaccatgaagatgctggggtcatctgcagcgccacccagatcaacagcaccaccacagactggtggcaccccaccaccaccaccacagcccggcccagcagcaactgtggcggcttcctgttctacgccagcggcaccttcagcagccccagctacccagcctactaccccaacaatgccaagtgtgtgtgggagattgaggtgaacagcggctaccgcatcaacctgggcttcagcaacctgaagctggaggcccaccacaactgcagctttgattatgtggagatctttgatggcagcctgaacagcagcctgctgctgggcaagatctgcaatgacacccggcagatcttcaccagcagctacaacaggatgaccatccacttcagaagtgacatctccttccagaacacaggcttcctggcctggtacaacagcttccccagtgatgccaccctgcggctggtgaacctgaacagcagctatggcctgtgtgccggccgggtggagatctaccatggaggcacctggggcaccgtgtgtgatgacagctggaccatccaggaggccgaggtggtgtgccggcagctgggctgcggccgggctgtgtctgccctgggcaatgcctactttggaagtggcagcggccccatcaccctggatgatgtggagtgcagcggcacagagagcaccctgtggcagtgcaggaacagaggctggttcagccacaactgcaaccacagagaagatgctggggtcatctgcagcggcaaccacctgagcaccccagcccccttcctgaacatcacccggcccaacacagactacagctgtggcggcttcctgagccagcccagcggggacttcagcagccccttctacccaggcaactaccccaacaatgccaagtgtgtgtgggacatcgaggtgcagaacaactacagagtgaccgtcatcttcagagatgtgcagctggagggcggctgcaactatgactacatcgaggtgtttgatggcccctaccgcagcagccccctgattgcccgggtgtgtgatggagcccggggcagcttcaccagcagcagcaacttcatgagcatccgcttcatcagtgaccacagcatcacccggcggggcttccgggcagagtactacagcagccccagcaatgacagcaccaacctgctgtgcctgcccaaccacatgcaggcctctgtgagccgcagctacctgcagagcctgggcttcagcgccagtgacctggtgatcagcacctggaatggctactatgaatgtcggccccagatcacccccaacctggtgatcttcaccatcccctacagcggctgcggcaccttcaagcaggccgacaatgacaccatcgactacagcaacttcctgacagctgctgtgtctgggggcatcatcaagagaagaacagacctgcgcatccacgtgtcctgcaggatgctgcagaacacctgggtggacaccatgtacatcgccaatgacaccatccacgtggccaacaacaccatccaggtggaggaggtgcagtatggcaactttgatgtgaacatctccttctacaccagcagcagcttcctgtaccctgtgaccagccggccctactacgtggacctgaaccaggacctgtatgtgcaggccgagatcctgcacagtgatgctgtgctgaccctgtttgtggacacctgtgtggccagcccctacagcaatgacttcaccagcctgacctatgacctgatccgcagcggctgtgtgagagatgacacctacggcccctacagcagccccagcctgagaattgcccgcttccgcttccgggccttccacttcctgaaccgcttccccagcgtgtacctgcgctgcaagatggtggtgtgccgggcctatgaccccagcagccgctgctaccggggctgtgtgctgcggagcaagagagatgtgggcagctaccaggagaaggtggatgtggtgctgggccccatccagctgcagaccccaccaagaagagaggaggagcccaggtag

SEQ ID NO: 19367 - DNA, 7242 bp, synthetic construct; identical to SEQ ID NO: 19360
  misc_feature 1..7242: note = Description of Artificial Sequence: Synthetic coding sequence
  source 1..7242: mol_type = other DNA

SEQ ID NO: 19368 - DNA, 7629 bp, synthetic construct
  misc_feature 1..7629: note = Description of Artificial Sequence: Synthetic coding sequence
  source 1..7629: mol_type = other DNA
atgggcatcagcaccgtcatcctggagatgtgcctgctgtggggccaggtgctgagcactggaggctggatccccaggaccacagattatgccagcctcatccccagcgaggtgcccctggaccccaccgtggccgagggcagccccttccccagcgagagcaccctggagagcacagtggccgagggcagccccatcagcctggagagcaccctggagagcacagtggccgagggcagcctcatccccagcgagagcaccctggagagcacagtggccgagggcagtgacagcggcctggccctgcggctggtgaatggagatggccgctgccagggccgggtggagatcctgtaccggggctcctggggcaccgtgtgtgatgacagctgggacaccaatgatgccaacgtggtgtgccggcagctgggctgcggctgggccatgtctgcccctggaaatgcctggtttggccagggcagcggccccatcgccctggatgatgtgcgctgcagcggccacgagagctacctgtggagctgcccccacaacggctggctgagccacaactgtggccatggagaagatgctggggtcatctgcagcgctgcccagccccagagcaccctgcggcctgagagctggcctgtgcgcatcagcccccctgtgcccacagagggcagcgagagcagcctggccctgcggctggtgaatggaggagaccgctgccggggccgggtggaggtgctgtaccggggctcctggggcaccgtgtgtgatgactactgggacaccaatgatgccaacgtggtgtgccggcagctgggctgcggctgggccatgtctgcccctggaaatgcccagtttggccagggcagcggccccatcgtgctggatgatgtgcgctgcagcggccacgagagctacctgtggagctgcccccacaacggctggctgacccacaactgtggccacagtgaagatgctggggtcatctgcagcgccccccagagccggcccacccccagcccagacacctggcccaccagccacgccagcacagctggccctgagagcagcctggccctgcggctggtgaatggaggagaccgctgccagggccgggtggaggtgctgtaccggggctcctggggcaccgtgtgtgatgacagctgggacaccagtgatgccaacgtggtgtgccggcagctgggctgcggctgggccaccagcgcccctggaaatgcccgcttcggccagggcagcggccccatcgtgctggatgatgtgcgctgcagcggctatgagagctacctgtggagctgcccccacaacggctggctgagccacaactgccagcacagtgaagatgctggggtcatctgcagcgctgcccacagctggagcacccccagcccagacaccctgcccaccatcaccctgcctgccagcacagtgggcagcgagagcagcctggccctgcggctggtgaatggaggagaccgctgccagggccgggtggaggtgctgtaccggggctcctggggcaccgtgtgtgatgacagctgggacaccaatgatgccaacgtggtgtgccggcagctgggctgcggctgggccatgctggcccctggaaatgccaggtttggccagggcagcggccccatcgtgctggatgatgtgcgctgcagcggaaatgaaagctacctgtggagctgcccccacaacggctggctgagccacaactgtggccacagtgaagatgctggggtcatctgcagcggccctgagagcagcctggccctgcggctggtgaatggaggagaccgctgccagggccgggtggaggtgctgtaccggggctcctggggcaccgtgtgtgatgacagctgggacaccaatgatgccaacgtggtgtgccggcagctgggctgcggctgggccaccagcgcccctggaaatgccaggtttggccagggcagcggccccatcgtgctggatgatgtgcgctgcagcggccacgagagctacctgtggagctgccccaacaacggctggctgagccacaactgtggccaccatgaagatgctggggtcatctgcagcgctgcccagagccgcagcacccccaggccagacaccctgagcaccatcaccctgccccccagcacagtgggcagcgagagcagcctgaccctgcggctggtgaatggaagtgaccgctgccagggccgggtggaggtgctgtaccggggctcctggggcaccgtgtgtgatgacagctgggacaccaatgatgccaacgtggtgtgccggcagctgggctgcggctgggccaccagcgcccctggaaatgcccgcttcggccagggcagcggccccatcgtgctggatgatgtgcgctgcagcggccacgagagctacctgtggagctgcccccacaacggctggctgagccacaactgtggccaccatgaagatgctggggtcatctgcagcgtgtcccagagccggcccacccccagcccagacacctggcccaccagccacgccagcacagctggccctgagagcagcctggccctgcggctggtgaatggaggagaccgctgccagggccgggtggaggtgctgtaccggggctcctggggcaccgtgtgtgatgacagctgggacaccagtgatgccaacgtggtgtgccggcagctgggctgcggctgggccaccagcgcccctggaaatgccaggtttggccagggcagcggccccatcgtgctggatgatgtgcgctgcagcggctatgagagctacctgtggagctgcccccacaacggctggctgagccacaactgccagcacagtgaagatgctggggtcatctgcagcgctgcccacagctggagcacccccagcccagacaccctgcccaccatcaccctgcctgccagcacagtgggcagcgagagcagcctggccctgcggctggtgaatggaggagaccgctgccagggccgggtggaggtgctgtaccagggctcctggggcaccgtgtgtgatgacagctgggacaccaatgatgccaacgtggtgtgccggcagctgggctgcggctgggccatgtctgcccctggaaatgcccgcttcggccagggcagcggccccatcgtgctggatgatgtgcgctgcagcggccacgagagctacctgtggagctgcccccacaacggctggctgagccacaactgtggccacagtgaagatgctggggtcatctgcagcgccagccagagccggcccacccccagcccagacacctggcccaccagccacgccagcacagctggcagcgagagcagcctggccctgcggctggtgaatggaggagaccgctgccagggccgggtggaggtgctgtaccggggctcctggggcaccgtgtgtgatgactactgggacaccaatgatgccaacgtggtgtgccggcagctgggctgcggctgggccatgtctgcccctggaaatgccaggtttggccagggcagcggccccatcgtgctggatgatgtgcgctgcagcggccacgagagctacctgtggagctgcccccacaacggctggctgagccacaactgtggccaccatgaagatgctggggtcatctgcagcgccagccagagccagcccacccccagcccagacacctggcccaccagccacgccagcacagctggcagcgagagcagcctggccctgcggctggtgaatggaggagaccgctgccagggccgggtggaggtgctgtaccggggctcctggggcaccgtgtgtgatgactactgggacaccaatgatgccaacgtggtgtgccggcagctgggctgcggctgggccaccagcgcccctggaaatgcccgcttcggccagggcagcggccccatcgtgctggatgatgtgcgctgcagcggccacgagagctacctgtggagctgcccccacaacggctggctgagccacaactgtggccaccatgaagatgctggggtcatctgcagcgccagccagagccagcccacccccagcccagacacctggcccaccagccacgccagcacagctggcagcgagagcagcctggccctgcggctggtgaatggaggagaccgctgccagggccgggtggaggtgctgtaccggggctcctggggcaccgtgtgtgatgactactgggacaccaatgatgccaacgtggtgtgccggcagctgggctgcggctgggccaccagcgcccctggaaatgccaggtttggccagggcagcggccccatcgtgctggatgatgtgcgctgcagcggccacgagagctacctgtggagctgcccccacaacggctggctgagccacaactgtggccaccatgaagatgctggggtcatctgcagcgccagccagagccagcccacccccagcccagacacctggcccaccagccacgccagcacagctggcagcgagagcagcctggccctgcggctggtgaatggaggagaccgctgccagggccgggtggaggtgctgtaccggggctcctggggcaccgtgtgtgatgactactgggacaccaatgatgccaacgtggtgtgccggcagctgggctgcggctgggccaccagcgcccctggaaatgcccgcttcggccagggcagcggccccatcgtgctggatgatgtgcgctgcagcggccacgagagctacctgtggagctgcccccacaacggctggctgagccacaactgtggccaccatgaagatgctggggtcatctgcagcgccagccagagccagcccacccccagcccagacacctggcccaccagccgggccagcacagctggcagcgagagcaccctggccctgcggctggtgaatggaggagaccgctgccggggccgggtggaggtgctgtaccagggctcctggggcaccgtgtgtgatgactactgggacaccaatgatgccaacgtggtgtgccggcagctgggctgcggctgggccatgtctgcccctggaaatgcccagtttggccagggcagcggccccatcgtgctggatgatgtgcgctgcagcggccacgagagctacctgtggagctgcccccacaacggctggctgagccacaactgtggccaccatgaagatgctggggtcatctgcagcgctgcccagagccagagcacccccaggccagacacctggctgaccaccaacctgcctgccctgactgtgggcagcgagagcagcctggccctgcggctggtgaatggaggagaccgctgccggggccgggtggaggtgctgtaccggggctcctggggcaccgtgtgtgatgacagctgggacaccaatgatgccaacgtggtgtgccggcagctgggctgcggctgggccatgtctgcccctggaaatgcccgcttcggccagggcagcggccccatcgtgctggatgatgtgcgctgcagcggaaatgaaagctacctgtggagctgcccccacaagggctggctgacccacaactgtggccaccatgaagatgctggggtcatctgcagcgccacccagatcaacagcaccaccacagactggtggcaccccaccaccaccaccacagcccggcccagcagcaactgtggcggcttcctgttctacgccagcggcaccttcagcagccccagctacccagcctactaccccaacaatgccaagtgtgtgtgggagattgaggtgaacagcggctaccgcatcaacctgggcttcagcaacctgaagctggaggcccaccacaactgcagctttgattatgtggagatctttgatggcagcctgaacagcagcctgctgctgggcaagatctgcaatgacacccggcagatcttcaccagcagctacaacaggatgaccatccacttcagaagtgacatctccttccagaacacaggcttcctggcctggtacaacagcttccccagtgatgccaccctgcggctggtgaacctgaacagcagctatggcctgtgtgccggccgggtggagatctaccacggcggcacctggggcaccgtgtgtgatgacagctggaccatccaggaggccgaggtggtgtgccggcagctgggctgcggccgggctgtgtctgccctgggcaatgcctacttcggcagcggcagcggccccatcaccctggatgatgtggagtgcagcggcacagagagcaccctgtggcagtgcaggaacagaggctggttcagccacaactgcaaccaccgggaggatgctggggtcatctgcagcggcaaccacctgagcaccccagcccccttcctgaacatcacccggcccaacacagactacagctgtggcggcttcctgagccagcccagcggggacttcagcagccccttctacccaggcaactaccccaacaatgccaagtgtgtgtgggacatcgaggtgcagaacaactacagagtgaccgtcatcttcagagatgtgcagctggagggcggctgcaactatgactacatcgaggtgtttgatggcccctaccgcagcagccccctcatcgcccgggtgtgtgatggagcccggggcagcttcaccagcagcagcaacttcatgagcatccgcttcatcagtgaccacagcatcacccggcggggcttccgggcagagtactacagcagccccagcaatgacagcaccaacctgctgtgcctgcccaaccacatgcaggcctctgtgagccgcagctacctgcagagcctgggcttcagcgccagtgacctggtgatcagcacctggaatggctactatgagtgccggccccagatcacccccaacctggtgatcttcaccatcccctacagcggctgcggcaccttcaagcaggccgacaatgacaccatcgactacagcaacttcctgacagctgctgtgtctgggggcatcatcaagagaagaacagacctgcgcatccacgtgtcctgcaggatgctgcagaacacctgggtggacaccatgtacatcgccaatgacaccatccacgtggccaacaacaccatccaggtggaggaggtgcagtatggcaactttgatgtgaacatctccttctacaccagcagcagcttcctgtaccctgtgaccagccggccctactacgtggacctgaaccaggacctgtatgtgcaggccgagatcctgcacagtgatgctgtgctgaccctgtttgtggacacctgtgtggccagcccctacagcaatgacttcaccagcctgacctatgacctgatccgcagcggctgtgtgagagatgacacctacggcccctacagcagccccagcctgcgcatcgcccgcttccgcttccgggccttccacttcctgaaccgcttccccagcgtgtacctgcgctgcaagatggtggtgtgccgggcctatgaccccagcagccgctgctaccggggctgtgtgctgcggagcaagagagatgtgggcagctaccaggagaaggtggatgtggtgctgggccccatccagctgcagaccccaccccggcgggaggaggagcccaggtag

SEQ ID NO: 19369 - DNA, 7239 bp, synthetic construct
  misc_feature 1..7239: note = Description of Artificial Sequence: Synthetic coding sequence
  source 1..7239: mol_type = other DNA
atgggcatcagcaccgtcatcctggagatgtgcctgctgtggggccaggtgctgagcactggaggctggatccccaggaccacagattatgccagcctcatccccagcgaggtgcccctggaccccaccgtggccgagggcagccccttccccagcgagagcaccctggagagcacagtggccgagggcagccccatcagcctggagagcaccctggagagcacagtggccgagggcagcctcatccccagcgagagcaccctggagagcacagtggccgagggcagtgacagcggcctggccctgcggctggtgaatggagatggccgctgccagggccgggtggagatcctgtaccggggctcctggggcaccgtgtgtgatgacagctgggacaccaatgatgccaacgtggtgtgccggcagctgggctgcggctgggccatgtctgcccctggaaatgcctggtttggccagggcagcggccccatcgccctggatgatgtgcgctgcagcggccacgagagctacctgtggagctgcccccacaacggctggctgagccacaactgtggccatggagaagatgctggggtcatctgcagcgctgcccagccccagagcaccctgcggcctgagagctggcctgtgcgcatcagcccccctgtgcccacagagggcagcgagagcagcctggccctgcggctggtgaatggaggagaccgctgccggggccgggtggaggtgctgtaccggggctcctggggcaccgtgtgtgatgactactgggacaccaatgatgccaacgtggtgtgccggcagctgggctgcggctgggccatgtctgcccctggaaatgcccagtttggccagggcagcggccccatcgtgctggatgatgtgcgctgcagcggccacgagagctacctgtggagctgcccccacaacggctggctgacccacaactgtggccacagtgaagatgctggggtcatctgcagcgccccccagagccggcccacccccagcccagacacctggcccaccagccacgccagcacagctggccctgagagcagcctggccctgcggctggtgaatggaggagaccgctgccagggccgggtggaggtgctgtaccggggctcctggggcaccgtgtgtgatgacagctgggacaccagtgatgccaacgtggtgtgccggcagctgggctgcggctgggccaccagcgcccctggaaatgcccgcttcggccagggcagcggccccatcgtgctggatgatgtgcgctgcagcggctatgagagctacctgtggagctgcccccacaacggctggctgagccacaactgccagcacagtgaagatgctggggtcatctgcagcgctgcccacagctggagcacccccagcccagacaccctgcccaccatcaccctgcctgccagcacagtgggcagcgagagcagcctggccctgcggctggtgaatggaggagaccgctgccagggccgggtggaggtgctgtaccggggctcctggggcaccgtgtgtgatgacagctgggacaccaatgatgccaacgtggtgtgccggcagctgggctgcggctgggccatgctggcccctggaaatgccaggtttggccagggcagcggccccatcgtgctggatgatgtgcgctgcagcggaaatgaaagctacctgtggagctgcccccacaacggctggctgagccacaactgtggccacagtgaagatgctggggtcatctgcagcggccctgagagcagcctggccctgcggctggtgaatggaggagaccgctgccagggccgggtggaggtgctgtaccggggctcctggggcaccgtgtgtgatgacagctgggacaccaatgatgccaacgtggtgtgccggcagctgggctgcggctgggccaccagcgcccctggaaatgccaggtttggccagggcagcggccccatcgtgctggatgatgtgcgctgcagcggccacgagagctacctgtggagctgccccaacaacggctggctgagccacaactgtggccaccatgaagatgctggggtcatctgcagcgctgcccagagccgcagcacccccaggccagacaccctgagcaccatcaccctgccccccagcacagtgggcagcgagagcagcctgaccctgcggctggtgaatggaagtgaccgctgccagggccgggtggaggtgctgtaccggggctcctggggcaccgtgtgtgatgacagctgggacaccaatgatgccaacgtggtgtgccggcagctgggctgcggctgggccaccagcgcccctggaaatgcccgcttcggccagggcagcggccccatcgtgctggatgatgtgcgctgcagcggccacgagagctacctgtggagctgcccccacaacggctggctgagccacaactgtggccaccatgaagatgctggggtcatctgcagcgtgtcccagagccggcccacccccagcccagacacctggcccaccagccacgccagcacagctggccctgagagcagcctggccctgcggctggtgaatggaggagaccgctgccagggccgggtggaggtgctgtaccggggctcctggggcaccgtgtgtgatgacagctgggacaccagtgatgccaacgtggtgtgccggcagctgggctgcggctgggccaccagcgcccctggaaatgccaggtttggccagggcagcggccccatcgtgctggatgatgtgcgctgcagcggctatgagagctacctgtggagctgcccccacaacggctggctgagccacaactgccagcacagtgaagatgctggggtcatctgcagcgctgcccacagctggagcacccccagcccagacaccctgcccaccatcaccctgcctgccagcacagtgggcagcgagagcagcctggccctgcggctggtgaatggaggagaccgctgccagggccgggtggaggtgctgtaccagggctcctggggcaccgtgtgtgatgacagctgggacaccaatgatgccaacgtggtgtgccggcagctgggctgcggctgggccatgtctgcccctggaaatgcccgcttcggccagggcagcggccccatcgtgctggatgatgtgcgctgcagcggccacgagagctacctgtggagctgcccccacaacggctggctgagccacaactgtggccacagtgaagatgctggggtcatctgcagcgccagccagagccggcccacccccagcccagacacctggcccaccagccacgccagcacagctggcagcgagagcagcctggccctgcggctggtgaatggaggagaccgctgccagggccgggtggaggtgctgtaccggggctcctggggcaccgtgtgtgatgactactgggacaccaatgatgccaacgtggtgtgccggcagctgggctgcggctgggccatgtctgcccctggaaatgccaggtttggccagggcagcggccccatcgtgctggatgatgtgcgctgcagcggccacgagagctacctgtggagctgcccccacaacggctggctgagccacaactgtggccaccatgaagatgctggggtcatctgcagcgccagccagagccagcccacccccagcccagacacctggcccaccagccacgccagcacagctggcagcgagagcagcctggccctgcggctggtgaatggaggagaccgctgccagggccgggtggaggtgctgtaccggggctcctggggcaccgtgtgtgatgactactgggacaccaatgatgccaacgtggtgtgccggcagctgggctgcggctgggccaccagcgcccctggaaatgcccgcttcggccagggcagcggccccatcgtgctggatgatgtgcgctgcagcggccacgagagctacctgtggagctgcccccacaacggctggctgagccacaactgtggccaccatgaagatgctggggtcatctgcagcgccagccagagccagcccacccccagcccagacacctggcccaccagccacgccagcacagctggcagcgagagcagcctggccctgcggctggtgaatggaggagaccgctgccagggccgggtggaggtgctgtaccggggctcctggggcaccgtgtgtgatgactactgggacaccaatgatgccaacgtggtgtgccggcagctgggctgcggctgggccaccagcgcccctggaaatgccaggtttggccagggcagcggccccatcgtgctggatgatgtgcgctgcagcggccacgagagctacctgtggagctgcccccacaacggctggctgagccacaactgtggccaccatgaagatgctggggtcatctgcagcgccagccagagccagcccacccccagcccagacacctggcccaccagccgggccagcacagctggcagcgagagcaccctggccctgcggctggtgaatggaggagaccgctgccggggccgggtggaggtgctgtaccagggctcctggggcaccgtgtgtgatgactactgggacaccaatgatgccaacgtggtgtgccggcagctgggctgcggctgggccatgtctgcccctggaaatgcccagtttggccagggcagcggccccatcgtgctggatgatgtgcgctgcagcggccacgagagctacctgtggagctgcccccacaacggctggctgagccacaactgtggccaccatgaagatgctggggtcatctgcagcgctgcccagagccagagcacccccaggccagacacctggctgaccaccaacctgcctgccctgactgtgggcagcgagagcagcctggccctgcggctggtgaatggaggagaccgctgccggggccgggtggaggtgctgtaccggggctcctggggcaccgtgtgtgatgacagctgggacaccaatgatgccaacgtggtgtgccggcagctgggctgcggctgggccatgtctgcccctggaaatgccaggtttggccagggcagcggccccatcgtgctggatgatgtgcgctgcagcggaaatgaaagctacctgtggagctgcccccacaagggctggctgacccacaactgtggccaccatgaagatgctggggtcatctgcagcgccacccagatcaacagcaccaccacagactggtggcaccccaccaccaccaccacagcccggcccagcagcaactgtggcggcttcctgttctacgccagcggcaccttcagcagccccagctacccagcctactaccccaacaatgccaagtgtgtgtgggagattgaggtgaacagcggctaccgcatcaacctgggcttcagcaacctgaagctggaggcccaccacaactgcagctttgattatgtggagatctttgatggcagcctgaacagcagcctgctgctgggcaagatctgcaatgacacccggcagatcttcaccagcagctacaacaggatgaccatccacttcagaagtgacatctccttccagaacacaggcttcctggcctggtacaacagcttccccagtgatgccaccctgcggctggtgaacctgaacagcagctatggcctgtgtgccggccgggtggagatctaccatggaggcacctggggcaccgtgtgtgatgacagctggaccatccaggaggccgaggtggtgtgccggcagctgggctgcggccgggctgtgtctgccctgggcaatgcctactttggaagtggcagcggccccatcaccctggatgatgtggagtgcagcggcacagagagcaccctgtggcagtgcaggaacagaggctggttcagccacaactgcaaccacagagaagatgctggggtcatctgcagcggcaaccacctgagcaccccagcccccttcctgaacatcacccggcccaacaactacagctgtggcggcttcctgagccagcccagcggggacttcagcagccccttctacccaggcaactaccccaacaatgccaagtgtgtgtgggacatcgaggtgcagaacaactacagagtgaccgtcatcttcagagatgtgcagctggagggcggctgcaactatgactacatcgaggtgtttgatggcccctaccgcagcagccccctcatcgcccgggtgtgtgatggagcccggggcagcttcaccagcagcagcaacttcatgagcatccgcttcatcagtgaccacagcatcacccggcggggcttccgggcagagtactacagcagccccagcaatgacagcaccaacctgctgtgcctgcccaaccacatgcaggcctctgtgagccgcagctacctgcagagcctgggcttcagcgccagtgacctggtgatcagcacctggaatggctactatgagtgccggccccagatcacccccaacctggtgatcttcaccatcccctacagcggctgcggcaccttcaagcaggccgacaatgacaccatcgactacagcaacttcctgacagctgctgtgtctgggggcatcatcaagagaagaacagacctgcgcatccacgtgtcctgcaggatgctgcagaacacctgggtggacaccatgtacatcgccaatgacaccatccacgtggccaacaacaccatccaggtggaggaggtgcagtatggcaactttgatgtgaacatctccttctacaccagcagcagcttcctgtaccctgtgaccagccggccctactacgtggacctgaaccaggacctgtatgtgcaggccgagatcctgcacagtgatgctgtgctgaccctgtttgtggacacctgtgtggccagcccctacagcaatgacttcaccagcctgacctatgacctgatccgcagcggctgtgtgagagatgacacctacggcccctacagcagccccagcctgcgcatcgcccgcttccgcttccgggccttccacttcctgaaccgcttccccagcgtgtacctgcgctgcaagatggtggtgtgccgggcctatgaccccagcagccgctgctaccggggctgtgtgctgcggagcaagagagatgtgggcagctaccaggagaaggtggatgtggtgctgggccccatccagctgcagaccccaccccggcgggaggaggagcccaggtag

SEQ ID NO: 19370 - DNA, 7242 bp, synthetic construct; identical to SEQ ID NO: 19360
  misc_feature 1..7242: note = Description of Artificial Sequence: Synthetic coding sequence
  source 1..7242: mol_type = other DNA

SEQ ID NO: 19371 - DNA, 7212 bp, synthetic construct; identical to SEQ ID NO: 19364
  misc_feature 1..7212: note = Description of Artificial Sequence: Synthetic coding sequence
  source 1..7212: mol_type = other DNA

SEQ ID NO: 19372 - DNA, 5358 bp, synthetic construct; identical to SEQ ID NO: 19358
  misc_feature 1..5358: note = Description of Artificial Sequence: Synthetic coding sequence
  source 1..5358: mol_type = other DNA

SEQ ID NO: 19373 - DNA, 597 bp, synthetic construct
  misc_feature 1..597: note = Description of Artificial Sequence: Synthetic coding sequence
  source 1..597: mol_type = other DNA
atggctgctgacatcagcgagagcagtggagctgactgcaagggggaccccaggaacagcgccaagctggatgctgactaccccctgcgggtgctgtactgcggcgtgtgcagcctgcccacagagtactgtgagtacatgccagatgtggccaagtgccggcagtggctggagaagaacttccccaatgaatttgccaagctgactgtggagaacagccccaagcaggaggccggcatcagcgagggccagggcacagctggggaggaggaggagaagaagaagcagaagagaggaggccggggccagatcaagcagaagaagaagacagtgccccagaaggtgaccatcgccaagatcccccgggccaagaagaagtatgtgaccagggtgtgtggcctggccacctttgaaattgacctgaaggaggcccagcgcttctttgcccagaagttcagctgtggggcctctgtgactggagaagatgagatcatcatccagggcgacttcacagatgacatcattgatgtgatccaggagaagtggccagaggtggatgatgacagcattgaggacctgggggaggtgaagaagtag

SEQ ID NO: 19374 - DNA, 1530 bp, synthetic construct
  misc_feature 1..1530: note = Description of Artificial Sequence: Synthetic coding sequence
  source 1..1530: mol_type = other DNA
atggaccccccccgggccagccacctgagccccaggaagaagaggccccggcagacaggagccctgatggccagcagcccccaggacatcaagttccaggacctggtggtgttcatcctggagaagaagatgggcaccacccggcgggccttcctgatggagctggcccggaggaagggcttccgggtggagaatgagctgagtgacagcgtgacccacatcgtggccgagaacaacagcggcagtgatgtgctggagtggctgcaggcccagaaggtgcaggtgagcagccagcctgagctgctggatgtgtcctggctgattgagtgcatccgggccggcaagcctgtggagatgaccgggaagcaccagctggtggtgcggcgggactacagcgacagcaccaaccctggcccccccaagaccccacccatcgctgtgcagaagatcagccagtatgcctgccagaggaggaccaccctgaacaactgcaaccagatcttcacagatgcctttgacatcctggccgagaactgtgagttcagagaaaatgaagacagctgtgtgaccttcatgagagctgcctctgtgctgaagagcctgcccttcaccatcatctccatgaaggacacagagggcatcccctgcctgggcagcaaggtgaagggcatcatcgaggagatcattgaagatggagagagcagcgaggtgaaggctgtgctgaatgatgagcgctaccagagcttcaagctgttcacctctgtgtttggagtgggcctgaagaccagcgagaagtggttcaggatgggcttccgcaccctgagcaaggtgcggagtgacaagagcctgaagttcaccaggatgcagaaggccggcttcctgtactatgaggacctggtgtcctgtgtgaccagggctgaggccgaggccgtgtctgtgctggtgaaggaggccgtgtgggccttcctgcctgatgcctttgtgaccatgactggaggcttcagaagaggcaagaagatgggccatgatgtggacttcctgatcaccagccctggcagcacagaagatgaggagcagctgctgcagaaggtgatgaacctgtgggagaagaagggcctgctgctgtactatgacctggtggagagcacctttgagaagctgcggctgcccagcaggaaggtggatgccctggaccacttccagaagtgcttcctgatcttcaagctgccccggcagagggtggacagcgaccagagctcctggcaggagggcaagacctggaaggccatccgggtggacctggtgctgtgcccctatgaaagaagagcctttgccctgctgggctggacaggcagccggcagtttgagcgggacctgcggcgctatgccacccatgagaggaagatgatcctggacaaccacgccctgtatgacaagaccaagaggatcttcctgaaggccgagagcgaggaggagatctttgcccacctgggcctggactacatcgagccctgggagagaaatgcctag

SEQ ID NO: 19375 - DNA, 1527 bp, synthetic construct
  misc_feature 1..1527: note = Description of Artificial Sequence: Synthetic coding sequence
  source 1..1527: mol_type = other DNA
atggaccccccccgggccagccacctgagccccaggaagaagaggccccggcagacaggagccctgatggccagcagcccccaggacatcaagttccaggacctggtggtgttcatcctggagaagaagatgggcaccacccggcgggccttcctgatggagctggcccggaggaagggcttccgggtggagaatgagctgagtgacagcgtgacccacatcgtggccgagaacaacagcggcagtgatgtgctggagtggctgcaggcccagaaggtgcaggtgagcagccagcctgagctgctggatgtgtcctggctgattgagtgcatccgggccggcaagcctgtggagatgaccgggaagcaccagctggtggtgcggcgggactacagcgacagcaccaaccctggcccccccaagaccccacccatcgctgtgcagaagatcagccagtatgcctgccagaggaggaccaccctgaacaactgcaaccagatcttcacagatgcctttgacatcctggccgagaactgtgagttcagagaaaatgaagacagctgtgtgaccttcatgagagctgcctctgtgctgaagagcctgcccttcaccatcatctccatgaaggacacagagggcatcccctgcctgggcagcaaggtgaagggcatcatcgaggagatcattgaagatggagagagcagcgaggtgaaggctgtgctgaatgatgagcgctaccagagcttcaagctgttcacctctgtgtttggagtgggcctgaagaccagcgagaagtggttcaggatgggcttccgcaccctgagcaaggtgcggagtgacaagagcctgaagttcaccaggatgcagaaggccggcttcctgtactatgaggacctggtgtcctgtgtgaccagggctgaggccgaggccgtgtctgtgctggtgaaggaggccgtgtgggccttcctgcctgatgcctttgtgaccatgactggaggcttcagaagaggcaagaagatgggccatgatgtggacttcctgatcaccagccctggcagcacagaagatgaggagcagctgctgcagaaggtgatgaacctgtgggagaagaagggcctgctgctgtactatgacctggtggagagcacctttgagaagctgcggctgcccagcaggaaggtggatgccctggaccacttccagaagtgcttcctgatcttcaagctgccccggcagagggtggacagcgaccagagctcctggcaggagggcaagacctggaaggccatccgggtggacctggtgctgtgcccctatgaaagaagagcctttgccctgctgggctggacaggcagcagatttgagcgggacctgcggcgctatgccacccatgagaggaagatgatcctggacaaccacgccctgtatgacaagaccaagaggatcttcctgaaggccgagagcgaggaggagatctttgcccacctgggcctggactacatcgagccctgggagagaaatgcctag

SEQ ID NO: 19376 - DNA, 2544 bp, synthetic construct
  misc_feature 1..2544: note = Description of Artificial Sequence: Synthetic coding sequence
  source 1..2544: mol_type = other DNA
atggaggccgcccggcccagcggctcctggaatggagccctgtgccgcctgctgctgctgaccctggccatcctgatctttgccagtgatgcctgcaagaatgtgaccctgcacgtgcccagcaagctggatgctgagaagctggtgggccgggtgaacctgaaggagtgcttcaccgctgccaacctgatccacagcagtgaccctgacttccagatcctggaggatggctctgtgtacaccaccaacaccatcctgctgagcagcgagaagaggagcttcaccatcctgctgagcaacacagagaaccaggagaagaagaagatctttgtgttcctggagcaccagaccaaggtgctgaagaagaggcacaccaaggagaaggtgctgcggcgggccaagaggcgctgggcccccatcccctgcagcatgctggagaacagcctgggccccttccccctcttcctgcagcaggtgcagagcgacacagcccagaactacaccatctactacagcatccggggccctggggtggaccaggagcccaggaacctcttctacgtggagcgggacaccggcaacctgtactgcaccaggcctgtggaccgggagcagtatgagagctttgagatcatcgcctttgccaccaccccagatggctacaccccagagctgcccctgcccctcatcatcaagattgaagatgaaaatgacaactaccccatcttcacagaggagacctacaccttcaccatctttgagaactgccgggtgggcaccaccgtgggccaggtgtgtgccacagacaaggatgagccagacaccatgcacacccggctgaagtacagcatcatcggccaggtgccccccagccccaccctcttctccatgcaccccaccactggagtcatcaccaccaccagcagccagctggaccgggagctgattgacaagtaccagctgaagatcaaggtgcaggacatggatggccagtacttcggcctgcagaccaccagcacctgcatcatcaacattgatgatgtgaatgaccacctgcccaccttcaccaggaccagctatgtgacctctgtggaggagaacacagtggatgtggagatcctgcgggtgacagtggaggacaaggacctggtgaacacagccaactggagggccaactacaccatcctgaagggaaatgaaaatggaaacttcaagatcgtgacagatgccaagaccaatgaaggagtgctgtgtgtggtgaagcccctgaactatgaggagaagcagcagatgatcctgcagattggagtggtgaatgaggcccccttcagccgggaggccagccccaggtctgccatgagcacagccaccgtgacagtgaatgtggaggaccaggatgagggccctgagtgcaacccccccatccagacagtgaggatgaaggaaaatgctgaggtgggcaccaccagcaatggctacaaggcctatgaccctgagaccaggagcagcagcggcatccgctacaagaagctgacagaccccaccggctgggtgaccattgatgagaacacaggcagcatcaaggtgttccgcagcctggaccgggaggccgagaccatcaagaatggcatctacaacatcaccgtgctggccagtgaccagggcggccgcacctgcaccggcaccctgggcatcatcctgcaggatgtgaatgacaacagccccttcatccccaagaagacagtcatcatctgcaagcccaccatgagcagcgctgagatcgtggccgtggaccctgatgagcccatccacggccccccatttgacttcagcctggagagcagcaccagcgaggtgcagaggatgtggaggctgaaggccatcaatgacacagctgcccggctgagctaccagaatgaccccccatttggcagctatgtggtgcccatcaccgtgcgggaccggctgggcatgagctctgtgaccagcctggatgtgaccctgtgtgactgcatcacagaaaatgactgcacccaccgggtggaccccagaattggaggcggcggcgtgcagctgggcaagtgggccatcctggccatcctgctgggcatcgccctgctcttctgcatcctcttcaccctggtgtgtggggccagcggcaccagcaagcagcccaaggtgatcccagatgacctggcccagcagaacctgattgtgagcaacacagaggcccctggagatgacaaggtgtacagcgccaacggcttcaccacccagacagtgggcgccagcgcccagggcgtgtgtggcaccgtgggcagcggcatcaagaatggaggccaggagaccatcgagatggtgaagggcggccaccagaccagcgagagctgccgcggggccggccaccaccacaccctggacagctgccggggcggccacacagaggtggacaactgccgctacacctacagcgagtggcacagcttcacccagccccggctgggggaggagagcatccggggccacaccctcatcaagaactag

SEQ ID NO: 19377 - DNA, 2706 bp, synthetic construct
  misc_feature 1..2706: note = Description of Artificial Sequence: Synthetic coding sequence
  source 1..2706: mol_type = other DNA
atggaggccgcccggcccagcggctcctggaatggagccctgtgccgcctgctgctgctgaccctggccatcctgatctttgccagtgatgcctgcaagaatgtgaccctgcacgtgcccagcaagctggatgctgagaagctggtgggccgggtgaacctgaaggagtgcttcaccgctgccaacctgatccacagcagtgaccctgacttccagatcctggaggatggctctgtgtacaccaccaacaccatcctgctgagcagcgagaagaggagcttcaccatcctgctgagcaacacagagaaccaggagaagaagaagatctttgtgttcctggagcaccagaccaaggtgctgaagaagaggcacaccaaggagaaggtgctgcggcgggccaagaggcgctgggcccccatcccctgcagcatgctggagaacagcctgggccccttccccctcttcctgcagcaggtgcagagcgacacagcccagaactacaccatctactacagcatccggggccctggggtggaccaggagcccaggaacctcttctacgtggagcgggacaccggcaacctgtactgcaccaggcctgtggaccgggagcagtatgagagctttgagatcatcgcctttgccaccaccccagatggctacaccccagagctgcccctgcccctcatcatcaagattgaagatgaaaatgacaactaccccatcttcacagaggagacctacaccttcaccatctttgagaactgccgggtgggcaccaccgtgggccaggtgtgtgccacagacaaggatgagccagacaccatgcacacccggctgaagtacagcatcatcggccaggtgccccccagccccaccctcttctccatgcaccccaccactggagtcatcaccaccaccagcagccagctggaccgggagctgattgacaagtaccagctgaagatcaaggtgcaggacatggatggccagtacttcggcctgcagaccaccagcacctgcatcatcaacattgatgatgtgaatgaccacctgcccaccttcaccaggaccagctatgtgacctctgtggaggagaacacagtggatgtggagatcctgcgggtgacagtggaggacaaggacctggtgaacacagccaactggagggccaactacaccatcctgaagggaaatgaaaatggaaacttcaagatcgtgacagatgccaagaccaatgaaggagtgctgtgtgtggtgaagcccctgaactatgaggagaagcagcagatgatcctgcagattggagtggtgaatgaggcccccttcagccgggaggccagccccaggtctgccatgagcacagccaccgtgacagtgaatgtggaggaccaggatgagggccctgagtgcaacccccccatccagacagtgaggatgaaggaaaatgctgaggtgggcaccaccagcaatggctacaaggcctatgaccctgagaccaggagcagcagcggcatccgctacaagaagctgacagaccccaccggctgggtgaccattgatgagaacacaggcagcatcaaggtgttccgcagcctggaccgggaggccgagaccatcaagaatggcatctacaacatcaccgtgctggccagtgaccagggcggccgcacctgcaccggcaccctgggcatcatcctgcaggatgtgaatgacaacagccccttcatccccaagaagacagtcatcatctgcaagcccaccatgagcagcgctgagatcgtggccgtggaccctgatgagcccatccacggccccccatttgacttcagcctggagagcagcaccagcgaggtgcagaggatgtggaggctgaaggccatcaatgacacagctgcccggctgagctaccagaatgaccccccatttggcagctatgtggtgcccatcaccgtgcgggaccggctgggcatgagctctgtgaccagcctggatgtgaccctgtgtgactgcatcacagaaaatgactgcacccaccgggtggaccccagaattggaggcggcggcgtgcagctgggcaagtgggccatcctggccatcctgctgggcatcgccctgctcttctgcatcctcttcaccctggtgtgtggggccagcggcaccagcaagcagcccaaggtgatcccagatgacctggcccagcagaacctgattgtgagcaacacagaggcccctggagatgacaaggtgtacagcgccaacggcttcaccacccagacagtgggcgccagcgcccagggcgtgtgtggcaccgtgggcagcggcatcaagaatggaggccaggagaccatcgagatggtgaagggcggccaccagaccagcgagagctgccgcggggccggccaccaccacaccctggacagctgccggggcggccacacagaggtggacaactgccgctacacctacagcgagtggcacagcttcacccagccccggctgggggagaaggtgtacctgtgcaaccaggatgagaaccacaagcacgcccaggactatgtgctgacctacaactatgagggccggggctctgtggccggctctgtgggctgctgcagcgagcggcaggaggaggatggcctggagttcctggacaacctggagcccaagttccgcaccctggccgaggcctgcatgaagaggtag

SEQ ID NO: 19378 - DNA, 2745 bp, synthetic construct
  misc_feature 1..2745: note = Description of Artificial Sequence: Synthetic coding sequence
  source 1..2745: mol_type = other DNA
atggaggccgcccggcccagcggctcctggaatggagccctgtgccgcctgctgctgctgaccctggccatcctgatctttgccagtgatgcctgcaagaatgtgaccctgcacgtgcccagcaagctggatgctgagaagctggtgggccgggtgaacctgaaggagtgcttcaccgctgccaacctgatccacagcagtgaccctgacttccagatcctggaggatggctctgtgtacaccaccaacaccatcctgctgagcagcgagaagaggagcttcaccatcctgctgagcaacacagagaaccaggagaagaagaagatctttgtgttcctggagcaccagaccaagatcagcctgctggtgccctggctgtgcctggtggccgaggtgctgaagaagaggcacaccaaggagaaggtgctgcggcgggccaagaggcgctgggcccccatcccctgcagcatgctggagaacagcctgggccccttccccctcttcctgcagcaggtgcagagcgacacagcccagaactacaccatctactacagcatccggggccctggggtggaccaggagcccaggaacctcttctacgtggagcgggacaccggcaacctgtactgcaccaggcctgtggaccgggagcagtatgagagctttgagatcatcgcctttgccaccaccccagatggctacaccccagagctgcccctgcccctcatcatcaagattgaagatgaaaatgacaactaccccatcttcacagaggagacctacaccttcaccatctttgagaactgccgggtgggcaccaccgtgggccaggtgtgtgccacagacaaggatgagccagacaccatgcacacccggctgaagtacagcatcatcggccaggtgccccccagccccaccctcttctccatgcaccccaccaccggggtcatcaccaccaccagcagccagctggaccgggagctgattgacaagtaccagctgaagatcaaggtgcaggacatggatggccagtacttcggcctgcagaccaccagcacctgcatcatcaacattgatgatgtgaatgaccacctgcccaccttcaccaggaccagctatgtgacctctgtggaggagaacacagtggatgtggagatcctgcgggtgacagtggaggacaaggacctggtgaacacagccaactggagggccaactacaccatcctgaagggaaatgaaaatggaaacttcaagatcgtgacagatgccaagaccaatgaaggagtgctgtgtgtggtgaagcccctgaactatgaggagaagcagcagatgatcctgcagatcggcgtggtgaatgaggcccccttcagccgggaggccagccccaggtctgccatgagcacagccaccgtgacagtgaatgtggaggaccaggatgagggccctgagtgcaacccccccatccagacagtgaggatgaaggaaaatgctgaggtgggcaccaccagcaatggctacaaggcctatgaccctgagaccaggagcagcagcggcatccgctacaagaagctgacagaccccaccggctgggtgaccattgatgaaaatacaggcagcatcaaggtgttccgcagcctggaccgggaggccgagaccatcaagaatggcatctacaacatcaccgtgctggccagtgaccagggcggccgcacctgcaccggcaccctgggcatcatcctgcaggatgtgaatgacaacagccccttcatccccaagaagacagtcatcatctgcaagcccaccatgagcagcgctgagatcgtggccgtggaccctgatgagcccatccacggccccccatttgacttcagcctggagagcagcaccagcgaggtgcagaggatgtggaggctgaaggccatcaatgacacagctgcccggctgagctaccagaatgacccccccttcggcagctatgtggtgcccatcaccgtgcgggaccggctgggcatgagctctgtgaccagcctggatgtgaccctgtgtgactgcatcacagaaaatgactgcacccaccgggtggacccccgcatcggcggcggcggcgtgcagctgggcaagtgggccatcctggccatcctgctgggcatcgccctgctcttctgcatcctcttcaccctggtgtgtggggccagcggcaccagcaagcagcccaaggtgatcccagatgacctggcccagcagaacctgattgtgagcaacacagaggcccctggagatgacaaggtgtacagcgccaacggcttcaccacccagacagtgggcgccagcgcccagggcgtgtgtggcaccgtgggcagcggcatcaagaatggaggccaggagaccatcgagatggtgaagggcggccaccagaccagcgagagctgcagaggagctggccaccaccacaccctggacagctgccggggcggccacacagaggtggacaactgccgctacacctacagcgagtggcacagcttcacccagccccggctgggggagaaggtgtacctgtgcaaccaggatgagaaccacaagcacgcccaggactatgtgctgacctacaactatgagggccggggctctgtggccggctctgtgggctgctgcagcgagcggcaggaggaggatggcctggagttcctggacaacctggagcccaagttccgcaccctggccgaggcctgcatgaagaggtag

SEQ ID NO: 19379 - DNA, 2004 bp, synthetic construct
  misc_feature 1..2004: note = Description of Artificial Sequence: Synthetic coding sequence
  source 1..2004: mol_type = other DNA
atgaagatgatcaccacccagttcctgcagaagaagctgatcctgctgcagttcctgaagattgctgagtggggcaccaccgtgggccaggtgtgtgccacagacaaggatgagccagacaccatgcacacccggctgaagtacagcatcatcggccaggtgccccccagccccaccctcttctccatgcaccccaccactggagtcatcaccaccaccagcagccagctggaccgggagctgattgacaagtaccagctgaagatcaaggtgcaggacatggatggccagtacttcggcctgcagaccaccagcacctgcatcatcaacattgatgatgtgaatgaccacctgcccaccttcaccaggaccagctatgtgacctctgtggaggagaacacagtggatgtggagatcctgcgggtgacagtggaggacaaggacctggtgaacacagccaactggagggccaactacaccatcctgaagggaaatgaaaatggaaacttcaagatcgtgacagatgccaagaccaatgaaggagtgctgtgtgtggtgaagcccctgaactatgaggagaagcagcagatgatcctgcagattggagtggtgaatgaggcccccttcagccgggaggccagccccaggtctgccatgagcacagccaccgtgacagtgaatgtggaggaccaggatgagggccctgagtgcaacccccccatccagacagtgaggatgaaggaaaatgctgaggtgggcaccaccagcaatggctacaaggcctatgaccctgagaccaggagcagcagcggcatccgctacaagaagctgacagaccccaccggctgggtgaccattgatgagaacacaggcagcatcaaggtgttccgcagcctggaccgggaggccgagaccatcaagaatggcatctacaacatcaccgtgctggccagtgaccagggcggccgcacctgcaccggcaccctgggcatcatcctgcaggatgtgaatgacaacagccccttcatccccaagaagacagtcatcatctgcaagcccaccatgagcagcgctgagatcgtggccgtggaccctgatgagcccatccacggccccccatttgacttcagcctggagagcagcaccagcgaggtgcagaggatgtggaggctgaaggccatcaatgacacagctgcccggctgagctaccagaatgaccccccatttggcagctatgtggtgcccatcaccgtgcgggaccggctgggcatgagctctgtgaccagcctggatgtgaccctgtgtgactgcatcacagaaaatgactgcacccaccgggtggaccccagaattggaggcggcggcgtgcagctgggcaagtgggccatcctggccatcctgctgggcatcgccctgctcttctgcatcctcttcaccctggtgtgtggggccagcggcaccagcaagcagcccaaggtgatcccagatgacctggcccagcagaacctgattgtgagcaacacagaggcccctggagatgacaaggtgtacagcgccaacggcttcaccacccagacagtgggcgccagcgcccagggcgtgtgtggcaccgtgggcagcggcatcaagaatggaggccaggagaccatcgagatggtgaagggcggccaccagaccagcgagagctgccgcggggccggccaccaccacaccctggacagctgccggggcggccacacagaggtggacaactgccgctacacctacagcgagtggcacagcttcacccagccccggctgggggagaaggtgtacctgtgcaaccaggatgagaaccacaagcacgcccaggactatgtgctgacctacaactatgagggccggggctctgtggccggctctgtgggctgctgcagcgagcggcaggaggaggatggcctggagttcctggacaacctggagcccaagttccgcaccctggccgaggcctgcatgaagaggtag

SEQ ID NO: 19380 - DNA, 3000 bp, synthetic construct
  misc_feature 1..3000: note = Description of Artificial Sequence: Synthetic coding sequence
  source 1..3000: mol_type = other DNA
atgatgggcctcttccccaggaccactggagccctggccatctttgtggtggtgatcctggtgcacggggagctgagaattgagaccaagggccagtatgatgaggaggagatgaccatgcagcaggccaagaggcggcagaagcgggagtgggtgaagtttgccaagccctgccgggagggggaggacaacagcaagaggaaccccatcgccaagatcaccagtgactaccaggccacccagaagatcacctaccgcatcagcggcgtgggcatcgaccagcccccatttggcatctttgtggtggacaagaacacaggagacatcaacatcacagccatcgtggaccgggaggagacccccagcttcctgatcacctgccgggccctgaatgcccagggcctggatgtggagaagcccctcatcctgactgtgaagatcctggacatcaatgacaacccccctgtgttcagccagcagatcttcatgggagaaattgaggagaacagcgccagcaacagcctggtgatgatcctgaatgccacagatgctgatgagcccaaccacctgaacagcaagatcgccttcaagatcgtgtcccaggagcccgccggcacccccatgttcctgctgagcagaaatactggagaggtgaggaccctgaccaacagcctggaccgggagcaggccagcagctaccgcctggtggtgtctggagctgacaaggatggagagggcctgagcacccagtgtgagtgcaacatcaaggtgaaggatgtgaatgacaacttccccatgttccgggacagccagtacagcgcccgcatcgaggagaacatcctgagcagcgagctgctgcgcttccaggtgacagacctggatgaggagtacacagacaactggctggccgtgtacttcttcaccagcggaaatgaaggcaactggtttgagatccagacagaccccaggaccaatgaaggcatcctgaaggtggtgaaggccctggactatgagcagctgcagagcgtgaagctgagcattgctgtgaagaacaaggccgagttccaccagagcgtcatcagccgctacagagtgcagagcacccctgtgaccatccaggtgatcaacgtgcgggagggcatcgccttccggcctgccagcaagaccttcaccgtgcagaagggcatcagcagcaagaagctggtggactacatcctgggcacctaccaggccattgatgaggacaccaacaaggccgccagcaatgtgaagtatgtgatgggcagaaatgatggcggctacctgatgattgacagcaagacagctgagatcaagtttgtgaagaacatgaacagagacagcaccttcatcgtgaacaagaccatcacagctgaggtgctggccattgatgagtacacaggcaagaccagcacaggcaccgtgtatgtgcgggtgcctgacttcaatgacaactgccccacagctgtgctggagaaggatgctgtgtgcagcagcagccccagcgtggtggtgtctgcccggaccctgaacaaccgctacacaggcccctacacctttgccctggaggaccagcctgtgaagctgcctgctgtgtggagcatcaccaccctgaatgccaccagcgccctgctgcgggcccaggagcagatccccccaggagtgtaccacatcagcctggtgctgacagacagccagaacaacagatgtgagatgcccaggagcctgaccctggaggtgtgccagtgtgacaacagaggcatctgtggcaccagctaccccaccaccagccctggcaccaggtatggccggccccacagcggccgcctgggccctgctgccatcggcctgctgctgctgggcctgctgctgctgctgctggcccccctgctgctgctgacctgtgactgtggggccggcagcactggaggagtgactggaggcttcatccctgtgcctgatggcagcgagggcaccatccaccagtggggcattgaaggagcccaccctgaggacaaggagatcaccaacatctgtgtgccccctgtgacagccaacggggctgacttcatggagagcagcgaggtgtgcaccaacacctacgcccggggcacagctgtggagggcaccagcggcatggagatgaccaccaagctgggcgccgccacagaaagtggaggagctgctggctttgccactggaacagtgtctggagctgccagcggctttggagctgccactggagtgggcatctgcagcagcggccagagcggcaccatgaggaccaggcacagcactggaggcaccaacaaggactatgcagatggagccatctccatgaacttcctggacagctacttcagccagaaggcctttgcctgtgccgaggaggatgatggccaggaggccaatgactgcctgctgatctatgacaatgaaggagcagatgccaccggcagccctgtgggctctgtgggctgctgcagcttcatcgcagatgacctggatgacagcttcctggacagcctgggccccaagttcaagaagctggccgagatcagcctgggcgtggatggagagggcaaggaggtgcagccccccagcaaggacagcggctatggaattgagagctgtggccaccccatcgaggtgcagcagacaggctttgtgaagtgccagaccctgagcggcagccagggcgccagcgccctgagcaccagcggctctgtgcagcctgctgtgtccatcccagaccccctgcagcacggcaactacctggtgacagagacctacagcgccagcggcagcctggtgcagcccagcacagctggctttgaccccctgctgacccagaatgtcatcgtgacagagagggtcatctgccccatcagctctgtgcccggcaacctggccggccccacccagctgcggggcagccacaccatgctgtgcacagaggacccctgcagccgcctcatctag

SEQ ID NO: 19381 - DNA, 8616 bp, synthetic construct
  misc_feature 1..8616: note = Description of Artificial Sequence: Synthetic coding sequence
  source 1..8616: mol_type = other DNA
atgagctgcaatggaggcagccacccccgcatcaacaccctgggccgcatgatccgggcagagagcggccctgacctgcgctatgaggtgaccagcggcggcggcggcaccagcaggatgtactacagccggcggggcgtcatcacagaccagaacagtgatggctactgccagacaggcaccatgagccgccaccagaaccagaacaccatccaggagctgctgcagaactgcagcgactgcctgatgagagctgagctgattgtgcagcctgagctgaagtatggagatggcatccagctgaccaggagccgggagctggatgaatgttttgcccaggccaatgaccagatggagatcctggacagcctcatccgggagatgaggcagatgggccagccctgtgatgcctaccagaagaggctgctgcagctgcaggagcagatgagggccctgtacaaggccatctctgtgccccgggtgcggcgggccagcagcaaaggaggcggcggctacacctgccagagcggcagcggctgggatgagttcaccaagcacgtgaccagcgagtgcctgggctggatgaggcagcagagagctgagatggacatggtggcctggggcgtggacctggcctctgtggagcagcacatcaacagccaccggggcatccacaacagcatcggggactaccgctggcagctggacaagatcaaggctgacctgcgggagaagagcgccatctaccagctggaggaggagtatgagaacctgctgaaggccagctttgagaggatggaccacctgcggcagctgcagaacatcatccaggccaccagccgggagatcatgtggatcaatgactgtgaggaggaggagctgctgtatgactggagcgacaagaacaccaacatcgcccagaagcaggaggccttcagcatccgcatgagccagctggaggtgaaggagaaggagctgaacaagctgaagcaggagagtgaccagctggtgctgaaccagcacccagccagtgacaagattgaggcctacatggacaccctgcagacccagtggagctggatcctgcagatcaccaagtgcattgatgtgcacctgaaggaaaatgctgcctacttccagttctttgaggaggcccagagcacagaggcctacctgaagggcctgcaggacagcatcaggaagaagtacccctgtgacaagaacatgcccctgcagcacctgctggagcagatcaaggagctggagaaggagcgggagaagatcctggagtacaagaggcaggtgcagaacctggtgaacaagagcaagaagatcgtgcagctgaagcccagaaatccagactaccgcagcaacaagcccatcatcctgcgggccctgtgtgactacaagcaggaccagaagatcgtgcacaagggagatgagtgcatcctgaaggacaacaatgaaagaagcaagtggtacgtgacaggccctgggggcgtggacatgctggtgcccagcgtgggcctcatcatccccccacccaaccccctggccgtggacctgagctgcaagattgagcagtactatgaggccatcctggccctgtggaaccagctgtacatcaacatgaagagcctggtgtcctggcactactgcatgattgatattgagaagatccgggccatgaccatcgccaagctgaagaccatgaggcaggaggactacatgaagaccatcgctgacctggagctgcactaccaggagttcatccggaacagccagggcagcgagatgtttggagatgatgacaagaggaagatccagagccagttcacagatgcccagaagcactaccagaccctggtgatccagctgcccggctacccccagcaccagacagtgaccaccacagagatcacccaccacggcacctgccaggatgtgaaccacaacaaggtgattgagaccaaccgggagaatgacaagcaggagacctggatgctgatggagctgcagaagatccggcggcagatcgagcactgtgagggccgcatgaccctgaagaacctgcccctggccgaccagggcagcagccaccacatcaccgtgaagatcaatgagctgaagtctgtgcagaatgacagccaggccatcgccgaggtgctgaaccagctgaaggacatgctggccaacttccggggcagcgagaagtactgctacctgcagaatgaggtgtttggcctcttccagaagctggagaacatcaatggagtgacagatggctacctgaacagcctgtgcaccgtgcgggccctgctgcaggccatcctgcagacagaggacatgctgaaggtgtatgaggcccggctgacagaggaggagaccgtgtgcctggacctggacaaggtggaggcctaccgctgtggcctgaagaagatcaagaatgacctgaacctgaagaagagcctgctggccaccatgaagacagagctgcagaaggcccagcagatccacagccagaccagccagcagtaccccctgtatgacctggacctgggcaagtttggagagaaggtgacccagctgacagaccgctggcagagaattgacaagcagattgacttccggctgtgggacctggagaagcagatcaagcagctgaggaactacagagacaactaccaggccttctgcaagtggctgtatgatgccaagaggcggcaggacagcctggagagcatgaagtttggagacagcaacacagtgatgaggttcctgaatgagcagaagaacctgcacagcgagatcagcggcaagagggacaagtctgaggaggtgcagaagattgctgagctgtgtgccaacagcatcaaggactatgagctgcagctggccagctacaccagcggcctggagaccctgctgaacatccccatcaagaggaccatgatccagagccccagcggggtcatcctgcaggaggccgcagatgtgcacgcccgctacatcgagctgctgaccaggtctggggactactaccgcttcctgtctgagatgctgaagagcctggaggacctgaagctgaagaacaccaagattgaggtgctggaggaggagctgcggctggccagagatgccaacagcgagaactgcaacaagaacaagttcctggaccagaacctgcagaagtaccaggccgagtgcagccagttcaaggccaagctggccagcctggaggagctgaagaggcaggccgagctggatggcaagagcgccaagcagaacctggacaagtgctacggccagatcaaggagctgaatgagaagatcacccggctgacctatgaaattgaagatgagaagagaagaaggaagtctgtggaggacagatttgaccagcagaagaatgactatgaccagctgcagaaggcccggcagtgtgagaaggagaacctgggctggcagaagctggagagcgagaaggccatcaaggagaaggagtatgaaattgagcggctgcgggtgctgctgcaggaggagggcaccaggaagcgggagtatgaaaatgagctggccaaggtgaggaaccactacaatgaggagatgagcaacctgaggaacaagtatgaaacagagatcaacatcaccaagaccaccatcaaggagatctccatgcagaaggaggatgacagcaagaacctgaggaaccagctggaccggctgagcagagaaaatagagacctgaaggatgaaattgtgcggctgaatgacagcatcctgcaggccacagagcagaggcggcgggcagaggagaatgccctgcagcagaaggcctgtggcagcgagatcatgcagaagaagcagcacctggagattgagctgaagcaggtgatgcagcagaggtctgaggacaatgcccggcacaagcagagcctggaggaggccgccaagaccatccaggacaagaacaaggagattgagcggctgaaggccgagttccaggaggaggccaagaggcgctgggagtatgaaaatgagctgagcaaggtgaggaacaactatgatgaggagatcatcagcctgaagaaccagtttgaaacagagatcaacatcaccaagaccaccatccaccagctgaccatgcagaaggaggaggacaccagcggctaccgggcccagattgacaacctgaccagagaaaatagaagcctgtctgaggagatcaagaggctgaagaacaccctgacccagaccacagagaacctgcggcgggtggaggaggacatccagcagcagaaggccaccggcagcgaggtgtcccagaggaagcagcagctggaggtggagctgcggcaggtgacccagatgaggacagaggagagcgtgcgctacaagcagagcctggatgatgctgccaagaccatccaggacaagaacaaggagattgagcggctgaagcagctgattgacaaggagaccaatgacaggaagtgcctggaggatgaaaatgcccggctgcagagggtgcagtatgacctgcagaaggccaacagcagcgccacagagaccatcaacaagctgaaggtgcaggagcaggagctgacccggctgagaattgattatgaaagagtgtcccaggagaggacagtgaaggaccaggacatcacccgcttccagaacagcctgaaggagctgcagctgcagaagcagaaggtggaggaggagctgaaccggctgaagaggacagccagcgaggacagctgcaagaggaagaagctggaggaggagctggagggcatgaggaggagcctgaaggagcaggccatcaagatcaccaacctgacccagcagctggagcaggccagcatcgtgaagaagagaagtgaagatgacctgcggcagcagagagatgtgctggatggccacctgcgggagaagcagaggacccaggaggagctgcggcggctgagcagcgaggtggaggccctgcggcggcagctgctgcaggagcaggagagcgtgaagcaggcccacctgagaaatgagcacttccagaaggccatcgaggacaagagccgcagcctgaatgaaagcaagattgaaattgagcggctgcagagcctgacagagaacctgaccaaggagcacctgatgctggaggaggagctgaggaacctgcggctggagtatgatgacctgcggcggggccgctctgaggccgacagcgacaagaatgccaccatcctggagctgcggagccagctgcagatcagcaacaacagaaccctggagctgcagggcctcatcaatgacctgcagcgggagcgggagaacctgcggcaggagattgagaagttccagaagcaggccctggaggccagcaaccgcatccaggagagcaagaaccagtgcacccaggtggtgcaggagcgggagagcctgctggtgaagatcaaggtgctggagcaggacaaggcccggctgcagaggctggaggatgagctgaacagagccaagagcaccctggaggccgagaccagggtgaagcagaggctggagtgtgagaagcagcagatccagaatgacctgaaccagtggaagacccagtacagcaggaaggaggaggccatcaggaagattgaaagtgagcgggagaagtctgagcgggagaagaacagcctgcggagtgaaattgagcggctgcaggccgagatcaagagaattgaggagcgctgcaggaggaagctggaggacagcacccgggagacccagagccagctggagacagagaggagccgctaccagcgggagattgacaagctgcggcagaggccctacggcagccaccgggagacccagacagaatgtgagtggacagtggacaccagcaagctggtgtttgatggcctgaggaagaaggtgacagccatgcagctgtatgagtgccagctgattgacaagaccaccctggacaagctgctgaagggcaagaagtctgtggaggaggtggccagcgagatccagcccttcctgcggggagctggcagcattgctggggccagcgccagccccaaggagaagtacagcctggtggaggccaagaggaagaagctgatcagccctgagagcacagtgatgctgctggaggcccaggccgccactggaggcatcatcgacccccacagaaatgagaagctgactgtggacagcgccatcgcccgggacctgattgactttgatgaccggcagcagatctatgctgctgagaaggccatcaccggctttgatgaccccttcagcggcaagacagtgtctgtgtctgaggccatcaagaagaacctgattgaccgggagaccggcatgaggctgctggaggcccagatcgccagcggaggagtggtggaccctgtgaacagcgtcttcctgcccaaggatgtggccctggcccggggcctgattgaccgggacctgtaccgcagcctgaatgacccccgggacagccagaagaactttgtggaccctgtgaccaagaagaaggtgtcctatgtgcagctgaaggagcgctgccgcatcgagccccacacaggcctgctgctgctgtctgtgcagaagaggtccatgtccttccagggcatccggcagcctgtgacagtgacagagctggtggacagcggcatcctgcggcccagcacagtgaatgagctggagagcggccagatctcctatgatgaggtgggggagcgcatcaaggacttcctgcagggcagcagctgcatcgccggcatctacaatgagaccaccaagcagaagctgggcatctatgaggccatgaagattggcctggtgcggcctggaacagccctggagctgctggaggcccaggccgccaccggcttcatcgtggaccctgtgagcaacctgcggctgcctgtggaggaggcctacaagaggggcctggtgggcatcgagttcaaggagaagctgctgtctgctgagagagctgtgacaggctacaatgaccctgagaccggcaacatcatcagcctcttccaggccatgaacaaggagctgattgaaaaaggacatggcatccggctgctggaggcccagatcgccaccggcggcatcatcgaccccaaggagagccaccggctgcctgtggacatcgcctacaagaggggctacttcaatgaggagctgtctgagatcctgagtgaccccagtgatgacaccaagggcttctttgaccccaacacagaggagaacctgacctacctgcagctgaaggagcgctgcatcaaggatgaggagaccggcctgtgcctgctgcccctgaaggagaagaagaagcaggtgcagaccagccagaagaacaccctgaggaagagaagagtggtgattgtggaccctgagaccaacaaggagatgtctgtgcaggaggcctacaagaagggcctgattgattatgagaccttcaaggagctgtgtgagcaggagtgtgagtgggaggagatcaccatcactggaagtgatggcagcaccagggtggtgctggtggacaggaagacaggcagccagtatgacatccaggatgccatcgacaagggcctggtggacaggaagttctttgaccagtacagaagtggcagcctgagcctgacccagtttgctgacatgatcagcctgaagaatggagtgggcaccagcagctccatgggcagcggcgtgtctgatgatgtgttcagcagcagcagacatgaatctgtgtccaagatcagcaccatcagctctgtgaggaacctgaccatccgcagcagcagcttcagtgacaccctggaggagagcagccccatcgccgccatctttgacacagagaacctggagaagatcagcatcacagagggcatcgagcggggcatcgtggacagcatcaccggccagaggctgctggaggcccaggcctgcacaggaggcatcatccaccccaccaccggccagaagctgagcctgcaggatgctgtgtcccagggcgtcatcgaccaggacatggccacccggctgaagccagcccagaaggccttcatcggctttgagggcgtgaagggcaagaagaagatgtctgctgctgaggccgtgaaggagaagtggctgccctatgaggccggccagcgcttcctggagttccagtacctgactggaggcctggtggaccctgaggtgcacggccgcatcagcacagaggaggccatcaggaagggcttcattgatggccgggccgcccagaggctgcaggacaccagcagctatgccaagatcctgacctgccccaagaccaagctgaagatctcctacaaggatgccatcaacagatccatggtggaggacatcaccggcctgcggctgctggaggccgcctctgtgagcagcaagggcctgcccagcccctacaacatgagcagcgcccctggcagccgcagcggcagccgcagcggcagccgcagcggcagccgcagcggcagccgcagcggcagccggcggggcagctttgatgccactggaaacagcagctacagctacagctacagcttcagcagcagcagcatcggccactag

SEQ ID NO: 19382 - DNA, 2862 bp, synthetic construct
  misc_feature 1..2862: note = Description of Artificial Sequence: Synthetic coding sequence
  source 1..2862: mol_type = other DNA
cagcagcagagagctgagatggacatggtggcctggggcgtggacctggcctctgtggagcagcacatcaacagccaccggggcatccacaacagcattggagactaccgctggcagctggacaagatcaaggctgacctgcgggagaagagcgccatctaccagctggaggaggagtatgagaacctgctgaaggccagctttgagaggatggaccacctgcggcagctgcagaacatcatccaggccaccagccgggagatcatgtggatcaatgactgtgaggaggaggagctgctgtatgactggagcgacaagaacaccaacatcgcccagaagcaggaggccttcagcatccgcatgagccagctggaggtgaaggagaaggagctgaacaagctgaagcaggagagtgaccagctggtgctgaaccagcacccagccagtgacaagattgaggcctacatggacaccctgcagacccagtggagctggatcctgcagatcaccaagtgcattgatgtgcacctgaaggaaaatgctgcctacttccagttctttgaggaggcccagagcacagaggcctacctgaagggcctgcaggacagcatcaggaagaagtacccctgtgacaagaacatgcccctgcagcacctgctggagcagatcaaggagctggagaaggagcgggagaagatcctggagtacaagaggcaggtgcagaacctggtgaacaagagcaagaagatcgtgcagctgaagcccaggaacccagactaccgcagcaacaagcccatcatcctgcgggccctgtgtgactacaagcaggaccagaagatcgtgcacaagggagatgagtgcatcctgaaggacaacaatgaaagaagcaagtggtacgtgactggacctggaggagtggacatgctggtgcccagcgtgggcctcatcatccccccacccaaccccctggccgtggacctgagctgcaagattgagcagtactatgaggccatcctggccctgtggaaccagctgtacatcaacatgaagagcctggtgtcctggcactactgcatgattgacatcgagaagatccgggccatgaccatcgccaagctgaagaccatgaggcaggaggactacatgaagaccatcgctgacctggagctgcactaccaggagttcatccggaacagccagggcagcgagatgtttggagatgatgacaagaggaagatccagagccagttcacagatgcccagaagcactaccagaccctggtgatccagctgcccggctacccccagcaccagacagtgaccaccacagagatcacccaccacggcacctgccaggatgtgaaccacaacaaggtgattgagaccaacagagaaaatgacaagcaggagacctggatgctgatggagctgcagaagatccggcggcagatcgagcactgtgagggccgcatgaccctgaagaacctgcccctggccgaccagggcagcagccaccacatcaccgtgaagatcaatgagctgaagtctgtgcagaatgacagccaggccatcgccgaggtgctgaaccagctgaaggacatgctggccaacttccggggcagcgagaagtactgctacctgcagaatgaggtgtttggcctcttccagaagctggagaacatcaacggggtgacagatggctacctgaacagcctgtgcaccgtgcgggccctgctgcaggccatcctgcagacagaggacatgctgaaggtgtatgaggcccggctgacagaggaggagaccgtgtgcctggacctggacaaggtggaggcctaccgctgtggcctgaagaagatcaagaatgacctgaacctgaagaagagcctgctggccaccatgaagacagagctgcagaaggcccagcagatccacagccagaccagccagcagtaccccctgtatgacctggacctgggcaagtttggagagaaggtgacccagctgacagaccgctggcagagaattgacaagcagattgacttccggctgtgggacctggagaagcagatcaagcagctgaggaactacagagacaactaccaggccttctgcaagtggctgtatgatgccaagaggcggcaggacagcctggagagcatgaagtttggagacagcaacacagtgatgaggttcctgaatgagcagaagaacctgcacagcgagatcagcggcaagagggacaagtctgaggaggtgcagaagattgctgagctgtgtgccaacagcatcaaggactatgagctgcagctggccagctacaccagcggcctggagaccctgctgaacatccccatcaagaggaccatgatccagagccccagcggggtcatcctgcaggaggccgcagatgtgcacgcccgctacatcgagctgctgaccaggtctggggactactaccgcttcctgtctgagatgctgaagagcctggaggacctgaagctgaagaacaccaagattgaggtgctggaggaggagctgcggctggccagagatgccaacagcgagaactgcaacaagaacaagttcctggaccagaacctgcagaagtaccaggctgaatgttcccagttcaaggccaagctggccagcctggaggagctgaagaggcaggccgagctggatggcaagagcgccaagcagaacctggacaagtgctacggccagatcaaggagctgaatgagaagatcacccggctgacctatgaaattgaagatgagaagagaagaaggaagtctgtggaggacagatttgaccagcagaagaatgactatgaccagctgcagaaggcccggcagtgctag

SEQ ID NO: 19383 - DNA, 6819 bp, synthetic construct
  misc_feature 1..6819: note = Description of Artificial Sequence: Synthetic coding sequence
  source 1..6819: mol_type = other DNA
atgagctgcaatggaggcagccacccccgcatcaacaccctgggccgcatgatccgggcagagagcggccctgacctgcgctatgaggtgaccagcggcggcggcggcaccagcaggatgtactacagccggcggggcgtcatcacagaccagaacagtgatggctactgccagacaggcaccatgagccgccaccagaaccagaacaccatccaggagctgctgcagaactgcagcgactgcctgatgagagctgagctgattgtgcagcctgagctgaagtatggagatggcatccagctgaccaggagccgggagctggatgaatgttttgcccaggccaatgaccagatggagatcctggacagcctcatccgggagatgaggcagatgggccagccctgtgatgcctaccagaagaggctgctgcagctgcaggagcagatgagggccctgtacaaggccatctctgtgccccgggtgcggcgggccagcagcaaaggaggcggcggctacacctgccagagcggcagcggctgggatgagttcaccaagcacgtgaccagcgagtgcctgggctggatgaggcagcagagagctgagatggacatggtggcctggggcgtggacctggcctctgtggagcagcacatcaacagccaccggggcatccacaacagcatcggggactaccgctggcagctggacaagatcaaggctgacctgcgggagaagagcgccatctaccagctggaggaggagtatgagaacctgctgaaggccagctttgagaggatggaccacctgcggcagctgcagaacatcatccaggccaccagccgggagatcatgtggatcaatgactgtgaggaggaggagctgctgtatgactggagcgacaagaacaccaacatcgcccagaagcaggaggccttcagcatccgcatgagccagctggaggtgaaggagaaggagctgaacaagctgaagcaggagagtgaccagctggtgctgaaccagcacccagccagtgacaagattgaggcctacatggacaccctgcagacccagtggagctggatcctgcagatcaccaagtgcattgatgtgcacctgaaggaaaatgctgcctacttccagttctttgaggaggcccagagcacagaggcctacctgaagggcctgcaggacagcatcaggaagaagtacccctgtgacaagaacatgcccctgcagcacctgctggagcagatcaaggagctggagaaggagcgggagaagatcctggagtacaagaggcaggtgcagaacctggtgaacaagagcaagaagatcgtgcagctgaagcccagaaatccagactaccgcagcaacaagcccatcatcctgcgggccctgtgtgactacaagcaggaccagaagatcgtgcacaagggagatgagtgcatcctgaaggacaacaatgaaagaagcaagtggtacgtgacaggccctgggggcgtggacatgctggtgcccagcgtgggcctcatcatccccccacccaaccccctggccgtggacctgagctgcaagattgagcagtactatgaggccatcctggccctgtggaaccagctgtacatcaacatgaagagcctggtgtcctggcactactgcatgattgatattgagaagatccgggccatgaccatcgccaagctgaagaccatgaggcaggaggactacatgaagaccatcgctgacctggagctgcactaccaggagttcatccggaacagccagggcagcgagatgtttggagatgatgacaagaggaagatccagagccagttcacagatgcccagaagcactaccagaccctggtgatccagctgcccggctacccccagcaccagacagtgaccaccacagagatcacccaccacggcacctgccaggatgtgaaccacaacaaggtgattgagaccaaccgggagaatgacaagcaggagacctggatgctgatggagctgcagaagatccggcggcagatcgagcactgtgagggccgcatgaccctgaagaacctgcccctggccgaccagggcagcagccaccacatcaccgtgaagatcaatgagctgaagtctgtgcagaatgacagccaggccatcgccgaggtgctgaaccagctgaaggacatgctggccaacttccggggcagcgagaagtactgctacctgcagaatgaggtgtttggcctcttccagaagctggagaacatcaatggagtgacagatggctacctgaacagcctgtgcaccgtgcgggccctgctgcaggccatcctgcagacagaggacatgctgaaggtgtatgaggcccggctgacagaggaggagaccgtgtgcctggacctggacaaggtggaggcctaccgctgtggcctgaagaagatcaagaatgacctgaacctgaagaagagcctgctggccaccatgaagacagagctgcagaaggcccagcagatccacagccagaccagccagcagtaccccctgtatgacctggacctgggcaagtttggagagaaggtgacccagctgacagaccgctggcagagaattgacaagcagattgacttccggctgtgggacctggagaagcagatcaagcagctgaggaactacagagacaactaccaggccttctgcaagtggctgtatgatgccaagaggcggcaggacagcctggagagcatgaagtttggagacagcaacacagtgatgaggttcctgaatgagcagaagaacctgcacagcgagatcagcggcaagagggacaagtctgaggaggtgcagaagattgctgagctgtgtgccaacagcatcaaggactatgagctgcagctggccagctacaccagcggcctggagaccctgctgaacatccccatcaagaggaccatgatccagagccccagcggggtcatcctgcaggaggccgcagatgtgcacgcccgctacatcgagctgctgaccaggtctggggactactaccgcttcctgtctgagatgctgaagagcctggaggacctgaagctgaagaacaccaagattgaggtgctggaggaggagctgcggctggccagagatgccaacagcgagaactgcaacaagaacaagttcctggaccagaacctgcagaagtaccaggccgagtgcagccagttcaaggccaagctggccagcctggaggagctgaagaggcaggccgagctggatggcaagagcgccaagcagaacctggacaagtgctacggccagatcaaggagctgaatgagaagatcacccggctgacctatgaaattgaagatgagaagagaagaaggaagtctgtggaggacagatttgaccagcagaagaatgactatgaccagctgcagaaggcccggcagtgtgagaaggagaacctgggctggcagaagctggagagcgagaaggccatcaaggagaaggagtatgaaattgagcggctgcgggtgctgctgcaggaggagggcaccaggaagcgggagtatgaaaatgagctggccaaggccagcaaccgcatccaggagagcaagaaccagtgcacccaggtggtgcaggagcgggagagcctgctggtgaagatcaaggtgctggagcaggacaaggcccggctgcagaggctggaggatgagctgaacagagccaagagcaccctggaggccgagaccagggtgaagcagaggctggagtgtgagaagcagcagatccagaatgacctgaaccagtggaagacccagtacagcaggaaggaggaggccatcaggaagattgagagcgagcgggagaagtctgagcgggagaagaacagcctgcggagtgaaattgaaaggctgcaggccgagatcaagagaattgaggagcgctgcaggaggaagctggaggacagcacccgggagacccagagccagctggagacagagaggagccgctaccagcgggagattgacaagctgcggcagaggccctacggcagccaccgggagacccagacagaatgtgagtggacagtggacaccagcaagctggtgtttgatggcctgaggaagaaggtgacagccatgcagctgtatgagtgccagctgattgacaagaccaccctggacaagctgctgaagggcaagaagtctgtggaggaggtggccagcgagatccagcccttcctgcggggggccggcagcattgctggggccagcgccagccccaaggagaagtacagcctggtggaggccaagaggaagaagctgatcagccctgagagcacagtgatgctgctggaggcccaggccgccaccggcggcatcatcgacccccacagaaatgagaagctgactgtggacagcgccatcgcccgggacctgattgactttgatgaccggcagcagatctatgctgctgagaaggccatcactggatttgatgaccccttcagcggcaagacagtgtctgtgtctgaggccatcaagaagaacctgattgaccgggagaccggcatgaggctgctggaggcccagatcgccagcggcggcgtggtggaccctgtgaacagcgtcttcctgcccaaggatgtggccctggcccggggcctgattgaccgggacctgtaccgcagcctgaatgacccccgggacagccagaagaactttgtggaccctgtgaccaagaagaaggtgtcctatgtgcagctgaaggagcgctgcagaattgagccccacacaggcctgctgctgctgtctgtgcagaagaggtccatgtccttccagggcatccggcagcctgtgacagtgacagagctggtggacagcggcatcctgcggcccagcacagtgaatgagctggagagcggccagatctcctatgatgaggtgggggagcgcatcaaggacttcctgcagggcagcagctgcatcgccggcatctacaatgagaccaccaagcagaagctgggcatctatgaggccatgaagattggcctggtgcggcccggcacagccctggagctgctggaggcccaggccgccaccggcttcatcgtggaccctgtgagcaacctgcggctgcctgtggaggaggcctacaagaggggcctggtgggcatcgagttcaaggagaagctgctgtctgctgagagagctgtgacaggctacaatgaccctgagactggaaacatcatcagcctcttccaggccatgaacaaggagctgattgagaagggccacggcatccggctgctggaggcccagatcgccactggaggcatcatcgaccccaaggagagccaccggctgcctgtggacatcgcctacaagaggggctacttcaatgaggagctgtctgagatcctgagtgaccccagtgatgacaccaagggcttctttgaccccaacacagaggagaacctgacctacctgcagctgaaggagcgctgcatcaaggatgaggagaccggcctgtgcctgctgcccctgaaggagaagaagaagcaggtgcagaccagccagaagaacaccctgaggaagagaagagtggtgattgtggaccctgagaccaacaaggagatgtctgtgcaggaggcctacaagaagggcctgattgattatgagaccttcaaggagctgtgtgagcaggagtgtgagtgggaggagatcaccatcaccggcagtgatggcagcaccagggtggtgctggtggacaggaagacaggcagccagtatgacatccaggatgccatcgacaagggcctggtggacaggaagttctttgaccagtaccgcagcggcagcctgagcctgacccagtttgctgacatgatcagcctgaagaatggagtgggcaccagcagctccatgggcagcggcgtgtctgatgatgtgttcagcagcagcagacatgagagcgtgtccaagatcagcaccatcagctctgtgaggaacctgaccatccgcagcagcagcttcagtgacaccctggaggagagcagccccatcgccgccatctttgacacagagaacctggagaagatcagcatcacagagggcatcgagcggggcatcgtggacagcatcaccggccagaggctgctggaggcccaggcctgcaccggcggcatcatccaccccaccaccggccagaagctgagcctgcaggatgctgtgtcccagggcgtgattgaccaggacatggccacccggctgaagccagcccagaaggccttcatcggctttgaaggagtgaagggcaagaagaagatgtctgctgctgaggccgtgaaggagaagtggctgccctatgaagctggccagcgcttcctggagttccagtacctgaccggcggcctggtggaccctgaggtgcacggccgcatcagcacagaggaggccatcaggaagggcttcattgatggccgggccgcccagaggctgcaggacaccagcagctatgccaagatcctgacctgccccaagaccaagctgaagatctcctacaaggatgccatcaacagatccatggtggaggacatcaccggcctgcggctgctggaggccgcctctgtgagcagcaagggcctgcccagcccctacaacatgagcagcgcccctggcagccgcagcggcagccgcagcggcagccgcagcggcagccgcagcggcagccgcagcggcagcagaagaggcagctttgatgccaccggcaacagcagctacagctacagctacagcttcagcagcagcagcatcggccactag

SEQ ID NO: 19384 - DNA, 507 bp, synthetic construct
  misc_feature 1..507: note = Description of Artificial Sequence: Synthetic coding sequence
  source 1..507: mol_type = other DNA
atggagccccccaacctgtaccctgtgaagctgtatgtgtatgacctgagcaagggcctggcccggcggctgagccccatcatgctgggcaagcagctggagggcatctggcacaccagcatcgtggtgcacaaggatgagttcttcttcggcagcggcggcatcagcagctgccccccaggcggcaccctgctgggccccccagacagcgtggtggatgtgggcagcacagaggtgacagaggagatcttcctggagtacctgagcagcctgggggagagcctcttccggggggaggcctacaacctgtttgagcacaactgcaacaccttcagcaatgaggtggcccagttcctgaccggcaggaagatccccagctacatcacagacctgcccagcgaggtgctgagcacccccttcggccaggccctgcggcccctgctggacagcatccagatccagcccccaggcggcagctctgtgggccggcccaacggccagagctag

SEQ ID NO: 19385 - DNA, 561 bp, synthetic construct
  misc_feature 1..561: note = Description of Artificial Sequence: Synthetic coding sequence
  source 1..561: mol_type = other DNA
atgaagagtgacttctacttccagaagtctgagccccacagcctgagcagcgaggccctgatgagaagagctgtgtccctggtgacagacagcaccagcaccttcctgagccagaccacctacgccctgattgaggccatcacagagtacaccaaggctgtgtacaccctgaccagcctgtaccggcagtacaccagcctgctgggcaagatgaacagcgaggaggaggatgaggtgtggcaggtgatcatcggggcccgggcagagatgaccagcaagcaccaggagtacctgaagctggagaccacctggatgacagctgtgggcctgtctgagatggctgctgaggccgcctaccagacaggagctgaccaggccagcatcacagccaggaaccacatccagctggtgaagctgcaggtggaggaggtgcaccagctgagcaggaaggccgagaccaagctggccgaggcccagatcgaggagctgcggcagaagacccaggaggagggggaggagagagctgagagcgagcaggaggcctacctgagagaagattag

SEQ ID NO: 19386 - DNA, 588 bp, synthetic construct
  misc_feature 1..588: note = Description of Artificial Sequence: Synthetic coding sequence
  source 1..588: mol_type = other DNA
atggccgccctgaagtcctggctgagccgctctgtgaccagcttcttccgctaccggcagtgcctgtgtgtgcctgtggtggccaacttcaagaagcgctgcttcagcgagctgatccggccctggcacaagacagtgaccatcggcttcggcgtgaccctgtgtgctgtgcccatcgcccaggccgtgtacaccctgaccagcctgtaccggcagtacaccagcctgctgggcaagatgaacagcgaggaggaggatgaggtgtggcaggtgatcattggagcccgggcagagatgaccagcaagcaccaggagtacctgaagctggagaccacctggatgacagctgtgggcctgtctgagatggctgctgaggccgcctaccagacaggagctgaccaggccagcatcacagccaggaaccacatccagctggtgaagctgcaggtggaggaggtgcaccagctgagcaggaaggccgagaccaagctggccgaggcccagatcgaggagctgcggcagaagacccaggaggagggggaggagcgggcagagagcgagcaggaggcctacctgcgggaggactag

SEQ ID NO: 19387 - DNA, 588 bp, synthetic construct; identical to SEQ ID NO: 19386
  misc_feature 1..588: note = Description of Artificial Sequence: Synthetic coding sequence
  source 1..588: mol_type = other DNA

SEQ ID NO: 19388 - DNA, 720 bp, synthetic construct
  misc_feature 1..720: note = Description of Artificial Sequence: Synthetic coding sequence
  source 1..720: mol_type = other DNA
atggccgccctgaagtcctggctgagccgctctgtgaccagcttcttccgctaccggcagtgcctgtgtgtgcctgtggtggccaacttcaagaagcgctgcttcagcgagctgatccggccctggcacaagacagtgaccatcggcttcggcgtgaccctgtgtgctgtgcccatcgcccagaagtctgagccccacagcctgagcagcgaggccctgatgagaagagctgtgtccctggtgacagacagcaccagcaccttcctgagccagaccacctacgccctgattgaggccatcacagagtacaccaaggctgtgtacaccctgaccagcctgtaccggcagtacaccagcctgctgggcaagatgaacagcgaggaggaggatgaggtgtggcaggtgatcattggagcccgggcagagatgaccagcaagcaccaggagtacctgaagctggagaccacctggatgacagctgtgggcctgtctgagatggctgctgaggccgcctaccagacaggagctgaccaggccagcatcacagccaggaaccacatccagctggtgaagctgcaggtggaggaggtgcaccagctgagcaggaaggccgagaccaagctggccgaggcccagatcgaggagctgcggcagaagacccaggaggagggggaggagcgggcagagagcgagcaggaggcctacctgcgggaggactag

SEQ ID NO: 19389 - DNA, 561 bp, synthetic construct; identical to SEQ ID NO: 19385
  misc_feature 1..561: note = Description of Artificial Sequence: Synthetic coding sequence
  source 1..561: mol_type = other DNA

SEQ ID NO: 19390 - DNA, 3822 bp, synthetic construct
  misc_feature 1..3822: note = Description of Artificial Sequence: Synthetic coding sequence
  source 1..3822: mol_type = other DNA
atggagcccccaggcggcagcctgggccctggccggggcacccgggacaagaagaagggccgcagcccagatgagctgcccagcgctggaggagatggcggcaagagcaagaagttcaccctgaagaggctgatggctgatgagctggagcgcttcacctccatgaggatcaagaaggagaaggagaagcccaacagcgcccacaggaacagcagcgccagctatggagatgaccccacagcccagagcctgcaggatgtgtctgatgagcaggtgctggtgctgtttgagcagatgctgctggacatgaacctgaatgaggagaagcagcagcccctgcgggagaaggacatcatcatcaagcgggagatggtgtcccagtacctgtacaccagcaaggccggcatgagccagaaggagagcagcaagagcgccatgatgtacatccaggagctgcggagcggcctgcgggacatgcccctgctgagctgcctggagagcctgcgggtgtccctgaacaacaaccctgtgtcctgggtgcagacctttggagctgagggcctggccagcctgctggacatcctgaagaggctgcatgatgagaaggaggagacagctggcagctatgacagcaggaacaagcatgagatcatccgctgcctgaaggccttcatgaacaacaagtttggcatcaagaccatgctggagacagaggagggcatcctgctgctggtgcgggccatggaccctgctgtgcccaacatgatgattgatgctgccaagctgctgagcgccctgtgcatcctgccccagcctgaggacatgaatgaaagagtgctggaggccatgacagaaagagctgagatggatgaggtggagcgcttccagcccctgctggatggcctgaagagcggcaccaccatcgccctgaaggtgggctgcctgcagctgatcaatgccctgatcaccccagctgaggagctggacttccgggtgcacatccgctctgagctgatgaggctgggcctgcaccaggtgctgcaggacctgcgggagattgaaaatgaagacatgagggtgcagctgaatgtgtttgatgagcagggcgaggaggacagctatgacctgaagggccgcctggatgacatccgcatggagatggatgacttcaatgaggtgttccagatcctgctgaacacagtgaaggacagcaaggccgagccccacttcctgagcatcctgcagcacctgctgctggtgagaaatgactatgaggcccggccccagtactacaagctgattgaggagtgcatcagccagatcgtgctgcacaagaatggagctgaccctgacttcaagtgccgccacctgcagattgaaattgagggcctgattgaccagatgattgacaagaccaaggtggagaagtctgaggccaaggctgctgagctggagaagaagctggacagcgagctgacagcccggcatgagctgcaggtggagatgaagaagatggagagtgactttgagcagaagctgcaggacctgcagggcgagaaggatgccctgcacagcgagaagcagcagatcgccacagagaagcaggacctggaggccgaggtgtcccagctgactggagaggtggccaagctgaccaaggagctggaggatgccaagaaggagatggccagcctgtctgctgctgccatcaccgtgcccccatctgtgcccagccgggcccctgtgcccccagccccacccctgcccggggacagcggcaccatcatccccccacctccagcccctggggacagcaccaccccacctcctcctcctcctcctcctcctcctcctccacccctgcccggcggcgtgtgcatcagcagcccccccagcctgcccggcggcacagccatcagccccccaccacccctgtctggagatgccaccatccccccacctccacccctgcctgagggcgtgggcatccccagccccagcagcctgcccggcggcacagccatccccccacctccacccctgcccggcagcgcccgcatccccccacctcctccacccctgcccggcagcgctggcatccccccacctcctccacccctgcccggggaggccggcatgcctcctcctcctccacccctgcccggcggccctggcatccccccacctccacccttccctgggggccctggcatccccccacctcctcctggcatgggcatgcctcctcctcctccatttggatttggagtgcctgctgcccctgtgctgcccttcggcctgacccccaagaagctgtacaagccagaggtgcagctgcggcggcccaactggagcaagctggtggccgaggacctgagccaggactgcttctggaccaaggtgaaggaggacagatttgaaaataatgagctgtttgccaagctgaccctgaccttcagcgcccagaccaagaggaccaagaaggccaagaaggaccaggagggcggggaggagaagaagtctgtgcagaagaagaaggtgaaggagctgaaggtgctggacagcaagacagcccagaacctgagcatcttcctgggcagcttcaggatgccctaccaggagatcaagaatgtcatcctggaggtgaatgaagctgtgctgacagagagcatgatccagaacctgatcaagcagatgcctgagcctgagcagctgaagatgctgtctgagctgaaggatgaatatgatgacctggccgagagcgagcagtttggagtggtgatgggcaccgtgccccggctgcggccccggctgaatgccatcctcttcaagctgcagttcagcgagcaggtggagaacatcaagccagagatcgtgtctgtgacagctgcctgtgaggagctgaggaagtctgagagcttcagcaacctgctggagatcaccctgctggtgggcaactacatgaatgccggcagcagaaatgctggggccttcggcttcaacatctccttcctgtgcaagctgcgggacaccaagagcacagaccagaagatgaccctgctgcacttcctggccgagctgtgtgaaaatgactacccagatgtgctgaagttcccagatgagctggcccacgtggagaaggccagccgggtgtctgctgagaacctgcagaagaacctggaccagatgaagaagcagatcagtgatgtggagagagatgtgcagaacttccctgctgccacagatgagaaggacaagtttgtggagaagatgaccatctttgtgaaggatgcccaggagcagtacaacaagctgaggatgatgcacagcaacatggagaccctgtacaaggagctgggggagtacttcctgtttgaccccaagaagctgtctgtggaggagttcttcatggacctgcacaacttcaggaacatgttcctgcaggccgtgaaggagaaccagaagaggcgggagacagaggagaagatgaggcgggccaagctggccaaggagaaggccgagaaggagcggctggagaagcagcagaagcgggagcagctgattgacatgaatgcagaaggagatgaaacaggagtgatggacagcctgctggaggccctgcagagcggggccgccttccggaggaagaggggcccccggcaggccaacaggaaggccggctgtgctgtgaccagcctgctggccagcgagctgaccaaggatgatgccatggctgctgtgcctgccaaggtgtccaagaacagcgagaccttccccaccatcctggaggaggccaaggagctggtgggccgggccagctag

SEQ ID NO: 19391 - DNA, 3810 bp, synthetic construct
  misc_feature 1..3810: note = Description of Artificial Sequence: Synthetic coding sequence
  source 1..3810: mol_type = other DNA
atggagcccccaggcggcagcctgggccctggccggggcacccgggacaagaagaagggccgcagcccagatgagctgcccagcgctggaggagatggcggcaagagcaagaagttcaccctgaagaggctgatggctgatgagctggagcgcttcacctccatgaggatcaagaaggagaaggagaagcccaacagcgcccacaggaacagcagcgccagctatggagatgaccccacagcccagagcctgcaggatgtgtctgatgagcaggtgctggtgctgtttgagcagatgctgctggacatgaacctgaatgaggagaagcagcagcccctgcgggagaaggacatcatcatcaagcgggagatggtgtcccagtacctgtacaccagcaaggccggcatgagccagaaggagagcagcaagagcgccatgatgtacatccaggagctgcggagcggcctgcgggacatgcccctgctgagctgcctggagagcctgcgggtgtccctgaacaacaaccctgtgtcctgggtgcagacctttggagctgagggcctggccagcctgctggacatcctgaagaggctgcatgatgagaaggaggagacagctggcagctatgacagcaggaacaagcatgagatcatccgctgcctgaaggccttcatgaacaacaagtttggcatcaagaccatgctggagacagaggagggcatcctgctgctggtgcgggccatggaccctgctgtgcccaacatgatgattgatgctgccaagctgctgagcgccctgtgcatcctgccccagcctgaggacatgaatgaaagagtgctggaggccatgacagaaagagctgagatggatgaggtggagcgcttccagcccctgctggatggcctgaagagcggcaccaccatcgccctgaaggtgggctgcctgcagctgatcaatgccctgatcaccccagctgaggagctggacttccgggtgcacatccgctctgagctgatgaggctgggcctgcaccaggtgctgcaggacctgcgggagattgaaaatgaagacatgagggtgcagctgaatgtgtttgatgagcagggcgaggaggacagctatgacctgaagggccgcctggatgacatccgcatggagatggatgacttcaatgaggtgttccagatcctgctgaacacagtgaaggacagcaaggccgagccccacttcctgagcatcctgcagcacctgctgctggtgagaaatgactatgaggcccggccccagtactacaagctgattgaggagtgcatcagccagatcgtgctgcacaagaatggagctgaccctgacttcaagtgccgccacctgcagattgaaattgagggcctgattgaccagatgattgacaagaccaaggtggagaagtctgaggccaaggctgctgagctggagaagaagctggacagcgagctgacagcccggcatgagctgcaggtggagatgaagaagatggagagtgactttgagcagaagctgcaggacctgcagggcgagaaggatgccctgcacagcgagaagcagcagatcgccacagagaagcaggacctggaggccgaggtgtcccagctgactggagaggtggccaagctgaccaaggagctggaggatgccaagaaggagatggccagcctgtctgctgctgccatcaccgtgcccccatctgtgcccagccgggcccctgtgcccccagccccacccctgcccggggacagcggcaccatcatccccccacctccagcccctggggacagcaccaccccacctcctcctcctcctcctcctcctcctcctccacccctgcccggcggcgtgtgcatcagcagcccccccagcctgcccggcggcacagccatcagccccccaccacccctgtctggagatgccaccatccccccacctccacccctgcctgagggcgtgggcatccccagccccagcagcctgcccggcggcacagccatccccccacctccacccctgcccggcagcgcccgcatccccccacctcctccacccctgcccggcagcgctggcatccccccacctcctccacccctgcccggggaggccggcatgcctcctcctcctccacccctgcccggcggccctggcatccccccacctccacccttccctgggggccctggcatccccccacctcctcctggcatgggcatgcctcctcctcctccatttggatttggagtgcctgctgcccctgtgctgcccttcggcctgacccccaagaagctgtacaagccagaggtgcagctgcggcggcccaactggagcaagctggtggccgaggacctgagccaggactgcttctggaccaaggtgaaggaggacagatttgaaaataatgagctgtttgccaagctgaccctgaccttcagcgcccagaccaagaccaagaaggaccaggagggcggggaggagaagaagtctgtgcagaagaagaaggtgaaggagctgaaggtgctggacagcaagacagcccagaacctgagcatcttcctgggcagcttcaggatgccctaccaggagatcaagaatgtcatcctggaggtgaatgaagctgtgctgacagagagcatgatccagaacctgatcaagcagatgcctgagcctgagcagctgaagatgctgtctgagctgaaggatgaatatgatgacctggccgagagcgagcagtttggagtggtgatgggcaccgtgccccggctgcggccccggctgaatgccatcctcttcaagctgcagttcagcgagcaggtggagaacatcaagccagagatcgtgtctgtgacagctgcctgtgaggagctgaggaagtctgagagcttcagcaacctgctggagatcaccctgctggtgggcaactacatgaatgccggcagcagaaatgctggggccttcggcttcaacatctccttcctgtgcaagctgcgggacaccaagagcacagaccagaagatgaccctgctgcacttcctggccgagctgtgtgaaaatgactacccagatgtgctgaagttcccagatgagctggcccacgtggagaaggccagccgggtgtctgctgagaacctgcagaagaacctggaccagatgaagaagcagatcagtgatgtggagagagatgtgcagaacttccctgctgccacagatgagaaggacaagtttgtggagaagatgaccagctttgtgaaggatgcccaggagcagtacaacaagctgaggatgatgcacagcaacatggagaccctgtacaaggagctgggggagtacttcctgtttgaccccaagaagctgtctgtggaggagttcttcatggacctgcacaacttcaggaacatgttcctgcaggccgtgaaggagaaccagaagaggcgggagacagaggagaagatgaggcgggccaagctggccaaggagaaggccgagaaggagcggctggagaagcagcagaagcgggagcagctgattgacatgaatgcagaaggagatgaaacaggagtgatggacagcctgctggaggccctgcagagcggggccgccttccggaggaagaggggcccccggcaggccaacaggaaggccggctgtgctgtgaccagcctgctggccagcgagctgaccaaggatgatgccatggctgctgtgcctgccaaggtgtccaagaacagcgagaccttccccaccatcctggaggaggccaaggagctggtgggccgggccagctag

SEQ ID NO: 19392 - DNA, 3792 bp, synthetic construct
  misc_feature 1..3792: note = Description of Artificial Sequence: Synthetic coding sequence
  source 1..3792: mol_type = other DNA
atggagcccccaggcggcagcctgggccctggccggggcacccgggacaagaagaagggccgcagcccagatgagctgcccagcgctggaggagatggcggcaagagcaagaagttcctggagcgcttcacctccatgaggatcaagaaggagaaggagaagcccaacagcgcccacaggaacagcagcgccagctatggagatgaccccacagcccagagcctgcaggatgtgtctgatgagcaggtgctggtgctgtttgagcagatgctgctggacatgaacctgaatgaggagaagcagcagcccctgcgggagaaggacatcatcatcaagcgggagatggtgtcccagtacctgtacaccagcaaggccggcatgagccagaaggagagcagcaagagcgccatgatgtacatccaggagctgcggagcggcctgcgggacatgcccctgctgagctgcctggagagcctgcgggtgtccctgaacaacaaccctgtgtcctgggtgcagaccttcggggctgagggcctggccagcctgctggacatcctgaagaggctgcatgatgagaaggaggagacagctggcagctatgacagcaggaacaagcatgagatcatccgctgcctgaaggccttcatgaacaacaagtttggcatcaagaccatgctggagacagaggagggcatcctgctgctggtgcgggccatggaccctgctgtgcccaacatgatgattgatgctgccaagctgctgagcgccctgtgcatcctgccccagcctgaggacatgaatgaaagagtgctggaggccatgacagagcgggcagagatggatgaggtggagcgcttccagcccctgctggatggcctgaagagcggcaccaccatcgccctgaaggtgggctgcctgcagctgatcaatgccctgatcaccccagctgaggagctggacttccgggtgcacatccgctctgagctgatgaggctgggcctgcaccaggtgctgcaggacctgcgggagattgaaaatgaagacatgagggtgcagctgaatgtgtttgatgagcagggcgaggaggacagctatgacctgaagggccgcctggatgacatccgcatggagatggatgacttcaatgaggtgttccagatcctgctgaacacagtgaaggacagcaaggccgagccccacttcctgagcatcctgcagcacctgctgctggtgagaaatgactatgaggcccggccccagtactacaagctgattgaggagtgcatcagccagatcgtgctgcacaagaatggagctgaccctgacttcaagtgccgccacctgcagatcgagattgagggcctgattgaccagatgattgacaagaccaaggtggagaagtctgaggccaaggctgctgagctggagaagaagctggacagcgagctgacagcccggcatgagctgcaggtggagatgaagaagatggagagtgactttgagcagaagctgcaggacctgcagggcgagaaggatgccctgcacagcgagaagcagcagatcgccacagagaagcaggacctggaggccgaggtgtcccagctgaccggggaggtggccaagctgaccaaggagctggaggatgccaagaaggagatggccagcctgtctgctgctgccatcaccgtgccccccagcgtgcccagccgggcccctgtgcccccagccccacccctgcccggggacagcggcaccatcatccccccacctccagcccctggggacagcaccaccccacctcctcctcctcctcctcctcctcctcctccacccctgcctggaggagtgtgcatcagcagcccccccagcctgcccggcggcacagccatcagccccccaccacccctgtctggagatgccaccatccccccacctccacccctgcctgagggcgtgggcatccccagccccagcagcctgcccggcggcacagccatccccccacctccacccctgcccggcagcgcccgcatccccccacctcctccacccctgcccggcagcgctggcatccccccacctcctccacccctgcctggagaggccggcatgcctcctcctcctccacccctgcccggcggccctggcatccccccacctccacccttccctgggggccctggcatccccccacctcctcctggcatgggcatgcctcctcctccacccttcggcttcggcgtgcctgctgcccctgtgctgcccttcggcctgacccccaagaagctgtacaagccagaggtgcagctgcggcggcccaactggagcaagctggtggccgaggacctgagccaggactgcttctggaccaaggtgaaggaggacagatttgagaacaatgagctgtttgccaagctgaccctgaccttcagcgcccagaccaagaccagcaaggccaagaaggaccaggagggcggggaggagaagaagtctgtgcagaagaagaaggtgaaggagctgaaggtgctggacagcaagacagcccagaacctgagcatcttcctgggcagcttcaggatgccctaccaggagatcaagaatgtcatcctggaggtgaatgaagctgtgctgacagagagcatgatccagaacctgatcaagcagatgcctgagcctgagcagctgaagatgctgtctgagctgaaggatgaatatgatgacctggccgagagcgagcagtttggagtggtgatgggcaccgtgccccggctgcggccccggctgaatgccatcctcttcaagctgcagttcagcgagcaggtggagaacatcaagccagagatcgtgtctgtgacagctgcctgtgaggagctgaggaagtctgagagcttcagcaacctgctggagatcaccctgctggtgggcaactacatgaatgccggcagcagaaatgctggggccttcggcttcaacatctccttcctgtgcaagctgcgggacaccaagagcacagaccagaagatgaccctgctgcacttcctggccgagctgtgtgaaaatgactacccagatgtgctgaagttcccagatgagctggcccacgtggagaaggccagccgggtgtctgctgagaacctgcagaagaacctggaccagatgaagaagcagatcagtgatgtggagagagatgtgcagaacttccctgctgccacagatgagaaggacaagtttgtggagaagatgaccagctttgtgaaggatgcccaggagcagtacaacaagctgaggatgatgcacagcaacatggagaccctgtacaaggagctgggggagtacttcctgtttgaccccaagaagctgtctgtggaggagttcttcatggacctgcacaacttcaggaacatgttcctgcaggccgtgaaggagaaccagaagaggcgggagacagaggagaagatgaggcgggccaagctggccaaggagaaggccgagaaggagcggctggagaagcagcagaagcgggagcagctgattgacatgaatgcagaaggagatgaaacaggagtgatggacagcctgctggaggccctgcagagcggggccgccttccggaggaagaggggcccccggcaggccaacaggaaggccggctgtgctgtgaccagcctgctggccagcgagctgaccaaggatgatgccatggctgctgtgcctgccaaggtgtccaagaacagcgagaccttccccaccatcctggaggaggccaaggagctggtgggccgggccagctag

SEQ ID NO: 19393 - DNA, 3819 bp, synthetic construct
  misc_feature 1..3819: note = Description of Artificial Sequence: Synthetic coding sequence
  source 1..3819: mol_type = other DNA
atggagcccccaggcggcagcctgggccctggccggggcacccgggacaagaagaagggccgcagcccagatgagctgcccagcgctggaggagatggcggcaagagcaagaagttcaccctgaagaggctgatggctgatgagctggagcgcttcacctccatgaggatcaagaaggagaaggagaagcccaacagcgcccacaggaacagcagcgccagctatggagatgaccccacagcccagagcctgcaggatgtgtctgatgagcaggtgctggtgctgtttgagcagatgctgctggacatgaacctgaatgaggagaagcagcagcccctgcgggagaaggacatcatcatcaagcgggagatggtgtcccagtacctgtacaccagcaaggccggcatgagccagaaggagagcagcaagagcgccatgatgtacatccaggagctgcggagcggcctgcgggacatgcccctgctgagctgcctggagagcctgcgggtgtccctgaacaacaaccctgtgtcctgggtgcagacctttggagctgagggcctggccagcctgctggacatcctgaagaggctgcatgatgagaaggaggagacagctggcagctatgacagcaggaacaagcatgagatcatccgctgcctgaaggccttcatgaacaacaagtttggcatcaagaccatgctggagacagaggagggcatcctgctgctggtgcgggccatggaccctgctgtgcccaacatgatgattgatgctgccaagctgctgagcgccctgtgcatcctgccccagcctgaggacatgaatgaaagagtgctggaggccatgacagaaagagctgagatggatgaggtggagcgcttccagcccctgctggatggcctgaagagcggcaccaccatcgccctgaaggtgggctgcctgcagctgatcaatgccctgatcaccccagctgaggagctggacttccgggtgcacatccgctctgagctgatgaggctgggcctgcaccaggtgctgcaggacctgcgggagattgaaaatgaagacatgagggtgcagctgaatgtgtttgatgagcagggcgaggaggacagctatgacctgaagggccgcctggatgacatccgcatggagatggatgacttcaatgaggtgttccagatcctgctgaacacagtgaaggacagcaaggccgagccccacttcctgagcatcctgcagcacctgctgctggtgagaaatgactatgaggcccggccccagtactacaagctgattgaggagtgcatcagccagatcgtgctgcacaagaatggagctgaccctgacttcaagtgccgccacctgcagattgaaattgagggcctgattgaccagatgattgacaagaccaaggtggagaagtctgaggccaaggctgctgagctggagaagaagctggacagcgagctgacagcccggcatgagctgcaggtggagatgaagaagatggagagtgactttgagcagaagctgcaggacctgcagggcgagaaggatgccctgcacagcgagaagcagcagatcgccacagagaagcaggacctggaggccgaggtgtcccagctgactggagaggtggccaagctgaccaaggagctggaggatgccaagaaggagatggccagcctgtctgctgctgccatcaccgtgcccccatctgtgcccagccgggcccctgtgcccccagccccacccctgcccggggacagcggcaccatcatccccccacctccagcccctggggacagcaccaccccacctcctcctcctcctcctcctcctcctcctccacccctgcccggcggcgtgtgcatcagcagcccccccagcctgcccggcggcacagccatcagccccccaccacccctgtctggagatgccaccatccccccacctccacccctgcctgagggcgtgggcatccccagccccagcagcctgcccggcggcacagccatccccccacctccacccctgcccggcagcgcccgcatccccccacctcctccacccctgcccggcagcgctggcatccccccacctcctccacccctgcccggggaggccggcatgcctcctcctcctccacccctgcccggcggccctggcatccccccacctccacccttccctgggggccctggcatccccccacctcctcctggcatgggcatgcctcctcctcctccatttggatttggagtgcctgctgcccctgtgctgcccttcggcctgacccccaagaagctgtacaagccagaggtgcagctgcggcggcccaactggagcaagctggtggccgaggacctgagccaggactgcttctggaccaaggtgaaggaggacagatttgaaaataatgagctgtttgccaagctgaccctgaccttcagcgcccagaccaagaccagcaaggccaagaaggaccaggagggcggggaggagaagaagtctgtgcagaagaagaaggtgaaggagctgaaggtgctggacagcaagacagcccagaacctgagcatcttcctgggcagcttcaggatgccctaccaggagatcaagaatgtcatcctggaggtgaatgaggccgtgctgacagagagcatgatccagaacctgatcaagcagatgcctgagcctgagcagctgaagatgctgtctgagctgaaggatgaatatgatgacctggccgagagcgagcagtttggagtggtgatgggcaccgtgccccggctgcggccccggctgaatgccatcctcttcaagctgcagttcagcgagcaggtggagaacatcaagccagaaattgtgtctgtgacagctgcctgtgaggagctgaggaagtctgagagcttcagcaacctgctggagatcaccctgctggtgggcaactacatgaatgccggcagcagaaatgctggggccttcggcttcaacatctccttcctgtgcaagctgcgggacaccaagagcacagaccagaagatgaccctgctgcacttcctggccgagctgtgtgaaaatgactacccagatgtgctgaagttcccagatgagctggcccacgtggagaaggccagccgggtgtctgctgagaacctgcagaagaacctggaccagatgaagaagcagatcagtgatgtggagagagatgtgcagaacttccctgctgccacagatgagaaggacaagtttgtggagaagatgaccagctttgtgaaggatgcccaggagcagtacaacaagctgaggatgatgcacagcaacatggagaccctgtacaaggagctgggggagtacttcctgtttgaccccaagaagctgtctgtggaggagttcttcatggacctgcacaacttcaggaacatgttcctgcaggccgtgaaggagaaccagaagagaagagaaacagaggagaagatgagaagagccaagctggccaaggagaaggccgagaaggagcggctggagaagcagcagaagcgggagcagctgattgacatgaatgcagaaggagatgagaccggggtgatggacagcctgctggaggccctgcagagcggggccgccttccggaggaagaggggcccccggcaggccaacaggaaggccggctgtgctgtgaccagcctgctggccagcgagctgaccaaggatgatgccatggctgctgtgcctgccaaggtgtccaagaacagcgagaccttccccaccatcctggaggaggccaaggagctggtgggccgggccagctag

SEQ ID NO: 19394 - DNA, 3747 bp, synthetic construct
  misc_feature 1..3747: note = Description of Artificial Sequence: Synthetic coding sequence
  source 1..3747: mol_type = other DNA
atggagcccccaggcggcagcctgggccctggccggggcacccgggacaagaagaagggccgcagcccagatgagctgcccagcgctggaggagatggcggcaagagcaagaagttcctggagcgcttcacctccatgaggatcaagaaggagaaggagaagcccaacagcgcccacaggaacagcagcgccagctatggagatgaccccacagcccagagcctgcaggatgtgtctgatgagcaggtgctggtgctgtttgagcagatgctgctggacatgaacctgaatgaggagaagcagcagcccctgcgggagaaggacatcatcatcaagcgggagatggtgtcccagtacctgtacaccagcaaggccggcatgagccagaaggagagcagcaagagcgccatgatgtacatccaggagctgcggagcggcctgcgggacatgcccctgctgagctgcctggagagcctgcgggtgtccctgaacaacaaccctgtgtcctgggtgcagaccttcggggctgagggcctggccagcctgctggacatcctgaagaggctgcatgatgagaaggaggagacagctggcagctatgacagcaggaacaagcatgagatcatccgctgcctgaaggccttcatgaacaacaagtttggcatcaagaccatgctggagacagaggagggcatcctgctgctggtgcgggccatggaccctgctgtgcccaacatgatgattgatgctgccaagctgctgagcgccctgtgcatcctgccccagcctgaggacatgaatgaaagagtgctggaggccatgacagagcgggcagagatggatgaggtggagcgcttccagcccctgctggatggcctgaagagcggcaccaccatcgccctgaaggtgggctgcctgcagctgatcaatgccctgatcaccccagctgaggagctggacttccgggtgcacatccgctctgagctgatgaggctgggcctgcaccaggtgctgcaggacctgcgggagattgaaaatgaagacatgagggtgcagctgaatgtgtttgatgagcagggcgaggaggacagctatgacctgaagggccgcctggatgacatccgcatggagatggatgacttcaatgaggtgttccagatcctgctgaacacagtgaaggacagcaaggccgagccccacttcctgagcatcctgcagcacctgctgctggtgagaaatgactatgaggcccggccccagtactacaagctgattgaggagtgcatcagccagatcgtgctgcacaagaatggagctgaccctgacttcaagtgccgccacctgcagatcgagattgagggcctgattgaccagatgattgacaagaccaaggtggagaagtctgaggccaaggctgctgagctggagaagaagctggacagcgagctgacagcccggcatgagctgcaggtggagatgaagaagatggagagtgactttgagcagaagctgcaggacctgcagggcgagaaggatgccctgcacagcgagaagcagcagatcgccacagagaagcaggacctggaggccgaggtgtcccagctgaccggggaggtggccaagctgaccaaggagctggaggatgccaagaaggagatggccagcctgtctgctgctgccatcaccgtgccccccagcgtgcccagccgggcccctgtgcccccagccccacccctgcccggggacagcggcaccatcatccccccacctccagcccctggggacagcaccaccccacctcctcctcctcctcctcctcctcctcctccacccctgcccggcggcacagccatcagccccccaccacccctgtctggagatgccaccatccccccacctccacccctgcctgagggcgtgggcatccccagccccagcagcctgcccggcggcacagccatccccccacctccacccctgcccggcagcgcccgcatccccccacctcctccacccctgcccggcagcgctggcatccccccacctcctccacccctgcctggagaggccggcatgcctcctcctcctccacccctgcccggcggccctggcatccccccacctccacccttccctgggggccctggcatccccccacctcctcctggcatgggcatgcctcctcctccacccttcggcttcggcgtgcctgctgcccctgtgctgcccttcggcctgacccccaagaagctgtacaagccagaggtgcagctgcggcggcccaactggagcaagctggtggccgaggacctgagccaggactgcttctggaccaaggtgaaggaggacagatttgagaacaatgagctgtttgccaagctgaccctgaccttcagcgcccagaccaagaccaagaaggaccaggagggcggggaggagaagaagtctgtgcagaagaagaaggtgaaggagctgaaggtgctggacagcaagacagcccagaacctgagcatcttcctgggcagcttcaggatgccctaccaggagatcaagaatgtcatcctggaggtgaatgaggccgtgctgacagagagcatgatccagaacctgatcaagcagatgcctgagcctgagcagctgaagatgctgtctgagctgaaggatgaatatgatgacctggccgagagcgagcagtttggagtggtgatgggcaccgtgccccggctgcggccccggctgaatgccatcctcttcaagctgcagttcagcgagcaggtggagaacatcaagccagaaattgtgtctgtgacagctgcctgtgaggagctgaggaagtctgagagcttcagcaacctgctggagatcaccctgctggtgggcaactacatgaatgccggcagcagaaatgctggggccttcggcttcaacatctccttcctgtgcaagctgcgggacaccaagagcacagaccagaagatgaccctgctgcacttcctggccgagctgtgtgaaaatgactacccagatgtgctgaagttcccagatgagctggcccacgtggagaaggccagccgggtgtctgctgagaacctgcagaagaacctggaccagatgaagaagcagatcagtgatgtggagagagatgtgcagaacttccctgctgccacagatgagaaggacaagtttgtggagaagatgaccatctttgtgaaggatgcccaggagcagtacaacaagctgaggatgatgcacagcaacatggagaccctgtacaaggagctgggggagtacttcctgtttgaccccaagaagctgtctgtggaggagttcttcatggacctgcacaacttcaggaacatgttcctgcaggccgtgaaggagaaccagaagagaagagaaacagaggagaagatgagaagagccaagctggccaaggagaaggccgagaaggagcggctggagaagcagcagaagcgggagcagctgattgacatgaatgcagaaggagatgagaccggggtgatggacagcctgctggaggccctgcagagcggggccgccttccggaggaagaggggcccccggcaggccaacaggaaggccggctgtgctgtgaccagcctgctggccagcgagctgaccaaggatgatgccatggctgctgtgcctgccaaggtgtccaagaacagcgagaccttccccaccatcctggaggaggccaaggagctggtgggccgggccagctag

SEQ ID NO: 19395 - DNA, 3795 bp, synthetic construct
  misc_feature 1..3795: note = Description of Artificial Sequence: Synthetic coding sequence
  source 1..3795: mol_type = other DNA
atggagcccccaggcggcagcctgggccctggccggggcacccgggacaagaagaagggccgcagcccagatgagctgcccagcgctggaggagatggcggcaagagcaagaagttcctggagcgcttcacctccatgaggatcaagaaggagaaggagaagcccaacagcgcccacaggaacagcagcgccagctatggagatgaccccacagcccagagcctgcaggatgtgtctgatgagcaggtgctggtgctgtttgagcagatgctgctggacatgaacctgaatgaggagaagcagcagcccctgcgggagaaggacatcatcatcaagcgggagatggtgtcccagtacctgtacaccagcaaggccggcatgagccagaaggagagcagcaagagcgccatgatgtacatccaggagctgcggagcggcctgcgggacatgcccctgctgagctgcctggagagcctgcgggtgtccctgaacaacaaccctgtgtcctgggtgcagaccttcggggctgagggcctggccagcctgctggacatcctgaagaggctgcatgatgagaaggaggagacagctggcagctatgacagcaggaacaagcatgagatcatccgctgcctgaaggccttcatgaacaacaagtttggcatcaagaccatgctggagacagaggagggcatcctgctgctggtgcgggccatggaccctgctgtgcccaacatgatgattgatgctgccaagctgctgagcgccctgtgcatcctgccccagcctgaggacatgaatgaaagagtgctggaggccatgacagagcgggcagagatggatgaggtggagcgcttccagcccctgctggatggcctgaagagcggcaccaccatcgccctgaaggtgggctgcctgcagctgatcaatgccctgatcaccccagctgaggagctggacttccgggtgcacatccgctctgagctgatgaggctgggcctgcaccaggtgctgcaggacctgcgggagattgaaaatgaagacatgagggtgcagctgaatgtgtttgatgagcagggcgaggaggacagctatgacctgaagggccgcctggatgacatccgcatggagatggatgacttcaatgaggtgttccagatcctgctgaacacagtgaaggacagcaaggccgagccccacttcctgagcatcctgcagcacctgctgctggtgagaaatgactatgaggcccggccccagtactacaagctgattgaggagtgcatcagccagatcgtgctgcacaagaatggagctgaccctgacttcaagtgccgccacctgcagatcgagattgagggcctgattgaccagatgattgacaagaccaaggtggagaagtctgaggccaaggctgctgagctggagaagaagctggacagcgagctgacagcccggcatgagctgcaggtggagatgaagaagatggagagtgactttgagcagaagctgcaggacctgcagggcgagaaggatgccctgcacagcgagaagcagcagatcgccacagagaagcaggacctggaggccgaggtgtcccagctgaccggggaggtggccaagctgaccaaggagctggaggatgccaagaaggagatggccagcctgtctgctgctgccatcaccgtgccccccagcgtgcccagccgggcccctgtgcccccagccccacccctgcccggggacagcggcaccatcatccccccacctccagcccctggggacagcaccaccccacctcctcctcctcctcctcctcctcctcctccacccctgcctggaggagtgtgcatcagcagcccccccagcctgcccggcggcacagccatcagccccccaccacccctgtctggagatgccaccatccccccacctccacccctgcctgagggcgtgggcatccccagccccagcagcctgcccggcggcacagccatccccccacctccacccctgcccggcagcgcccgcatccccccacctcctccacccctgcccggcagcgctggcatccccccacctcctccacccctgcctggagaggccggcatgcctcctcctcctccacccctgcccggcggccctggcatccccccacctccacccttccctgggggccctggcatccccccacctcctcctggcatgggcatgcctcctcctccacccttcggcttcggcgtgcctgctgcccctgtgctgcccttcggcctgacccccaagaagctgtacaagccagaggtgcagctgcggcggcccaactggagcaagctggtggccgaggacctgagccaggactgcttctggaccaaggtgaaggaggacagatttgagaacaatgagctgtttgccaagctgaccctgaccttcagcgcccagaccaagaggaccaagaaggccaagaaggaccaggagggcggggaggagaagaagtctgtgcagaagaagaaggtgaaggagctgaaggtgctggacagcaagacagcccagaacctgagcatcttcctgggcagcttcaggatgccctaccaggagatcaagaatgtcatcctggaggtgaatgaggccgtgctgacagagagcatgatccagaacctgatcaagcagatgcctgagcctgagcagctgaagatgctgtctgagctgaaggatgaatatgatgacctggccgagagcgagcagtttggagtggtgatgggcaccgtgccccggctgcggccccggctgaatgccatcctcttcaagctgcagttcagcgagcaggtggagaacatcaagccagaaattgtgtctgtgacagctgcctgtgaggagctgaggaagtctgagagcttcagcaacctgctggagatcaccctgctggtgggcaactacatgaatgccggcagcagaaatgctggggccttcggcttcaacatctccttcctgtgcaagctgcgggacaccaagagcacagaccagaagatgaccctgctgcacttcctggccgagctgtgtgaaaatgactacccagatgtgctgaagttcccagatgagctggcccacgtggagaaggccagccgggtgtctgctgagaacctgcagaagaacctggaccagatgaagaagcagatcagtgatgtggagagagatgtgcagaacttccctgctgccacagatgagaaggacaagtttgtggagaagatgaccatctttgtgaaggatgcccaggagcagtacaacaagctgaggatgatgcacagcaacatggagaccctgtacaaggagctgggggagtacttcctgtttgaccccaagaagctgtctgtggaggagttcttcatggacctgcacaacttcaggaacatgttcctgcaggccgtgaaggagaaccagaagagaagagaaacagaggagaagatgagaagagccaagctggccaaggagaaggccgagaaggagcggctggagaagcagcagaagcgggagcagctgattgacatgaatgcagaaggagatgagaccggggtgatggacagcctgctggaggccctgcagagcggggccgccttccggaggaagaggggcccccggcaggccaacaggaaggccggctgtgctgtgaccagcctgctggccagcgagctgaccaaggatgatgccatggctgctgtgcctgccaaggtgtccaagaacagcgagaccttccccaccatcctggaggaggccaaggagctggtgggccgggccagctag

SEQ ID NO: 19396 - DNA, 855 bp, synthetic construct
  misc_feature 1..855: note = Description of Artificial Sequence: Synthetic coding sequence
  source 1..855: mol_type = other DNA
atggccagcctgtctgctgctgccatcaccgtgccccccagcgtgcccagccgggcccctgtgcccccagccccacccctgcccggggacagcggcaccatcatccccccacctccagcccctggggacagcaccaccccacctcctcctcctcctcctcctcctcctcctccacccctgcctggaggagtgtgcatcagcagcccccccagcctgcccggcggcacagccatcagccccccaccacccctgtctggagatgccaccatccccccacctccacccctgcctgagggcgtgggcatccccagccccagcagcctgcccggcggcacagccatccccccacctccacccctgcccggcagcgcccgcatccccccacctcctccacccctgcccggcagcgctggcatccccccacctcctccacccctgcctggagaggccggcatgcctcctcctcctccacccctgcccggcggccctggcatccccccacctccacccttccctgggggccctggcatccccccacctcctcctggcatgggcatgcctcctcctccacccttcggcttcggcgtgcctgctgcccctgtgctgcccttcggcctgacccccaagaagctgtacaagccagaggtgcagctgcggcggcccaactggagcaagctggtggccgaggacctgagccaggactgcttctggaccaaggtgaaggaggacagatttgagaacaatgagctgtttgccaagctgaccctgaccttcagcgcccagaccaagtctgagaaggccaagaaggaccaggagggcggggaggagaagaagtctgtgcagaagaagaagtag

SEQ ID NO: 19397 - DNA, 513 bp, synthetic construct
  misc_feature 1..513: note = Description of Artificial Sequence: Synthetic coding sequence
  source 1..513: mol_type = other DNA
atgtactgccagtttgccagcttccagtacacctgccagccctgccggggccagaggatgctgtgcacccgggacagcgagtgctgcggggaccagctgtgtgtgtggggccactgcaccaagatggccacccggggcagcaatggcaccatctgtgacaaccagagggactgccagcccggcctgtgctgtgccttccagaggggcctgctcttccctgtgtgcacccccctgcctgtggagggggagctgtgccacgaccctgccagccggctgctggacctgatcacctgggagctggagccagatggagccctggaccgctgcccctgtgccagcggcctgctgtgccagccccacagccacagcctggtgtatgtgtgcaagcccacctttgtgggcagccgggaccaggatggagagatcctgctgccccgggaggtgcctgatgagtacctggccgcctcctggaggcgctgtgcccgctcctggaggacctggaggggggcctag

SEQ ID NO: 19398 - DNA, 1053 bp, synthetic construct
  misc_feature 1..1053: note = Description of Artificial Sequence: Synthetic coding sequence
  source 1..1053: mol_type = other DNA
atgcagaggctgggcgccaccctgctgtgcctgctgctggccgctgctgtgcccacagccccagccccagcccccacagccaccagcgcccctgtgaagccaggccctgccctgagctacccccaggaggaggccaccctgaatgagatgttccgggaggtggaggagctgatggaggacacccagcacaagctgcggtctgctgtggaggagatggaggccgaggaggccgccgccaaggccagcagcgaggtgaacctggccaacctgcccccatcctaccacaatgagaccaacacagacaccaaggtgggcaacaacaccatccacgtgcaccgggagatccacaagatcaccaacaaccagacaggccagatggtgttttctgaaacagtcatcacctctgtgggagatgaggagggccgccgcagccatgagtgcatcattgatgaggactgtggccccagcatgtactgccagtttgccagcttccagtacacctgccagccctgccggggccagaggatgctgtgcacccgggacagcgagtgctgcggggaccagctgtgtgtgtggggccactgcaccaagatggccacccggggcagcaatggcaccatctgtgacaaccagagggactgccagcccggcctgtgctgtgccttccagaggggcctgctcttccctgtgtgcacccccctgcctgtggagggggagctgtgccacgaccctgccagccggctgctggacctgatcacctgggagctggagccagatggagccctggaccgctgcccctgtgccagcggcctgctgtgccagccccacagccacagcctggtgtatgtgtgcaagcccacctttgtgggcagccgggaccaggatggagagatcctgctgccccgggaggtgcctgatgaatatgaggtgggcagcttcatggaggaggtgcggcaggagctggaggacctggagaggagcctgacagaggagatggccctgcgggagcctgctgctgctgctgctgccctgctgggcggggaggagatctag

SEQ ID NO: 19399 - DNA, 882 bp, synthetic construct
  misc_feature 1..882: note = Description of Artificial Sequence: Synthetic coding sequence
  source 1..882: mol_type = other DNA
atggaggacacccagcacaagctgcggtctgctgtggaggagatggaggccgaggaggccgccgccaaggccagcagcgaggtgaacctggccaacctgccccccagctaccacaatgagaccaacacagacaccaaggtgggcaacaacaccatccacgtgcaccgggagatccacaagatcaccaacaaccagacaggccagatggtgttcagcgagaccgtcatcacctctgtgggagatgaggagggcagaagaagccatgagtgcatcattgatgaggactgtggccccagcatgtactgccagtttgccagcttccagtacacctgccagccctgccggggccagaggatgctgtgcacccgggacagcgagtgctgcggggaccagctgtgtgtgtggggccactgcaccaagatggccacccggggcagcaatggcaccatctgtgacaaccagagggactgccagcccggcctgtgctgtgccttccagaggggcctgctcttccctgtgtgcacccccctgcctgtggagggggagctgtgccacgaccctgccagccggctgctggacctgatcacctgggagctggagccagatggagccctggaccgctgcccctgtgccagcggcctgctgtgccagccccacagccacagcctggtgtatgtgtgcaagcccacctttgtgggcagccgggaccaggatggagagatcctgctgccccgggaggtgcctgatgaatatgaggtgggcagcttcatggaggaggtgcggcaggagctggaggacctggagaggagcctgacagaggagatggccctgcgggagcctgctgctgctgctgctgccctgctgggcggggaggagatctag

SEQ ID NO: 19400 - DNA, 1053 bp, synthetic construct; identical to SEQ ID NO: 19398
  misc_feature 1..1053: note = Description of Artificial Sequence: Synthetic coding sequence
  source 1..1053: mol_type = other DNA

SEQ ID NO: 19401 - DNA, 969 bp, synthetic construct
  misc_feature 1..969: note = Description of Artificial Sequence: Synthetic coding sequence
  source 1..969: mol_type = other DNA
atgcagaggctgggcgccaccctgctgtgcctgctgctggccgctgctgtgcccacagccccagccccagcccccacagccaccagcgcccctgtgaagccaggccctgccctgagctacccccaggaggaggccaccctgaatgagatgttccgggaggtggaggagctgatggaggacacccagcacaagctgcggtctgctgtggaggagatggaggccgaggaggccgccgccaaggccagcagcgaggtgaacctggccaacctgcccccatcctaccacaatgagaccaacacagacaccaaggtgggcaacaacaccatccacgtgcaccgggagatccacaaggagtgcatcattgatgaggactgtggccccagcatgtactgccagtttgccagcttccagtacacctgccagccctgccggggccagaggatgctgtgcacccgggacagcgagtgctgcggggaccagctgtgtgtgtggggccactgcaccaagatggccacccggggcagcaatggcaccatctgtgacaaccagagggactgccagcccggcctgtgctgtgccttccagaggggcctgctcttccctgtgtgcacccccctgcctgtggagggggagctgtgccacgaccctgccagccggctgctggacctgatcacctgggagctggagccagatggagccctggaccgctgcccctgtgccagcggcctgctgtgccagccccacagccacagcctggtgtatgtgtgcaagcccacctttgtgggcagccgggaccaggatggagagatcctgctgccccgggaggtgcctgatgaatatgaggtgggcagcttcatggaggaggtgcggcaggagctggaggacctggagaggagcctgacagaggagatggccctgcgggagcctgctgctgctgctgctgccctgctgggcggggaggagatctag

SEQ ID NO: 19402 - DNA, 708 bp, synthetic construct
  misc_feature 1..708: note = Description of Artificial Sequence: Synthetic coding sequence
  source 1..708: mol_type = other DNA
atgcagaggctgggcgccaccctgctgtgcctgctgctggccgctgctgtgcccacagccccagccccagcccccacagccaccagcgcccctgtgaagccaggccctgccctgagctacccccaggaggaggccaccctgaatgagatgttccgggaggtggaggagctgatggaggacacccagcacaagctgcggtctgctgtggaggagatggaggccgaggaggccgccgccaaggccagcagcgaggtgaacctggccaacctgcccccatcctaccacaatgagaccaacacagacaccaaggtgggcaacaacaccatccacgtgcaccgggagatccacaagatcaccaacaaccagacaggccagatggtgttttctgaaacagtcatcacctctgtgggagatgaggagggccgccgcagccatgagtgcatcattgatgaggactgtggccccagcatgtactgccagtttgccagcttccagtacacctgccagccctgccggggccagaggatgctgtgcacccgggacagcgagtgctgcggggaccagctgtgtgtgtggggccactgcaccaagatggccacccggggcagcaatggcaccatctgtgacaaccagagggactgccagcccggcctgtgctgtgccttccagaggggcctgctcttccctgtgtgcacccccctgccctag

SEQ ID NO: 19403 - DNA, 2301 bp, synthetic construct
  misc_feature 1..2301: note = Description of Artificial Sequence: Synthetic coding sequence
  source 1..2301: mol_type = other DNA
atgaagaccccctggaaggtgctgctgggcctgctgggcgctgctgccctggtgaccatcatcaccgtgcctgtggtgctgctgaacaagggcacagatgatgccacagctgacagcaggaagacctacaccctgacagactacctgaagaacacctaccgcctgaagctgtacagcctgcgctggatcagtgaccacgagtacctgtacaagcaggagaacaacatcctggtgttcaatgcagaatatggcaacagctctgtgttcctggagaacagcacctttgatgaatttggccacagcatcaatgactacagcatcagcccagatggccagttcatcctgctggagtacaactacgtgaagcagtggaggcacagctacacagccagctatgacatctatgacctgaacaagaggcagctgatcacagaggagcgcatccccaacaacacccagtgggtgacctggagccctgtgggccacaagctggcctacgtgtggaacaatgacatctacgtgaagattgagcccaacctgcccagctaccgcatcacctggacaggcaaggaggacatcatctacaacggcatcacagactgggtgtatgaggaggaggtgttttctgcctacagcgccctgtggtggagccccaacggcaccttcctggcctatgcccagttcaatgacacagaggtgcccctcatcgagtacagcttctacagtgatgagagcctgcagtaccccaagacagtgcgggtgccctaccccaaggccggggctgtgaaccccaccgtgaagttctttgtggtgaacacagacagcctgagctctgtgaccaatgccaccagcatccagatcacagccccagcctccatgctgattggagaccactacctgtgtgatgtgacctgggccacccaggagcgcatcagcctgcagtggctgcggcgcatccagaactacagcgtgatggacatctgtgactatgatgagagcagcggccgctggaactgcctggtggcccggcagcacatcgagatgagcaccaccggctgggtgggccgcttccggcccagcgagccccacttcaccctggatggcaacagcttctacaagatcatcagcaatgaggagggctaccgccacatctgctacttccagattgacaagaaggactgcaccttcatcaccaagggcacctgggaggtgattggaattgaggccctgaccagtgactacctgtactacatcagcaatgagtacaagggcatgcctgggggcaggaacctgtacaagatccagctgagtgactacaccaaggtgacctgcctgagctgtgagctgaaccctgagcgctgccagtactacagcgtgtccttcagcaaggaggccaagtactaccagctgcgctgcagcggccctggcctgcccctgtacaccctgcacagctctgtgaatgacaagggcctgcgggtgctggaggacaacagcgccctggacaagatgctgcagaatgtgcagatgcccagcaagaagctggacttcatcatcctgaatgagaccaagttctggtaccagatgatcctgcccccccactttgacaagagcaagaagtaccccctgctgctggatgtgtatgccggcccctgcagccagaaggctgacacagtgttccggctgaactgggccacctacctggccagcacagagaacatcatcgtggccagctttgatggccggggcagcggctaccagggcgacaagatcatgcacgccatcaacagaaggctgggcacctttgaggtggaggaccagattgaagctgcccggcagttcagcaagatgggctttgtggacaacaagagaattgccatctggggctggagctatggaggctacgtgacctccatggtgctgggcagcggcagcggggtcttcaagtgtggcattgctgtggcccctgtgagccgctgggagtactatgacagcgtgtacacagagcgctacatgggcctgcccaccccagaggacaacctggaccactacagaaacagcacagtgatgagcagagctgagaacttcaagcaggtggagtacctgctgatccacggcacagcagatgacaacgtgcacttccagcagagcgcccagatcagcaaggccctggtggatgtgggcgtggacttccaggccatgtggtacacagatgaggaccacggcatcgccagcagcacagcccaccagcacatctacacccacatgagccacttcatcaagcagtgcttcagcctgccctag

SEQ ID NO: 19404 - DNA, 645 bp, synthetic construct
  misc_feature 1..645: note = Description of Artificial Sequence: Synthetic coding sequence
  source 1..645: mol_type = other DNA
atgaatgtgttccgcatcctgggggacctgagccacctgctggccatgatcctgctgctgggcaagatctggaggagcaagtgctgcaagggcatcagcggcaagagccagatcctgtttgccctggtgttcaccacccgctacctggacctcttcaccaacttcatcagcatctacaacacagtgatgaaggtggtgttcctgctgtgtgcctacgtgacagtgtacatgatctacggcaagttcaggaagacctttgacagtgaaaatgacaccttccggctggagttcctgctggtgcctgtgattggcctgtccttcctggagaactacagcttcaccctgctggagatcctgtggaccttcagcatctacctggagagcgtggccatcctgccccagctgttcatgatcagcaagacaggagaggccgagaccatcaccacccactacctgttcttcctgggcctgtaccgggccctgtacctggccaactggatccgccgctaccagacagagaacttctatgaccagattgctgtggtgtctggagtggtgcagaccatcttctactgtgacttcttctacctgtatgtgaccaaggtgctgaagggcaagaagctgagcctgcccatgcccatctag

SEQ ID NO: 19405 - DNA, 498 bp, synthetic construct
  misc_feature 1..498: note = Description of Artificial Sequence: Synthetic coding sequence
  source 1..498: mol_type = other DNA
atgaaggaggaccaggtggtggccgaggagcccggcttccaggatgaggaggagagcctcttccaggacatcgacctgctgcagaagcacggcatcaacgtggccgacatcaagaagctgaagtctgtgggcatctgcaccatcaagggcatccagatgaccacccggcgggccctgtgcaatgtgaagggcctgtctgaggccaaggtggacaagatcaaggaggccgccaacaagctgattgagcccggcttcctgacagcctttgagtacagcgagaagaggaagatggtgttccacatcaccaccggcagccaggagtttgacaagctgctgggcggcggcatcgagagcatggccatcacagaggcctttggagagttcagaacaggcaagacccagctgagccacaccctgtgtgtgacagcccagctgcccggggccggcggctacccaggcggcaagatcatcttcatcgacacagagaacaccctgtag

SEQ ID NO: 19406 - DNA, 420 bp, synthetic construct
  misc_feature 1..420: note = Description of Artificial Sequence: Synthetic coding sequence
  source 1..420: mol_type = other DNA
atgaaggaggaccaggtggtggccgaggagcccggcttccaggatgaggaggagagcctcttccaggacatcgacctgctgcagaagcacggcatcaacgtggccgacatcaagaagctgaagtctgtgggcatctgcaccatcaagggcatccagatgaccacccggcgggccctgtgcaatgtgaagggcctgtctgaggccaaggtggacaagatcaaggaggccgccaacaagctgattgagcccggcttcctgacagcctttgagtacagcgagaagaggaagatggtgttccacatcaccaccggcagccaggagtttgacaagctgctgggcggcggcatcgagagcatggccatcacagaggcctttggagagttcagaacaggcaagacccagctgagccacaccctgtag

SEQ ID NO: 19407 - DNA, 858 bp, synthetic construct
  misc_feature 1..858: note = Description of Artificial Sequence: Synthetic coding sequence
  source 1..858: mol_type = other DNA
atgaaggaggaccaggtggtggccgaggagcccggcttccaggatgaggaggagagcctcttccaggacatcgacctgctgcagaagcacggcatcaacgtggccgacatcaagaagctgaagtctgtgggcatctgcaccatcaagggcatccagatgaccacccggcgggccctgtgcaatgtgaagggcctgtctgaggccaaggtggacaagatcaaggaggccgccaacaagctgattgagcccggcttcctgacagcctttgagtacagcgagaagaggaagatggtgttccacatcaccaccggcagccaggagtttgacaagctgctgggcggcggcatcgagagcatggccatcacagaggcctttggagagttcagaacaggcaagacccagctgagccacaccctgtgtggggagcaccagatggagctgctggactatgtggccgccaagttccacgaggaggccggcatcttcaagctgctgatcatcgacagcatcatggccctcttccgggtggacttcagcggccgcggggagctggccgagcggcagcagaagctggcccagatgctgagccggctgcagaagatcagcgaggagtacaacgtggccgtgtttgtgaccaaccagatgacagctgaccccggggccaccatgaccttccaggccgaccccaagaagcccatcggcggccacatcctggcccacgccagcaccacccgcatcagcctgaggaagggccgcggggagctgagaattgccaagatctatgacagccctgagatgccagaaaatgaggccacctttgccatcacagctgggggcattggagatgccaaggagtag

SEQ ID NO: 19408 - DNA, 612 bp, synthetic construct
  misc_feature 1..612: note = Description of Artificial Sequence: Synthetic coding sequence
  source 1..612: mol_type = other DNA
atgaaggaggaccaggtggtggccgaggagcccggcttccaggatgaggaggagagcctcttccaggacatcgacctgctgcagaagcacggcatcaacgtggccgacatcaagaagctgaagtctgtgggcatctgcaccatcaagggcatccagatgaccacccggcgggccctgtgcaatgtgaagggcctgtctgaggccaaggtggacaagatcaaggaggccgccaacaagctgattgagcccggcttcctgacagcctttgagtacagcgagaagaggaagatggtgttccacatcaccaccggcagccaggagtttgacaagctgctgggcggcggcatcgagagcatggccatcacagaggcctttggagagttcagaacaggcaagacccagctgagccacaccctgtgtggggagcaccagatggagctgctggactatgtggccgccaagttccacgaggaggccggcatcttcaagctgctgatcatcgacagcatcatggccctcttccgggtggacttcagcggccgcggggagctggccgagcggcagcagaagctggcccagatgctgagccggctgcagaagatcagcgagtag

SEQ ID NO: 19409 - DNA, 1599 bp, synthetic construct
  misc_feature 1..1599: note = Description of Artificial Sequence: Synthetic coding sequence
  source 1..1599: mol_type = other DNA
atgaatggagtgctgatcccccacacccccatcgctgtggacttctggagcctgcggcgggccggcacagcccggctcttcttcctgagccacatgcacagcgaccacacagtgggcctgagcagcacctgggcccggcccctgtactgcagccccatcacagcccacctgctgcaccgccacctgcaggtgtccaagcagtggatccaggccctggaggtgggggagagccacgtgctgcccctggatgaaattggccaggagaccatgacagtgaccctgctggatgccaaccactgccccggctctgtgatgttcctgtttgagggctacttcggcaccatcctgtacaccggggacttccgctacacccccagcatgctgaaggagcccgccctgaccctgggcaagcagatccacaccctgtacctggacaacaccaactgcaacccagccctggtgctgcccagccggcaggaggccgcccaccagatcgtgcagctgatcaggaagcacccccagcacaacatcaagattggcctgtacagcctgggcaaggagagcctgctggagcagctggccctggagttccagacctgggtggtgctgagcccccggcggctggagctggtgcagctgctgggcctggctgatgtgttcaccgtggaggagaaggccggccgcatccatgctgtggaccacatggagatctgccacagcaacatgctgcgctggaaccagacccaccccaccatcgccatcctgcccaccagcaggaagatccacagcagccacccagacatccacgtgatcccctacagcgaccacagcagctacagcgagctgcgggcctttgtggccgccctgaagccctgccaggtggtgcccatcgtgtcccggcggccctgtggcggcttccaggacagcctgagcccccgcatctctgtgcccctcatcccagacagcgtgcagcagtacatgagcagcagcagcaggaagcccagcctgctgtggctgctggagcggcggctgaagaggcccaggacccagggcgtggtgtttgagagccctgaggagagcgctgaccagagccaggccgaccgggacagcaagaaggccaagaaggagaagctgagcccctggccagctgacctggagaagcagcccagccaccaccccctgcgcatcaagaagcagctgttcccagacctgtacagcaaggagtggaacaaggctgtgcccttctgtgagagccagaagagggtgaccatgctgacagcccccctgggcttctctgtgcacctgcggagcacagatgaggagttcatcagccagaagacccgggaggagatcggcctgggcagccccctggtgcccatgggagatgatgatggcggccctgaggccaccggcaaccagagcgcctggatgggccacggcagccccctgagccacagcagcaagggcacccccctgctggccacagagttccggggcctggccctgaagtacctgctgacccctgtgaacttcttccaggccggctacagcagcagaagatttgaccagcaggtggagaagtaccacaagccctgctag

SEQ ID NO: 19410 - DNA, 1734 bp, synthetic construct
  misc_feature 1..1734: note = Description of Artificial Sequence: Synthetic coding sequence
  source 1..1734: mol_type = other DNA
atgaagcaccaggagcgcttcctgttccagggcaacaatggaacagtgctgtacacaggagacttccggctggcccagggcgaggccgccaggatggagctgctgcacagcggcggccgggtgaaggacatccagagcgtgtacctggacaccaccttctgtgacccccgcttctaccagatccccagccgggaggagtgcctgtctggagtgctggagctggtgcgctcctggatcaccaggagcccctaccacgtggtgtggctgaactgcaaggccgcctacggctatgagtacctgttcaccaacctgtctgaggagctgggcgtgcaggtgcacgtgaacaagctggacatgttcaggaacatgcctgagatcctgcaccacctgaccacagacaggaacacccagatccacgcctgccgccaccccaaggccgaggagtacttccagtggagcaagctgccctgtggcatcaccagcaggaaccgcatccccctgcacatcatcagcatcaagcccagcaccatgtggtttggagagaggagcaggaagaccaacgtgattgtgaggactggagagagcagctaccgggcctgcttctccttccacagcagctacagcgagatcaaggacttcctgagctacctgtgccctgtgaatgcctacccaaatgtcatccctgtgggcaccaccatggacaaggtggtggagatcctgaagcccctgtgccgcagcagccagagcacagagcccaagtacaagcccctgggcaagctgaagagggccaggacagtgcaccgggacagcgaggaggaggatgactacctgtttgatgaccccctgcccatccccctgcggcacaaggtgccctacccagagaccttccaccctgaggtgttctccatgacagctgtgtctgagaagcagcctgagaagctgcggcagaccccaggctgctgcagagctgagtgcatgcagagcagccgcttcaccaactttgtggactgtgaggagagcaacagcgagagcgaggaggaggtgggcatcccagccagcctgcagggcgacctgggctctgtgctgcacctgcagaaggcagatggagatgtgccccagtgggaggtgttcttcaagagaaatgatgagatcacagatgagagcctggagaacttccccagcagcacagtggccggcggcagccagagccccaagctgttcagtgacagtgatggagagagcacccacatcagcagccagaacagcagccagagcacccacatcacagagcagggcagccagggctgggacagccagagcgacacagtgctgctgagcagccaggagaggaacagcggggacatcaccagcctggacaaggctgactaccggcccaccatcaaggagaacatcccagccagcctgatggagcagaatgtcatctgccccaaggacacctacagcgacctgaagagccgggacaaggatgtgaccatcgtgcccagcactggagagcccaccaccctgagcagcgagacccacatccctgaggagaagagcctgctgaacctgagcaccaatgctgacagccagagcagcagtgactttgaggtgcccagcaccccagaggccgagctgcccaagcgggagcacctgcagtacctgtatgagaagctggccactggagagagcattgctgtgaagaagaggaagtgcagcctgctggacacctag

SEQ ID NO: 19411 - DNA, 255 bp, synthetic construct
  misc_feature 1..255: note = Description of Artificial Sequence: Synthetic coding sequence
  source 1..255: mol_type = other DNA
atgttcctgttccagggcaacaacggcaccgtgctgtacaccggggacttccggctggcccagggcgaggccgccaggatggagctgctgcacagcggcggccgggtgaaggacatccagagcgtgtacctggacaccaccttctgtgacccccgcttctaccagatccccagccgggaggagtgcctgagcggcgtgctggagctggtgcgctcctggatcaccaggagcccctaccacgtggtgtggctgtag

SEQ ID NO: 19412 - DNA, 1038 bp, synthetic construct
  misc_feature 1..1038: note = Description of Artificial Sequence: Synthetic coding sequence
  source 1..1038: mol_type = other DNA
atggacaaggtggtggagatcctgaagcccctgtgccgcagcagccagagcacagagcccaagtacaagcccctgggcaagctgaagagggccaggacagtgcaccgggacagcgaggaggaggatgactacctgtttgatgaccccctgcccatccccctgcggcacaaggtgccctacccagagaccttccaccctgaggtgttctccatgacagctgtgtctgagaagcagcctgagaagctgcggcagaccccaggctgctgcagagctgagtgcatgcagagcagccgcttcaccaactttgtggactgtgaggagagcaacagcgagagcgaggaggaggtgggcatcccagccagcctgcagggcgacctgggctctgtgctgcacctgcagaaggcagatggagatgtgccccagtgggaggtgttcttcaagagaaatgatgagatcacagatgagagcctggagaacttccccagcagcacagtggccggcggcagccagagccccaagctgttcagtgacagtgatggagagagcacccacatcagcagccagaacagcagccagagcacccacatcacagagcagggcagccagggctgggacagccagagcgacacagtgctgctgagcagccaggagaggaacagcggggacatcaccagcctggacaaggctgactaccggcccaccatcaaggagaacatcccagccagcctgatggagcagaatgtcatctgccccaaggacacctacagcgacctgaagagccgggacaaggatgtgaccatcgtgcccagcactggagagcccaccaccctgagcagcgagacccacatccctgaggagaagagcctgctgaacctgagcaccaatgctgacagccagagcagcagtgactttgaggtgcccagcaccccagaggccgagctgcccaagcgggagcacctgcagtacctgtatgagaagctggccactggagagagcattgctgtgaagaagaggaagtgcagcctgctggacacctag

SEQ ID NO: 19413 - DNA, 1734 bp, synthetic construct; identical to SEQ ID NO: 19410
  misc_feature 1..1734: note = Description of Artificial Sequence: Synthetic coding sequence
  source 1..1734: mol_type = other DNA

SEQ ID NO: 19414 - DNA, 1734 bp, synthetic construct; identical to SEQ ID NO: 19410
  misc_feature 1..1734: note = Description of Artificial Sequence: Synthetic coding sequence
  source 1..1734: mol_type = other DNA

SEQ ID NO: 19415 - DNA, 1719 bp, synthetic construct
  misc_feature 1..1719: note = Description of Artificial Sequence: Synthetic coding sequence
  source 1..1719: mol_type = other DNA
atgttcctgttccagggcaacaacggcaccgtgctgtacaccggggacttccggctggcccagggcgaggccgccaggatggagctgctgcacagcggcggccgggtgaaggacatccagagcgtgtacctggacaccaccttctgtgacccccgcttctaccagatccccagccgggaggagtgcctgagcggcgtgctggagctggtgcgctcctggatcaccaggagcccctaccacgtggtgtggctgaactgcaaggccgcctacggctatgagtacctgttcaccaacctgtctgaggagctgggcgtgcaggtgcacgtgaacaagctggacatgttcaggaacatgcctgagatcctgcaccacctgaccacagacaggaacacccagatccacgcctgccgccaccccaaggccgaggagtacttccagtggagcaagctgccctgtggcatcaccagcaggaaccgcatccccctgcacatcatcagcatcaagcccagcaccatgtggtttggagagaggagcaggaagaccaacgtcatcgtgaggactggagagagcagctaccgggcctgcttctccttccacagcagctacagcgagatcaaggacttcctgagctacctgtgccctgtgaatgcctaccccaacgtcatccctgtgggcaccaccatggacaaggtggtggagatcctgaagcccctgtgccgcagcagccagagcacagagcccaagtacaagcccctgggcaagctgaagagggccaggacagtgcaccgggacagcgaggaggaggatgactacctgtttgatgaccccctgcccatccccctgcggcacaaggtgccctacccagagaccttccaccctgaggtgttctccatgacagctgtgtctgagaagcagcctgagaagctgcggcagaccccaggctgctgcagagctgagtgcatgcagagcagccgcttcaccaactttgtggactgtgaggagagcaacagcgagagcgaggaggaggtgggcatcccagccagcctgcagggcgacctgggctctgtgctgcacctgcagaaggcagatggagatgtgccccagtgggaggtgttcttcaagagaaatgatgagatcacagatgagagcctggagaacttccccagcagcacagtggccggcggcagccagagccccaagctgttcagtgacagtgatggagagagcacccacatcagcagccagaacagcagccagagcacccacatcacagagcagggcagccagggctgggacagccagagcgacacagtgctgctgagcagccaggagagaaattctggggacatcaccagcctggacaaggctgactaccggcccaccatcaaggagaacatcccagccagcctgatggagcagaatgtcatctgccccaaggacacctacagcgacctgaagagccgggacaaggatgtgaccatcgtgcccagcactggagagcccaccaccctgagcagcgagacccacatccctgaggagaagagcctgctgaacctgagcaccaatgctgacagccagagcagcagtgactttgaggtgcccagcaccccagaggccgagctgcccaagcgggagcacctgcagtacctgtatgagaagctggccaccggggagagcattgctgtgaagaagaggaagtgcagcctgctggacacctag

SEQ ID NO: 19416 - DNA, 1719 bp, synthetic construct; identical to SEQ ID NO: 19415
  misc_feature 1..1719: note = Description of Artificial Sequence: Synthetic coding sequence
  source 1..1719: mol_type = other DNA

SEQ ID NO: 19417 - DNA, 1719 bp, synthetic construct; identical to SEQ ID NO: 19415
  misc_feature 1..1719: note = Description of Artificial Sequence: Synthetic coding sequence
  source 1..1719: mol_type = other DNA

SEQ ID NO: 19418 - DNA, 2079 bp, synthetic construct
  misc_feature 1..2079: note = Description of Artificial Sequence: Synthetic coding sequence
  source 1..2079: mol_type = other DNA
atgagcagctttgagggccagatggccgagtaccccaccatcagcattgacagatttgaccgggagaacctgcgggcccgggcctacttcctgagccactgccacaaggaccacatgaagggcctgcgggcccccaccctgaagaggcggctggagtgcagcctgaaggtgtacctgtactgcagccctgtgaccaaggagctgctgctgaccagccccaagtaccgcttctggaagaagaggatcatcagcattgaaattgagacccccacccagatcagcctggtggatgaggccagcggggagaaggaggagatcgtggtgaccctgctgcctgctggccactgccccggctctgtgatgttcctgttccagggcaacaacggcaccgtgctgtacaccggggacttccggctggcccagggcgaggccgccaggatggagctgctgcacagcggcggccgggtgaaggacatccagagcgtgtacctggacaccaccttctgtgacccccgcttctaccagatccccagccgggaggagtgcctgagcggcgtgctggagctggtgcgctcctggatcaccaggagcccctaccacgtggtgtggctgaactgcaaggccgcctacggctatgagtacctgttcaccaacctgtctgaggagctgggcgtgcaggtgcacgtgaacaagctggacatgttcaggaacatgcctgagatcctgcaccacctgaccacagacaggaacacccagatccacgcctgccgccaccccaaggccgaggagtacttccagtggagcaagctgccctgtggcatcaccagcaggaaccgcatccccctgcacatcatcagcatcaagcccagcaccatgtggtttggagagaggagcaggaagaccaacgtcatcgtgaggactggagagagcagctaccgggcctgcttctccttccacagcagctacagcgagatcaaggacttcctgagctacctgtgccctgtgaatgcctaccccaacgtcatccctgtgggcaccaccatggacaaggtggtggagatcctgaagcccctgtgccgcagcagccagagcacagagcccaagtacaagcccctgggcaagctgaagagggccaggacagtgcaccgggacagcgaggaggaggatgactacctgtttgatgaccccctgcccatccccctgcggcacaaggtgccctacccagagaccttccaccctgaggtgttctccatgacagctgtgtctgagaagcagcctgagaagctgcggcagaccccaggctgctgcagagctgagtgcatgcagagcagccgcttcaccaactttgtggactgtgaggagagcaacagcgagagcgaggaggaggtgggcatcccagccagcctgcagggcgacctgggctctgtgctgcacctgcagaaggcagatggagatgtgccccagtgggaggtgttcttcaagagaaatgatgagatcacagatgagagcctggagaacttccccagcagcacagtggccggcggcagccagagccccaagctgttcagtgacagtgatggagagagcacccacatcagcagccagaacagcagccagagcacccacatcacagagcagggcagccagggctgggacagccagagcgacacagtgctgctgagcagccaggagagaaattctggggacatcaccagcctggacaaggctgactaccggcccaccatcaaggagaacatcccagccagcctgatggagcagaatgtcatctgccccaaggacacctacagcgacctgaagagccgggacaaggatgtgaccatcgtgcccagcactggagagcccaccaccctgagcagcgagacccacatccctgaggagaagagcctgctgaacctgagcaccaatgctgacagccagagcagcagtgactttgaggtgcccagcaccccagaggccgagctgcccaagcgggagcacctgcagtacctgtatgagaagctggccaccggggagagcattgctgtgaagaagaggaagtgcagcctgctggacacctag

SEQ ID NO: 19419 - DNA, 1305 bp, synthetic construct
  misc_feature 1..1305: note = Description of Artificial Sequence: Synthetic coding sequence
  source 1..1305: mol_type = other DNA
atgagcagctttgagggccagatggccgagtaccccaccatcagcattgacagatttgaccgggagaacctgcgggcccgggcctacttcctgagccactgccacaaggaccacatgaagggcctgcgggcccccaccctgaagaggcggctggagtgcagcctgaaggtgtacctgtactgcagccctgtgaccaaggagctgctgctgaccagccccaagtaccgcttctggaagaagaggatcatcagcattgaaattgagacccccacccagatcagcctggtggatgaggccagcggggagaaggaggagatcgtggtgaccctgctgcctgctggccactgccccggctctgtgatgttcctgttccagggcaacaacggcaccgtgctgtacaccggggacttccggctggcccagggcgaggccgccaggatggagctgctgcacagcggcggccgggtgaaggacatccagagcgtgtacctggacaccaccttctgtgacccccgcttctaccagatccccagccgggaggagtgcctgagcggcgtgctggagctggtgcgctcctggatcaccaggagcccctaccacgtggtgtggctgaactgcaaggccgcctacggctatgagtacctgttcaccaacctgtctgaggagctgggcgtgcaggtgcacgtgaacaagctggacatgttcaggaacatgcctgagatcctgcaccacctgaccacagacaggaacacccagatccacgcctgccgccaccccaaggccgaggagtacttccagtggagcaagctgccctgtggcatcaccagcaggaaccgcatccccctgcacatcatcagcatcaagcccagcaccatgtggtttggagagaggagcaggaagaccaacgtcatcgtgaggactggagagagcagctaccgggcctgcttctccttccacagcagctacagcgagatcaaggacttcctgagctacctgtgccctgtgaatgcctaccccaacgtcatccctgtgggcaccaccatggacaaggtggtggagatcctgaagcccctgtgccgcagcagccagagcacagagcccaagtacaagcccctgggcaagctgaagagggccaggacagtgcaccgggacagcggcagccacagcgtgacccaggccaggatgcgctggtgccaccacgacagcctgtaccccctgaccccaggcatcaagaggagcagctgcctgagcctgctgacctcctggatcaccggggcctacagacatgcccagctgatgatctag

SEQ ID NO: 19420 - DNA, 1719 bp, synthetic construct; identical to SEQ ID NO: 19415
  misc_feature 1..1719: note = Description of Artificial Sequence: Synthetic coding sequence
  source 1..1719: mol_type = other DNA

SEQ ID NO: 19421 - DNA, 354 bp, synthetic construct
  misc_feature 1..354: note = Description of Artificial Sequence: Synthetic coding sequence
  source 1..354: mol_type = other DNA
atggagctgctgcacagcggcggccgggtgaaggacatccagagcgtgtacctggacaccaccttctgtgacccccgcttctaccagatccccagccgggaggagtgcctgagcggcgtgctggagctggtgcgctcctggatcaccaggagcccctaccacgtggtgtggctgaactgcaaggccgcctacggctatgagtacctgttcaccaacctgtctgaggagctgggcgtgcaggtgcacgtgaacaagctggacatgttcaggaacatgcctgagatcctgcaccacctgaccacagacaggaacacccagatccacgcctgccgccaccccaaggccgaggagtag

SEQ ID NO: 19422 - DNA, 1719 bp, synthetic construct; identical to SEQ ID NO: 19415
  misc_feature 1..1719: note = Description of Artificial Sequence: Synthetic coding sequence
  source 1..1719: mol_type = other DNA

SEQ ID NO: 19423 - DNA, 174 bp, synthetic construct
  misc_feature 1..174: note = Description of Artificial Sequence: Synthetic coding sequence
  source 1..174: mol_type = other DNA
atgaagcaccaggagcgcttcctgttccagggcaacaatggaacagtgctgtacacaggagacttccggctggcccagggcgaggccgccaggatggagctgctgcacagcggcggccgggtgaaggacatccagagcgtgtacctggacaccaccttctgtgaccccaggtag

SEQ ID NO: 19424 - DNA, 807 bp, synthetic construct
  misc_feature 1..807: note = Description of Artificial Sequence: Synthetic coding sequence
  source 1..807: mol_type = other DNA
atggaggtgactggagatgctggggtgcctgagagcggggagatccgcaccctgaagccctgcctgctgcggaggaactacagccgggagcagcacggcgtggccgccagctgcctggaggacctgcggagcaaggcctgtgacatcctggccatcgacaagagcctgacccctgtgaccctggtgctggctgaagatggcaccatcgtggatgatgatgactacttcctgtgcctgcccagcaacaccaagtttgtggccctggccagcaatgagaagtgggcctacaacaacagtgatggcggcacagcctggatcagccaggagagctttgatgtggatgaaacagacagcggggccggcctgaagtggaagaatgtggcccggcagctgaaggaggacctgagcagcatcatcctgctgtctgaggaggacctgcagatgctggtggatgccccctgcagcgacctggcccaggagctgcggcagagctgtgccaccgtgcagaggctgcagcacaccctgcagcaggtgctggaccagcgggaggaggtgcggcagagcaagcagctgctgcagctgtacctgcaggccctggagaaggagggcagcctgctgagcaagcaggaggagagcaaggccgccttcggggaggaggtggatgctgtggacaccggcatcagccgggagaccagcagtgatgtggccctggccagccacatcctgacagccctgcgggagaagcaggcccctgagctgagcctgagcagccaggacctggaggtgggcggcaaccagggccactag

SEQ ID NO: 19425 - DNA, 996 bp, synthetic construct
  misc_feature 1..996: note = Description of Artificial Sequence: Synthetic coding sequence
  source 1..996: mol_type = other DNA
atggaggtgactggagatgctggggtgcctgagagcggggagatccgcaccctgaagccctgcctgctgcggaggaactacagccgggagcagcacggcgtggccgccagctgcctggaggacctgcggagcaaggcctgtgacatcctggccatcgacaagagcctgacccctgtgaccctggtgctggctgaagatggcaccatcgtggatgatgatgactacttcctgtgcctgcccagcaacaccaagtttgtggccctggccagcaatgagaagtgggcctacaacaacagtgatggcggcacagcctggatcagccaggagagctttgatgtggatgaaacagacagcggggccggcctgaagtggaagaatgtggcccggcagctgaaggaggacctgagcagcatcatcctgctgtctgaggaggacctgcagatgctggtggatgccccctgcagcgacctggcccaggagctgcggcagagctgtgccaccgtgcagaggctgcagcacaccctgcagcaggtgctggaccagcgggaggaggtgcggcagagcaagcagctgctgcagctgtacctgcaggccctggagaaggagggcagcctgctgagcaagcaggaggagagcaaggccgccttcggggaggaggtggatgctgtggacaccggcatcagccgggagaccagcagtgatgtggccctggccagccacatcctgacagccctgcgggagaagcaggcccctgagctgagcctgagcagccaggacctggagctggtgaccaaggaggaccccaaggccctggccgtggccctgaactgggacatcaagaagacagagaccgtgcaggaggcctgtgagcgggagctggccctgcggctgcagcagacccagagcctgcacagcctgcggagcatcagcgccagcaaggccagccccccaggggacctgcagaaccccaagagggcccggcaggaccccacctag

SEQ ID NO: 19426 - DNA, 510 bp, synthetic construct
  misc_feature 1..510: note = Description of Artificial Sequence: Synthetic coding sequence
  source 1..510: mol_type = other DNA
atggctgctgagagcctgcccttctcctttggcaccctgagctcctgggagctggaggcctggtatgaggacctgcaggaggtgctgagcagtgatgaaaatggaggcacctacgtgtccccacctggaaatgaggaggaggagagcaagatcttcaccaccctggaccctgccagcctggcctggctgacagaggaggagcctgagcctgctgaggtgaccagcaccagccagagcccccacagcccagacagcagccagagcagcctggcccaggaggaggaggaggaggaccagggccgcaccaggaagaggaagcagagcggccacagccctgcccgggccggcaagcagaggatgaaggagaaggagcaggagaatgaaaggaaggtggcccagctggccgaggagaatgaaaggctgaagcaggagattgagcggctgacccgggaggtggaggccacccggcgggccctgattgacaggatggtgaacctgcaccaggcctag

SEQ ID NO: 19427 - DNA, 510 bp, synthetic construct; identical to SEQ ID NO: 19426
  misc_feature 1..510: note = Description of Artificial Sequence: Synthetic coding sequence
  source 1..510: mol_type = other DNA

SEQ ID NO: 19428 - DNA, 438 bp, synthetic construct
  misc_feature 1..438: note = Description of Artificial Sequence: Synthetic coding sequence
  source 1..438: mol_type = other DNA
atggagctggtgcctgccaccccccactacccagcagatgtgctcttccagacagaccccacagctgagatggctgctgagagcctgcccttctcctttggcaccctgagctcctgggagctggaggcctggtatgaggacctgcaggaggtgctgagcagtgatgaaaatggaggcacctacgtgagccccccaggaaatgaggaggaggagagcaagatcttcaccaccctggaccctgccagcctggcctggctgacagaggaggagcctgagcctgctgaggtgaccagcaccagccagagcccccacagcccagacagcagccagagcagcctggcccaggaggaggaggaggaggaccagggccgcaccaggaagaggaagcagagcggccacagccctgcccgggccggcaagcagaggatgaaggagtag

SEQ ID NO: 19429 - DNA, 579 bp, synthetic construct
  misc_feature 1..579: note = Description of Artificial Sequence: Synthetic coding sequence
  source 1..579: mol_type = other DNA
atggagctggtgcctgccaccccccactacccagcagatgtgctcttccagacagaccccacagctgagatggctgctgagagcctgcccttctcctttggcaccctgagctcctgggagctggaggcctggtatgaggacctgcaggaggtgctgagcagtgatgaaaatggaggcacctacgtgagccccccaggaaatgaggaggaggagagcaagatcttcaccaccctggaccctgccagcctggcctggctgacagaggaggagcctgagcctgctgaggtgaccagcaccagccagagcccccacagcccagacagcagccagagcagcctggcccaggaggaggaggaggaggaccagggccgcaccaggaagaggaagcagagcggccacagccctgcccgggccggcaagcagaggatgaaggagaaggagcaggagaatgaaaggaaggtggcccagctggccgaggagaatgaaaggctgaagcaggagattgaaaggctgacccgggaggtggaggccacccggcgggccctgattgacaggatggtgaacctgcaccaggcctag

SEQ ID NO: 19430 - DNA, 579 bp, synthetic construct; identical to SEQ ID NO: 19429
  misc_feature 1..579: note = Description of Artificial Sequence: Synthetic coding sequence
  source 1..579: mol_type = other DNA

SEQ ID NO: 19431 - DNA, 864 bp, synthetic construct
  misc_feature 1..864: note = Description of Artificial Sequence: Synthetic coding sequence
  source 1..864: mol_type = other DNA
atggccagcctggaggtgagccgcagccccaggaggagccggcgggagctggaggtgcgcagcccccggcagaacaagtacagcgtgctgctgcccacctacaatgaaagagagaacctgcccctgattgtgtggctgctggtgaagagcttcagcgagagcggcatcaactatgagatcatcatcattgatgatggcagcccagatggcaccagagatgtggccgagcagctggagaagatctacggcagtgaccgcatcctgctgcggccccgggagaagaagctgggcctgggcacagcctacatccacggcatgaagcacgccaccggcaactacatcatcatcatggatgctgacctgagccaccaccccaagttcatccctgagttcatcaggaagcagaaggagggcaactttgacatcgtgtctggcacccgctacaagggaaatggaggagtgtatggctgggacctgaagaggaagatcatcagtgatggagtgctgccctgctgccccggctggagcctgctgggcagcagtgaccctgccatcctggcctcctgggactacagcagaggagccaacttcctgacccagatcctgctgcggcctggggccagtgacctgaccggcagcttccggctgtacaggaaggaggtgctggagaagctgattgagaagtgtgtgtccaagggctacgtgttccagatggagatgattgtgcgggcccggcagctgaactacaccatcggggaggtgcccatcagctttgtggacagagtgtatggagagagcaagctgggcggcaatgaaattgtgtccttcctgaagggcctgctgaccctgtttgccaccacctag

SEQ ID NO: 19432 - DNA, 768 bp, synthetic construct
  misc_feature 1..768: note = Description of Artificial Sequence: Synthetic coding sequence
  source 1..768: mol_type = other DNA
atggccagcctggaggtgagccgcagccccaggaggagccggcgggagctggaggtgcgcagcccccggcagaacaagtacagcgtgctgctgcccacctacaatgaaagagagaacctgcccctgattgtgtggctgctggtgaagagcttcagcgagagcggcatcaactatgagatcatcatcattgatgatggcagcccagatggcaccagagatgtggccgagcagctggagaagatctacggcagtgaccgcatcctgctgcggccccgggagaagaagctgggcctgggcacagcctacatccacggcatgaagcacgccaccggcaactacatcatcatcatggatgctgacctgagccaccaccccaagttcatccctgagttcatcagtgatggagtgctgccctgctgccccggctggagcctgctgggcagcagtgaccctgccatcctggcctcctgggactacagcagaggagccaacttcctgacccagatcctgctgcggcctggggccagtgacctgaccggcagcttccggctgtacaggaaggaggtgctggagaagctgattgagaagtgtgtgtccaagggctacgtgttccagatggagatgattgtgcgggcccggcagctgaactacaccatcggggaggtgcccatcagctttgtggacagagtgtatggagagagcaagctgggcggcaatgaaattgtgtccttcctgaagggcctgctgaccctgtttgccaccacctag

SEQ ID NO: 19433 - DNA, 888 bp, synthetic construct
  misc_feature 1..888: note = Description of Artificial Sequence: Synthetic coding sequence
  source 1..888: mol_type = other DNA
tgagccagcctggaggtgagccgcagccccaggaggagccggcgggagctggaggtgcgcagcccccggcagaacaagtacagcgtgctgctgcccacctacaatgaaagagagaacctgcccctgattgtgtggctgctggtgaagagcttcagcgagagcggcatcaactatgagatcatcatcattgatgatggcagcccagatggcaccagagatgtggccgagcagctggagaagatctacggcagtgaccgcatcctgctgcggccccgggagaagaagctgggcctgggcacagcctacatccacggcatgaagcacgccaccggcaactacatcatcatcatggatgctgacctgagccaccaccccaagttcatccctgagttcatcaggaagcagaaggagggcaactttgacatcgtgtctggcacccgctacaagggaaatggaggagtgtatggctgggacctgaagaggaagatcatcagtgatggagtgctgccctgctgccccggctggagcctgctgggcagcagtgaccctgccatcctggcctcctgggactaccgctgtgagcccccccggctggccagcagaggagccaacttcctgacccagatcctgctgcggcctggggccagtgacctgaccggcagcttccggctgtacaggaaggaggtgctggagaagctgattgagaagtgtgtgtccaagggctacgtgttccagatggagatgattgtgcgggcccggcagctgaactacaccatcggggaggtgcccatcagctttgtggacagagtgtatggagagagcaagctgggcggcaatgaaattgtgtccttcctgaagggcctgctgaccctgtttgccaccacctag

SEQ ID NO: 19434 - DNA, 783 bp, synthetic construct
  misc_feature 1..783: note = Description of Artificial Sequence: Synthetic coding sequence
  source 1..783: mol_type = other DNA
atggccagcctggaggtgagccgcagccccaggaggagccggcgggagctggaggtgcgcagcccccggcagaacaagtacagcgtgctgctgcccacctacaatgaaagagagaacctgcccctgattgtgtggctgctggtgaagagcttcagcgagagcggcatcaactatgagatcatcatcattgatgatggcagcccagatggcaccagagatgtggccgagcagctggagaagatctacggcagtgaccgcatcctgctgcggccccgggagaagaagctgggcctgggcacagcctacatccacggcatgaagcacgccaccggcaactacatcatcatcatggatgctgacctgagccaccaccccaagttcatccctgagttcatcaggaagcagaaggagggcaactttgacatcgtgtctggcacccgctacaagggaaatggaggagtgtatggctgggacctgaagaggaagatcatcagcagaggagccaacttcctgacccagatcctgctgcggcctggggccagtgacctgaccggcagcttccggctgtacaggaaggaggtgctggagaagctgattgaaaaatgtgtgtccaagggctacgtgttccagatggagatgattgtgcgggcccggcagctgaactacaccatcggggaggtgcccatcagctttgtggacagagtgtatggagagagcaagctgggcggcaatgagatcgtgtccttcctgaagggcctgctgaccctgtttgccaccacctag

SEQ ID NO: 19435 - DNA, 666 bp, synthetic construct
  misc_feature 1..666: note = Description of Artificial Sequence: Synthetic coding sequence
  source 1..666: mol_type = other DNA
atggccagcctggaggtgagccgcagccccaggaggagccggcgggagctggaggtgcgcagcccccggcagaacaagtacagcgtgctgctgcccacctacaatgaaagagagaacctgcccctgattgtgtggctgctggtgaagagcttcagcgagagcggcatcaactatgagatcatcatcattgatgatggcagcccagatggcaccagagatgtggccgagcagctggagaagatctacggcagtgaccgcatcctgctgcggccccgggagaagaagctgggcctgggcacagcctacatccacggcatgaagcacgccaccggcaactacatcatcatcatggatgctgacctgagccaccaccccaagttcatccctgagttcatcagtgatggagtgctgccctgctgccccggctggagcctgctgggcagcagtgaccctgccatcctggcctcctgggactacagcagaggagccaacttcctgacccagatcctgctgcggcctggggccagtgacctgaccggcagcttccggctgtacaggaaggaggtgctggagaagctgattgagaagtgtgtgtccaagggctacgtgttccagatggagatgattgtgcgggcccggcagctgaactacaccatcggggagtag

SEQ ID NO: 19436 - DNA, 888 bp, synthetic construct
  misc_feature 1..888: note = Description of Artificial Sequence: Synthetic coding sequence
  source 1..888: mol_type = other DNA
atggccagcctggaggtgagccgcagccccaggaggagccggcgggagctggaggtgcgcagcccccggcagaacaagtacagcgtgctgctgcccacctacaatgaaagagagaacctgcccctgattgtgtggctgctggtgaagagcttcagcgagagcggcatcaactatgagatcatcatcattgatgatggcagcccagatggcaccagagatgtggccgagcagctggagaagatctacggcagtgaccgcatcctgctgcggccccgggagaagaagctgggcctgggcacagcctacatccacggcatgaagcacgccaccggcaactacatcatcatcatggatgctgacctgagccaccaccccaagttcatccctgagttcatcaggaagcagaaggagggcaactttgacatcgtgtctggcacccgctacaagggaaatggaggagtgtatggctgggacctgaagaggaagatcatcagtgatggagtgctgccctgctgccccggctggagcctgctgggcagcagtgaccctgccatcctggcctcctgggactaccgctgtgagcccccccggctggccagcagaggagccaacttcctgacccagatcctgctgcggcctggggccagtgacctgaccggcagcttccggctgtacaggaaggaggtgctggagaagctgattgagaagtgtgtgtccaagggctacgtgttccagatggagatgattgtgcgggcccggcagctgaactacaccatcggggaggtgcccatcagctttgtggacagagtgtatggagagagcaagctgggcggcaatgaaattgtgtccttcctgaagggcctgctgaccctgtttgccaccacctag

SEQ ID NO: 19437 - DNA, 1332 bp, synthetic construct
  misc_feature 1..1332: note = Description of Artificial Sequence: Synthetic coding sequence
  source 1..1332: mol_type = other DNA
atgaggcggcaggtgatggccgccctggtggtgtctggagctgctgagcagggcggcagagatggccctggccggggccgggccccccggggccgggtggccaaccagatccccccagagatcctgaagaacccccagctgcaggccgccatccgggtgctgcccagcaactacaactttgagatccccaagaccatctggaggatccagcaggcccaggccaagaaggtggccctgcagatgcctgagggcctgctgctgtttgcctgcaccatcgtggacatcctggagcgcttcacagaggccgaggtgatggtgatgggagatgtgacctacggggcctgctgcgtggatgacttcaccgcccgggccctgggcgctgacttcctggtgcactacggccacagctgcctgatccccatggacaccagcgcccaggacttccgggtgctgtatgtgtttgtggacatcagaattgacaccacccacctgctggacagcctgcggctgaccttccccccagccacagccctggccctggtgtccaccatccagtttgtgtccaccctgcaggccgccgcccaggagctgaaggccgagtacagagtgtctgtgccccagtgcaagcccctgagccctggagagatcctgggctgcaccagcccccggctgagcaaggaggtggaggccgtggtgtacctgggagatggccgcttccacctggagagcgtgatgattgccaaccccaacgtgcctgcctaccgctatgacccctacagcaaggtgctgagccgggagcactatgaccaccagaggatgcaggccgcccggcaggaggccatcgccacagcccggagcgccaagtcctggggcctcatcctgggcaccctgggccggcagggcagccccaagatcctggagcacctggagagccggctgcgggccctgggcctgagctttgtgcggctgctgctgtctgagatcttccccagcaagctgagcctgctgcctgaggtggatgtgtgggtgcaggtggcctgcccccggctgagcattgactggggcacagccttccccaagcccctgctgaccccctatgaggccgctgtggccctgcgggacatctcctggcagcagccctaccccatggacttctacgccggcagcagcctgggcccctggacagtgaaccacggccaggaccggcggccccacgcccctggccggcctgcccggggcaaggtgcaggagggcagcgcccggccccccagcgctgtggcctgtgaggactgcagctgcagagatgagaaggtggcccccctggccccctag

SEQ ID NO: 19438 - DNA, 1146 bp, synthetic construct
  misc_feature 1..1146: note = Description of Artificial Sequence: Synthetic coding sequence
  source 1..1146: mol_type = other DNA
atgattgacaccctgcggcctgtgccctttgccagcgagatggccatcagcaagacagtggcctggctgaatgagcagctggagctgggcaatgaaaggctgctgctgatggactgccggccccaggagctgtatgagagcagccacatcgagagcgccatcaacgtggccatccctggcatcatgctgcggcggctgcagaagggcaacctgcctgtgcgggccctcttcaccagaggagaagatcgggaccgcttcacccggcgctgtggcacagacacagtggtgctgtatgatgagagcagcagtgactggaatgaaaatactggaggagagagcgtgctgggcctgctgctgaagaagctgaaggatgagggctgccgggccttctacctggagggcggcttcagcaagttccaggccgagttcagcctgcactgtgagaccaacctggatggcagctgcagcagcagcagcccccccctgcctgtgctgggcctgggcggcctgcgcatcagcagtgacagcagcagtgacatcgagagtgacctggaccgggaccccaacagcgccacagacagtgatggcagccccctgagcaacagccagcccagcttccctgtggagatcctgcccttcctgtacctgggctgtgccaaggacagcaccaacctggatgtgctggaggagtttggcatcaagtacatcctgaatgtgacccccaacctgcccaacctgtttgaaaatgctggggagttcaagtacaagcagatccccatcagtgaccactggagccagaacctgagccagttcttccctgaggccatctccttcattgatgaggcccggggcaagaactgtggggtgctggtgcactgcctggccggcatcagccgctctgtgacagtgacagtggcctacctgatgcagaagctgaacctgtccatgaatgatgcctatgacatcgtgaagatgaagaagagcaacatcagccccaacttcaacttcatgggccagctgctggactttgagaggaccctgggcctgagcagcccctgtgacaacagagtgcctgcccagcagctgtacttcaccacccccagcaaccagaatgtgtaccaggtggacagcctgcagagcacctag

SEQ ID NO: 19439 - DNA, 708 bp, synthetic construct
  misc_feature 1..708: note = Description of Artificial Sequence: Synthetic coding sequence
  source 1..708: mol_type = other DNA
atgattgacaccctgcggcctgtgccctttgccagcgagatggccatcagcaagacagtggcctggctgaatgagcagctggagctgggcaatgaaaggctgctgctgatggactgccggccccaggagctgtatgagagcagccacatcgagagcgccatcaacgtggccatccctggcatcatgctgcggcggctgcagaagggcaacctgcctgtgcgggccctcttcaccagaggagaagatcgggaccgcttcacccggcgctgtggcacagacacagtggtgctgtatgatgagagcagcagtgactggaatgaaaatactggaggagagagcgtgctgggcctgctgctgaagaagctgaaggatgagggctgccgggccttctacctggaggatgaggcccggggcaagaactgtggggtgctggtgcactgcctggccggcatcagccgctctgtgacagtgacagtggcctacctgatgcagaagctgaacctgtccatgaatgatgcctatgacatcgtgaagatgaagaagagcaacatcagccccaacttcaacttcatgggccagctgctggactttgagaggaccctgggcctgagcagcccctgtgacaacagagtgcctgcccagcagctgtacttcaccacccccagcaaccagaatgtgtaccaggtggacagcctgcagagcacctag

SEQ ID NO: 19440 - DNA, 354 bp, synthetic construct
  misc_feature 1..354: note = Description of Artificial Sequence: Synthetic coding sequence
  source 1..354: mol_type = other DNA
atgattgacaccctgcggcctgtgccctttgccagcgagatggccatcagcaagacagtggcctggctgaatgagcagctggagctgggcaatgaaaggctgctgctgatggactgccggccccaggagctgtatgagagcagccacatcgagagcgccatcaacgtggccatccctggcatcatgctgcggcggctgcagaagggcaacctgcctgtgcgggccctcttcaccagaggagaagatcgggaccgcttcacccggcgctgtggcacagacacagtggtgctgtatgatgagagcagcagtgactggaatgaaaatactggaggagagagcgtgctgggcctgtag

SEQ ID NO: 19441 - DNA, 1545 bp, synthetic construct
  misc_feature 1..1545: note = Description of Artificial Sequence: Synthetic coding sequence
  source 1..1545: mol_type = other DNA
atggctgatgctgaggtgatcatcctgcccaagaagcacaagaagaagaaggagaggaagagcctgcctgaagaagatgtggccgagatccagcacgccgaggagttcctgatcaagccagagagcaaggtggccaagctggacaccagccagtggcccctgctgctgaagaactttgacaagctgaatgtgaggaccacccactacacccccctggcctgtggcagcaaccccctgaagcgggagattggagactacatcagaacaggcttcatcaacctggacaagcccagcaaccccagcagccatgaggtggtggcctggatccgccgcatcctgcgggtggagaagacaggccacagcggcaccctggaccccaaggtgacaggctgcctgattgtgtgcatcgagcgggccacccggctggtgaagagccagcagagcgctgggaaggagtatgtgggcatcgtgcggctgcacaatgccattgaaggaggcacccagctgagccgggccctggagaccctgactggagccctcttccagaggcctcccctgattgctgctgtgaagaggcagctgcgggtgaggaccatctatgagagcaagatgattgaatatgaccctgagcggcggctgggcatcttctgggtgtcctgtgaggccggcacctacatccgcaccctgtgtgtgcacctgggcctgctgctgggcgtgggcggccagatgcaggagctgcggcgggtgcgctctggagtgatgtctgagaaggaccacatggtgaccatgcatgatgtgctggatgcccagtggctgtatgacaaccacaaggatgagagctacctgcggcgggtggtgtaccccctggagaagctgctgaccagccacaagaggctggtgatgaaggacagcgctgtgaatgccatctgctatggagccaagatcatgctgcccggggtgctgcgctatgaagatggcatcgaggtgaaccaggagatcgtggtgatcaccaccaagggggaggccatctgcatggccatcgccctgatgaccacagctgtgatcagcacctgtgaccacggcatcgtggccaagatcaagagggtcatcatggagcgggacacctaccccaggaagtggggcctgggccccaaggccagccagaagaagctgatgatcaagcagggcctgctggacaagcacggcaagcccacagacagcaccccagccacctggaagcaggagtatgtggactacagcgagagcgccaagaaggaggtggtggccgaggtggtgaaggccccccaggtggtggccgaggccgccaagacagccaagaggaagcgggagagcgagagcgagagtgatgagaccccacctgctgccccccagctgatcaagaaggagaagaagaagagcaagaaggacaagaaggccaaggccggcctggagagcggggctgagcctggagatggagacagcgacaccaccaagaagaagaagaagaagaagaaggccaaggaggtggagctggtgtctgagtag

SEQ ID NO: 19442 - DNA, 7245 bp, synthetic construct
  misc_feature 1..7245: note = Description of Artificial Sequence: Synthetic coding sequence
  source 1..7245: mol_type = other DNA
atggctgaaaatgtggtggagcccggcccccccagcgccaagaggcccaagctgagcagccctgccctgagcgccagcgccagtgatggaacagactttggcagcctgtttgacctggagcatgacctgcctgatgagctgatcaacagcacagagctgggcctgaccaatggaggagacatcaaccagctgcagaccagcctgggcatggtgcaggatgctgccagcaagcacaagcagctgtctgagctgctgcggagcggcagcagccccaacctgaacatgggcgtgggcggccctggccaggtgatggccagccaggcccagcagagcagccctggcctgggcctcatcaacagcatggtgaagagccccatgacccaggccggcctgaccagccccaacatgggcatgggcaccagcggccccaaccagggccccacccagagcacaggcatgatgaacagccctgtgaaccagcctgccatgggcatgaacacaggcatgaatgccggcatgaaccctggcatgctggccgctggaaatggccagggcatcatgcccaaccaggtgatgaatggcagcatcggggccggccggggccggcagaacatgcagtaccccaaccctggcatgggcagcgctggcaacctgctgacagagcccctgcagcagggcagcccccagatgggcggccagacaggcctgcggggcccccagcccctgaagatgggcatgatgaacaaccccaacccctacggcagcccctacacccagaaccctggccagcagattggagccagcggcctgggcctgcagatccagaccaagacagtgctgagcaacaacctgagcccctttgccatggacaagaaggctgtgcctgggggcggcatgcccaacatgggccagcagcctgccccccaggtgcagcagcccggcctggtgacccctgtggcccagggcatgggcagcggggcccacacagctgaccctgagaagaggaagctgatccagcagcagctggtgctgctgctgcacgcccacaagtgccagaggcgggagcaggccaacggggaggtgcggcagtgcaacctgccccactgcaggaccatgaagaatgtgctgaaccacatgacccactgccagagcggcaagagctgccaggtggcccactgtgccagcagccggcagatcatcagccactggaagaactgcaccaggcatgactgccctgtgtgcctgcccctgaagaatgctggggacaagaggaaccagcagcccatcctgactggagcccctgtgggcctgggcaaccccagcagcctgggcgtgggccagcagagcgcccccaacctgagcacagtgtcccagattgaccccagcagcattgaaagagcctatgctgccctgggcctgccctaccaggtgaaccagatgcccacccagccccaggtgcaggccaagaaccagcagaaccagcagcccggccagagcccccagggcatgaggcccatgagcaacatgtctgccagccccatgggcgtgaatggaggagtgggcgtgcagacccccagcctgctgagtgacagcatgctgcacagcgccatcaacagccagaaccccatgatgtctgaaaatgcctctgtgcccagcctgggccccatgcccacagctgcccagcccagcaccaccggcatcaggaagcagtggcatgaggacatcacccaggacctgaggaaccacctggtgcacaagctggtgcaggccatcttccccaccccagaccctgctgccctgaaggacaggaggatggagaacctggtggcctatgccaggaaggtggagggggacatgtatgagagcgccaacaacagagctgagtactaccacctgctggccgagaagatctacaagatccagaaggagctggaggagaagaggaggacccggctgcagaagcagaacatgctgcccaatgctgctggcatggtgcctgtgtccatgaaccctggccccaacatgggccagccccagcccggcatgaccagcaatggccccctgcctgaccccagcatgatccggggctctgtgcccaaccagatgatgccccgcatcaccccccagagcggcctgaaccagtttggccagatgtccatggcccagccccccatcgtgccccggcagaccccacccctgcagcaccacggccagctggcccagcccggggccctgaacccccccatgggctacggccccaggatgcagcagcccagcaaccagggccagttcctgccccagacccagttccccagccagggcatgaatgtgaccaacatccccctggcccccagcagcggccaggcccctgtgtcccaggcccagatgagcagcagcagctgccctgtgaacagccccatcatgcctcctggcagccagggcagccacatccactgcccccagctgccccagcctgccctgcaccagaacagccccagccctgtgcccagcaggacccccaccccccaccacaccccacccagcattggagcccagcagcccccagccaccaccatcccagcccctgtgcccaccccaccagccatgcctcctggcccccagagccaggccctgcaccccccaccccggcagacccccaccccacccaccacccagctgccccagcaggtgcagcccagcctgcctgctgcccccagcgctgaccagccccagcagcagcccaggagccagcagagcacagctgcctctgtgcccacccccacagcccccctgctgcccccccagcctgccacccccctgagccagcctgctgtgtccattgagggccaggtgagcaacccccccagcaccagcagcacagaggtgaacagccaggccatcgccgagaagcagcccagccaggaggtgaagatggaggccaagatggaggtggaccagcctgagcctgctgacacccagcctgaggacatcagcgagagcaaggtggaggactgcaagatggagagcacagaaacagaggagaggagcacagagctgaagacagagatcaaggaggaggaggaccagcccagcaccagcgccacccagagcagccctgcccctggccagagcaagaagaagatcttcaagccagaggagctgcggcaggccctgatgcccaccctggaggccctgtaccggcaggaccctgagagcctgcccttccggcagcctgtggacccccagctgctgggcatcccagactactttgacatcgtgaagagccccatggacctgagcaccatcaagaggaagctggacaccggccagtaccaggagccctggcagtatgtggatgacatctggctgatgttcaacaatgcctggctgtacaacaggaagaccagccgggtgtacaagtactgcagcaagctgtctgaggtgtttgagcaggagattgatcctgtgatgcagagcctgggctactgctgcggcaggaagctggagttcagcccccagaccctgtgctgctacggcaagcagctgtgcaccatccccagagatgccacctactacagctaccagaaccgctaccacttctgtgagaagtgcttcaatgagatccagggcgagagcgtgtccctgggagatgaccccagccagccccagaccaccatcaacaaggagcagttcagcaagaggaagaatgacaccctggaccctgagctgtttgtggagtgcacagaatgtggcaggaagatgcaccagatctgtgtgctgcaccacgagatcatctggccagctggctttgtgtgtgatggctgcctgaagaagagcgcccggaccaggaaagaaaacaagttcagcgccaagaggctgcccagcacccggctgggcaccttcctggagaacagagtgaatgacttcctgcggcggcagaaccaccctgagagcggggaggtgacagtgcgggtggtgcacgccagtgacaagacagtggaggtgaagccaggcatgaaggccaggtttgtggacagcggggagatggccgagagcttcccctaccgcaccaaggccctgtttgcctttgaggagattgatggagtggacctgtgcttcttcggcatgcacgtgcaggagtatggcagtgactgccccccacccaaccagaggagagtgtacatctcctacctggacagcgtgcacttcttccggcccaagtgcctgaggacagctgtgtaccacgagatcctgattggctacctggagtatgtgaagaagctgggctacaccaccggccacatctgggcctgccccccatctgaaggagatgactacatcttccactgccaccccccagaccagaagatccccaagcccaagaggctgcaggagtggtacaagaagatgctggacaaggctgtgtctgaaagaattgtgcatgactacaaggacatcttcaagcaggccacagaggaccggctgaccagcgccaaggagctgccctactttgaaggagacttctggcccaacgtgctggaggagagcatcaaggagctggagcaggaggaggaggagaggaagcgggaggagaacaccagcaatgaaagcacagatgtgaccaagggggacagcaagaatgccaagaagaagaacaacaagaagaccagcaagaacaagagcagcctgagccggggcaacaagaagaagccaggcatgcccaacgtgtccaatgacctgagccagaagctgtatgccaccatggagaagcacaaggaggtgttcttcgtcatccggctgattgctggccctgctgccaacagcctgccccccatcgtggaccctgaccccctcatcccctgtgacctgatggatggaagagatgccttcctgaccctggcccgggacaagcacctggagttcagcagcctgcggcgggcccagtggagcaccatgtgcatgctggtggagctgcacacccagagccaggacagatttgtgtacacctgcaatgaatgcaagcaccacgtggagacccgctggcactgcaccgtgtgtgaagattatgacctgtgcatcacctgctacaacaccaagaaccacgaccacaagatggagaagctgggcctgggcctggatgatgagagcaacaaccagcaggccgccgccacccagagccctggggacagccggcggctgagcatccagcgctgcatccagagcctggtgcacgcctgccagtgcagaaatgccaactgcagcctgcccagctgccagaagatgaagagggtggtgcagcacaccaagggctgcaagaggaagaccaacggcggctgccccatctgcaagcagctgattgccctgtgctgctaccacgccaagcactgccaggagaacaagtgccctgtgcccttctgcctgaacatcaagcagaagctgcggcagcagcagctgcagcaccggctgcagcaggcccagatgctgcggcggaggatggcctccatgcagaggactggagtggtgggccagcagcagggcctgcccagccccaccccagccacccccaccacccccaccggccagcagcccaccaccccccagaccccccagcccaccagccagccccagcccaccccacccaacagcatgccaccctacctgcccaggacccaggccgccggccctgtgtcccagggcaaggccgccggccaggtgaccccacccaccccaccccagacagcccagccccccctgcccggccccccacctgctgctgtggagatggccatgcagatccagagagctgctgagacccagaggcagatggcccacgtgcagatcttccagaggcccatccagcaccagatgccacccatgacccccatggcccccatgggcatgaaccccccacccatgacccggggccccagcggccacctggagcccggcatgggccccaccggcatgcagcagcagcccccctggagccagggcggcctgccccagccccagcagctgcagagcggcatgcccaggcctgccatgatgtctgtggcccagcacggccagcccctgaacatggccccccagcccggcctgggccaggtgggcatcagccccctgaagccaggcaccgtgtcccagcaggccctgcagaacctgctgcggaccctgcggagccccagcagccccctgcagcagcagcaggtgctgagcatcctgcacgccaacccccagctgctggccgccttcatcaagcagagagctgccaagtatgccaacagcaacccccagcccatccctggccagcccggcatgccccagggccagcccggcctgcagccccccaccatgcctggccagcagggcgtgcacagcaacccagccatgcagaacatgaaccccatgcaggccggcgtgcagagagctggcctgccccagcagcagccccagcagcagctgcagccccccatgggcggcatgagcccccaggcccagcagatgaacatgaaccacaacaccatgcccagccagttccgggacatcctgcggcggcagcagatgatgcagcagcagcagcagcagggcgccggccctggcatcggccctggcatggccaaccacaaccagttccagcagccccagggcgtgggctacccaccccagcagcagcagaggatgcagcaccacatgcagcagatgcagcagggcaacatgggccagatcggccagctgccccaggccctgggcgctgaggccggggccagcctgcaggcctaccagcagaggctgctgcagcagcagatgggcagccctgtgcagcccaaccccatgagcccccagcagcacatgctgcccaaccaggcccagagcccccacctgcagggccagcagatccccaacagcctgagcaaccaggtgcgcagcccccagcctgtgcccagcccccggccccagagccagcccccccacagcagccccagccccaggatgcagccccagcccagcccccaccacgtgagcccccagaccagcagcccccaccctggcctggtggccgcccaggccaaccccatggagcagggccactttgccagcccagaccagaacagcatgctgagccagctggccagcaaccctggcatggccaacctgcacggggccagcgccacagacctgggcctgagcacagacaacagcgacctgaacagcaacctgagccagagcaccctggacatccactag

SEQ ID NO: 19443 - DNA, 1314 bp, synthetic construct
  misc_feature 1..1314: note = Description of Artificial Sequence: Synthetic coding sequence
  source 1..1314: mol_type = other DNA
atggccctggccggggccccagctgggggcccctgtgccccagccctggaggccctgctgggcgctggggccctgcggctgctggacagcagccagatcgtcatcatctctgctgcccaggatgccagcgcccccccagcccccactggacctgctgccccagctgctggcccctgtgaccctgacctgctgctgtttgccaccccccaggccccccggcccaccccatctgcccccaggcctgccctgggccggccccctgtgaagaggcggctggacctggagacagaccaccagtacctggccgagagcagcggccctgcccggggccggggccgccaccctggaaaaggagtgaagagccctggagagaagagccgctatgagaccagcctgaacctgaccaccaagcgcttcctggagctgctgagccacagcgcagatggagtggtggacctgaactgggccgctgaggtgctgaaggtgcagaagaggcgcatctatgacatcaccaacgtgctggagggcatccagctgattgccaagaagagcaagaaccacatccagtggctgggcagccacaccaccgtgggcgtgggcggccgcctggagggcctgacccaggacctgcggcagctgcaggagagcgagcagcagctggaccacctgatgaacatctgcaccacccagctgcggctgctgtctgaggacacagacagccagaggctggcctacgtgacctgccaggacctgcggagcattgctgaccctgctgagcagatggtgatggtgatcaaggcccctcctgagacccagctgcaggccgtggacagcagcgagaacttccagatcagcctgaagagcaagcagggccccattgatgtgttcctgtgcccagaggagaccgtgggcggcatcagccctgggaagacccccagccaggaggtgaccagcgaggaggagaacagagccacagattctgccaccatcgtgtccccaccacccagcagcccccccagcagcctgaccacagaccccagccagagcctgctgagcctggagcaggagcccctgctgagcaggatgggcagcctgcgggcccctgtggatgaagatcggctgagccccctggtggccgctgacagcctgctggagcacgtgcgggaggacttcagcggcctgctgcctgaggagttcatcagcctgagcccccctcatgaggccctggactaccacttcggcctggaggagggggagggcatccgggacctgtttgactgtgactttggagacctgacccccctggacttctag

SEQ ID NO: 19444 - DNA, 1242 bp, synthetic construct
  misc_feature 1..1242: note = Description of Artificial Sequence: Synthetic coding sequence
  source 1..1242: mol_type = other DNA
atggccgaggccggcccccaggcccctcctcctcctggcacccccagcagacatgagaagagcctgggcctgctgaccaccaagtttgtgtccctgctgcaggaggccaaggatggagtgctggacctgaagctggccgctgacaccctggccgtgcggcagaagaggcgcatctatgacatcaccaacgtgctggagggcatcggcctgattgagaagaagagcaagaacagcatccagtggaagggcgtgggccctggctgcaacacccgggagattgctgacaagctgattgagctgaaggccgagattgaggagctgcagcagcgggagcaggagctggaccagcacaaggtgtgggtgcagcagagcatcagaaatgtgacagaagatgtgcagaacagctgcctggcctacgtgacccatgaggacatctgccgctgctttgctggggacaccctgctggccatccgggcccccagcggcaccagcctggaggtgcccatccctgagggcctgaatggccagaagaagtaccagatccacctgaagtctgtgtctggccccatcgaggtgctgctggtgaacaaggaggcctggagcagcccccctgtggccgtgcctgtgcccccacctgaggacctgctgcagagccccagcgctgtgtccaccccaccacccctgcccaagccagccctggcccagagccaggaggccagccggcccaacagcccccagctgacccccacagctgtgcccggcagcgctgaggtgcagggcatggccggccctgctgctgagatcaccgtgtctgggggccctggaacagacagcaaggacagcggggagctgagcagcctgcccctgggccccaccaccctggacacccggcccctgcagagcagcgccctgctggacagcagcagcagcagcagcagcagcagcagcagcagcagcaacagcaacagcagcagcagcagcggccccaaccccagcaccagctttgagcccatcaaggctgaccccactggagtgctggagctgcccaaggagctgtctgagatctttgaccccacccgggagtgcatgagcagcgagctgctggaggagctgatgagcagcgaggtgtttgcccccctgctgcggctgagccccccacctggggaccatgactacatctacaacctggatgaaagtgaaggagtgtgtgacctgtttgatgtgcctgtgctgaacctgtag

SEQ ID NO: 19445 - DNA, 1164 bp, synthetic construct
  misc_feature 1..1164: note = Description of Artificial Sequence: Synthetic coding sequence
  source 1..1164: mol_type = other DNA
atgaccgggaagctggccgagaagctgcctgtgaccatgagcagcctgctgaaccagctgcctgacaacctgtacccagaggagatccccagcgccctgaacctcttcagcggcagcagtgacagcgtggtgcactacaaccagatggccacagaaaatgtgatggacatcggcctgaccaatgagaagcccaaccctgagctgagctacagcggcagcttccagcctgcccctggcaacaagacagtgacctacctgggcaagtttgcctttgacagccccagcaactggtgccaggacaacatcatcagcctgatgtctgctggcatcctgggcgtgcccccagccagcggggccctgagcacccagaccagcacagcctccatggtgcagcccccccagggagatgtggaggccatgtacccagccctgcccccctacagcaactgtggggacctgtacagcgagcctgtgtccttccatgacccccagggcaaccctggcctggcctacagcccccaggactaccagagcgccaagccagccctggacagcaacctcttccccatgatcccagactacaacctgtaccaccaccccaatgacatgggcagcatccctgagcacaagcccttccagggcatggaccccatccgggtgaaccccccacccatcacccccctggagaccatcaaggccttcaaggacaagcagatccaccctggcttcggcagcctgccccagccccccctgaccctgaagcccatccggcccaggaagtaccccaaccggcccagcaagacccccctgcacgagcggccccacgcctgcccagctgagggctgtgaccggcgcttcagcagaagtgatgagctgaccaggcacctgcgcatccacacaggccacaagcccttccagtgccgcatctgcatgaggagcttcagcagaagtgaccacctgaccacccacatccgcacccacactggagagaagccctttgcctgtgagttctgtggcaggaagtttgcccggagtgatgagaggaagagacatgccaagatccacctgaagcagaaggagaagaaggccgagaagggcggggcccccagcgccagcagcgcccctcctgtgtccctggcccctgtggtgaccacctgtgcctag

SEQ ID NO: 19446 - DNA, 687 bp, synthetic construct
  misc_feature 1..687: note = Description of Artificial Sequence: Synthetic coding sequence
  source 1..687: mol_type = other DNA
atggacatcggcctgaccaatgagaagcccaaccctgagctgagctacagcggcagcttccagcctgcccctggcaacaagacagtgaccatgatcccagactacaacctgtaccaccaccccaatgacatgggcagcatccctgagcacaagcccttccagggcatggaccccatccgggtgaaccccccacccatcacccccctggagaccatcaaggccttcaaggacaagcagatccaccctggcttcggcagcctgccccagccccccctgaccctgaagcccatccggcccaggaagtaccccaaccggcccagcaagacccccctgcacgagcggccccacgcctgcccagctgagggctgtgaccggcgcttcagcagaagtgatgagctgaccaggcacctgcgcatccacacaggccacaagcccttccagtgccgcatctgcatgaggagcttcagcagaagtgaccacctgaccacccacatccgcacccacactggagagaagccctttgcctgtgagttctgtggcaggaagtttgcccggagtgatgagaggaagagacatgccaagatccacctgaagcagaaggagaagaaggccgagaagggcggggcccccagcgccagcagcgcccctcctgtgtccctggcccctgtggtgaccacctgtgcctag

SEQ ID NO: 19447 - DNA, 1050 bp, synthetic construct
  misc_feature 1..1050: note = Description of Artificial Sequence: Synthetic coding sequence
  source 1..1050: mol_type = other DNA
atggagccctgtgccgcctggagcccccggggcggccgggagaatgtgatggacatcggcctgaccaatgagaagcccaaccctgagctgagctacagcggcagcttccagcctgcccctggcaacaagacagtgacctacctgggcaagtttgcctttgacagccccagcaactggtgccaggacaacatcatcagcctgatgtctgctggcatcctgggcgtgcccccagccagcggggccctgagcacccagaccagcacagcctccatggtgcagcccccccagggagatgtggaggccatgtacccagccctgcccccctacagcaactgtggggacctgtacagcgagcctgtgtccttccatgacccccagggcaaccctggcctggcctacagcccccaggactaccagagcgccaagccagccctggacagcaacctcttccccatgatcccagactacaacctgtaccaccaccccaatgacatgggcagcatccctgagcacaagcccttccagggcatggaccccatccgggtgaaccccccacccatcacccccctggagaccatcaaggccttcaaggacaagcagatccaccctggcttcggcagcctgccccagccccccctgaccctgaagcccatccggcccaggaagtaccccaaccggcccagcaagacccccctgcacgagcggccccacgcctgcccagctgagggctgtgaccggcgcttcagcagaagtgatgagctgaccaggcacctgcgcatccacacaggccacaagcccttccagtgccgcatctgcatgaggagcttcagcagaagtgaccacctgaccacccacatccgcacccacactggagagaagccctttgcctgtgagttctgtggcaggaagtttgcccggagtgatgagaggaagagacatgccaagatccacctgaagcagaaggagaagaaggccgagaagggcggggcccccagcgccagcagcgcccctcctgtgtccctggcccctgtggtgaccacctgtgcctag

SEQ ID NO: 19448 - DNA, 3696 bp, synthetic construct
  misc_feature 1..3696: note = Description of Artificial Sequence: Synthetic coding sequence
  source 1..3696: mol_type = other DNA
atggcctctgtgtggaagaggctgcagagggtgggcaagcacgccagcaagttccagtttgtggccagctaccaggagctgatggtggagtgcaccaagaagtggcagcctgacaagctggtggtggtgtggacccggcgcagcaggaggaagagcagcaaggcccacagctggcagcccggcatcaagaacccctaccggggcgtggtggtgtggcctgtgcctgagaacatcgagatcaccgtgaccctcttcaaggacccccacgccgaggagtttgaggacaaggagtggacctttgtgattgaaaatgaaagccccagcggccgcaggaaggccctggccaccagcagcatcaacatgaagcagtatgccagccccatgcccacccagacagatgtgaagctgaagttcaagcccctgagcaagaaggtggtgtctgctgccctgcagttcagcctgagctgcatcttcctgcgggagggcaaggccacagatgaggacatgcagagcctggccagcctgatgtccatgaagcaggccgacatcggcaacctggatgactttgaagaagataatgaagatgatgatgagaacagagtgaaccaggaggagaaggccgccaagatcacagaaattgtgaaccagctgaatgccctgagcagcctggatgaggaccaggatgactgcatcaagcaggccaacatgaggtctgccaagagcgccagcagcagcgaggagctgatcaacaagctgaacttcctggatgaggccgagaaggacctggccaccgtgaacagcaacccctttgatgatcctgatgctgctgagctgaacccctttggagaccctgacagcgaggagcccatcacagaaacagccagccccaggaagacagaggacagcttctacaacaacagctacaaccccttcaaggaggtgcagaccccccagtacctgaacccctttgatgagcctgaggcctttgtgaccatcaaggacagccccccccagagcaccaagaggaagaacatccggcctgtggacatgagcaagtacctgtatgctgacagcagcaagacagaggaggaggagctggatgagagcaaccccttctatgagcccaagagcaccccaccacccaacaacctggtgaaccctgtgcaggagctggagacagaaagaagagtgaagaggaaggccccagcccctcctgtgctgagccccaagacaggagtgctgaatgaaaatacagtgtctgctgggaaggacctgagcaccagccccaagcccagccccatccccagccctgtgctgggcaggaagcccaatgccagccagagcctgctggtgtggtgcaaggaggtgaccaagaactaccggggcgtgaagatcaccaacttcaccacctcctggagaaatggcctgtccttctgtgccatcctgcaccacttccggccagacctgattgactacaagagcctgaacccccaggacatcaaggagaacaacaagaaggcctatgatggctttgccagcatcggcatcagccggctgctggagcccagcgacatggtgctgctggccatcccagacaagctgactgtgatgacctacctgtaccagatccgggcccacttcagcggccaggagctgaatgtggtgcagatcgaggagaacagcagcaagagcacctacaaggtgggcaactatgaaacagacaccaacagctctgtggaccaggagaagttctacgccgagctgagtgacctgaagcgggagcctgagctgcagcagcccatcagcggggctgtggacttcctgagccaggatgattctgtgtttgtgaatgattctggagtgggggagagcgagagcgagcaccagaccccagatgaccacctgagccccagcacagccagcccctactgcaggaggaccaagagtgacacagagccccagaagagccagcagagcagcggccgcaccagcggcagtgatgatcctggcatctgcagcaacacagacagcacccaggcccaggtgctgctgggcaagaagaggctgctgaaggccgagaccctggagctgagtgacctgtatgtgtctgacaagaagaaggacatgagcccccccttcatctgtgaggagacagatgagcagaagctgcagaccctggacatcggcagcaacctggagaaggagaagctggagaacagccgcagcctggagtgccgcagtgaccctgagagccccatcaagaagaccagcctgagccccaccagcaagctgggctacagctacagccgggacctggacctggccaagaagaagcacgccagcctgcggcagacagaaagtgaccctgatgctgacaggaccaccctgaaccacgccgaccacagcagcaagatcgtgcagcaccggctgctgagccggcaggaggagctgaaggagcgggcccgggtgctgctggagcaggccaggagagatgctgccctgaaggccggcaacaagcacaacaccaacacagccacccccttctgcaaccggcagctgagtgaccagcaggatgaggagcggcggcggcagctgcgggagcgggcccggcagctgattgctgaggcccggtctggagtgaagatgtctgagctgcccagctatggagagatggctgctgagaagctgaaggagaggagcaaggccagcggagatgaaaatgacaacatcgagattgacaccaatgaggagatccctgagggctttgtggtgggcggcggagatgagctgaccaacctggagaatgacctggacaccccagagcagaacagcaagctggtggacctgaagctgaagaagctgctggaggtgcagccccaggtggccaacagccccagcagcgctgcccagaaggctgtgacagagagcagcgagcaggacatgaagtctggaacagaggacctgaggacagagcggctgcagaagaccacagagcgcttcagaaatcctgtggtgttcagcaaggacagcacagtgaggaagacccagctgcagagcttcagccagtacattgaaaatagacctgagatgaagaggcagaggagcatccaggaggacaccaagaagggaaatgaggagaaggccgccatcacagagacccagaggaagcccagtgaagatgaggtgctgaacaagggcttcaaggacaccagccagtatgtggtgggggagctggccgccctggagaatgagcagaagcagattgacacccgggccgccctggtggagaagaggctgcgctacctgatggacacaggaagaaacacagaggaggaggaggccatgatgcaggagtggttcatgctggtgaacaagaagaatgccctgatccggaggatgaaccagctgagcctgctggagaaggagcatgacctggagaggagatatgagctgctgaaccgggagctgcgggccatgctggccatcgaggactggcagaagacagaggcccagaagagaagagagcagctgctgctggatgagctggtggccctggtgaacaagagagatgccctggtgcgggacctggatgcccaggagaagcaggccgaggaggaggatgagcacctggagaggaccctggagcagaacaagggcaagatggccaagaaggaggagaagtgtgtgctgcagtag

SEQ ID NO: 19449 - DNA, 3591 bp, synthetic construct
  misc_feature 1..3591: note = Description of Artificial Sequence: Synthetic coding sequence
  source 1..3591: mol_type = other DNA
atggcctctgtgtggaagaggctgcagagggtgggcaagcacgccagcaagttccagtttgtggccagctaccaggagctgatggtggagtgcaccaagaagtggcagcctgacaagctggtggtggtgtggacccggcgcagcaggaggaagagcagcaaggcccacagctggcagcccggcatcaagaacccctaccggggcgtggtggtgtggcctgtgcctgagaacatcgagatcaccgtgaccctcttcaaggacccccacgccgaggagtttgaggacaaggagtggacctttgtgattgaaaatgaaagccccagcggccgcaggaaggccctggccaccagcagcatcaacatgaagcagtatgccagccccatgcccacccagacagatgtgaagctgaagttcaagcccctgagcaagaaggtggtgtctgctgccctgcagttcagcctgagctgcatcttcctgcgggagggcaaggccacagatgaggacatgcagagcctggccagcctgatgtccatgaagcaggccgacatcggcaacctggatgactttgaagaagataatgaagatgatgatgagaacagagtgaaccaggaggagaaggccgccaagatcacagagctgatcaacaagctgaacttcctggatgaagctgagaaggacctggccaccgtgaacagcaacccctttgatgatcctgatgctgctgagctgaacccctttggagaccctgattctgaggagcccatcacagaaacagccagccccaggaagacagaagattccttctacaacaacagctacaaccccttcaaggaggtgcagaccccccagtacctgaacccctttgatgagcctgaggcctttgtgaccatcaaggacagccccccccagagcaccaagaggaagaacatccggcctgtggacatgagcaagtacctgtatgctgacagcagcaagacagaggaggaggagctggatgagagcaaccccttctatgagcccaagagcaccccaccacccaacaacctggtgaaccctgtgcaggagctggagacagagcggcgggtgaagaggaaggccccagcccctcctgtgctgagccccaagacaggagtgctgaatgaaaatacagtgtctgctgggaaggacctgagcaccagccccaagcccagccccatccccagccctgtgctgggcaggaagcccaatgccagccagagcctgctggtgtggtgcaaggaggtgaccaagaactacagaggagtgaagatcaccaacttcaccacctcctggagaaatggcctgtccttctgtgccatcctgcaccacttccggccagacctgattgactacaagagcctgaacccccaggacatcaaggagaacaacaagaaggcctatgatggctttgccagcatcggcatcagccggctgctggagcccagcgacatggtgctgctggccatcccagacaagctgactgtgatgacctacctgtaccagatccgggcccacttcagcggccaggagctgaatgtggtgcagatcgaggagaacagcagcaagagcacctacaaggtgggcaactatgaaacagacaccaacagctctgtggaccaggagaagttctatgcagagctgagtgacctgaagcgggagcctgagctgcagcagcccatctctggagctgtggacttcctgagccaggatgacagcgtgtttgtgaatgacagcggcgtgggggagagcgagagcgagcaccagaccccagatgaccacctgagccccagcacagccagcccctactgcaggaggaccaagagtgacacagagccccagaagagccagcagagcagcggccgcaccagcggcagtgatgaccccggcatctgcagcaacacagacagcacccaggcccaggtgctgctgggcaagaagaggctgctgaaggccgagaccctggagctgagtgacctgtatgtgtctgacaagaagaaggacatgagcccccccttcatctgtgaggagacagatgagcagaagctgcagaccctggacatcggcagcaacctggagaaggagaagctggagaacagccgcagcctggagtgccgcagtgaccctgagagccccatcaagaagaccagcctgagccccaccagcaagctgggctacagctacagccgggacctggacctggccaagaagaagcacgccagcctgcggcagacagaaagtgaccctgatgctgacaggaccaccctgaaccacgccgaccacagcagcaagatcgtgcagcaccggctgctgagccggcaggaggagctgaaggagcgggcccgggtgctgctggagcaggccaggagagatgctgccctgaaggccggcaacaagcacaacaccaacacagccacccccttctgcaaccggcagctgagtgaccagcaggatgaggagcggcggcggcagctgcgggagcgggcccggcagctgattgctgaggcccggtctggagtgaagatgtctgagctgcccagctatggagagatggctgctgagaagctgaaggagaggagcaaggccagcggagatgaaaatgacaacattgaaattgacaccaatgaggagatccctgagggctttgtggtgggcggcggagatgagctgaccaacctggagaatgacctggacaccccagagcagaacagcaagctggtggacctgaagctgaagaagctgctggaggtgcagccccaggtggccaacagccccagcagcgctgcccagaaggctgtgacagagagcagcgagcaggacatgaagagcggcacagaggacctgaggacagagcggctgcagaagaccacagagcgcttcaggaaccctgtggtgttcagcaaggacagcacagtgaggaagacccagctgcagagcttcagccagtacatcgagaacagacctgagatgaagaggcagaggagcatccaggaggacaccaagaagggaaatgaggagaaggccgccatcacagagacccagaggaagcccagtgaagatgaggtgctgaacaagggcttcaaggacaccagccagtatgtggtgggggagctggccgccctggagaatgagcagaagcagattgacaccagggctgccctggtggagaagaggctgcgctacctgatggacaccggcaggaacacagaggaggaggaggccatgatgcaggagtggttcatgctggtgaacaagaagaatgccctgatccggaggatgaaccagctgagcctgctggagaaggagcatgacctggagcggcgctatgagctgctgaaccgggagctgcgggccatgctggccatcgaggactggcagaagacagaggcccagaagaggcgggagcagctgctgctggatgagctggtggccctggtgaacaagagagatgccctggtgcgggacctggatgcccaggagaagcaggccgaggaggaggatgagcacctggagaggaccctggagcagaacaagggcaagatggccaagaaggaggagaagtgtgtgctgcagtag

SEQ ID NO: 19450 - DNA, 3483 bp, synthetic construct
  misc_feature 1..3483: note = Description of Artificial Sequence: Synthetic coding sequence
  source 1..3483: mol_type = other DNA
atggcctctgtgtggaagaggctgcagagggtgggcaagcacgccagcaagttccagtttgtggccagctaccaggagctgatggtggagtgcaccaagaagtggcagcctgacaagctggtggtggtgtggacccggcgcagcaggaggaagagcagcaaggcccacagctggcagcccggcatcaagaacccctaccggggcgtggtggtgtggcctgtgcctgagaacatcgagatcaccgtgaccctcttcaaggacccccacgccgaggagtttgaggacaaggagtggacctttgtgattgaaaatgaaagccccagcggccgcaggaaggccctggccaccagcagcatcaacatgaagcagtatgccagccccatgcccacccagacagatgtgaagctgaagttcaagcccctgagcaagaaggtggtgtctgctgccctgcagttcagcctgagctgcatcttcctgcgggagggcaaggccacagatgaggacatgcagagcctggccagcctgatgtccatgaagcaggccgacatcggcaacctggatgactttgaagaagataatgaagatgatgatgagaacagagtgaaccaggaggagaaggccgccaagatcacagagctgatcaacaagctgaacttcctggatgaagctgagaaggacctggccaccgtgaacagcaacccctttgatgatcctgatgctgctgagctgaacccctttggagaccctgattctgaggagcccatcacagaaacagccagccccaggaagacagaagattccttctacaacaacagctacaaccccttcaaggaggtgcagaccccccagtacctgaacccctttgatgagcctgaggcctttgtgaccatcaaggacagccccccccagagcaccaagaggaagaacatccggcctgtggacatgagcaagtacctgtatgctgacagcagcaagacagaggaggaggagctggatgagagcaaccccttctatgagcccaagagcaccccaccacccaacaacctggtgaaccctgtgcaggagctggagacagagcggcgggtgaagaggaaggccccagcccctcctgtgctgagccccaagacaggagtgctgaatgaaaatacagtgtctgctgggaaggacctgagcaccagccccaagcccagccccatccccagccctgtgctgggcaggaagcccaatgccagccagagcctgctggtgtggtgcaaggaggtgaccaagaactacagaggagtgaagatcaccaacttcaccacctcctggagaaatggcctgtccttctgtgccatcctgcaccacttccggccagacctgattgactacaagagcctgaacccccaggacatcaaggagaacaacaagaaggcctatgatggctttgccagcatcggcatcagccggctgctggagcccagcgacatggtgctgctggccatcccagacaagctgactgtgatgacctacctgtaccagatccgggcccacttcagcggccaggagctgaatgtggtgcagatcgaggagaacagcagcaagagcacctacaaggtgggcaactatgaaacagacaccaacagctctgtggaccaggagaagttctatgcagagctgagtgacctgaagcgggagcctgagctgcagcagcccatctctggagctgtggacttcctgagccaggatgacagcgtgtttgtgaatgacagcggcgtgggggagagcgagagcgagcaccagaccccagatgaccacctgagccccagcacagccagcccctactgcaggaggaccaagagtgacacagagccccagaagagccagcagagcagcggccgcaccagcggcagtgatgaccccggcatctgcagcaacacagacagcacccaggcccaggtgctgctgggcaagaagaggctgctgaaggccgagaccctggagctgagtgacctgtatgtgtctgacaagaagaaggacatgagcccccccttcatctgtgaggagacagatgagcagaagctgcagaccctggacatcggcagcaacctggagaaggagaagctggagaacagccgcagcctggagtgccgcagtgaccctgagagccccatcaagaagaccagcctgagccccaccagcaagctgggctacagctacagccgggacctggacctggccaagaagaagcacgccagcctgcggcagacagaaagtgaccctgatgctgacaggaccaccctgaaccacgccgaccacagcagcaagatcgtgcagcaccggctgctgagccggcaggaggagctgaaggagcgggcccgggtgctgctggagcaggccaggagagatgctgccctgaaggccggcaacaagcacaacaccaacacagccacccccttctgcaaccggcagctgagtgaccagcaggatgaggagcggcggcggcagctgcgggagcgggcccggcagctgattgctgaggcccggtctggagtgaagatgtctgagctgcccagctatggagagatggctgctgagaagctgaaggagaggagcaaggccagcggggagcagaacagcaagctggtggacctgaagctgaagaagctgctggaggtgcagccccaggtggccaacagccccagcagcgctgcccagaaggctgtgacagagagcagcgagcaggacatgaagagcggcacagaggacctgaggacagagcggctgcagaagaccacagagcgcttcaggaaccctgtggtgttcagcaaggacagcacagtgaggaagacccagctgcagagcttcagccagtacatcgagaacagacctgagatgaagaggcagaggagcatccaggaggacaccaagaagggaaatgaggagaaggccgccatcacagagacccagaggaagcccagtgaagatgaggtgctgaacaagggcttcaaggacaccagccagtatgtggtgggggagctggccgccctggagaatgagcagaagcagattgacaccagggctgccctggtggagaagaggctgcgctacctgatggacaccggcaggaacacagaggaggaggaggccatgatgcaggagtggttcatgctggtgaacaagaagaatgccctgatccggaggatgaaccagctgagcctgctggagaaggagcatgacctggagcggcgctatgagctgctgaaccgggagctgcgggccatgctggccatcgaggactggcagaagacagaggcccagaagaggcgggagcagctgctgctggatgagctggtggccctggtgaacaagagagatgccctggtgcgggacctggatgcccaggagaagcaggccgaggaggaggatgagcacctggagaggaccctggagcagaacaagggcaagatggccaagaaggaggagaagtgtgtgctgcagtag

SEQ ID NO: 19451 - DNA, 3591 bp, synthetic construct; identical to SEQ ID NO: 19449
  misc_feature 1..3591: note = Description of Artificial Sequence: Synthetic coding sequence
  source 1..3591: mol_type = other DNA

SEQ ID NO: 19452 - DNA, 933 bp, synthetic construct
  misc_feature 1..933: note = Description of Artificial Sequence: Synthetic coding sequence
  source 1..933: mol_type = other DNA
atggcctctgtgtggaagaggctgcagagggtgggcaagcacgccagcaagttccagtttgtggccagctaccaggagctgatggtggagtgcaccaagaagtggcagcctgacaagctggtggtggtgtggacccggcgcagcaggaggaagagcagcaaggcccacagctggcagcccggcatcaagaacccctaccggggcgtggtggtgtggcctgtgcctgagaacatcgagatcaccgtgaccctcttcaaggacccccacgccgaggagtttgaggacaaggagtggacctttgtgattgaaaatgaaagccccagcggccgcaggaaggccctggccaccagcagcatcaacatgaagcagtatgccagccccatgcccacccagacagatgtgaagctgaagttcaagcccctgagcaagaaggtggtgtctgctgccctgcagttcagcctgagctgcatcttcctgcgggagggcaaggccacagatgaggacatgcagagcctggccagcctgatgtccatgaagcaggccgacatcggcaacctggatgactttgaagaagataatgaagatgatgatgagaacagagtgaaccaggaggagaaggccgccaagatcacagagctgatcaacaagctgaacttcctggatgaagctgagaaggacctggccaccgtgaacagcaacccctttgatgatcctgatgctgctgagctgaacccctttggagaccctgattctgaggagcccatcacagaaacagccagccccaggaagacagaagattccttctacaacaacagctacaaccccttcaaggaggtgcagaccccccagtacctgaacccctttgatgagcctgaggcctttgtgaccatcaaggacagccccccccagagcaccaagaggaagaacatctag

SEQ ID NO: 19453 - DNA, 234 bp, synthetic construct
  misc_feature 1..234: note = Description of Artificial Sequence: Synthetic coding sequence
  source 1..234: mol_type = other DNA
atggcctctgtgtggaagaggctgcagagggtgggcaagcacgccagcaagttccagtttgtggccagctaccaggagctgatggtggagtgcaccaagaagtggcagcctgacaagctggtggtggtgtggacccggcgcagcaggaggaagagcagcaaggcccacagctggcagcccggcatcaagaacccctaccggggcgtggtggtgtggcctgtgcctgagaactag

SEQ ID NO: 19454 - DNA, 3483 bp, synthetic construct; identical to SEQ ID NO: 19450
  misc_feature 1..3483: note = Description of Artificial Sequence: Synthetic coding sequence
  source 1..3483: mol_type = other DNA

SEQ ID NO: 19455 - DNA, 609 bp, synthetic construct
  misc_feature 1..609: note = Description of Artificial Sequence: Synthetic coding sequence
  source 1..609: mol_type = other DNA
atgaagaggcagaggagcatccaggaggacaccaagaagggaaatgaggagaaggccgccatcacagagacccagaggaagcccagtgaagatgaggtgctgaacaagggcttcaaggacaccagccagtatgtggtgggggagctggccgccctggagaatgagcagaagcagattgacaccagggctgccctggtggagaagaggctgcgctacctgatggacaccggcaggaacacagaggaggaggaggccatgatgcaggagtggttcatgctggtgaacaagaagaatgccctgatccggaggatgaaccagctgagcctgctggagaaggagcatgacctggagcggcgctatgagctgctgaaccgggagctgcgggccatgctggccatcgaggactggcagaagacagaggcccagaagaggcgggagcagctgctgctggatgagctggtggccctggtgaacaagagagatgccctggtgcgggacctggatgcccaggagaagcaggccgaggaggaggatgagcacctggagaggaccctggagcagaacaagggcaagatggccaagaaggaggagaagtgtgtgctgcagtag

SEQ ID NO: 19456 - DNA, 1287 bp, synthetic construct
  misc_feature 1..1287: note = Description of Artificial Sequence: Synthetic coding sequence
  source 1..1287: mol_type = other DNA
atggaccccagcgtgaccctgtggcagttcctgctgcagctgctgcgggagcagggcaatggccacatcatctcctggaccagcagagatggaggagagttcaagctggtggatgctgaggaggtggcccggctgtggggcctgaggaagaacaagaccaacatgaactatgacaagctgagccgggccctgcgctactactatgacaagaacatcatcaggaaggtgtctggccagaagtttgtgtacaagtttgtgtcctacccagaggtggccggctgcagcacagaggactgccccccccagcctgaggtgtctgtgaccagcaccatgcccaacgtggccccagctgccatccatgctgcccctggggacacagtgtctgggaagccaggcacccccaagggagctggcatggccggccctgggggcctggcccggagcagcagaaatgagtacatgaggagcggcctgtacagcaccttcaccatccagagcctgcagccccagcccccaccccaccccaggcctgctgtggtgctgcccagcgctgccccagctggagctgctgccccacccagcggcagccgcagcaccagccccagccccctggaggcctgcctggaggccgaggaggccggcctgcccctgcaggtgatcctgaccccacctgaggcccccaacctgaagtctgaggagctgaatgtggagcccggcctgggccgggccctgcccccagaggtgaaggtggagggccccaaggaggagctggaggtggccggggagcggggctttgtgcctgagaccaccaaggccgagcctgaggtgcccccccaggagggcgtgcctgcccggctgcctgctgtggtgatggacacagctggccaggccggcggccatgctgccagcagccctgagatcagccagccccagaagggcaggaagccccgggacctggagctgcccctgagccccagcctgctgggcggccctggccctgagaggaccccaggcagcggcagcggcagcggcctgcaggcccctggccctgccctgacccccagcctgctgcccacccacaccctgacccctgtgctgctgacccccagcagcctgcccccatccatccacttctggagcaccctgagccccatcgcccccaggagccctgccaagctgtccttccagttccccagcagcggcagcgcccaggtgcacatccccagcatctctgtggatggcctgagcacccctgtggtgctgagccctggcccccagaagccctag

SEQ ID NO: 19457 - DNA, 288 bp, synthetic construct
  misc_feature 1..288: note = Description of Artificial Sequence: Synthetic coding sequence
  source 1..288: mol_type = other DNA
atggaccccagcgtgaccctgtggcagttcctgctgcagctgctgcgggagcagggcaatggccacatcatctcctggaccagcagagatggaggagagttcaagctggtggatgctgaggaggtggcccggctgtggggcctgaggaagaacaagaccaacatgaactatgacaagctgagccgggccctgcgctactactatgacaagaacatcatcaggaaggtgtctggccagaagtttgtgtacaagtttgtgtcctacccagagagccactgtgccccctag

SEQ ID NO: 19458 - DNA, 1287 bp, synthetic construct; identical to SEQ ID NO: 19456
  misc_feature 1..1287: note = Description of Artificial Sequence: Synthetic coding sequence
  source 1..1287: mol_type = other DNA

SEQ ID NO: 19459 - DNA, 366 bp, synthetic construct
  misc_feature 1..366: note = Description of Artificial Sequence: Synthetic coding sequence
  source 1..366: mol_type = other DNA
atggacacagctggccaggccggcggccatgctgccagcagccctgagatcagccagccccagaagggcaggaagccccgggacctggagctgcccctgagccccagcctgctgggcggccctggccctgagaggaccccagccctgctgcccacccacaccctgacccctgtgctgctgacccccagcagcctgccccccagcatccacttctggagcaccctgagccccatcgcccccaggagccctgccaagctgtccttccagttccccagcagcggcagcgcccaggtgcacatccccagcatctctgtggatggcctgagcacccctgtggtgctgagccctggcccccagaagccctag

SEQ ID NO: 19460 - DNA, 1713 bp, synthetic construct
  misc_feature 1..1713: note = Description of Artificial Sequence: Synthetic coding sequence
  source 1..1713: mol_type = other DNA
atgtctgagcagagcatctgccaggcccgggctgctgtgatggtgtatgatgatgccaacaagaagtgggtgcctgctgggggcagcacaggcttcagccgggtgcacatctaccaccacactggaaacaacaccttccgggtggtgggcaggaagatccaggaccaccaggtggtgatcaactgtgccatccccaagggcctgaagtacaaccaggccacccagaccttccaccagtggagagatgcccggcaggtgtatggcctgaactttggcagcaaagaagatgccaacgtgtttgccagcgccatgatgcacgccctggaggtgctgaacagccaggagaccggccccaccctgccccggcagaacagccagctgcctgcccaggtgcagaatggccccagccaggaggagctggagatccagaggcggcagctgcaggagcagcagaggcagaaggagctggagcgggagcggctggagcgggagaggatggagcgggagcggctggagcgggagcggctggagcgggagcggctggagcgggagcggctggagcaggagcagctggagcgggagcggcaggagcgggagcggcaggagcggctggagcggcaggagcggctggagcggcaggagcggctggagcggcaggagcggctggaccgggagcggcaggagcggcaggagcgggagcggctggagcggctggagcgggagcggcaggagcgggagcggcaggagcagctggagcgggagcagctggagtgggagcgggagcggcgcatcagcagcgctgctgccccagcctctgtggagacccccctgaacagcgtgctgggggacagcagcgccagcgagcccggcctgcaggccgccagccagcctgctgagacccccagccagcagggcatcgtgctgggccccctggcccctcctcctcctccacccctgcccccaggccctgcccaggcctctgtggccctgcccccacctcctggccccccacctcctccacccctgcccagcactggacctcctcctcctcctcctcctccacccctgcccaaccaggtgcccccacctcctcctcctcctccagccccacccctgcctgccagcggcttcttcctggcctccatgtctgaggacaaccggcccctgaccggcctggccgccgccatcgccggggccaagctgaggaaggtgtccaggatggaggacaccagcttccccagcggcggcaatgccatcggcgtgaacagcgccagcagcaagacagacaccggcagaggaaatggccccctgcccctgggcggcagcggcctgatggaggagatgtctgccctgctggccaggagaagaagaattgctgagaagggcagcaccattgaaacagagcagaaggaggacaagggagaagattctgagcctgtgaccagcaaggccagcagcaccagcaccccagagcccaccaggaagccctgggagaggaccaacaccatgaatggcagcaagagccctgtgatcagccggcccaagagcacccccctgagccagcccagcgccaatggagtgcagacagagggcctggactatgaccggctgaagcaggacatcctggatgagatgaggaaggagctgaccaagctgaaggaggagctgattgatgccatccggcaggagctgagcaagagcaacacagcctag

SEQ ID NO: 19461 - DNA, 1776 bp, synthetic construct
  misc_feature 1..1776: note = Description of Artificial Sequence: Synthetic coding sequence
  source 1..1776: mol_type = other DNA
atgtctgagcagagcatctgccaggcccgggctgctgtgatggtgtatgatgatgccaacaagaagtgggtgcctgctgggggcagcacaggcttcagccgggtgcacatctaccaccacactggaaacaacaccttccgggtggtgggcaggaagatccaggaccaccaggtggtgatcaactgtgccatccccaagggcctgaagtacaaccaggccacccagaccttccaccagtggagagatgcccggcaggtgtatggcctgaactttggcagcaaagaagatgccaacgtgtttgccagcgccatgatgcacgccctggaggtgctgaacagccaggagaccggccccaccctgccccggcagaacagccagctgcctgcccaggtgcagaatggccccagccaggaggagctggagatccagaggcggcagctgcaggagcagcagaggcagaaggagctggagcgggagcggctggagcgggagaggatggagcgggagcggctggagcgggagcggctggagcgggagcggctggagcgggagcggctggagcaggagcagctggagcgggagcggcaggagcgggagcggcaggagcggctggagcggcaggagcggctggagcggcaggagcggctggagcggcaggagcggctggaccgggagcggcaggagcggcaggagcgggagcggctggagcggctggagcgggagcggcaggagcgggagcggcaggagcagctggagcgggagcagctggagtgggagcgggagcggcgcatcagcagcgctgctgccccagcctctgtggagacccccctgaacagcgtgctgggggacagcagcgccagcgagcccggcctgcaggccgccagccagcctgctgagacccccagccagcagggcatcgtgctgggccccctggcccctcctcctcctccacccctgcccccaggccctgcccaggcctctgtggccctgcccccacctcctggccccccacctcctccacccctgcccagcactggacctcctcctcctcctcctcctccacccctgcccaaccaggtgcccccacctcctcctcctcctccagccccacccctgcctgccagcggcttcttcctggcctccatgtctgaggacaaccggcccctgaccggcctggccgccgccatcgccggggccaagctgaggaaggtgtccaggatggaggacaccagcttccccagcggcggcaatgccatcggcgtgaacagcgccagcagcaagacagacaccggcagaggaaatggccccctgcccctgggcggcagcggcctgatggaggagatgtctgccctgctggccaggagaagaagaattgctgagaagggcagcaccattgaaacagagcagaaggaggacaagggagaagattctgagcctgtgaccagcaaggccagcagcaccagcaccccagagcccaccaggaagccctgggagaggaccaacaccatgaatggcagcaagagccctgtgatcagcagaagagacagccccaggaagaaccagatcgtgtttgacaacagaagctatgacagcctgcaccggcccaagagcacccccctgagccagcccagcgccaacggggtgcagacagagggcctggactatgaccggctgaagcaggacatcctggatgagatgaggaaggagctgaccaagctgaaggaggagctgattgatgccatccggcaggagctgagcaagagcaacacagcctag

SEQ ID NO: 19462 - DNA, 1599 bp, synthetic construct
  misc_feature 1..1599: note = Description of Artificial Sequence: Synthetic coding sequence
  source 1..1599: mol_type = other DNA
tctgagcagagcatctgccaggcccgggctgctgtgatggtgtatgatgatgccaacaagaagtgggtgcctgctgggggcagcacaggcttcagccgggtgcacatctaccaccacacaggcaacaacaccttccgggtggtgggcaggaagatccaggaccaccaggtggtgatcaactgtgccatccccaagggcctgaagtacaaccaggccacccagaccttccaccagtggagagatgcccggcaggtgtatggcctgaactttggcagcaaggaggatgccaacgtgtttgccagcgccatgatgcacgccctggaggtgctgaacagccaggagaccggccccaccctgccccggcagaacagccagctgcctgcccaggtgcagaatggccccagccaggaggagctggagatccagaggcggcagctgcaggagcagcagaggcagaaggagctggagcgggagcggctggagcgggagaggatggagcgggagcggctggagcgggagcggctggagcgggagcggctggagcgggagcggctggagcaggagcagctggagcgggagcggcaggagcgggagcggcaggagcggctggagcggcaggagcggctggagcggcaggagcggctggagcggcaggagcggctggaccgggagcggcaggagcggcaggagcgggagcggctggagcggctggagcgggagcggcaggagcgggagcggcaggagcagctggagcgggagcagctggagtgggagcgggagcggcgcatcagcagcgctggcatcgtgctgggccccctggcccctcctcctcctccacccctgcccccaggccctgcccaggcctctgtggccctgcccccacctcctggccccccacctcctccacccctgcccagcactggacctcctcctcctcctcctcctccacccctgcccaaccaggtgcccccacctcctcctcctcctccagccccacccctgcctgccagcggcttcttcctggcctccatgtctgaggacaaccggcccctgaccggcctggccgccgccatcgccggggccaagctgaggaaggtgtccaggatggaggacaccagcttccccagcggcggcaatgccatcggcgtgaacagcgccagcagcaagacagacaccggcagaggaaatggccccctgcccctgggcggcagcggcctgatggaggagatgtctgccctgctggccaggagaagaagaattgctgagaagggcagcaccattgaaacagagcagaaggaggacaagggagaagattctgagcctgtgaccagcaaggccagcagcaccagcaccccagagcccaccaggaagccctgggagaggaccaacaccatgaatggcagcaagagccctgtgatcagccggcccaagagcacccccctgagccagcccagcgccaatggagtgcagacagagggcctggactatgaccggctgaagcaggacatcctggatgagatgaggaaggagctgaccaagctgaaggaggagctgattgatgccatccggcaggagctgagcaagagcaacacagcctag

SEQ ID NO: 19463 - DNA, 1878 bp, synthetic construct
  misc_feature 1..1878: note = Description of Artificial Sequence: Synthetic coding sequence
  source 1..1878: mol_type = other DNA
atggaccggggcaccctgcccctggccgtggccctgctgctggccagctgcagcctgagccccaccagcctggccgagaccgtgcactgtgacctgcagcctgtgggccctgagcggggggaggtgacctacaccaccagccaggtgtccaagggctgtgtggcccaggccccaaatgccatcctggaggtgcacgtgctcttcctggagttccccaccggccccagccagctggagctgaccctgcaggccagcaagcagaatggcacctggccccgggaggtgctgctggtgctgtctgtgaacagcagcgtcttcctgcacctgcaggccctgggcatccccctgcacctggcctacaacagcagcctggtgaccttccaggagcccccaggagtgaacaccacagagctgcccagcttccccaagacccagatcctggagtgggccgctgagcggggccccatcaccagcgctgctgagctgaatgacccccagagcatcctgctgcggctgggccaggcccagggcagcctgtccttctgcatgctggaggccagccaggacatgggccgcaccctggagtggaggcccaggaccccagccctggtgcggggctgccacctggagggcgtggccggccacaaggaggcccacatcctgcgggtgctgcccggccacagcgctggccccaggacagtgacagtgaaggtggagctgagctgtgcccctggggacctggatgctgtgctgatcctgcagggccccccctacgtgtcctggctgattgatgccaaccacaacatgcagatctggaccaccggggagtacagcttcaagatcttccctgagaagaacatccggggcttcaagctgcctgacaccccccagggcctgctgggggaggccaggatgctgaatgccagcatcgtggccagctttgtggagctgcccctggccagcatcgtgtccctgcacgccagcagctgtggcggccgcctgcagaccagccctgcccccatccagaccaccccacccaaggacacctgcagccctgagctgctgatgagcctcatccagaccaagtgtgctgatgatgccatgaccctggtgctgaagaaggagctggtggcccacctgaagtgcaccatcaccggcctgaccttctgggaccccagctgtgaggctgaagatagaggagacaagtttgtgctgcggagcgcctacagcagctgtggcatgcaggtgtctgcctccatgatcagcaatgaagctgtggtgaacatcctgagcagcagcagcccccagaggaagaaggtgcactgcctgaacatggacagcctgtccttccagctgggcctgtacctgagcccccacttcctgcaggccagcaacaccatcgagcccggccagcagagctttgtgcaggtgcgggtgagccccagcgtgtctgagttcctgctgcagctggacagctgccacctggacctgggccctgagggcggcaccgtggagctgatccagggccgggccgccaagggcaactgtgtgtccctgctgagccccagccctgagggggacccccgcttctccttcctgctgcacttctacacagtgcccatccccaagacaggcaccctgagctgcaccgtggccctgcggcccaagacaggcagccaggaccaggaggtgcacaggacagtgttcatgaggctgaacatcatcagcccagacctgagcggctgcaccagcaagggcctggtgctgcctgctgtgctgggcatcacctttggagccttcctgattggagccctgctgacagctgccctgtggtacatctacagccacacccgggagtaccccaggcctccccagtag

SEQ ID NO: 19464 - DNA, 1977 bp, synthetic construct
  misc_feature 1..1977: note = Description of Artificial Sequence: Synthetic coding sequence
  source 1..1977: mol_type = other DNA
atggaccggggcaccctgcccctggccgtggccctgctgctggccagctgcagcctgagccccaccagcctggccgagaccgtgcactgtgacctgcagcctgtgggccctgagcggggggaggtgacctacaccaccagccaggtgtccaagggctgtgtggcccaggccccaaatgccatcctggaggtgcacgtgctcttcctggagttccccaccggccccagccagctggagctgaccctgcaggccagcaagcagaatggcacctggccccgggaggtgctgctggtgctgtctgtgaacagcagcgtcttcctgcacctgcaggccctgggcatccccctgcacctggcctacaacagcagcctggtgaccttccaggagcccccaggagtgaacaccacagagctgcccagcttccccaagacccagatcctggagtgggccgctgagcggggccccatcaccagcgctgctgagctgaatgacccccagagcatcctgctgcggctgggccaggcccagggcagcctgtccttctgcatgctggaggccagccaggacatgggccgcaccctggagtggaggcccaggaccccagccctggtgcggggctgccacctggagggcgtggccggccacaaggaggcccacatcctgcgggtgctgcccggccacagcgctggccccaggacagtgacagtgaaggtggagctgagctgtgcccctggggacctggatgctgtgctgatcctgcagggccccccctacgtgtcctggctgattgatgccaaccacaacatgcagatctggaccaccggggagtacagcttcaagatcttccctgagaagaacatccggggcttcaagctgcctgacaccccccagggcctgctgggggaggccaggatgctgaatgccagcatcgtggccagctttgtggagctgcccctggccagcatcgtgtccctgcacgccagcagctgtggcggccgcctgcagaccagccctgcccccatccagaccaccccacccaaggacacctgcagccctgagctgctgatgagcctcatccagaccaagtgtgctgatgatgccatgaccctggtgctgaagaaggagctggtggcccacctgaagtgcaccatcaccggcctgaccttctgggaccccagctgtgaggctgaagatagaggagacaagtttgtgctgcggagcgcctacagcagctgtggcatgcaggtgtctgcctccatgatcagcaatgaagctgtggtgaacatcctgagcagcagcagcccccagaggaagaaggtgcactgcctgaacatggacagcctgtccttccagctgggcctgtacctgagcccccacttcctgcaggccagcaacaccatcgagcccggccagcagagctttgtgcaggtgcgggtgagccccagcgtgtctgagttcctgctgcagctggacagctgccacctggacctgggccctgagggcggcaccgtggagctgatccagggccgggccgccaagggcaactgtgtgtccctgctgagccccagccctgagggggacccccgcttctccttcctgctgcacttctacacagtgcccatccccaagacaggcaccctgagctgcaccgtggccctgcggcccaagacaggcagccaggaccaggaggtgcacaggacagtgttcatgaggctgaacatcatcagcccagacctgagcggctgcaccagcaagggcctggtgctgcctgctgtgctgggcatcacctttggagccttcctgattggagccctgctgacagctgccctgtggtacatctacagccacaccaggagccccagcaagcgggagcctgtggtggccgtggccgccccagccagcagcgagagcagcagcaccaaccacagcatcggcagcacccagagcaccccctgcagcaccagctccatggcctag

SEQ ID NO: 19465 - DNA, 1977 bp, synthetic construct; identical to SEQ ID NO: 19464
  misc_feature 1..1977: note = Description of Artificial Sequence: Synthetic coding sequence
  source 1..1977: mol_type = other DNA

SEQ ID NO: 19466 - DNA, 1431 bp, synthetic construct
  misc_feature 1..1431: note = Description of Artificial Sequence: Synthetic coding sequence
  source 1..1431: mol_type = other DNA
atgctggaggccagccaggacatgggccgcaccctggagtggaggcccaggaccccagccctggtgcggggctgccacctggagggcgtggccggccacaaggaggcccacatcctgcgggtgctgcccggccacagcgctggccccaggacagtgacagtgaaggtggagctgagctgtgcccctggggacctggatgctgtgctgatcctgcagggccccccctacgtgtcctggctgattgatgccaaccacaacatgcagatctggaccaccggggagtacagcttcaagatcttccctgagaagaacatccggggcttcaagctgcctgacaccccccagggcctgctgggggaggccaggatgctgaatgccagcatcgtggccagctttgtggagctgcccctggccagcatcgtgtccctgcacgccagcagctgtggcggccgcctgcagaccagccctgcccccatccagaccaccccacccaaggacacctgcagccctgagctgctgatgagcctcatccagaccaagtgtgctgatgatgccatgaccctggtgctgaagaaggagctggtggcccacctgaagtgcaccatcaccggcctgaccttctgggaccccagctgtgaggctgaagatagaggagacaagtttgtgctgcggagcgcctacagcagctgtggcatgcaggtgtctgcctccatgatcagcaatgaagctgtggtgaacatcctgagcagcagcagcccccagaggaagaaggtgcactgcctgaacatggacagcctgtccttccagctgggcctgtacctgagcccccacttcctgcaggccagcaacaccatcgagcccggccagcagagctttgtgcaggtgcgggtgagccccagcgtgtctgagttcctgctgcagctggacagctgccacctggacctgggccctgagggcggcaccgtggagctgatccagggccgggccgccaagggcaactgtgtgtccctgctgagccccagccctgagggggacccccgcttctccttcctgctgcacttctacacagtgcccatccccaagacaggcaccctgagctgcaccgtggccctgcggcccaagacaggcagccaggaccaggaggtgcacaggacagtgttcatgaggctgaacatcatcagcccagacctgagcggctgcaccagcaagggcctggtgctgcctgctgtgctgggcatcacctttggagccttcctgattggagccctgctgacagctgccctgtggtacatctacagccacaccaggagccccagcaagcgggagcctgtggtggccgtggccgccccagccagcagcgagagcagcagcaccaaccacagcatcggcagcacccagagcaccccctgcagcaccagctccatggcctag

SEQ ID NO: 19467 - DNA, 639 bp, synthetic construct
  misc_feature 1..639: note = Description of Artificial Sequence: Synthetic coding sequence
  source 1..639: mol_type = other DNA
atggactacctgctgatgatcttcagcctgctgtttgtggcctgccagggcgcccctgagacagctgtgctgggcgctgagctgtctgctgtgggagaaaatggaggagagaagcccacccccagccccccctggaggctgcggcgcagcaagcgctgcagctgcagcagcctgatggacaaggaatgtgtgtacttctgccacctggacatcatctgggtgaacaccccagagcacgtggtgccctacggcctgggcagccccaggagcaagagggccctggagaacctgctgcccaccaaggccacagaccgggagaaccgctgccagtgtgccagccagaaggacaagaagtgctggaacttctgccaggccggcaaggagctgcgggcagaggacatcatggagaaggactggaacaaccacaagaagggcaaggactgcagcaagctgggcaagaagtgcatctaccagcagctggtgcggggcaggaagatcagaagaagcagcgaggagcacctgcggcagaccaggtctgagaccatgagaaattctgtgaagagcagcttccatgaccccaagctgaagggcaagcccagccgggagcgctacgtgacccacaacagagcccactggtag

SEQ ID NO: 19468 - DNA, 1329 bp, synthetic construct
  misc_feature 1..1329: note = Description of Artificial Sequence: Synthetic coding sequence
  source 1..1329: mol_type = other DNA
atgcagcccccacccagcctgtgtggccgggccctggtggccctggtgctggcctgtggcctgagccgcatctggggcgaggagcggggcttccccccagaccgggccacccccctgctgcagacagctgagatcatgaccccacccaccaagaccctgtggcccaagggcagcaatgccagcctggcccggagcctggccccagctgaggtgcccaagggggacagaacagctggcagcccccccaggaccatcagccccccaccctgccagggccccatcgagatcaaggagaccttcaagtacatcaacacagtggtgtcctgcctggtgtttgtgctgggcatcatcggcaacagcaccctgctgcgcatcatctacaagaacaagtgcatgagaaatggccccaacatcctgattgccagcctggccctgggggacctgctgcacatcgtgattgacatccccatcaacgtgtacaagctgctggccgaggactggccctttggagctgagatgtgcaagctggtgcccttcatccagaaggcctctgtgggcatcaccgtgctgagcctgtgtgccctgagcattgaccgctacagagctgtggcctcctggagccgcatcaagggcatcggcgtgcccaagtggacagctgtggagatcgtgctgatctgggtggtgtctgtggtgctggccgtgcctgaggccatcggctttgacatcatcaccatggactacaagggcagctacctgcgcatctgcctgctgcaccctgtgcagaagacagccttcatgcagttctacaagacagccaaggactggtggctgttctccttctacttctgcctgcccctggccatcacagccttcttctacaccctgatgacctgtgagatgctgaggaagaagagcggcatgcagatcgccctgaatgaccacctgaagcagaggcgggaggtggccaagacagtgttctgcctggtgctggtgtttgccctgtgctggctgcccctgcacctgagccgcatcctgaagctgaccctgtacaaccagaatgaccccaacagatgtgagctgctgtccttcctgctggtgctggactacatcggcatcaacatggccagcctgaacagctgcatcaaccccatcgccctgtacctggtgtccaagcgcttcaagaactgcttcaagagctgcctgtgctgctggtgccagagctttgaggagaagcagagcctggaggagaagcagagctgcctgaagttcaaggccaatgaccacggctatgacaacttccgcagcagcaacaagtacagcagcagctag

SEQ ID NO: 19469 - DNA, 1599 bp, synthetic construct
  misc_feature 1..1599: note = Description of Artificial Sequence: Synthetic coding sequence
  source 1..1599: mol_type = other DNA
atgaacaagagcacctgcctgatggctgctgagacccccagcaagcgctggaggctgcactgcctggccttcagccagagatttgtgcgggccggccctgcctgcagcagccgggaggcctgcagcagcccccgggccggctggaacccagctggcttccggctgcccggccgctggagcccctttgtggccctgcacctggtgtgccagatccgggaggccctgaagctgcggagcggccacaggaccccatctggagctggcagctccatgcagcccccacccagcctgtgtggccgggccctggtggccctggtgctggcctgtggcctgagccgcatctggggcgaggagcggggcttccccccagaccgggccacccccctgctgcagacagctgagatcatgaccccacccaccaagaccctgtggcccaagggcagcaatgccagcctggcccggagcctggccccagctgaggtgcccaagggggacagaacagctggcagcccccccaggaccatcagccccccaccctgccagggccccatcgagatcaaggagaccttcaagtacatcaacacagtggtgtcctgcctggtgtttgtgctgggcatcatcggcaacagcaccctgctgcgcatcatctacaagaacaagtgcatgagaaatggccccaacatcctgattgccagcctggccctgggggacctgctgcacatcgtgattgacatccccatcaacgtgtacaagctgctggccgaggactggccctttggagctgagatgtgcaagctggtgcccttcatccagaaggcctctgtgggcatcaccgtgctgagcctgtgtgccctgagcattgaccgctacagagctgtggcctcctggagccgcatcaagggcatcggcgtgcccaagtggacagctgtggagatcgtgctgatctgggtggtgtctgtggtgctggccgtgcctgaggccatcggctttgacatcatcaccatggactacaagggcagctacctgcgcatctgcctgctgcaccctgtgcagaagacagccttcatgcagttctacaagacagccaaggactggtggctgttctccttctacttctgcctgcccctggccatcacagccttcttctacaccctgatgacctgtgagatgctgaggaagaagagcggcatgcagatcgccctgaatgaccacctgaagcagaggcgggaggtggccaagacagtgttctgcctggtgctggtgtttgccctgtgctggctgcccctgcacctgagccgcatcctgaagctgaccctgtacaaccagaatgaccccaacagatgtgagctgctgtccttcctgctggtgctggactacatcggcatcaacatggccagcctgaacagctgcatcaaccccatcgccctgtacctggtgtccaagcgcttcaagaactgcttcaagagctgcctgtgctgctggtgccagagctttgaggagaagcagagcctggaggagaagcagagctgcctgaagttcaaggccaatgaccacggctatgacaacttccgcagcagcaacaagtacagcagcagctag

SEQ ID NO: 19470 - DNA, 1311 bp, synthetic construct
  misc_feature 1..1311: note = Description of Artificial Sequence: Synthetic coding sequence
  source 1..1311: mol_type = other DNA
atgcagcccccacccagcctgtgtggccgggccctggtggccctggtgctggcctgtggcctgagccgcatctggggcgaggagcggggcttccccccagaccgggccacccccctgctgcagacagctgagatcatgaccccacccaccaagaccctgtggcccaagggcagcaatgccagcctggcccggagcctggccccagctgaggtgcccaagggggacagaacagctggcagcccccccaggaccatcagccccccaccctgccagggccccatcgagatcaaggagaccttcaagtacatcaacacagtggtgtcctgcctggtgtttgtgctgggcatcatcggcaacagcaccctgctgcgcatcatctacaagaacaagtgcatgagaaatggccccaacatcctgattgccagcctggccctgggggacctgctgcacatcgtgattgacatccccatcaacgtgtacaagctgctggccgaggactggccctttggagctgagatgtgcaagctggtgcccttcatccagaaggcctctgtgggcatcaccgtgctgagcctgtgtgccctgagcattgaccgctacagagctgtggcctcctggagccgcatcaagggcatcggcgtgcccaagtggacagctgtggagatcgtgctgatctgggtggtgtctgtggtgctggccgtgcctgaggccatcggctttgacatcatcaccatggactacaagggcagctacctgcgcatctgcctgctgcaccctgtgcagaagacagccttcatgcagttctacaagacagccaaggactggtggctgttctccttctacttctgcctgcccctggccatcacagccttcttctacaccctgatgacctgtgagatgctgaggaagaagagcggcatgcagatcgccctgaatgaccacctgaagcagaggcgggaggtggccaagacagtgttctgcctggtgctggtgtttgccctgtgctggctgcccctgcacctgagccgcatcctgaagctgaccctgtacaaccagaatgaccccaacagatgtgagctgctgtccttcctgctggtgctggactacatcggcatcaacatggccagcctgaacagctgcatcaaccccatcgccctgtacctggtgtccaagcgcttcaagaactgcttcaaggccggcccccacgtgggcaacaagctggtgatgctgttctctgtgaacattgaatgtgatggcaccgtgaaccagaaccccaccatgtggccagagaggaagagcaacaacaactag

SEQ ID NO: 19471 - DNA, 2787 bp, synthetic construct
  misc_feature 1..2787: note = Description of Artificial Sequence: Synthetic coding sequence
  source 1..2787: mol_type = other DNA
atggccctgcggcggctgggcgccgccctgctgctgctgcccctgctggccgctgtggaggagaccctgatggacagcaccacagccacagctgagctgggctggatggtgcaccccccatctggctgggaggaggtgtctggctatgatgagaacatgaacaccatccgcacctaccaggtgtgcaatgtgtttgagagcagccagaacaactggctgcggaccaagttcatcagaagaagaggagcccaccgcatccacgtggagatgaagttctctgtgcgggactgcagcagcatccccagcgtgcccggcagctgcaaggagaccttcaacctgtactactatgaggccgactttgacagcgccaccaagaccttccccaactggatggagaacccctgggtgaaggtggacaccatcgctgctgatgagagcttcagccaggtggacctgggcggccgggtgatgaagatcaacacagaggtgcgcagctttggacctgtgagccgcagcggcttctacctggccttccaggactatggaggctgcatgagcctgattgctgtgcgggtcttctacaggaagtgcccccgcatcatccagaatggagccatcttccaggagaccctgagcggggctgagagcaccagcctggtggccgcccggggcagctgcatcgccaatgctgaggaggtggatgtgcccatcaagctgtactgcaatggagatggagagtggctggtgcccatcggccgctgcatgtgcaaggccggctttgaggccgtggagaatggaacagtgtgccggggctgccccagcggcaccttcaaggccaaccagggagatgaggcctgcacccactgccccatcaacagcaggaccaccagcgagggcgccaccaactgtgtgtgcagaaatggctactacagagctgacctggaccccctggacatgccctgcaccaccatccccagcgccccccaggccgtcatcagctctgtgaatgagaccagcctgatgctggagtggaccccaccccgggacagcggcggccgggaggacctggtgtacaacatcatctgcaagagctgtggcagcggccgcggggcctgcacccgctgtggggacaacgtgcagtatgccccccggcagctgggcctgacagagccccgcatctacatcagtgacctgctggcccacacccagtacacctttgagatccaggccgtgaatggagtgacagaccagagccccttcagcccccagtttgcctctgtgaacatcaccaccaaccaggccgcccccagcgctgtgtccatcatgcaccaggtgtccaggacagtggacagcatcaccctgtcctggagccagcctgaccagcccaatggagtcatcctggactatgagctgcagtactatgagaaggagctgtctgagtacaatgccacagccatcaagagccccaccaacacagtgacagtgcagggcctgaaggccggggccatctacgtgttccaggtgcgggccaggacagtggccggctacggccgctacagcggcaagatgtacttccagaccatgacagaggtgaccccaggcatgaagatctacatcgaccccttcacctatgaggaccccaatgaggccgtgcgggagtttgccaaggagattgacatcagctgtgtgaagattgagcaggtgattggagctggggagtttggagaggtgtgcagcggccacctgaagctgcccgggaagcgggagatctttgtggccatcaagaccctgaagagcggctacacagagaagcagaggcgggacttcctgtctgaggccagcatcatgggccagtttgaccaccccaacgtcatccacctggagggcgtggtgaccaagagcacccctgtgatgatcatcacagagttcatggagaatggcagcctggacagcttcctgcggcagaatgatggccagttcaccgtcatccagctggtgggcatgctgcggggcattgctgctggcatgaagtacctggccgacatgaactacgtgcaccgggacctggccgccaggaacatcctggtgaacagcaacctggtgtgcaaggtgtctgactttggcctgagccgcttcctggaggatgacaccagtgaccccacctacaccagcgccctgggcggcaagatccccatccgctggacagcccctgaggccatccagtacaggaagttcaccagcgccagtgatgtgtggagctatggcatcgtgatgtgggaggtgatgtcctatggagagcggccctactgggacatgaccaaccaggacgtcatcaatgccatcgagcaggactaccgcctgcccccacccatggactgccccagcgccctgcaccagctgatgctggactgctggcagaaggacaggaaccaccggcccaagtttggccagatcgtgaacaccctggacaagatgatccggaaccccaacagcctgaaggccatggcccccctgagcagcggcatcaacctgcccctgctggacaggaccatcccagactacaccagcttcaacacagtggatgagtggctggaggccatcaagatgggccagtacaaggagagctttgccaatgccggcttcaccagctttgatgtggtgtcccagatgatgatggaggacatcctgcgggtgggcgtgaccctggccggccaccagaagaagatcctgaacagcatccaggtgatgagggcccagatgaaccagatccagagcgtggaggtgtag

SEQ ID NO: 19472 - DNA, 2841 bp, synthetic construct
  misc_feature 1..2841: note = Description of Artificial Sequence: Synthetic coding sequence
  source 1..2841: mol_type = other DNA
atgtgggtgcctgtgctggccctgcctgtgtgcacctacgccgagaccctgatggacagcaccacagccacagctgagctgggctggatggtgcaccccccatctggctgggaggaggtgtctggctatgatgagaacatgaacaccatccgcacctaccaggtgtgcaatgtgtttgagagcagccagaacaactggctgcggaccaagttcatcagaagaagaggagcccaccgcatccacgtggagatgaagttctctgtgcgggactgcagcagcatccccagcgtgcccggcagctgcaaggagaccttcaacctgtactactatgaggccgactttgacagcgccaccaagaccttccccaactggatggagaacccctgggtgaaggtggacaccatcgctgctgatgagagcttcagccaggtggacctgggcggccgggtgatgaagatcaacacagaggtgcgcagctttggacctgtgagccgcagcggcttctacctggccttccaggactatggaggctgcatgagcctgattgctgtgcgggtcttctacaggaagtgcccccgcatcatccagaatggagccatcttccaggagaccctgagcggggctgagagcaccagcctggtggccgcccggggcagctgcatcgccaatgctgaggaggtggatgtgcccatcaagctgtactgcaatggagatggagagtggctggtgcccatcggccgctgcatgtgcaaggccggctttgaggccgtggagaatggaacagtgtgccggggctgccccagcggcaccttcaaggccaaccagggagatgaggcctgcacccactgccccatcaacagcaggaccaccagcgagggcgccaccaactgtgtgtgcagaaatggctactacagagctgacctggaccccctggacatgccctgcaccaccatccccagcgccccccaggccgtcatcagctctgtgaatgagaccagcctgatgctggagtggaccccaccccgggacagcggcggccgggaggacctggtgtacaacatcatctgcaagagctgtggcagcggccgcggggcctgcacccgctgtggggacaacgtgcagtatgccccccggcagctgggcctgacagagccccgcatctacatcagtgacctgctggcccacacccagtacacctttgagatccaggccgtgaatggagtgacagaccagagccccttcagcccccagtttgcctctgtgaacatcaccaccaaccaggccgcccccagcgctgtgtccatcatgcaccaggtgtccaggacagtggacagcatcaccctgtcctggagccagcctgaccagcccaatggagtcatcctggactatgagctgcagtactatgagaagcaggagctgtctgagtacaatgccacagccatcaagagccccaccaacacagtgacagtgcagggcctgaaggccggggccatctacgtgttccaggtgcgggccaggacagtggccggctacggccgctacagcggcaagatgtacttccagaccatgacagaggccgagtaccagaccagcatccaggagaagctgcccctcatcatcggcagcagcgctgctggcctggtgttcctgattgctgtggtggtgattgccatcgtgtgcaacagaagaggatttgaaagagctgacagcgagtacacagacaagctgcagcactacaccagcggccacatgaccccaggcatgaagatctacatcgaccccttcacctatgaggaccccaatgaagctgtgcgggagtttgccaaggagattgacatcagctgtgtgaagattgagcaggtgattggagctggggagtttggagaggtgtgcagcggccacctgaagctgcccgggaagcgggagatctttgtggccatcaagaccctgaagagcggctacacagagaagcagaggcgggacttcctgtctgaggccagcatcatgggccagtttgaccaccccaacgtcatccacctggagggcgtggtgaccaagagcacccctgtgatgatcatcacagagttcatggagaatggcagcctggacagcttcctgcggcagaatgatggccagttcaccgtcatccagctggtgggcatgctgcggggcattgctgctggcatgaagtacctggccgacatgaactacgtgcaccgggacctggccgccaggaacatcctggtgaacagcaacctggtgtgcaaggtgtctgactttggcctgagccgcttcctggaggatgacaccagtgaccccacctacaccagcgccctgggcggcaagatccccatccgctggacagcccctgaggccatccagtacaggaagttcaccagcgccagtgatgtgtggagctatggaattgtgatgtgggaggtgatgtcctatggagagcggccctactgggacatgaccaaccaggatgtgatcaatgccatcgagcaggactaccgcctgcccccacccatggactgccccagcgccctgcaccagctgatgctggactgctggcagaaggacaggaaccaccggcccaagtttggccagatcgtgaacaccctggacaagatgatccggaaccccaacagcctgaaggccatggcccccctgagcagcggcatcaacctgcccctgctggacaggaccatcccagactacaccagcttcaacacagtggatgagtggctggaggccatcaagatgggccagtacaaggagagctttgccaatgccggcttcaccagctttgatgtggtgtcccagatgatgatggagtag

SEQ ID NO: 19473 - DNA, 2961 bp, synthetic construct
  misc_feature 1..2961: note = Description of Artificial Sequence: Synthetic coding sequence
  source 1..2961: mol_type = other DNA
atggccctgcggcggctgggcgccgccctgctgctgctgcccctgctggccgctgtggaggagaccctgatggacagcaccacagccacagctgagctgggctggatggtgcaccccccatctggctgggaggaggtgtctggctatgatgagaacatgaacaccatccgcacctaccaggtgtgcaatgtgtttgagagcagccagaacaactggctgcggaccaagttcatcagaagaagaggagcccaccgcatccacgtggagatgaagttctctgtgcgggactgcagcagcatccccagcgtgcccggcagctgcaaggagaccttcaacctgtactactatgaggccgactttgacagcgccaccaagaccttccccaactggatggagaacccctgggtgaaggtggacaccatcgctgctgatgagagcttcagccaggtggacctgggcggccgggtgatgaagatcaacacagaggtgcgcagctttggacctgtgagccgcagcggcttctacctggccttccaggactatggaggctgcatgagcctgattgctgtgcgggtcttctacaggaagtgcccccgcatcatccagaatggagccatcttccaggagaccctgagcggggctgagagcaccagcctggtggccgcccggggcagctgcatcgccaatgctgaggaggtggatgtgcccatcaagctgtactgcaatggagatggagagtggctggtgcccatcggccgctgcatgtgcaaggccggctttgaggccgtggagaatggaacagtgtgccggggctgccccagcggcaccttcaaggccaaccagggagatgaggcctgcacccactgccccatcaacagcaggaccaccagcgagggcgccaccaactgtgtgtgcagaaatggctactacagagctgacctggaccccctggacatgccctgcaccaccatccccagcgccccccaggccgtcatcagctctgtgaatgagaccagcctgatgctggagtggaccccaccccgggacagcggcggccgggaggacctggtgtacaacatcatctgcaagagctgtggcagcggccgcggggcctgcacccgctgtggggacaacgtgcagtatgccccccggcagctgggcctgacagagccccgcatctacatcagtgacctgctggcccacacccagtacacctttgagatccaggccgtgaatggagtgacagaccagagccccttcagcccccagtttgcctctgtgaacatcaccaccaaccaggccgcccccagcgctgtgtccatcatgcaccaggtgtccaggacagtggacagcatcaccctgtcctggagccagcctgaccagcccaatggagtcatcctggactatgagctgcagtactatgagaaggagctgtctgagtacaatgccacagccatcaagagccccaccaacacagtgacagtgcagggcctgaaggccggggccatctacgtgttccaggtgcgggccaggacagtggccggctacggccgctacagcggcaagatgtacttccagaccatgacagaagctgagtaccagaccagcatccaggagaagctgcccctcatcatcggcagcagcgctgctggcctggtgttcctgattgctgtggtggtgattgccatcgtgtgcaacagaagaggatttgaaagagctgacagcgagtacacagacaagctgcagcactacaccagcggccacatgaccccaggcatgaagatctacatcgaccccttcacctatgaggaccccaatgaggccgtgcgggagtttgccaaggagattgacatcagctgtgtgaagattgagcaggtgattggagctggggagtttggagaggtgtgcagcggccacctgaagctgcccgggaagcgggagatctttgtggccatcaagaccctgaagagcggctacacagagaagcagaggcgggacttcctgtctgaggccagcatcatgggccagtttgaccaccccaacgtcatccacctggagggcgtggtgaccaagagcacccctgtgatgatcatcacagagttcatggagaatggcagcctggacagcttcctgcggcagaatgatggccagttcaccgtcatccagctggtgggcatgctgcggggcattgctgctggcatgaagtacctggccgacatgaactacgtgcaccgggacctggccgccaggaacatcctggtgaacagcaacctggtgtgcaaggtgtctgactttggcctgagccgcttcctggaggatgacaccagtgaccccacctacaccagcgccctgggcggcaagatccccatccgctggacagcccctgaggccatccagtacaggaagttcaccagcgccagtgatgtgtggagctatggcatcgtgatgtgggaggtgatgtcctatggagagcggccctactgggacatgaccaaccaggacgtcatcaatgccatcgagcaggactaccgcctgcccccacccatggactgccccagcgccctgcaccagctgatgctggactgctggcagaaggacaggaaccaccggcccaagtttggccagatcgtgaacaccctggacaagatgatccggaaccccaacagcctgaaggccatggcccccctgagcagcggcatcaacctgcccctgctggacaggaccatcccagactacaccagcttcaacacagtggatgagtggctggaggccatcaagatgggccagtacaaggagagctttgccaatgccggcttcaccagctttgatgtggtgtcccagatgatgatggaggacatcctgcgggtgggcgtgaccctggccggccaccagaagaagatcctgaacagcatccaggtgatgagggcccagatgaaccagatccagagcgtggaggtgtag

SEQ ID NO: 19474 - DNA, 2964 bp, synthetic construct
  misc_feature 1..2964: note = Description of Artificial Sequence: Synthetic coding sequence
  source 1..2964: mol_type = other DNA
atggccctgcggcggctgggcgccgccctgctgctgctgcccctgctggccgctgtggaggagaccctgatggacagcaccacagccacagctgagctgggctggatggtgcaccccccatctggctgggaggaggtgtctggctatgatgagaacatgaacaccatccgcacctaccaggtgtgcaatgtgtttgagagcagccagaacaactggctgcggaccaagttcatcagaagaagaggagcccaccgcatccacgtggagatgaagttctctgtgcgggactgcagcagcatccccagcgtgcccggcagctgcaaggagaccttcaacctgtactactatgaggccgactttgacagcgccaccaagaccttccccaactggatggagaacccctgggtgaaggtggacaccatcgctgctgatgagagcttcagccaggtggacctgggcggccgggtgatgaagatcaacacagaggtgcgcagctttggacctgtgagccgcagcggcttctacctggccttccaggactatggaggctgcatgagcctgattgctgtgcgggtcttctacaggaagtgcccccgcatcatccagaatggagccatcttccaggagaccctgagcggggctgagagcaccagcctggtggccgcccggggcagctgcatcgccaatgctgaggaggtggatgtgcccatcaagctgtactgcaatggagatggagagtggctggtgcccatcggccgctgcatgtgcaaggccggctttgaggccgtggagaatggaacagtgtgccggggctgccccagcggcaccttcaaggccaaccagggagatgaggcctgcacccactgccccatcaacagcaggaccaccagcgagggcgccaccaactgtgtgtgcagaaatggctactacagagctgacctggaccccctggacatgccctgcaccaccatccccagcgccccccaggccgtcatcagctctgtgaatgagaccagcctgatgctggagtggaccccaccccgggacagcggcggccgggaggacctggtgtacaacatcatctgcaagagctgtggcagcggccgcggggcctgcacccgctgtggggacaacgtgcagtatgccccccggcagctgggcctgacagagccccgcatctacatcagtgacctgctggcccacacccagtacacctttgagatccaggccgtgaatggagtgacagaccagagccccttcagcccccagtttgcctctgtgaacatcaccaccaaccaggccgcccccagcgctgtgtccatcatgcaccaggtgtccaggacagtggacagcatcaccctgtcctggagccagcctgaccagcccaatggagtcatcctggactatgagctgcagtactatgagaaggagctgtctgagtacaatgccacagccatcaagagccccaccaacacagtgacagtgcagggcctgaaggccggggccatctacgtgttccaggtgcgggccaggacagtggccggctacggccgctacagcggcaagatgtacttccagaccatgacagaagctgagtaccagaccagcatccaggagaagctgcccctcatcatcggcagcagcgctgctggcctggtgttcctgattgctgtggtggtgattgccatcgtgtgcaacagaagaagaggatttgaaagagctgacagcgagtacacagacaagctgcagcactacaccagcggccacatgaccccaggcatgaagatctacatcgaccccttcacctatgaggaccccaatgaagctgtgcgggagtttgccaaggagattgacatcagctgtgtgaagattgagcaggtgattggagctggggagtttggagaggtgtgcagcggccacctgaagctgcccgggaagcgggagatctttgtggccatcaagaccctgaagagcggctacacagagaagcagaggcgggacttcctgtctgaggccagcatcatgggccagtttgaccaccccaacgtcatccacctggagggcgtggtgaccaagagcacccctgtgatgatcatcacagagttcatggagaatggcagcctggacagcttcctgcggcagaatgatggccagttcaccgtcatccagctggtgggcatgctgcggggcattgctgctggcatgaagtacctggccgacatgaactacgtgcaccgggacctggccgccaggaacatcctggtgaacagcaacctggtgtgcaaggtgtctgactttggcctgagccgcttcctggaggatgacaccagtgaccccacctacaccagcgccctgggcggcaagatccccatccgctggacagcccctgaggccatccagtacaggaagttcaccagcgccagtgatgtgtggagctatggaattgtgatgtgggaggtgatgtcctatggagagcggccctactgggacatgaccaaccaggatgtgatcaatgccatcgagcaggactaccgcctgcccccacccatggactgccccagcgccctgcaccagctgatgctggactgctggcagaaggacaggaaccaccggcccaagtttggccagatcgtgaacaccctggacaagatgatccggaaccccaacagcctgaaggccatggcccccctgagcagcggcatcaacctgcccctgctggacaggaccatcccagactacaccagcttcaacacagtggatgagtggctggaggccatcaagatgggccagtacaaggagagctttgccaatgccggcttcaccagctttgatgtggtgtcccagatgatgatggaggacatcctgcgggtgggcgtgaccctggccggccaccagaagaagatcctgaacagcatccaggtgatgagggcccagatgaaccagatccagagcgtggaggtgtag

SEQ ID NO: 19475 - DNA, 3168 bp, synthetic construct
  misc_feature 1..3168: note = Description of Artificial Sequence: Synthetic coding sequence
  source 1..3168: mol_type = other DNA
atggccctgcggcggctgggcgccgccctgctgctgctgcccctgctggccgctgtggaggagaccctgatggacagcaccacagccacagctgagctgggctggatggtgcaccccccatctggctgggaggaggtgtctggctatgatgagaacatgaacaccatccgcacctaccaggtgtgcaatgtgtttgagagcagccagaacaactggctgcggaccaagttcatcagaagaagaggagcccaccgcatccacgtggagatgaagttctctgtgcgggactgcagcagcatccccagcgtgcccggcagctgcaaggagaccttcaacctgtactactatgaggccgactttgacagcgccaccaagaccttccccaactggatggagaacccctgggtgaaggtggacaccatcgctgctgatgagagcttcagccaggtggacctgggcggccgggtgatgaagatcaacacagaggtgcgcagctttggacctgtgagccgcagcggcttctacctggccttccaggactatggaggctgcatgagcctgattgctgtgcgggtcttctacaggaagtgcccccgcatcatccagaatggagccatcttccaggagaccctgagcggggctgagagcaccagcctggtggccgcccggggcagctgcatcgccaatgctgaggaggtggatgtgcccatcaagctgtactgcaatggagatggagagtggctggtgcccatcggccgctgcatgtgcaaggccggctttgaggccgtggagaatggaacagtgtgccggggctgccccagcggcaccttcaaggccaaccagggagatgaggcctgcacccactgccccatcaacagcaggaccaccagcgagggcgccaccaactgtgtgtgcagaaatggctactacagagctgacctggaccccctggacatgccctgcaccaccatccccagcgccccccaggccgtcatcagctctgtgaatgagaccagcctgatgctggagtggaccccaccccgggacagcggcggccgggaggacctggtgtacaacatcatctgcaagagctgtggcagcggccgcggggcctgcacccgctgtggggacaacgtgcagtatgccccccggcagctgggcctgacagagccccgcatctacatcagtgacctgctggcccacacccagtacacctttgagatccaggccgtgaatggagtgacagaccagagccccttcagcccccagtttgcctctgtgaacatcaccaccaaccaggccgcccccagcgctgtgtccatcatgcaccaggtgtccaggacagtggacagcatcaccctgtcctggagccagcctgaccagcccaatggagtcatcctggactatgagctgcagtactatgagaaggagctgtctgagtacaatgccacagccatcaagagccccaccaacacagtgacagtgcagggcctgaaggccggggccatctacgtgttccaggtgcgggccaggacagtggccggctacggccgctacagcggcaagatgtacttccagaccatgacagaagctgagtaccagaccagcatccaggagaagctgcccctcatcatcggcagcagcgctgctggcctggtgttcctgattgctgtggtggtgattgccatcgtgtgcaacagaagaggatttgaaagagctgacagcgagtacacagacaagctgcagcactacaccagcggccacatgaccccaggcatgaagatctacatcgaccccttcacctatgaggaccccaatgaggccgtgcgggagtttgccaaggagattgacatcagctgtgtgaagattgagcaggtgattggagctggggagtttggagaggtgtgcagcggccacctgaagctgcccgggaagcgggagatctttgtggccatcaagaccctgaagagcggctacacagagaagcagaggcgggacttcctgtctgaggccagcatcatgggccagtttgaccaccccaacgtcatccacctggagggcgtggtgaccaagagcacccctgtgatgatcatcacagagttcatggagaatggcagcctggacagcttcctgcggcagaatgatggccagttcaccgtcatccagctggtgggcatgctgcggggcattgctgctggcatgaagtacctggccgacatgaactacgtgcaccgggacctggccgccaggaacatcctggtgaacagcaacctggtgtgcaaggtgtctgactttggcctgagccgcttcctggaggatgacaccagtgaccccacctacaccagcgccctgggcggcaagatccccatccgctggacagcccctgaggccatccagtacaggaagttcaccagcgccagtgatgtgtggagctatggcatcgtgatgtgggaggtgatgtcctatggagagcggccctactgggacatgaccaaccaggacgtcatcaatgccatcgagcaggactaccgcctgcccccacccatggactgccccagcgccctgcaccagctgatgctggactgctggcagaaggacaggaaccaccggcccaagtttggccagatcgtgaacaccctggacaagatgatccggaaccccaacagcctgaaggccatggcccccctgagcagcggcatcaacctgcccctgctggacaggaccatcccagactacaccagcttcaacacagtggatgagtggctggaggccatcaagatgggccagtacaaggagagctttgccaatgccggcttcaccagctttgatgtggtgtcccagatgatgatggaggacatcctgcgggtgggcgtgaccctggccggccaccagaagaagatcctgaacagcatccaggtgatgagggcccagatgaaccagatccagagcgtggagggccagcccctggcccggcggccccgggccaccggccgcaccaagcgctgccagcccagagatgtgaccaagaagacctgcaacagcaatgatggcaagaagaagggcatgggcaagaagaagacagatcctggccggggccgggagatccagggcatcttcttcaaggaggacagccacaaggagagcaatgactgcagctgtggcggctag

SEQ ID NO: 19476 - DNA, 1449 bp, synthetic construct
  misc_feature 1..1449: note = Description of Artificial Sequence: Synthetic coding sequence
  source 1..1449: mol_type = other DNA
atggccctgcggcggctgggcgccgccctgctgctgctgcccctgctggccgctgtggaggagaccctgatggacagcaccacagccacagctgagctgggctggatggtgcaccccccatctggctgggaggaggtgtctggctatgatgagaacatgaacaccatccgcacctaccaggtgtgcaatgtgtttgagagcagccagaacaactggctgcggaccaagttcatcagaagaagaggagcccaccgcatccacgtggagatgaagttctctgtgcgggactgcagcagcatccccagcgtgcccggcagctgcaaggagaccttcaacctgtactactatgaggccgactttgacagcgccaccaagaccttccccaactggatggagaacccctgggtgaaggtggacaccatcgctgctgatgagagcttcagccaggtggacctgggcggccgggtgatgaagatcaacacagaggtgcgcagctttggacctgtgagccgcagcggcttctacctggccttccaggactatggaggctgcatgagcctgattgctgtgcgggtcttctacaggaagtgcccccgcatcatccagaatggagccatcttccaggagaccctgagcggggctgagagcaccagcctggtggccgcccggggcagctgcatcgccaatgctgaggaggtggatgtgcccatcaagctgtactgcaatggagatggagagtggctggtgcccatcggccgctgcatgtgcaaggccggctttgaggccgtggagaatggaacagtgtgccggggctgccccagcggcaccttcaaggccaaccagggagatgaggcctgcacccactgccccatcaacagcaggaccaccagcgagggcgccaccaactgtgtgtgcagaaatggctactacagagctgacctggaccccctggacatgccctgcaccaccatccccagcgccccccaggccgtcatcagctctgtgaatgagaccagcctgatgctggagtggaccccaccccgggacagcggcggccgggaggacctggtgtacaacatcatctgcaagagctgtggcagcggccgcggggcctgcacccgctgtggggacaacgtgcagtatgccccccggcagctgggcctgacagagccccgcatctacatcagtgacctgctggcccacacccagtacacctttgagatccaggccgtgaatggagtgacagaccagagccccttcagcccccagtttgcctctgtgaacatcaccaccaaccaggccgcccccagcgctgtgtccatcatgcaccaggtgtccaggacagtggacagcatcaccctgtcctggagccagcctgaccagcccaatggagtcatcctggactatgagctgcagtactatgagaagatgaagacccagaggagctag

SEQ ID NO: 19477 - DNA, 2964 bp, synthetic construct
  misc_feature 1..2964: note = Description of Artificial Sequence: Synthetic coding sequence
  source 1..2964: mol_type = other DNA
atggagctgcgggtgctgctgtgctgggccagcctggccgccgccctggaggagaccctgctgaacaccaagctggagacagctgacctgaagtgggtgaccttcccccaggtggatggccagtgggaggagctgagcggcctggatgaggagcagcacagcgtgaggacctatgaggtgtgtgatgtgcagagggcccctggccaggcccactggctgaggacaggctgggtgcccaggagaggagctgtgcacgtgtatgccaccctgcgcttcaccatgctggagtgcctgagcctgcccagggctggccgcagctgcaaggagaccttcaccgtcttctactatgaaagtgatgctgacacagccacagccctgaccccagcctggatggagaacccctacatcaaggtggacacagtggccgctgagcacctgaccaggaagaggcctggagctgaggccaccgggaaggtgaatgtgaagaccctgcggctgggccccctgagcaaggccggcttctacctggccttccaggaccagggcgcctgcatggccctgctgagcctgcacctgttctacaagaagtgtgcccagctgactgtgaacctgacccgcttccctgagaccgtgccccgggagctggtggtgcctgtggccggcagctgtgtggtggatgctgtgcctgcccctggccccagccccagcctgtactgcagagaagatggccagtgggccgagcagcctgtgacaggctgcagctgtgcccctggctttgaagctgctgagggcaacaccaagtgccgggcctgtgcccagggcaccttcaagcccctgagcggggagggcagctgccagccctgcccagccaacagccacagcaacaccatcggcagcgctgtgtgccagtgccgggtgggctacttccgggccaggacagaccccaggggggccccctgcaccaccccaccttctgcccccaggtctgtggtgtcccggctgaatggcagcagcctgcacctggagtggagcgcccccctggagagcggcggccgggaggacctgacctacgccctgcgctgcagagaatgtagacctgggggcagctgtgccccctgtggcggggacctgacctttgatcctggcccccgggacctggtggagccctgggtggtggtgcggggcctgcggccagacttcacctacacctttgaggtgacagccctgaatggagtgagcagcctggccactggacctgtgccctttgagcctgtgaatgtgaccacagaccgggaggtgcccccagctgtgtctgacatccgggtgaccaggagcagccccagcagcctgagcctggcctgggccgtgccccgggcccccagcggggctgtgctggactatgaggtgaagtaccacgagaagggagctgagggccccagctctgtgcgcttcctgaagaccagtgaaaatagagctgagctgcggggcctgaagagaggagccagctacctggtgcaggtgcgggcccggtctgaggccggctacggccccttcggccaggagcaccacagccagacccagctggatgaaagtgagggctggagggagcagctggccctgattgctggaacagctgtggtgggcgtggtgctggtgctggtggtgattgtggtggccgtgctgtgcctgaggaagcagagcaatggccgggaggccgagtacagcgacaagcacggccagtacctgattggacatggcaccaaggtgtacatcgaccccttcacctatgaggaccccaatgaggccgtgcgggagtttgccaaggagattgatgtgtcctatgtgaagattgaggaggtgattggagctggggagtttggagaggtgtgccggggccgcctgaaggcccctgggaagaaggagagctgtgtggccatcaagaccctgaagggcggctacacagagcggcagaggcgggagttcctgtctgaggccagcatcatgggccagtttgagcaccccaacatcatccggctggagggcgtggtgaccaacagcatgcctgtgatgatcctgacagagttcatggagaatggagccctggacagcttcctgcggctgaatgatggccagttcaccgtcatccagctggtgggcatgctgcggggcatcgccagcggcatgagatacctggccgagatgtcctatgtgcaccgggacctggccgccaggaacatcctggtgaacagcaacctggtgtgcaaggtgtctgactttggcctgagccgcttcctggaggagaacagcagtgaccccacctacaccagcagcctgggcggcaagatccccatccgctggacagcccctgaggccatcgccttcaggaagttcaccagcgccagtgatgcctggagctatggcatcgtgatgtgggaggtgatgagctttggagagcggccctactgggacatgagcaaccaggacgtcatcaatgccatcgagcaggactaccgcctgcccccacctccagactgccccaccagcctgcaccagctgatgctggactgctggcagaaggacagaaatgcccggccccgcttcccccaggtggtgtctgccctggacaagatgatcagaaatcctgccagcctgaagatcgtggcccgggagaatggaggagccagccaccccctgctggaccagaggcagccccactacagcgcctttggatctgtgggggagtggctgcgggccatcaagatgggccgctatgaggagagctttgctgctgctggcttcggcagctttgagctggtgtcccagatctctgctgaggacctgctgcgcatcggcgtgaccctggccggccaccagaagaagatcctggcctctgtgcagcacatgaagagccaggccaagccaggcaccccaggcggcaccggcggccctgccccccagtactag

SEQ ID NO: 19478 - DNA, 2808 bp, synthetic construct
  misc_feature 1..2808: note = Description of Artificial Sequence: Synthetic coding sequence
  source 1..2808: mol_type = other DNA
atggagctgcgggtgctgctgtgctgggccagcctggccgccgccctggaggagaccctgctgaacaccaagctggagacagctgacctgaagtgggtgaccttcccccaggtggatggccagtgggaggagctgagcggcctggatgaggagcagcacagcgtgaggacctatgaggtgtgtgatgtgcagagggcccctggccaggcccactggctgaggacaggctgggtgcccaggagaggagctgtgcacgtgtatgccaccctgcgcttcaccatgctggagtgcctgagcctgcccagggctggccgcagctgcaaggagaccttcaccgtcttctactatgaaagtgatgctgacacagccacagccctgaccccagcctggatggagaacccctacatcaaggtggacacagtggccgctgagcacctgaccaggaagaggcctggagctgaggccaccgggaaggtgaatgtgaagaccctgcggctgggccccctgagcaaggccggcttctacctggccttccaggaccagggcgcctgcatggccctgctgagcctgcacctgttctacaagaagtgtgcccagctgactgtgaacctgacccgcttccctgagaccgtgccccgggagctggtggtgcctgtggccggcagctgtgtggtggatgctgtgcctgcccctggccccagccccagcctgtactgcagagaagatggccagtgggccgagcagcctgtgacaggctgcagctgtgcccctggctttgaagctgctgagggcaacaccaagtgccgggcctgtgcccagggcaccttcaagcccctgagcggggagggcagctgccagccctgcccagccaacagccacagcaacaccatcggcagcgctgtgtgccagtgccgggtgggctacttccgggccaggacagaccccaggggggccccctgcaccaccccaccttctgcccccaggtctgtggtgtcccggctgaatggcagcagcctgcacctggagtggagcgcccccctggagagcggcggccgggaggacctgacctacgccctgcgctgcagagaatgtagacctgggggcagctgtgccccctgtggcggggacctgacctttgatcctggcccccgggacctggtggagccctgggtggtggtgcggggcctgcggccagacttcacctacacctttgaggtgacagccctgaatggagtgagcagcctggccactggacctgtgccctttgagcctgtgaatgtgaccacagaccgggaggtgcccccagctgtgtctgacatccgggtgaccaggagcagccccagcagcctgagcctggcctgggccgtgccccgggcccccagcggggctgtgctggactatgaggtgaagtaccacgagaagggagctgagggccccagctctgtgcgcttcctgaagaccagtgaaaatagagctgagctgcggggcctgaagagaggagccagctacctggtgcaggtgcgggcccggtctgaggccggctacggccccttcggccaggagcaccacagccagacccagctggatgaaagtgagggctggagggagcagctggccctgattgctggaacagctgtggtgggcgtggtgctggtgctggtggtgattgtggtggccgtgctgtgcctgaggaagcagagcaatggccgggaggccgagtacagcgacaagcacggccagtacctgattggacatggcaccaaggtgtacatcgaccccttcacctatgaggaccccaatgaggccgtgcgggagtttgccaaggagattgatgtgtcctatgtgaagattgaggaggtgattggagctggggagtttggagaggtgtgccggggccgcctgaaggcccctgggaagaaggagagctgtgtggccatcaagaccctgaagggcggctacacagagcggcagaggcgggagttcctgtctgaggccagcatcatgggccagtttgagcaccccaacatcatccggctggagggcgtggtgaccaacagcatgcctgtgatgatcctgacagagttcatggagaatggagccctggacagcttcctgcggctgaatgatggccagttcaccgtcatccagctggtgggcatgctgcggggcatcgccagcggcatgagatacctggccgagatgtcctatgtgcaccgggacctggccgccaggaacatcctggtgaacagcaacctggtgtgcaaggtgtctgactttggcctgagccgcttcctggaggagaacagcagtgaccccacctacaccagcagcctgggcggcaagatccccatccgctggacagcccctgaggccatcgccttcaggaagttcaccagcgccagtgatgcctggagctatggcatcgtgatgtgggaggtgatgagctttggagagcggccctactgggacatgagcaaccaggacgtcatcaatgccatcgagcaggactaccgcctgcccccacctccagactgccccaccagcctgcaccagctgatgctggactgctggcagaaggacagaaatgcccggccccgcttcccccaggtggtgtctgccctggacaagatgatcagaaatcctgccagcctgaagatcgtggcccgggagaatggaggagacctgctgcgcatcggcgtgaccctggccggccaccagaagaagatcctggcctctgtgcagcacatgaagagccaggccaagccaggcaccccaggcggcaccggcggccctgccccccagtactag

SEQ ID NO: 19479 - DNA, 552 bp, synthetic construct
  misc_feature 1..552: note = Description of Artificial Sequence: Synthetic coding sequence
  source 1..552: mol_type = other DNA
atggagttcctgtgggcccccctgctgggcctgtgctgcagcctggccgctgctgacagacacacagtgttctggaacagcagcaaccccaagttcagaaatgaagactacaccatccacgtgcagctgaatgactatgtggacatcatctgcccccactatgaggaccacagcgtggctgatgctgccatggagcagtacatcctgtacctggtggagcacgaggagtaccagctgtgccagccccagagcaaggaccaggtgcgctggcagtgcaaccggcccagcgccaagcacggccctgagaagctgtctgagaagttccagcgcttcacccccttcaccctgggcaaggagttcaaggagggccacagctactactacatcagccacagcccccaggcccatgacaacccccaggagaagaggctggccgcagatgatcctgaggtgcgggtgctgcacagcatcggccacagcgctgcccccaggctcttccccctggcctggacagtgctgctgctgcccctgctgctgctgcagaccccctag

SEQ ID NO: 19480 - DNA, 618 bp, synthetic construct
  misc_feature 1..618: note = Description of Artificial Sequence: Synthetic coding sequence
  source 1..618: mol_type = other DNA
atggagttcctgtgggcccccctgctgggcctgtgctgcagcctggccgctgctgacagacacacagtgttctggaacagcagcaaccccaagttcagaaatgaagactacaccatccacgtgcagctgaatgactatgtggacatcatctgcccccactatgaggaccacagcgtggctgatgctgccatggagcagtacatcctgtacctggtggagcacgaggagtaccagctgtgccagccccagagcaaggaccaggtgcgctggcagtgcaaccggcccagcgccaagcacggccctgagaagctgtctgagaagttccagcgcttcacccccttcaccctgggcaaggagttcaaggagggccacagctactactacatcagcaagcccatccaccagcatgaagatcgctgcctgcggctgaaggtgacagtgtctgggaagatcacccacagcccccaggcccatgacaacccccaggagaagaggctggccgcagatgatcctgaggtgcgggtgctgcacagcatcggccacagcgctgcccccaggctcttccccctggcctggacagtgctgctgctgcccctgctgctgctgcagaccccctag

SEQ ID NO: 19481 - DNA, 1002 bp, synthetic construct
  misc_feature 1..1002: note = Description of Artificial Sequence: Synthetic coding sequence
  source 1..1002: mol_type = other DNA
atggctgtgcggcgggacagcgtgtggaagtactgctggggcgtgctgatggtgctgtgcaggacagccatcagcaagagcatcgtgctggagcccatctactggaacagcagcaacagcaagttcctgcccggccagggcctggtgctgtacccccagatcggggacaagctggacatcatctgccccaaggtggacagcaagacagtgggccagtatgagtactacaaggtgtacatggtggacaaggaccaggccgaccgctgcaccatcaagaaggagaacacccccctgctgaactgtgccaagccagaccaggacatcaagttcaccatcaagttccaggagttcagccccaacctgtggggcctggagttccagaagaacaaggactactacatcatcagcaccagcaatggcagcctggagggcctggacaaccaggagggcggcgtgtgccagacccgggccatgaagatcctgatgaaggtgggccaggatgccagcagcgctggcagcaccaggaacaaggaccccaccaggaggcctgagctggaggccggcaccaacggccgcagcagcaccaccagcccctttgtgaagcccaaccctggcagcagcacagatggcaacagcgctggccacagcggcaacaacatcctgggcagcgaggtggccctgtttgctggcatcgccagcggctgcatcatcttcatcgtcatcatcatcaccctggtggtgctgctgctgaagtacagaagaagacacaggaagcacagcccccagcacaccaccaccctgagcctgagcaccctggccacccccaagaggagcggcaacaacaacggcagcgagcccagcgacatcatcatccccctgaggacagctgacagcgtcttctgcccccactatgagaaggtgtctggggactatggccaccctgtgtacatcgtgcaggagatgccaccccagagccctgccaacatctactacaaggtgtag

SEQ ID NO: 19482 - DNA, 3624 bp, synthetic construct
  misc_feature 1..3624: note = Description of Artificial Sequence: Synthetic coding sequence
  source 1..3624: mol_type = other DNA
atgctgctgaccctcatcatcctgctgcctgtggtgtccaagttctcctttgtgtccctgagcgccccccagcactggagctgcccagagggcaccctggccggaaatggaaacagcacctgtgtgggccctgcccccttcctgatcttcagccacggcaacagcatcttcagaattgacacagagggcaccaactatgagcagctggtggtggatgctggggtgtctgtcatcatggacttccactacaatgagaagaggatctactgggtggacctggagcggcagctgctgcagagggtcttcctgaatggcagccggcaggagcgggtgtgcaacatcgagaagaatgtgtctggcatggccatcaactggatcaatgaggaggtgatctggagcaaccagcaggagggcatcatcaccgtgacagacatgaagggcaacaacagccacatcctgctgagcgccctgaagtacccagccaacgtggccgtggaccctgtggagcgcttcatcttctggagcagcgaggtggccggcagcctgtacagagctgacctggatggagtgggcgtgaaggccctgctggagaccagcgagaagatcacagctgtgtccctggatgtgctggacaagaggctcttctggatccagtacaaccgggagggcagcaacagcctcatctgcagctgtgactatgatggcggctctgtgcacatcagcaagcaccccacccagcacaacctgtttgccatgagcctgtttggagaccgcatcttctacagcacctggaagatgaagaccatctggatcgccaacaagcacacaggcaaggacatggtgcgcatcaacctgcacagcagctttgtgcccctgggggagctgaaggtggtgcaccccctggcccagcccaaggcagaagatgacacctgggagcctgagcagaagctgtgcaagctgaggaagggcaactgcagcagcacagtgtgtggccaggacctgcagagccacctgtgcatgtgtgccgagggctacgccctgagccgggacaggaagtactgtgaagatgtgaatgaatgtgccttctggaaccacggctgcaccctgggctgcaagaacaccccaggcagctactactgcacctgccctgtgggctttgtgctgctgcctgatggcaagcgctgccaccagctggtgtcctgccccagaaatgtgtctgaatgttctcatgactgtgtgctgaccagcgagggccccctgtgcttctgcccagagggctctgtgctggagagagatggcaagacctgcagcggctgcagcagcccagacaatggaggctgcagccagctgtgtgtgcccctgagccctgtgtcctgggagtgtgactgcttccctggctatgacctgcagctggatgagaagagctgtgccgccagcggcccccagcccttcctgctgtttgccaacagccaggacatccgccacatgcactttgatggaacagattatggcaccctgctgagccagcagatgggcatggtgtatgccctggaccatgaccctgtggagaacaagatctactttgcccacacagccctgaagtggattgaaagagccaacatggatggcagccagcgggagcggctcatcgaggagggcgtggatgtgcctgagggcctggccgtggactggattggaagacgcttctactggacagaccggggcaagagcctgattggccgcagtgacctgaatggcaagaggagcaagatcatcaccaaggagaacatcagccagccccggggcattgctgtgcaccccatggccaagaggctcttctggacagacaccggcatcaaccccagaattgagagcagcagcctgcagggcctgggccgcctggtgattgccagcagtgacctgatctggcccagcggcatcaccatcgacttcctgacagacaagctgtactggtgtgatgccaagcagagcgtcatcgagatggccaacctggatggcagcaagagaagaaggctgacccagaatgatgtgggccacccctttgctgtggccgtgtttgaggactatgtgtggttcagtgactgggccatgcccagcgtgatgagggtgaacaagaggacaggcaaggacagagtgcggctgcagggctccatgctgaagcccagcagcctggtggtggtgcaccccctggccaagccaggagctgacccctgcctgtaccagaatggaggctgtgagcacatctgcaagaagaggctgggcacagcctggtgcagctgccgggagggcttcatgaaggccagtgatggcaagacctgcctggccctggatggccaccagctgctggccggcggggaggtggacctgaagaaccaggtgacccccctggacatcctgagcaagaccagggtgtctgaggacaacatcacagagagccagcacatgctggtggccgagatcatggtgtctgaccaggatgactgtgcccctgtgggctgcagcatgtatgcccgctgcatcagtgaaggagaagatgccacctgccagtgcctgaagggctttgctggagatggcaagctgtgcagcgacattgatgaatgtgagatgggcgtgcctgtgtgccccccagccagcagcaagtgcatcaacacagaaggaggctacgtgtgccgctgcagcgagggctaccagggagatggcatccactgcctggacattgatgagtgccagctgggggagcacagctgtggagaaaatgccagctgcaccaacacagagggcggctacacctgcatgtgtgccggccgcctgtctgagcccggcctcatctgcccagacagcaccccaccaccccacctgcgggaggatgaccaccactacagcgtgaggaacagcgacagtgaatgtcccctgagccatgatggctactgcctgcatgatggagtgtgcatgtacatcgaggccctggacaagtatgcctgcaactgtgtggtgggctacatcggggagcgctgccagtacagagacctgaagtggtgggagctgcggcatgctggccacggccagcagcagaaggtgattgtggtggccgtgtgtgtggtggtgctggtgatgctgctgctgctgagcctgtggggcgcccactactaccgcacccagaagctgctgagcaagaaccccaagaacccctatgaggagagcagcagagatgtgcgcagcagaagacctgctgacacagaagatggcatgagcagctgcccccagccctggtttgtggtgatcaaggagcaccaggacctgaagaatggaggccagcctgtggccggagaagatggccaggccgcagatggctccatgcagcccacctcctggaggcaggagccccagctgtgtggcatgggcacagagcagggctgctggatccctgtgtccagtgacaagggcagctgcccccaggtgatggagaggagcttccacatgcccagctatggcacccagaccctggagggcggcgtggagaagccccacagcctgctgagcgccaaccccctgtggcagcagagggccctggaccccccccaccagatggagctgacccagtag

SEQ ID NO: 19483 - DNA, 3501 bp, synthetic construct
  misc_feature 1..3501: note = Description of Artificial Sequence: Synthetic coding sequence
  source 1..3501: mol_type = other DNA
atgctgctgaccctcatcatcctgctgcctgtggtgtccaagttctcctttgtgtccctgagcgccccccagcactggagctgcccagagggcaccctggccggaaatggaaacagcacctgtgtgggccctgcccccttcctgatcttcagccacggcaacagcatcttcagaattgacacagagggcaccaactatgagcagctggtggtggatgctggggtgtctgtcatcatggacttccactacaatgagaagaggatctactgggtggacctggagcggcagctgctgcagagggtcttcctgaatggcagccggcaggagcgggtgtgcaacatcgagaagaatgtgtctggcatggccatcaactggatcaatgaggaggtgatctggagcaaccagcaggagggcatcatcaccgtgacagacatgaagggcaacaacagccacatcctgctgagcgccctgaagtacccagccaacgtggccgtggaccctgtggagcgcttcatcttctggagcagcgaggtggccggcagcctgtacagagctgacctggatggagtgggcgtgaaggccctgctggagaccagcgagaagatcacagctgtgtccctggatgtgctggacaagaggctcttctggatccagtacaaccgggagggcagcaacagcctcatctgcagctgtgactatgatggcggctctgtgcacatcagcaagcaccccacccagcacaacctgtttgccatgagcctgtttggagaccgcatcttctacagcacctggaagatgaagaccatctggatcgccaacaagcacacaggcaaggacatggtgcgcatcaacctgcacagcagctttgtgcccctgggggagctgaaggtggtgcaccccctggcccagcccaaggcagaagatgacacctgggagcctgagcagaagctgtgcaagctgaggaagggcaactgcagcagcacagtgtgtggccaggacctgcagagccacctgtgcatgtgtgccgagggctacgccctgagccgggacaggaagtactgtgaagatgtgaatgaatgtgccttctggaaccacggctgcaccctgggctgcaagaacaccccaggcagctactactgcacctgccctgtgggctttgtgctgctgcctgatggcaagcgctgccaccagctggtgtcctgccccagaaatgtgtctgaatgttctcatgactgtgtgctgaccagcgagggccccctgtgcttctgcccagagggctctgtgctggagagagatggcaagacctgcagcggctgcagcagcccagacaatggaggctgcagccagctgtgtgtgcccctgagccctgtgtcctgggagtgtgactgcttccctggctatgacctgcagctggatgagaagagctgtgccgccagcggcccccagcccttcctgctgtttgccaacagccaggacatccgccacatgcactttgatggaacagattatggcaccctgctgagccagcagatgggcatggtgtatgccctggaccatgaccctgtggagaacaagatctactttgcccacacagccctgaagtggattgaaagagccaacatggatggcagccagcgggagcggctcatcgaggagggcgtggatgtgcctgagggcctggccgtggactggattggaagacgcttctactggacagaccggggcaagagcctgattggccgcagtgacctgaatggcaagaggagcaagatcatcaccaaggagaacatcagccagccccggggcattgctgtgcaccccatggccaagaggctcttctggacagacaccggcatcaaccccagaattgagagcagcagcctgcagggcctgggccgcctggtgattgccagcagtgacctgatctggcccagcggcatcaccatcgacttcctgacagacaagctgtactggtgtgatgccaagcagagcgtcatcgagatggccaacctggatggcagcaagagaagaaggctgacccagaatgatgtgggccacccctttgctgtggccgtgtttgaggactatgtgtggttcagtgactgggccatgcccagcgtgatgagggtgaacaagaggacaggcaaggacagagtgcggctgcagggctccatgctgaagcccagcagcctggtggtggtgcaccccctggccaagccaggagctgacccctgcctgtaccagaatggaggctgtgagcacatctgcaagaagaggctgggcacagcctggtgcagctgccgggagggcttcatgaaggccagtgatggcaagacctgcctggccctggatggccaccagctgctggccggcggggaggtggacctgaagaaccaggtgacccccctggacatcctgagcaagaccagggtgtctgaggacaacatcacagagagccagcacatgctggtggccgagatcatggtgtctgaccaggatgactgtgcccctgtgggctgcagcatgtatgcccgctgcatcagtgaaggagaagatgccacctgccagtgcctgaagggctttgctggagatggcaagctgtgcagcgacattgatgaatgtgagatgggcgtgcctgtgtgccccccagccagcagcaagtgcatcaacacagaaggaggctacgtgtgccgctgcagcgagggctaccagggagatggcatccactgcctggacagcaccccaccaccccacctgagagaagatgaccaccactacagcgtgaggaacagcgacagcgagtgccccctgagccatgatggctactgcctgcatgatggagtgtgcatgtacatcgaggccctggacaagtatgcctgcaactgtgtggtgggctacatcggggagcgctgccagtacagagacctgaagtggtgggagctgcggcatgctggccacggccagcagcagaaggtgattgtggtggccgtgtgtgtggtggtgctggtgatgctgctgctgctgagcctgtggggcgcccactactaccgcacccagaagctgctgagcaagaaccccaagaacccctatgaggagagcagcagagatgtgcgcagccggcggcctgctgacacagaagatggcatgagcagctgcccccagccctggtttgtggtgatcaaggagcaccaggacctgaagaatggaggccagcctgtggccggggaggatggccaggccgcagatggctccatgcagcccacctcctggaggcaggagccccagctgtgtggcatgggcacagagcagggctgctggatccctgtgtccagtgacaagggcagctgcccccaggtgatggagaggagcttccacatgcccagctatggcacccagaccctggagggcggcgtggagaagccccacagcctgctgagcgccaaccccctgtggcagcagagggccctggaccccccccaccagatggagctgacccagtag

SEQ ID NO: 19484 - DNA, 3498 bp, synthetic construct
  misc_feature 1..3498: note = Description of Artificial Sequence: Synthetic coding sequence
  source 1..3498: mol_type = other DNA
atgctgctgaccctcatcatcctgctgcctgtggtgtccaagttctcctttgtgtccctgagcgccccccagcactggagctgcccagagggcaccctggccggaaatggaaacagcacctgtgtgggccctgcccccttcctgatcttcagccacggcaacagcatcttcagaattgacacagagggcaccaactatgagcagctggtggtggatgctggggtgtctgtcatcatggacttccactacaatgagaagaggatctactgggtggacctggagcggcagctgctgcagagggtcttcctgaatggcagccggcaggagcgggtgtgcaacatcgagaagaatgtgtctggcatggccatcaactggatcaatgaggaggtgatctggagcaaccagcaggagggcatcatcaccgtgacagacatgaagggcaacaacagccacatcctgctgagcgccctgaagtacccagccaacgtggccgtggaccctgtggagcgcttcatcttctggagcagcgaggtggccggcagcctgtacagagctgacctggatggagtgggcgtgaaggccctgctggagaccagcgagaagatcacagctgtgtccctggatgtgctggacaagaggctcttctggatccagtacaaccgggagggcagcaacagcctcatctgcagctgtgactatgatggcggctctgtgcacatcagcaagcaccccacccagcacaacctgtttgccatgagcctgtttggagaccgcatcttctacagcacctggaagatgaagaccatctggatcgccaacaagcacacaggcaaggacatggtgcgcatcaacctgcacagcagctttgtgcccctgggggagctgaaggtggtgcaccccctggcccagcccaaggcagaagatgacacctgggagccagatgtgaatgaatgtgccttctggaaccacggctgcaccctgggctgcaagaacaccccaggcagctactactgcacctgccctgtgggctttgtgctgctgcctgatggcaagcgctgccaccagctggtgtcctgccccagaaatgtgtctgaatgttctcatgactgtgtgctgaccagcgagggccccctgtgcttctgcccagagggctctgtgctggagagagatggcaagacctgcagcggctgcagcagcccagacaatggaggctgcagccagctgtgtgtgcccctgagccctgtgtcctgggagtgtgactgcttccctggctatgacctgcagctggatgagaagagctgtgccgccagcggcccccagcccttcctgctgtttgccaacagccaggacatccgccacatgcactttgatggaacagattatggcaccctgctgagccagcagatgggcatggtgtatgccctggaccatgaccctgtggagaacaagatctactttgcccacacagccctgaagtggattgaaagagccaacatggatggcagccagcgggagcggctcatcgaggagggcgtggatgtgcctgagggcctggccgtggactggattggaagacgcttctactggacagaccggggcaagagcctgattggccgcagtgacctgaatggcaagaggagcaagatcatcaccaaggagaacatcagccagccccggggcattgctgtgcaccccatggccaagaggctcttctggacagacaccggcatcaaccccagaattgagagcagcagcctgcagggcctgggccgcctggtgattgccagcagtgacctgatctggcccagcggcatcaccatcgacttcctgacagacaagctgtactggtgtgatgccaagcagagcgtcatcgagatggccaacctggatggcagcaagagaagaaggctgacccagaatgatgtgggccacccctttgctgtggccgtgtttgaggactatgtgtggttcagtgactgggccatgcccagcgtgatgagggtgaacaagaggacaggcaaggacagagtgcggctgcagggctccatgctgaagcccagcagcctggtggtggtgcaccccctggccaagccaggagctgacccctgcctgtaccagaatggaggctgtgagcacatctgcaagaagaggctgggcacagcctggtgcagctgccgggagggcttcatgaaggccagtgatggcaagacctgcctggccctggatggccaccagctgctggccggcggggaggtggacctgaagaaccaggtgacccccctggacatcctgagcaagaccagggtgtctgaggacaacatcacagagagccagcacatgctggtggccgagatcatggtgtctgaccaggatgactgtgcccctgtgggctgcagcatgtatgcccgctgcatcagtgaaggagaagatgccacctgccagtgcctgaagggctttgctggagatggcaagctgtgcagcgacattgatgaatgtgagatgggcgtgcctgtgtgccccccagccagcagcaagtgcatcaacacagaaggaggctacgtgtgccgctgcagcgagggctaccagggagatggcatccactgcctggacattgatgagtgccagctgggggagcacagctgtggagaaaatgccagctgcaccaacacagagggcggctacacctgcatgtgtgccggccgcctgtctgagcccggcctcatctgcccagacagcaccccaccaccccacctgcgggaggatgaccaccactacagcgtgaggaacagcgacagtgaatgtcccctgagccatgatggctactgcctgcatgatggagtgtgcatgtacatcgaggccctggacaagtatgcctgcaactgtgtggtgggctacatcggggagcgctgccagtacagagacctgaagtggtgggagctgcggcatgctggccacggccagcagcagaaggtgattgtggtggccgtgtgtgtggtggtgctggtgatgctgctgctgctgagcctgtggggcgcccactactaccgcacccagaagctgctgagcaagaaccccaagaacccctatgaggagagcagcagagatgtgcgcagcagaagacctgctgacacagaagatggcatgagcagctgcccccagccctggtttgtggtgatcaaggagcaccaggacctgaagaatggaggccagcctgtggccggagaagatggccaggccgcagatggctccatgcagcccacctcctggaggcaggagccccagctgtgtggcatgggcacagagcagggctgctggatccctgtgtccagtgacaagggcagctgcccccaggtgatggagaggagcttccacatgcccagctatggcacccagaccctggagggcggcgtggagaagccccacagcctgctgagcgccaaccccctgtggcagcagagggccctggaccccccccaccagatggagctgacccagtag

SEQ ID NO: 19485 - DNA, 3633 bp, synthetic construct
  misc_feature 1..3633: note = Description of Artificial Sequence: Synthetic coding sequence
  source 1..3633: mol_type = other DNA
atgaggcccagcggcacagctggagctgccctgctggccctgctggccgccctgtgcccagccagccgggccctggaggagaagaaggtgtgccagggcaccagcaacaagctgacccagctgggcacctttgaggaccacttcctgagcctgcagaggatgttcaacaactgtgaggtggtgctgggcaacctggagatcacctacgtgcagaggaactatgacctgtccttcctgaagaccatccaggaggtggccggctacgtgctgattgccctgaacacagtggagcgcatccccctggagaacctgcagatcatccggggcaacatgtactatgagaacagctatgccctggccgtgctgagcaactatgatgccaacaagacaggcctgaaggagctgcccatgaggaacctgcaggagatcctgcatggagctgtgcgcttcagcaacaacccagccctgtgcaatgtggagagcatccagtggagggacatcgtgtccagtgacttcctgagcaacatgtccatggacttccagaaccacctgggcagctgccagaagtgtgaccccagctgccccaacggcagctgctggggcgctggggaggagaactgccagaagctgaccaagatcatctgtgcccagcagtgcagcggccgctgccggggcaagagccccagcgactgctgccacaaccagtgtgccgccggctgcaccggcccccgggagagtgactgcctggtgtgcaggaagttcagagatgaggccacctgcaaggacacctgcccccccctgatgctgtacaaccccaccacctaccagatggatgtgaaccctgagggcaagtacagctttggagccacctgtgtgaagaagtgccccagaaattatgtggtgacagaccacggcagctgtgtgcgggcctgtggggctgacagctatgagatggaggaggatggagtgaggaagtgcaagaagtgtgagggcccctgcaggaaggtgtgcaatggcatcggcatcggggagttcaaggacagcctgagcatcaatgccaccaacatcaagcacttcaagaactgcaccagcatcagcggggacctgcacatcctgcctgtggccttccggggggacagcttcacccacaccccacccctggacccccaggagctggacatcctgaagacagtgaaggagatcaccggcttcctgctgatccaggcctggccagagaacagaacagacctgcacgcctttgagaacctggagatcatccggggccgcaccaagcagcacggccagttcagcctggccgtggtgtccctgaacatcaccagcctgggcctgcggagcctgaaggagatcagtgatggagatgtgatcatcagcggcaacaagaacctgtgctacgccaacaccatcaactggaagaagctgtttggcaccagcggccagaagaccaagatcatcagcaacagaggagagaacagctgcaaggccaccggccaggtgtgccacgccctgtgcagccctgagggctgctggggccctgagccccgggactgtgtgtcctgcagaaatgtgtcccggggccgggagtgtgtggacaagtgcaacctgctggagggggagccccgggagtttgtggagaacagcgagtgcatccagtgccacccagaatgtctgccccaggccatgaacatcacctgcaccggccggggccctgacaactgcatccagtgtgcccactacattgatggcccccactgtgtgaagacctgcccagctggggtgatgggagagaacaacaccctggtgtggaagtatgcagatgctggccacgtgtgccacctgtgccaccccaactgcacctacggctgcaccggccctggcctggagggctgccccaccaacggccccaagatccccagcatcgccaccggcatggtgggcgccctgctgctgctgctggtggtggccctgggcatcggcctcttcatgagaagaagacacatcgtgaggaagaggaccctgcggcggctgctgcaggagcgggagctggtggagcccctgaccccatctggagaggcccccaaccaggccctgctgcgcatcctgaaggagacagagttcaagaagatcaaggtgctgggcagcggggcctttggaacagtgtacaagggcctgtggatccctgagggggagaaggtgaagatccctgtggccatcaaggagctgcgggaggccaccagccccaaggccaacaaggagatcctggatgaggcctacgtgatggcctctgtggacaacccccacgtgtgccgcctgctgggcatctgcctgaccagcacagtgcagctgatcacccagctgatgcccttcggctgcctgctggactatgtgcgggagcacaaggacaacatcggcagccagtacctgctgaactggtgtgtgcagatcgccaagggcatgaactacctggaggaccggcggctggtgcaccgggacctggccgccagaaatgtgctggtgaagaccccccagcacgtgaagatcacagactttggcctggccaagctgctgggcgctgaggagaaggagtaccacgccgagggcggcaaggtgcccatcaagtggatggccctggagagcatcctgcaccgcatctacacccaccagagtgatgtgtggagctatggagtgacagtgtgggagctgatgaccttcggcagcaagccctatgatggcatcccagccagcgagatcagcagcatcctggagaagggggagcggctgccccagccccccatctgcaccattgatgtgtacatgatcatggtgaagtgctggatgattgatgctgacagccggcccaagttccgggagctgatcatcgagttcagcaagatggcccgggacccccagcgctacctggtgatccagggagatgagaggatgcacctgcccagccccacagacagcaacttctaccgggccctgatggatgaggaggacatggatgatgtggtggatgctgatgagtacctgatcccccagcagggcttcttcagcagccccagcaccagcaggacccccctgctgagcagcctgagcgccaccagcaacaacagcacagtggcctgcatcgacagaaatggcctgcagagctgccccatcaaggaggacagcttcctgcagcgctacagcagtgaccccaccggggccctgacagaagattccattgatgacaccttcctgcctgtgcctgagtacatcaaccagagcgtgcccaagaggcctgctggctctgtgcagaaccctgtgtaccacaaccagcccctgaacccagcccccagccgggacccccactaccaggacccccacagcacagctgtgggcaaccctgagtacctgaacacagtgcagcccacctgtgtgaacagcacctttgacagccctgcccactgggcccagaagggcagccaccagatcagcctggacaacccagactaccagcaggacttcttccccaaggaggccaagcccaacggcatcttcaagggcagcacagcagaaaatgctgagtacctgcgggtggccccccagagcagcgagttcatcggggcctag

SEQ ID NO: 19486 - DNA, 1887 bp, synthetic construct
  misc_feature 1..1887: note = Description of Artificial Sequence: Synthetic coding sequence
  source 1..1887: mol_type = other DNA
atgaggcccagcggcacagctggagctgccctgctggccctgctggccgccctgtgcccagccagccgggccctggaggagaagaaggtgtgccagggcaccagcaacaagctgacccagctgggcacctttgaggaccacttcctgagcctgcagaggatgttcaacaactgtgaggtggtgctgggcaacctggagatcacctacgtgcagaggaactatgacctgtccttcctgaagaccatccaggaggtggccggctacgtgctgattgccctgaacacagtggagcgcatccccctggagaacctgcagatcatccggggcaacatgtactatgagaacagctatgccctggccgtgctgagcaactatgatgccaacaagacaggcctgaaggagctgcccatgaggaacctgcaggagatcctgcatggagctgtgcgcttcagcaacaacccagccctgtgcaatgtggagagcatccagtggagggacatcgtgtccagtgacttcctgagcaacatgtccatggacttccagaaccacctgggcagctgccagaagtgtgaccccagctgccccaacggcagctgctggggcgctggggaggagaactgccagaagctgaccaagatcatctgtgcccagcagtgcagcggccgctgccggggcaagagccccagcgactgctgccacaaccagtgtgccgccggctgcaccggcccccgggagagtgactgcctggtgtgcaggaagttcagagatgaggccacctgcaaggacacctgcccccccctgatgctgtacaaccccaccacctaccagatggatgtgaaccctgagggcaagtacagctttggagccacctgtgtgaagaagtgccccagaaattatgtggtgacagaccacggcagctgtgtgcgggcctgtggggctgacagctatgagatggaggaggatggagtgaggaagtgcaagaagtgtgagggcccctgcaggaaggtgtgcaatggcatcggcatcggggagttcaaggacagcctgagcatcaatgccaccaacatcaagcacttcaagaactgcaccagcatcagcggggacctgcacatcctgcctgtggccttccggggggacagcttcacccacaccccacccctggacccccaggagctggacatcctgaagacagtgaaggagatcaccggcttcctgctgatccaggcctggccagagaacagaacagacctgcacgcctttgagaacctggagatcatccggggccgcaccaagcagcacggccagttcagcctggccgtggtgtccctgaacatcaccagcctgggcctgcggagcctgaaggagatcagtgatggagatgtgatcatcagcggcaacaagaacctgtgctacgccaacaccatcaactggaagaagctgtttggcaccagcggccagaagaccaagatcatcagcaacagaggagagaacagctgcaaggccaccggccaggtgtgccacgccctgtgcagccctgagggctgctggggccctgagccccgggactgtgtgtcctgcagaaatgtgtcccggggccgggagtgtgtggacaagtgcaacctgctggagggggagccccgggagtttgtggagaacagcgagtgcatccagtgccacccagaatgtctgccccaggccatgaacatcacctgcaccggccggggccctgacaactgcatccagtgtgcccactacattgatggcccccactgtgtgaagacctgcccagctggggtgatgggagagaacaacaccctggtgtggaagtatgcagatgctggccacgtgtgccacctgtgccaccccaactgcacctacggcagctag

SEQ ID NO: 19487 - DNA, 2118 bp, synthetic construct
  misc_feature 1..2118: note = Description of Artificial Sequence: Synthetic coding sequence
  source 1..2118: mol_type = other DNA
atgaggcccagcggcacagctggagctgccctgctggccctgctggccgccctgtgcccagccagccgggccctggaggagaagaaggtgtgccagggcaccagcaacaagctgacccagctgggcacctttgaggaccacttcctgagcctgcagaggatgttcaacaactgtgaggtggtgctgggcaacctggagatcacctacgtgcagaggaactatgacctgtccttcctgaagaccatccaggaggtggccggctacgtgctgattgccctgaacacagtggagcgcatccccctggagaacctgcagatcatccggggcaacatgtactatgagaacagctatgccctggccgtgctgagcaactatgatgccaacaagacaggcctgaaggagctgcccatgaggaacctgcaggagatcctgcatggagctgtgcgcttcagcaacaacccagccctgtgcaatgtggagagcatccagtggagggacatcgtgtccagtgacttcctgagcaacatgtccatggacttccagaaccacctgggcagctgccagaagtgtgaccccagctgccccaacggcagctgctggggcgctggggaggagaactgccagaagctgaccaagatcatctgtgcccagcagtgcagcggccgctgccggggcaagagccccagcgactgctgccacaaccagtgtgccgccggctgcaccggcccccgggagagtgactgcctggtgtgcaggaagttcagagatgaggccacctgcaaggacacctgcccccccctgatgctgtacaaccccaccacctaccagatggatgtgaaccctgagggcaagtacagctttggagccacctgtgtgaagaagtgccccagaaattatgtggtgacagaccacggcagctgtgtgcgggcctgtggggctgacagctatgagatggaggaggatggagtgaggaagtgcaagaagtgtgagggcccctgcaggaaggtgtgcaatggcatcggcatcggggagttcaaggacagcctgagcatcaatgccaccaacatcaagcacttcaagaactgcaccagcatcagcggggacctgcacatcctgcctgtggccttccggggggacagcttcacccacaccccacccctggacccccaggagctggacatcctgaagacagtgaaggagatcaccggcttcctgctgatccaggcctggccagagaacagaacagacctgcacgcctttgagaacctggagatcatccggggccgcaccaagcagcacggccagttcagcctggccgtggtgtccctgaacatcaccagcctgggcctgcggagcctgaaggagatcagtgatggagatgtgatcatcagcggcaacaagaacctgtgctacgccaacaccatcaactggaagaagctgtttggcaccagcggccagaagaccaagatcatcagcaacagaggagagaacagctgcaaggccaccggccaggtgtgccacgccctgtgcagccctgagggctgctggggccctgagccccgggactgtgtgtcctgcagaaatgtgtcccggggccgggagtgtgtggacaagtgcaacctgctggagggggagccccgggagtttgtggagaacagcgagtgcatccagtgccacccagaatgtctgccccaggccatgaacatcacctgcaccggccggggccctgacaactgcatccagtgtgcccactacattgatggcccccactgtgtgaagacctgcccagctggggtgatgggagagaacaacaccctggtgtggaagtatgcagatgctggccacgtgtgccacctgtgccaccccaactgcacctacggccctggaaatgaaagcctgaaggccatgctgttctgcctcttcaagctgagcagctgcaaccagagcaatgatggctctgtgagccaccagagcggcagccctgctgcccaggagagctgcctgggctggatccccagcctgctgcccagcgagttccagctgggctggggcggctgcagccacctgcacgcctggcccagcgccagcgtcatcatcacagccagcagctgccactag

SEQ ID NO: 19488 - DNA, 3243 bp, synthetic construct
  misc_feature 1..3243: note = Description of Artificial Sequence: Synthetic coding sequence
  source 1..3243: mol_type = other DNA
aacagaacagaaggagctgcccacgagaagttcaccggcaacccagcctggaggagagctgtgcagcagcagccctgccctgtggtggagagcatccagtggagggacatcgtgtccagtgacttcctgagcaacatgtccatggacttccagaaccacctgggcagctgccagaagtgtgaccccagctgccccaacggcagctgctggggcgctggggaggagaactgccagaagctgaccaagatcatctgtgcccagcagtgcagcggccgctgccggggcaagagccccagcgactgctgccacaaccagtgtgccgccggctgcaccggcccccgggagagtgactgcctggtgtgcaggaagttcagagatgaggccacctgcaaggacacctgcccccccctgatgctgtacaaccccaccacctaccagatggatgtgaaccctgagggcaagtacagctttggagccacctgtgtgaagaagtgccccagaaattatgtggtgacagaccacggcagctgtgtgcgggcctgtggggctgacagctatgagatggaggaggatggagtgaggaagtgcaagaagtgtgagggcccctgcaggaaggtgtgcaatggcatcggcatcggggagttcaaggacagcctgagcatcaatgccaccaacatcaagcacttcaagaactgcaccagcatcagcggggacctgcacatcctgcctgtggccttccggggggacagcttcacccacaccccacccctggacccccaggagctggacatcctgaagacagtgaaggagatcaccggcttcctgctgatccaggcctggccagagaacagaacagacctgcacgcctttgagaacctggagatcatccggggccgcaccaagcagcacggccagttcagcctggccgtggtgtccctgaacatcaccagcctgggcctgcggagcctgaaggagatcagtgatggagatgtgatcatcagcggcaacaagaacctgtgctacgccaacaccatcaactggaagaagctgtttggcaccagcggccagaagaccaagatcatcagcaacagaggagagaacagctgcaaggccaccggccaggtgtgccacgccctgtgcagccctgagggctgctggggccctgagccccgggactgtgtgtcctgcagaaatgtgtcccggggccgggagtgtgtggacaagtgcaacctgctggagggggagccccgggagtttgtggagaacagcgagtgcatccagtgccacccagaatgtctgccccaggccatgaacatcacctgcaccggccggggccctgacaactgcatccagtgtgcccactacattgatggcccccactgtgtgaagacctgcccagctggggtgatgggagagaacaacaccctggtgtggaagtatgcagatgctggccacgtgtgccacctgtgccaccccaactgcacctacggctgcaccggccctggcctggagggctgccccaccaacggccccaagatccccagcatcgccaccggcatggtgggcgccctgctgctgctgctggtggtggccctgggcatcggcctcttcatgagaagaagacacatcgtgaggaagaggaccctgcggcggctgctgcaggagcgggagctggtggagcccctgaccccatctggagaggcccccaaccaggccctgctgcgcatcctgaaggagacagagttcaagaagatcaaggtgctgggcagcggggcctttggaacagtgtacaagggcctgtggatccctgagggggagaaggtgaagatccctgtggccatcaaggagctgcgggaggccaccagccccaaggccaacaaggagatcctggatgaggcctacgtgatggcctctgtggacaacccccacgtgtgccgcctgctgggcatctgcctgaccagcacagtgcagctgatcacccagctgatgcccttcggctgcctgctggactatgtgcgggagcacaaggacaacatcggcagccagtacctgctgaactggtgtgtgcagatcgccaagggcatgaactacctggaggaccggcggctggtgcaccgggacctggccgccagaaatgtgctggtgaagaccccccagcacgtgaagatcacagactttggcctggccaagctgctgggcgctgaggagaaggagtaccacgccgagggcggcaaggtgcccatcaagtggatggccctggagagcatcctgcaccgcatctacacccaccagagtgatgtgtggagctatggagtgacagtgtgggagctgatgaccttcggcagcaagccctatgatggcatcccagccagcgagatcagcagcatcctggagaagggggagcggctgccccagccccccatctgcaccattgatgtgtacatgatcatggtgaagtgctggatgattgatgctgacagccggcccaagttccgggagctgatcatcgagttcagcaagatggcccgggacccccagcgctacctggtgatccagggagatgagaggatgcacctgcccagccccacagacagcaacttctaccgggccctgatggatgaggaggacatggatgatgtggtggatgctgatgagtacctgatcccccagcagggcttcttcagcagccccagcaccagcaggacccccctgctgagcagcctgagcgccaccagcaacaacagcacagtggcctgcatcgacagaaatggcctgcagagctgccccatcaaggaggacagcttcctgcagcgctacagcagtgaccccaccggggccctgacagaagattccattgatgacaccttcctgcctgtgcctgagtacatcaaccagagcgtgcccaagaggcctgctggctctgtgcagaaccctgtgtaccacaaccagcccctgaacccagcccccagccgggacccccactaccaggacccccacagcacagctgtgggcaaccctgagtacctgaacacagtgcagcccacctgtgtgaacagcacctttgacagccctgcccactgggcccagaagggcagccaccagatcagcctggacaacccagactaccagcaggacttcttccccaaggaggccaagcccaacggcatcttcaagggcagcacagcagaaaatgctgagtacctgcgggtggccccccagagcagcgagttcatcggggcctag

SEQ ID NO: 19489 - DNA, 1218 bp, synthetic construct
  misc_feature 1..1218: note = Description of Artificial Sequence: Synthetic coding sequence
  source 1..1218: mol_type = other DNA
atgaggcccagcggcacagctggagctgccctgctggccctgctggccgccctgtgcccagccagccgggccctggaggagaagaaggtgtgccagggcaccagcaacaagctgacccagctgggcacctttgaggaccacttcctgagcctgcagaggatgttcaacaactgtgaggtggtgctgggcaacctggagatcacctacgtgcagaggaactatgacctgtccttcctgaagaccatccaggaggtggccggctacgtgctgattgccctgaacacagtggagcgcatccccctggagaacctgcagatcatccggggcaacatgtactatgagaacagctatgccctggccgtgctgagcaactatgatgccaacaagacaggcctgaaggagctgcccatgaggaacctgcaggagatcctgcatggagctgtgcgcttcagcaacaacccagccctgtgcaatgtggagagcatccagtggagggacatcgtgtccagtgacttcctgagcaacatgtccatggacttccagaaccacctgggcagctgccagaagtgtgaccccagctgccccaacggcagctgctggggcgctggggaggagaactgccagaagctgaccaagatcatctgtgcccagcagtgcagcggccgctgccggggcaagagccccagcgactgctgccacaaccagtgtgccgccggctgcaccggcccccgggagagtgactgcctggtgtgcaggaagttcagagatgaggccacctgcaaggacacctgcccccccctgatgctgtacaaccccaccacctaccagatggatgtgaaccctgagggcaagtacagctttggagccacctgtgtgaagaagtgccccagaaattatgtggtgacagaccacggcagctgtgtgcgggcctgtggggctgacagctatgagatggaggaggatggagtgaggaagtgcaagaagtgtgagggcccctgcaggaaggtgtgcaatggcatcggcatcggggagttcaaggacagcctgagcatcaatgccaccaacatcaagcacttcaagaactgcaccagcatcagcggggacctgcacatcctgcctgtggccttccggggggacagcttcacccacaccccacccctggacccccaggagctggacatcctgaagacagtgaaggagatcaccggcctgtcctag

SEQ ID NO: 19490 - DNA, 1974 bp, synthetic construct
  misc_feature 1..1974: note = Description of Artificial Sequence: Synthetic coding sequence
  source 1..1974: mol_type = other DNA
atgaggcccagcggcacagctggagctgccctgctggccctgctggccgccctgtgcccagccagccgggccctggaggagaagaaggtgtgccagggcaccagcaacaagctgacccagctgggcacctttgaggaccacttcctgagcctgcagaggatgttcaacaactgtgaggtggtgctgggcaacctggagatcacctacgtgcagaggaactatgacctgtccttcctgaagaccatccaggaggtggccggctacgtgctgattgccctgaacacagtggagcgcatccccctggagaacctgcagatcatccggggcaacatgtactatgagaacagctatgccctggccgtgctgagcaactatgatgccaacaagacaggcctgaaggagctgcccatgaggaacctgcaggagatcctgcatggagctgtgcgcttcagcaacaacccagccctgtgcaatgtggagagcatccagtggagggacatcgtgtccagtgacttcctgagcaacatgtccatggacttccagaaccacctgggcagctgccagaagtgtgaccccagctgccccaacggcagctgctggggcgctggggaggagaactgccagaagctgaccaagatcatctgtgcccagcagtgcagcggccgctgccggggcaagagccccagcgactgctgccacaaccagtgtgccgccggctgcaccggcccccgggagagtgactgcctggtgtgcaggaagttcagagatgaggccacctgcaaggacacctgcccccccctgatgctgtacaaccccaccacctaccagatggatgtgaaccctgagggcaagtacagctttggagccacctgtgtgaagaagtgccccagaaattatgtggtgacagaccacggcagctgtgtgcgggcctgtggggctgacagctatgagatggaggaggatggagtgaggaagtgcaagaagtgtgagggcccctgcaggaaggtgtgcaatggcatcggcatcggggagttcaaggacagcctgagcatcaatgccaccaacatcaagcacttcaagaactgcaccagcatcagcggggacctgcacatcctgcctgtggccttccggggggacagcttcacccacaccccacccctggacccccaggagctggacatcctgaagacagtgaaggagatcaccggcttcctgctgatccaggcctggccagagaacagaacagacctgcacgcctttgagaacctggagatcatccggggccgcaccaagcagcacggccagttcagcctggccgtggtgtccctgaacatcaccagcctgggcctgcggagcctgaaggagatcagtgatggagatgtgatcatcagcggcaacaagaacctgtgctacgccaacaccatcaactggaagaagctgtttggcaccagcggccagaagaccaagatcatcagcaacagaggagagaacagctgcaaggccaccggccaggtgtgccacgccctgtgcagccctgagggctgctggggccctgagccccgggactgtgtgtcctgcagaaatgtgtcccggggccgggagtgtgtggacaagtgcaacctgctggagggggagccccgggagtttgtggagaacagcgagtgcatccagtgccacccagaatgtctgccccaggccatgaacatcacctgcaccggccggggccctgacaactgcatccagtgtgcccactacattgatggcccccactgtgtgaagacctgcccagctggggtgatgggagagaacaacaccctggtgtggaagtatgcagatgctggccacgtgtgccacctgtgccaccccaactgcacctacggctgcaccggccctggcctggagggctgccccaccaacggcagctacatcgtgagccacttccccaggagcttctacaagatgtctgtgcactag

SEQ ID NO: 19491 - DNA, 3474 bp, synthetic construct
  misc_feature 1..3474: note = Description of Artificial Sequence: Synthetic coding sequence
  source 1..3474: mol_type = other DNA
atgttcaacaactgtgaggtggtgctgggcaacctggagatcacctacgtgcagagaaattatgacctgtccttcctgaagaccatccaggaggtggccggctacgtgctgattgccctgaacacagtggagcgcatccccctggagaacctgcagatcatccggggcaacatgtactatgaaaattcctatgccctggccgtgctgagcaactatgatgccaacaagacaggcctgaaggagctgcccatgaggaacctgcaggagatcctgcacggggctgtgcgcttcagcaacaacccagccctgtgcaatgtggagagcatccagtggagggacatcgtgtccagtgacttcctgagcaacatgtccatggacttccagaaccacctgggcagctgccagaagtgtgaccccagctgccccaacggcagctgctggggcgctggggaggagaactgccagaagctgaccaagatcatctgtgcccagcagtgcagcggccgctgccggggcaagagccccagcgactgctgccacaaccagtgtgccgccggctgcaccggcccccgggagagtgactgcctggtgtgcaggaagttcagagatgaggccacctgcaaggacacctgcccccccctgatgctgtacaaccccaccacctaccagatggatgtgaaccctgagggcaagtacagctttggagccacctgtgtgaagaagtgccccaggaactacgtggtgacagaccacggcagctgtgtgcgggcctgtggggctgacagctatgagatggaggaggatggagtgaggaagtgcaagaagtgtgagggcccctgcaggaaggtgtgcaatggaattggaattggagagttcaaggacagcctgagcatcaatgccaccaacatcaagcacttcaagaactgcaccagcatcagcggggacctgcacatcctgcctgtggccttccggggggacagcttcacccacaccccacccctggacccccaggagctggacatcctgaagacagtgaaggagatcaccggcttcctgctgatccaggcctggccagaaaatagaacagacctgcacgcctttgagaacctggagatcatccggggccgcaccaagcagcacggccagttcagcctggccgtggtgtccctgaacatcaccagcctgggcctgcggagcctgaaggagatcagtgatggagatgtgatcatcagcggcaacaagaacctgtgctacgccaacaccatcaactggaagaagctgtttggcaccagcggccagaagaccaagatcatcagcaacagaggagagaacagctgcaaggccaccggccaggtgtgccacgccctgtgcagccctgagggctgctggggccctgagccccgggactgtgtgtcctgcagaaatgtgtcccggggcagagaatgtgtggacaagtgcaacctgctggagggggagccccgggagtttgtggagaacagcgagtgcatccagtgccaccctgagtgcctgccccaggccatgaacatcacctgcaccggccggggccctgacaactgcatccagtgtgcccactacattgatggcccccactgtgtgaagacctgcccagctggggtgatgggagagaacaacaccctggtgtggaagtatgcagatgctggccacgtgtgccacctgtgccaccccaactgcacctacggctgcaccggccctggcctggagggctgccccaccaacggccccaagatccccagcatcgccaccggcatggtgggcgccctgctgctgctgctggtggtggccctgggcatcggcctcttcatgagaagaagacacatcgtgaggaagaggaccctgcggcggctgctgcaggagcgggagctggtggagcccctgacccccagcggggaggcccccaaccaggccctgctgcgcatcctgaaggagacagagttcaagaagatcaaggtgctgggcagcggggccttcggcaccgtgtacaagggcctgtggatccctgagggggagaaggtgaagatccctgtggccatcaaggagctgcgggaggccaccagccccaaggccaacaaggagatcctggatgaggcctacgtgatggcctctgtggacaacccccacgtgtgccgcctgctgggcatctgcctgaccagcacagtgcagctgatcacccagctgatgcccttcggctgcctgctggactatgtgcgggagcacaaggacaacatcggcagccagtacctgctgaactggtgtgtgcagatcgccaagggcatgaactacctggaggaccggcggctggtgcaccgggacctggccgccagaaatgtgctggtgaagaccccccagcacgtgaagatcacagactttggcctggccaagctgctgggcgctgaggagaaggagtaccacgccgagggcggcaaggtgcccatcaagtggatggccctggagagcatcctgcaccgcatctacacccaccagagtgatgtgtggagctatggagtgacagtgtgggagctgatgaccttcggcagcaagccctatgatggcatcccagccagcgagatcagcagcatcctggagaagggggagcggctgccccagccccccatctgcaccattgatgtgtacatgatcatggtgaagtgctggatgattgatgctgacagccggcccaagttccgggagctgatcatcgagttcagcaagatggcccgggacccccagcgctacctggtgatccagggagatgagaggatgcacctgcccagccccacagacagcaacttctaccgggccctgatggatgaggaggacatggatgatgtggtggatgctgatgagtacctgatcccccagcagggcttcttcagcagccccagcaccagcaggacccccctgctgagcagcctgagcgccaccagcaacaacagcacagtggcctgcatcgacagaaatggcctgcagagctgccccatcaaggaggacagcttcctgcagcgctacagcagtgaccccactggagccctgacagaggacagcattgatgacaccttcctgcctgtgcctgagtacatcaaccagagcgtgcccaagaggcctgctggctctgtgcagaaccctgtgtaccacaaccagcccctgaacccagcccccagccgggacccccactaccaggacccccacagcacagctgtgggcaaccctgagtacctgaacacagtgcagcccacctgtgtgaacagcacctttgacagccctgcccactgggcccagaagggcagccaccagatcagcctggacaacccagactaccagcaggacttcttccccaaggaggccaagcccaacggcatcttcaagggcagcacagcagaaaatgctgagtacctgcgggtggccccccagagcagcgagttcatcggggcctag

SEQ ID NO: 19492 - DNA, 3276 bp, synthetic construct
  misc_feature 1..3276: note = Description of Artificial Sequence: Synthetic coding sequence
  source 1..3276: mol_type = other DNA
atgaggcccagcggcacagctggagctgccctgctggccctgctggccgccctgtgcccagccagccgggccctggaggagaagaaggtgtgccagggcaccagcaacaagctgacccagctgggcacctttgaggaccacttcctgagcctgcagaggatgttcaacaactgtgaggtggtgctgggcaacctggagatcacctacgtgcagaggaactatgacctgtccttcctgaagaccatccaggaggtggccggctacgtgctgattgccctgaacacagtggagcgcatccccctggagaacctgcagatcatccggggcaacatgtactatgagaacagctatgccctggccgtgctgagcaactatgatgccaacaagacaggcctgaaggagctgcccatgaggaacctgcagggccagaagtgtgaccccagctgccccaacggcagctgctggggcgctggggaggagaactgccagaagctgaccaagatcatctgtgcccagcagtgcagcggccgctgccggggcaagagccccagcgactgctgccacaaccagtgtgccgccggctgcaccggcccccgggagagtgactgcctggtgtgcaggaagttcagagatgaggccacctgcaaggacacctgcccccccctgatgctgtacaaccccaccacctaccagatggatgtgaaccctgagggcaagtacagctttggagccacctgtgtgaagaagtgccccaggaactacgtggtgacagaccacggcagctgtgtgcgggcctgtggggctgacagctatgagatggaggaggatggagtgaggaagtgcaagaagtgtgagggcccctgcaggaaggtgtgcaatggaattggaattggagagttcaaggacagcctgagcatcaatgccaccaacatcaagcacttcaagaactgcaccagcatcagcggggacctgcacatcctgcctgtggccttccggggggacagcttcacccacaccccacccctggacccccaggagctggacatcctgaagacagtgaaggagatcaccggcttcctgctgatccaggcctggccagaaaatagaacagacctgcacgcctttgagaacctggagatcatccggggccgcaccaagcagcacggccagttcagcctggccgtggtgtccctgaacatcaccagcctgggcctgcggagcctgaaggagatcagtgatggagatgtgatcatcagcggcaacaagaacctgtgctacgccaacaccatcaactggaagaagctgtttggcaccagcggccagaagaccaagatcatcagcaacagaggagagaacagctgcaaggccaccggccaggtgtgccacgccctgtgcagccctgagggctgctggggccctgagccccgggactgtgtgtcctgcagaaatgtgtcccggggcagagaatgtgtggacaagtgcaacctgctggagggggagccccgggagtttgtggagaacagcgagtgcatccagtgccaccctgagtgcctgccccaggccatgaacatcacctgcaccggccggggccctgacaactgcatccagtgtgcccactacattgatggcccccactgtgtgaagacctgcccagctggggtgatgggagagaacaacaccctggtgtggaagtatgcagatgctggccacgtgtgccacctgtgccaccccaactgcacctacggctgcaccggccctggcctggagggctgccccaccaacggccccaagatccccagcatcgccaccggcatggtgggcgccctgctgctgctgctggtggtggccctgggcatcggcctcttcatgagaagaagacacatcgtgaggaagaggaccctgcggcggctgctgcaggagcgggagctggtggagcccctgacccccagcggggaggcccccaaccaggccctgctgcgcatcctgaaggagacagagttcaagaagatcaaggtgctgggcagcggggccttcggcaccgtgtacaagggcctgtggatccctgagggggagaaggtgaagatccctgtggccatcaaggagctgcgggaggccaccagccccaaggccaacaaggagatcctggatgaggcctacgtgatggcctctgtggacaacccccacgtgtgccgcctgctgggcatctgcctgaccagcacagtgcagctgatcacccagctgatgcccttcggctgcctgctggactatgtgcgggagcacaaggacaacatcggcagccagtacctgctgaactggtgtgtgcagatcgccaagggcatgaactacctggaggaccggcggctggtgcaccgggacctggccgccagaaatgtgctggtgaagaccccccagcacgtgaagatcacagactttggcctggccaagctgctgggcgctgaggagaaggagtaccacgccgagggcggcaaggtgcccatcaagtggatggccctggagagcatcctgcaccgcatctacacccaccagagtgatgtgtggagctatggagtgacagtgtgggagctgatgaccttcggcagcaagccctatgatggcatcccagccagcgagatcagcagcatcctggagaagggggagcggctgccccagccccccatctgcaccattgatgtgtacatgatcatggtgaagtgctggatgattgatgctgacagccggcccaagttccgggagctgatcatcgagttcagcaagatggcccgggacccccagcgctacctggtgatccagggagatgagaggatgcacctgcccagccccacagacagcaacttctaccgggccctgatggatgaggaggacatggatgatgtggtggatgctgatgagtacctgatcccccagcagggcttcttcagcagccccagcaccagcaggacccccctgctgagcagcctgagcgccaccagcaacaacagcacagtggcctgcatcgacagaaatggcctgcagagctgccccatcaaggaggacagcttcctgcagcgctacagcagtgaccccactggagccctgacagaggacagcattgatgacaccttcctgcctgtgcctggagagtggctggtgtggaagcagagctgcagcagcaccagcagcacccacagcgctgctgccagcctgcagtgccccagccaggtgctgcccccagccagccctgagggggagaccgtggccgacctgcagacccagtag

SEQ ID NO: 19493 - DNA, 1395 bp, synthetic construct
  misc_feature 1..1395: note = Description of Artificial Sequence: Synthetic coding sequence
  source 1..1395: mol_type = other DNA
atgagcagcctgaccaagatcatctgtgcccagcagtgcagcggccgctgccggggcaagagccccagcgactgctgccacaaccagtgtgccgccggctgcaccggcccccgggagagtgactgcctggtgtgcaggaagttcagagatgaggccacctgcaaggacacctgcccccccctgatgctgtacaaccccaccacctaccagatggatgtgaaccctgagggcaagtacagctttggagccacctgtgtgaagaagtgccccagaaattatgtggtgacagaccacggcagctgtgtgcgggcctgtggggctgacagctatgagatggaggaggatggagtgaggaagtgcaagaagtgtgagggcccctgcaggaaggtgtgcaatggcatcggcatcggggagttcaaggacagcctgagcatcaatgccaccaacatcaagcacttcaagaactgcaccagcatcagcggggacctgcacatcctgcctgtggccttccggggggacagcttcacccacaccccacccctggacccccaggagctggacatcctgaagacagtgaaggagatcaccggcttcctgctgatccaggcctggccagagaacagaacagacctgcacgcctttgagaacctggagatcatccggggccgcaccaagcagcacggccagttcagcctggccgtggtgtccctgaacatcaccagcctgggcctgcggagcctgaaggagatcagtgatggagatgtgatcatcagcggcaacaagaacctgtgctacgccaacaccatcaactggaagaagctgtttggcaccagcggccagaagaccaagatcatcagcaacagaggagagaacagctgcaaggccaccggccaggtgtgccacgccctgtgcagccctgagggctgctggggccctgagccccgggactgtgtgtcctgcagaaatgtgtcccggggccgggagtgtgtggacaagtgcaacctgctggagggggagccccgggagtttgtggagaacagcgagtgcatccagtgccacccagaatgtctgccccaggccatgaacatcacctgcaccggccggggccctgacaactgcatccagtgtgcccactacattgatggcccccactgtgtgaagacctgcccagctggggtgatgggagagaacaacaccctggtgtggaagtatgcagatgctggccacgtgtgccacctgtgccaccccaactgcacctacggctgcaccggccctggcctggagggctgccccaccaacggccccaagatccccagcatcgccaccggcatggtgggcgccctgctgctgctgctggtggtggccctgggcatcggcctcttcatgagaagatag

SEQ ID NO: 19494 - DNA, 843 bp, synthetic construct
  misc_feature 1..843: note = Description of Artificial Sequence: Synthetic coding sequence
  source 1..843: mol_type = other DNA
atgcctgctgacatcatggagaagaacagcagcagccctgtggccgccaccccagcctctgtgaacaccaccccagacaagcccaagacagccagcgagcacaggaagagcagcaagcccatcatggagaagagaagaagagcccgcatcaatgaaagcctgagccagctgaagaccctcatcctggatgccctgaagaaggacagcagccgccacagcaagctggagaaggctgacatcctggagatgacagtgaagcacctgaggaacctgcagagggcccagatgacagctgccctgagcacagaccccagcgtgctgggcaagtaccgggccggcttcagcgagtgcatgaatgaggtgacccgcttcctgagcacctgtgagggcgtgaacacagaggtgaggacccggctgctgggccacctggccaactgcatgacccagatcaatgccatgacctacccaggccagccccacccagccctgcaggcccctcctcctcctcctcctggccctgggggcccccagcacgccccctttgcccctcctccacccctggtgcccatccctggaggagctgcccctcctcctgggggcgccccctgcaagctgggcagccaggccggggaggccgccaaggtgtttggaggcttccaggtggtgcctgccccagatggccagtttgccttcctgatccccaatggagcctttgcccacagcggccctgtgattcctgtgtacaccagcaacagcggcacctctgtgggccccaatgctgtgagccccagcagcggccccagcctgacagctgacagcatgtggaggccctggagaaattag

SEQ ID NO: 19495 - DNA, 57 bp, synthetic construct
  misc_feature 1..57: note = Description of Artificial Sequence: Synthetic coding sequence
  source 1..57: mol_type = other DNA
atggctgaaaattctgtgctgaccagcaccactggaagaaccagcctggccgactag

SEQ ID NO: 19496 - DNA, 2745 bp, synthetic construct
  misc_feature 1..2745: note = Description of Artificial Sequence: Synthetic coding sequence
  source 1..2745: mol_type = other DNA
atggctgaaaattctgtgctgaccagcaccactggaagaaccagcctggccgacagcagcatctttgacagcaaggtgacagagatcagcaaggagaacctgctgattggcagcaccagctatgtggaggaggagatgccccagatcgagaccagggtcatcctggtgcaggaggccggcaagcaggaggagctgatcaaggccctgaagaccatcaagatcatggaggtgcctgtgatcaagatcaaggagagctgccctgggaagagtgatgagaagctgatcaagagcgtcatcaacatggacatcaaggtgggctttgtgaagatggagagcgtggaggagtttgagggcctggacagccctgagtttgaaaatgtgtttgtggtgacagacttccaggacagcgtcttcaatgacctgtacaaggctgactgccgggtgattggcccccctgtggtgctgaactgcagccagaagggggagcccctgcccttcagctgccggcccctgtactgcacctccatgatgaacctggtgctgtgcttcaccggcttcaggaagaaggaggagctggtgcggctggtgaccctggtgcaccacatgggcggcgtcatcaggaaggacttcaacagcaaggtgacccacctggtggccaactgcacccagggcgagaagttccgggtggccgtgtccctgggcacccccatcatgaagccagagtggatctacaaggcctgggagaggagaaatgagcaggacttctatgctgctgtggatgacttcagaaatgagttcaaggtgccccccttccaggactgcatcctgtccttcctgggcttcagtgatgaggagaagaccaacatggaggagatgacagagatgcagggcggcaagtacctgcccctgggagatgagcgctgcacccacctggtggtggaggagaacatcgtgaaggacctgccctttgagcccagcaagaagctgtatgtggtgaagcaggagtggttctggggcagcatccagatggatgcccgggccggggagaccatgtacctgtatgagaaggccaacaccccagagctgaagaagtctgtgtccatgctgagcctgaacacccccaacagcaacaggaagagaagaaggctgaaggagaccctggcccagctgagccgggagacagatgtgagccccttcccccccaggaagaggcccagcgctgagcacagcctgagcatcggcagcctgctggacatcagcaacaccccagagagcagcatcaactatggagacacccccaagagctgcaccaagagcagcaagagcagcacccctgtgcccagcaagcagagcgcccgctggcaggtggccaaggagctgtaccagacagagagcaactacgtgaacatcctggccaccatcatccagctgttccaggtgcccctggaggaggagggccagagaggaggccccatcctggcccctgaggagatcaagaccatcttcggcagcatcccagacatctttgatgtgcacaccaagatcaaggatgacctggaggacctgattgtgaactgggatgagagcaagagcatcggggacatcttcctgaagtacagcaaggacctggtgaagacctaccccccatttgtgaacttctttgagatgagcaaggagaccatcatcaagtgtgagaagcagaagccccgcttccacgccttcctgaagatcaaccaggccaagccagaatgtggccggcagagcctggtggagctgctgatccggcctgtgcagaggctgcccagcgtggccctgctgctgaatgacctgaagaagcacacagcagatgaaaatccagacaagagcaccctggagaaggccatcggcagcctgaaggaggtgatgacccacatcaatgaagacaagaggaagacagaggcccagaagcagatctttgatgtggtgtatgaggtggatggctgcccagccaacctgctgagcagccacaggagcctggtgcagagggtggagaccatcagcctgggggagcacccctgtgacagaggagagcaggtgaccctcttcctgttcaatgactgcctggagatcgccaggaagaggcacaaggtgattggcaccttccgcagcccccacggccagacccggcccccagccagcctgaagcacatccacctgatgcccctgagccagatcaagaaggtgctggacatccgggagacagaggactgccacaatgcctttgccctgctggtgcggcccccaacagagcaggccaacgtgctgctgtccttccagatgaccagtgatgagctgcccaaggagaactggctgaagatgctgtgccgccacgtggccaacaccatctgcaaggcagatgctgaaaatctcatctacacagctgaccctgagagctttgaggtgaacaccaaggacatggacagcaccctgagccgggccagccgggccatcaagaagaccagcaagaaggtgacccgggccttctccttcagcaagacccccaagagggccctgcggcgggccctgatgaccagccacggctctgtggagggccgcagccccagcagcaatgacaagcacgtgatgagccggctgagcagcaccagcagcctggccggcatccccagccccagcctggtgtccctgcccagcttctttgaaagaagaagccacaccctgagccgcagcaccacccacctgatctag

SEQ ID NO: 19497 - DNA, 480 bp, synthetic construct
  misc_feature 1..480: note = Description of Artificial Sequence: Synthetic coding sequence
  source 1..480: mol_type = other DNA
atggctgaaaattctgtgctgaccagcaccactggaagaaccagcctggccgacagcagcatctttgacagcaaggtgacagagatcagcaaggagaacctgctgattggcagcaccagctatgtggaggaggagatgccccagatcgagaccagggtcatcctggtgcaggaggccggcaagcaggaggagctgatcaaggccctgaaggacatcaaggtgggctttgtgaagatggagagcgtggaggagtttgagggcctggacagccctgagtttgaaaatgtgtttgtggtgacagacttccaggacagcgtcttcaatgacctgtacaaggctgactgcagggtcatcggcccccctgtggtgctgaactgcagccagaagggggagcccctgcccttcagctgccggcccctgtactgcacctccatgatgaacctggtgctgtgcttcaccggcttcaggaagaaggagtag

SEQ ID NO: 19498 - DNA, 2649 bp, synthetic construct
  misc_feature 1..2649: note = Description of Artificial Sequence: Synthetic coding sequence
  source 1..2649: mol_type = other DNA
atggctgaaaattctgtgctgaccagcaccactggaagaaccagcctggccgacagcagcatctttgacagcaaggtgacagagatcagcaaggagaacctgctgattggcagcaccagctatgtggaggagatgccccagatcgagaccagggtcatcctggtgcaggaggccggcaagcaggaggagctgatcaaggccctgaaggacatcaaggtgggctttgtgaagatggagagcgtggaggagtttgagggcctggacagccctgagtttgaaaatgtgtttgtggtgacagacttccaggacagcgtcttcaatgacctgtacaaggctgactgccgggtgattggcccccctgtggtgctgaactgcagccagaagggggagcccctgcccttcagctgccggcccctgtactgcacctccatgatgaacctggtgctgtgcttcaccggcttcaggaagaaggaggagctggtgcggctggtgaccctggtgcaccacatgggcggcgtcatcaggaaggacttcaacagcaaggtgacccacctggtggccaactgcacccagggcgagaagttccgggtggccgtgtccctgggcacccccatcatgaagccagagtggatctacaaggcctgggagaggagaaatgagcaggacttctatgctgctgtggatgacttcagaaatgagttcaaggtgccccccttccaggactgcatcctgtccttcctgggcttcagtgatgaggagaagaccaacatggaggagatgacagagatgcagggcggcaagtacctgcccctgggagatgagcgctgcacccacctggtggtggaggagaacatcgtgaaggacctgccctttgagcccagcaagaagctgtatgtggtgaagcaggagtggttctggggcagcatccagatggatgcccgggccggggagaccatgtacctgtatgagaaggccaacaccccagagctgaagaagtctgtgtccatgctgagcctgaacacccccaacagcaacaggaagagaagaaggctgaaggagaccctggcccagctgagccgggagacagatgtgagccccttcccccccaggaagaggcccagcgctgagcacagcctgagcatcggcagcctgctggacatcagcaacaccccagagagcagcatcaactatggagacacccccaagagctgcaccaagagcagcaagagcagcacccctgtgcccagcaagcagagcgcccgctggcaggtggccaaggagctgtaccagacagagagcaactacgtgaacatcctggccaccatcatccagctgttccaggtgcccctggaggaggagggccagagaggaggccccatcctggcccctgaggagatcaagaccatcttcggcagcatcccagacatctttgatgtgcacaccaagatcaaggatgacctggaggacctgattgtgaactgggatgagagcaagagcatcggggacatcttcctgaagtacagcaaggacctggtgaagacctaccccccatttgtgaacttctttgagatgagcaaggagaccatcatcaagtgtgagaagcagaagccccgcttccacgccttcctgaagatcaaccaggccaagccagaatgtggccggcagagcctggtggagctgctgatccggcctgtgcagaggctgcccagcgtggccctgctgctgaatgacctgaagaagcacacagcagatgaaaatccagacaagagcaccctggagaaggccatcggcagcctgaaggaggtgatgacccacatcaatgaagacaagaggaagacagaggcccagaagcagatctttgatgtggtgtatgaggtggatggctgcccagccaacctgctgagcagccacaggagcctggtgcagagggtggagaccatcagcctgggggagcacccctgtgacagaggagagcaggtgaccctcttcctgttcaatgactgcctggagatcgccaggaagaggcacaaggtgattggcaccttccgcagcccccacggccagacccggcccccagccagcctgaagcacatccacctgatgcccctgagccagatcaagaaggtgctggacatccgggagacagaggactgccacaatgcctttgccctgctggtgcggcccccaacagagcaggccaacgtgctgctgtccttccagatgaccagtgatgagctgcccaaggagaactggctgaagatgctgtgccgccacgtggccaacaccatctgcaaggcagatgctgaaaatctcatctacacagctgaccctgagagctttgaggtgaacaccaaggacatggacagcaccctgagccgggccagccgggccatcaagaagaccagcaagaaggtgacccgggccttctccttcagcaagacccccaagagggccctgcggcgggccctgatgaccagccacggctctgtggagggccgcagccccagcagcaatgacaagcacgtgatgagccggctgagcagcaccagcagcctggccggcatccccagccccagcctggtgtccctgcccagcttctttgaaagaagaagccacaccctgagccgcagcaccacccacctgatctag

SEQ ID NO: 19499 - DNA, 321 bp, synthetic construct
  misc_feature 1..321: note = Description of Artificial Sequence: Synthetic coding sequence
  source 1..321: mol_type = other DNA
atggctgaaaattctgtgctgaccagcaccactggaagaaccagcctggccgacagcagcatctttgacagcaaggtgacagagatcagcaaggagaacctgctgattggcagcaccagctatgtggaggaggagatgccccagatcgagaccagggtcatcctggtgcaggaggccggcaagcaggaggagctgatcaaggccctgaaggacatcaaggtgggctttgtgaagatggagagcgtggaggagtttgagggcctggacagccctgagtttgaaaatgtgtttgtggtgacagacttccaggacagcgtgtag

SEQ ID NO: 19500 - DNA, 2784 bp, synthetic construct
  misc_feature 1..2784: note = Description of Artificial Sequence: Synthetic coding sequence
  source 1..2784: mol_type = other DNA
atggctgaaaattctgtgctgaccagcaccactggaagaaccagcctggccgacagcagcatctttgacagcaaggtgacagagatcagcaaggagaacctgctgattggcagcaccagctatgtggaggaggagatgccccagatcgagaccagggtcatcctggtgcaggaggccggcaagcaggaggagctgatcaaggccctgaaggacatcaaggtgggctttgtgaagatggagagcgtggaggagtttgagggcctggacagccctgagtttgaaaatgtgtttgtggtgacagacttccaggacagcgtcttcaatgacctgtacaaggctgactgcagggtcatcggcccccctgtggtgctgaactgcagccagaagggggagcccctgcccttcagctgccggcccctgtactgcacctccatgatgaacctggtgctgtgcttcaccggcttcaggaagaaggaggagctggtgcggctggtgaccctggtgcaccacatgggcggcgtcatcaggaaggacttcaacagcaaggtgacccacctggtggccaactgcacccagggcgagaagttccgggtggccgtgtccctgggcacccccatcatgaagccagagtggatctacaaggcctgggagaggagaaatgagcaggacttctacgccgctgtggatgacttcagaaatgagttcaaggtgccccccttccaggactgcatcctgtccttcctgggcttcagtgatgaggagaagaccaacatggaggagatgacagagatgcagggcggcaagtacctgcccctgggagatgagcgctgcacccacctggtggtggaggagaacatcgtgaaggacctgccctttgagcccagcaagaagctgtatgtggtgaagcaggagtggttctggggcagcatccagatggatgcccgggccggggagaccatgtacctgtatgagaaggccaacaccccagagctgaagaagtctgtgtccatgctgagcctgaacacccccaacagcaacaggaagagaagaaggctgaaggagaccctggcccagctgagccgggagacagatgtgagccccttcccccccaggaagaggccttctgctgagcacagcctgagcatcggcagcctgctggacatcagcaacaccccagagagcagcatcaactacggggacacccccaagagctgcaccaagagcagcaagagcagcacccctgtgcccagcaagcagagcgcccgctggcaggtggccaaggagctgtaccagacagagagcaactacgtgaacatcctggccaccatcatccagctgttccaggtgcccctggaggaggagggccagaggggcggccccatcctggcccctgaggagatcaagaccatcttcggcagcatcccagacatctttgatgtgcacaccaagatcaaggatgacctggaggacctgattgtgaactgggatgagagcaagagcattggagacatcttcctgaagtacagcaaggacctggtgaagacctaccccccatttgtgaacttctttgagatgagcaaggagaccatcatcaagtgtgagaagcagaagccccgcttccacgccttcctgaagatcaaccaggccaagccagaatgtggccggcagagcctggtggagctgctgatccggcctgtgcagaggctgcccagcgtggccctgctgctgaatgacctgaagaagcacacagcagatgagaacccagacaagagcaccctggagaaggccatcggcagcctgaaggaggtgatgacccacatcaatgaagacaagaggaagacagaggcccagaagcagatctttgatgtggtgtatgaggtggatggctgcccagccaacctgctgagcagccacaggagcctggtgcagagggtggagaccatcagcctgggggagcacccctgtgacagaggagagcaggtgaccctcttcctgttcaatgactgcctggagatcgccaggaagaggcacaaggtgattggcaccttccgcagcccccacggccagacccggcccccagccagcctgaagcacatccacctgatgcccctgagccagatcaagaaggtgctggacatccgggagacagaggactgccacaatgcctttgccctgctggtgcggcccccaacagagcaggccaacgtgctgctgtccttccagatgaccagtgatgagctgcccaaggagaactggctgaagatgctgtgcagacatgtggccaacaccatctgcaaggcagatgctgagaacctgatctacacagctgaccctgagagctttgaggtgaacaccaaggacatggacagcaccctgagccgggccagccgggccatcaagaagaccagcaagaaggtgacccgggccttctccttcagcaagacccccaagagggccctgcggcgggccctgatgaccagccacggctctgtggagggccgcagccccagcagcaatgacaagcacgtgatgagccggctgagcagcaccagcagcctggccatcacccacagcgtgtccaccagcaatgtgattggcttcaccaagcacgtgtatgtgcagaggctgaacagcactggaggccgcagccagtacagctggttccagagcgtgcgccacagcgccttccgggccagcttcagcgagatcctggagggcaacacagacttcagcaacttcaagaaggtgctgagcaagagcagcctgacctttgtgaagaactag

SEQ ID NO: 19501 - DNA, 2652 bp, synthetic construct
  misc_feature 1..2652: note = Description of Artificial Sequence: Synthetic coding sequence
  source 1..2652: mol_type = other DNA
atggctgaaaattctgtgctgaccagcaccactggaagaaccagcctggccgacagcagcatctttgacagcaaggtgacagagatcagcaaggagaacctgctgattggcagcaccagctatgtggaggaggagatgccccagatcgagaccagggtcatcctggtgcaggaggccggcaagcaggaggagctgatcaaggccctgaaggacatcaaggtgggctttgtgaagatggagagcgtggaggagtttgagggcctggacagccctgagtttgaaaatgtgtttgtggtgacagacttccaggacagcgtcttcaatgacctgtacaaggctgactgcagggtcatcggcccccctgtggtgctgaactgcagccagaagggggagcccctgcccttcagctgccggcccctgtactgcacctccatgatgaacctggtgctgtgcttcaccggcttcaggaagaaggaggagctggtgcggctggtgaccctggtgcaccacatgggcggcgtcatcaggaaggacttcaacagcaaggtgacccacctggtggccaactgcacccagggcgagaagttccgggtggccgtgtccctgggcacccccatcatgaagccagagtggatctacaaggcctgggagaggagaaatgagcaggacttctacgccgctgtggatgacttcagaaatgagttcaaggtgccccccttccaggactgcatcctgtccttcctgggcttcagtgatgaggagaagaccaacatggaggagatgacagagatgcagggcggcaagtacctgcccctgggagatgagcgctgcacccacctggtggtggaggagaacatcgtgaaggacctgccctttgagcccagcaagaagctgtatgtggtgaagcaggagtggttctggggcagcatccagatggatgcccgggccggggagaccatgtacctgtatgagaaggccaacaccccagagctgaagaagtctgtgtccatgctgagcctgaacacccccaacagcaacaggaagagaagaaggctgaaggagaccctggcccagctgagccgggagacagatgtgagccccttcccccccaggaagaggccttctgctgagcacagcctgagcatcggcagcctgctggacatcagcaacaccccagagagcagcatcaactacggggacacccccaagagctgcaccaagagcagcaagagcagcacccctgtgcccagcaagcagagcgcccgctggcaggtggccaaggagctgtaccagacagagagcaactacgtgaacatcctggccaccatcatccagctgttccaggtgcccctggaggaggagggccagaggggcggccccatcctggcccctgaggagatcaagaccatcttcggcagcatcccagacatctttgatgtgcacaccaagatcaaggatgacctggaggacctgattgtgaactgggatgagagcaagagcattggagacatcttcctgaagtacagcaaggacctggtgaagacctaccccccatttgtgaacttctttgagatgagcaaggagaccatcatcaagtgtgagaagcagaagccccgcttccacgccttcctgaagatcaaccaggccaagccagaatgtggccggcagagcctggtggagctgctgatccggcctgtgcagaggctgcccagcgtggccctgctgctgaatgacctgaagaagcacacagcagatgagaacccagacaagagcaccctggagaaggccatcggcagcctgaaggaggtgatgacccacatcaatgaagacaagaggaagacagaggcccagaagcagatctttgatgtggtgtatgaggtggatggctgcccagccaacctgctgagcagccacaggagcctggtgcagagggtggagaccatcagcctgggggagcacccctgtgacagaggagagcaggtgaccctcttcctgttcaatgactgcctggagatcgccaggaagaggcacaaggtgattggcaccttccgcagcccccacggccagacccggcccccagccagcctgaagcacatccacctgatgcccctgagccagatcaagaaggtgctggacatccgggagacagaggactgccacaatgcctttgccctgctggtgcggcccccaacagagcaggccaacgtgctgctgtccttccagatgaccagtgatgagctgcccaaggagaactggctgaagatgctgtgcagacatgtggccaacaccatctgcaaggcagatgctgagaacctgatctacacagctgaccctgagagctttgaggtgaacaccaaggacatggacagcaccctgagccgggccagccgggccatcaagaagaccagcaagaaggtgacccgggccttctccttcagcaagacccccaagagggccctgcggcgggccctgatgaccagccacggctctgtggagggccgcagccccagcagcaatgacaagcacgtgatgagccggctgagcagcaccagcagcctggccggcatccccagccccagcctggtgtccctgcccagcttctttgagcggcgcagccacaccctgagccgcagcaccacccacctgatctag

SEQ ID NO: 19502 - DNA, 2745 bp, synthetic construct; identical to SEQ ID NO: 19496
  misc_feature 1..2745: note = Description of Artificial Sequence: Synthetic coding sequence
  source 1..2745: mol_type = other DNA

SEQ ID NO: 19503 - DNA, 1389 bp, synthetic construct
  misc_feature 1..1389: note = Description of Artificial Sequence: Synthetic coding sequence
  source 1..1389: mol_type = other DNA
atgagcattgctggggtggccgcccaggagatccgggtgcccctgaagacaggcttcctgcacaacggccgggccatgggcaacatgaggaagacctactggagcagccgctctgagttcaagaacaacttcctgaacatcgaccccatcaccatggcctacagcctgaacagcagcgcccaggagcggctcatccccctgggccacgccagcaagagcgcccccatgaatggccactgctttgctgaaaatggccccagccagaagagcagcctgccccccctgctgatccccccatctgagaacctgggcccccatgaggaggaccaggtggtgtgtggcttcaagaagctgactgtgaatggagtgtgtgccagcaccccacccctgacccccatcaagaacagccccagcctcttcccctgtgcccccctgtgtgagcggggcagccggcccctgccccccctgcccatcagcgaggccctgagcctggatgacacagactgtgaggtggagttcctgaccagcagtgacacagacttcctgctggaggacagcaccctgagtgacttcaagtatgatgtgcccggccgccgctccttccggggctgcggccagatcaactatgcctactttgacaccccagctgtgtctgctgctgacctgtcctatgtgtctgaccagaatggaggagtgcctgaccccaaccccccaccaccccagacccaccggcggctgcggcgcagccacagcggccctgctggcagcttcaacaagccagccatccgcatcagcaactgctgcatccaccgggccagccccaacagtgatgaggacaagccagaggtgcccccccgggtgcccatcccccccaggcctgtgaagccagactaccgccgctggagcgctgaggtgaccagcagcacctacagtgatgaagatcggccccccaaggtgcccccccgggagcccctgagccccagcaacagcaggacccccagccccaagagcctgcccagctacctgaatggagtgatgccacccacccagagctttgccccagaccccaagtatgtgagcagcaaggccctgcagaggcagaacagcgagggcagcgccagcaaggtgccctgcatcctgcccatcattgaaaatggcaagaaggtgagcagcacccactactacctgctgcctgagaggcctccctacctggacaagtatgagaagttcttccgggaggccgaggagaccaacggcggggcccagatccagcccctgcctgctgactgtggcatcagcagcgccacagagaagccagacagcaagaccaagatggacctgggcggccacgtgaagaggaagcacctgtcctatgtggtgagcccctag

SEQ ID NO: 19504 - DNA, 1713 bp, synthetic construct
  misc_feature 1..1713: note = Description of Artificial Sequence: Synthetic coding sequence
  source 1..1713: mol_type = other DNA
atggccctgaagaagagcagccccagcctggacagcggggacagcgacagcgaggagctgcccacctttgccttcctgaagaaggagcccagcagcaccaagaggcggcagcctgagcgggaggagaagatcgtggtggtggacatcagtgactgtgaggccagctgccccccagcccctgagctgttcagcccccctgtgcctgagattgctgagaccgtgacccagacccagcctgtgcggctgctgagcagcgagagtgaagatgaggaggagttcatccccctggcccagaggctgacctgcaagttcctgacccacaagcagctgagccctgaggacagcagcagccctgtgaagtctgtgctggaccaccagaacaatgaaggagccagctgtgactggaagaagcccttccccaagatccctgaggtgcccctgcatgacaccccagagaggtctgctgctgacaacaaggacctgatcctggacccctgctgccagctgcctgcctacctgagcacctgccccggccagagcagcagcctggccgtgaccaagaccaacagcgacatcctgcccccccagaagaagaccaagcccagccagaaggtgcagggccggggcagccacggctgccggcagcagaggcaggcccggcagaaggagagcaccctgcggcggcaggagaggaagaatgctgccctggtgaccaggatgaaggcccagaggccagaagaatgtctgaagcacatcatcgtggtgctggaccctgtgctgctgcagatggagggcggcggccagctgctgggcgccctgcagaccatggagtgccgctgcgtcatcgaggcccaggccgtgccctgcagcgtgacctggaggagaagagctggccccagtgaagatcgggaggactgggtggaggagcccaccgtgctggtgctgctgcgggcagaggcctttgtgtccatgattgacaatggcaagcagggcagcctggacagcaccatgaagggcaaggagaccctgcagggctttgtgacagacatcacagccaagacagctgggaaggccctgagcctggtgattgtggaccaggagaagtgcttcagcgcccagaaccccccaagaagaggcaagcagggcgccaacaagcagaccaagaagcagcagcagaggcagcctgaggccagcatcggctccatggtgtcccgggtggatgctgaggaggccctggtggacctgcagctgcacacagaggcccaggcccagatcgtgcagagctggaaggagctggccgacttcacctgtgccttcaccaaggctgtggccgaggcccccttcaagaagctgagagatgagaccaccttctccttctgcctggagagtgactgggccggcggcgtgaaggtggacctggccggccggggcctggccctggtgtggaggcggcagatccagcagctgaacagagtgtccctggagatggccagcgctgtggtgaatgcctaccccagcccccagctgctggtgcaggcctaccagcagtgcttcagtgacaaggagcggcagaacctgctggccgacatccaggtgagaagaggagaaggagtgaccagcaccagcagaagaattggccctgagctgagccgccgcatctacctgcagatgaccaccctgcagccccacctgagcctggacagcgctgactag

SEQ ID NO: 19505 - DNA, 1752 bp, synthetic construct
  misc_feature 1..1752: note = Description of Artificial Sequence: Synthetic coding sequence
  source 1..1752: mol_type = other DNA
atggccctgaagaagagcagccccagcctggacagcggggacagcgacagcgaggagctgcccacctttgccttcctgaagaaggagcccagcagcaccaagaggcggcagcctgagcgggaggagaagatcgtggtggtggacatcagtgactgtgaggccagctgccccccagcccctgagctgttcagcccccctgtgcctgagattgctgagaccgtgacccagacccagcctgtgcggctgctgagcagcgagagtgaagatgaggaggagttcatccccctggcccagaggctgacctgcaagttcctgacccacaagcagctgagccctgaggacagcagcagccctgtgaagtctgtgctggaccaccagaacaatgaaggagccagctgtgactggaagaagcccttccccaagatccctgaggtgcccctgcatgacaccccagagaggtctgctgctgacaacaaggacctgatcctggacccctgctgccagctgcctgcctacctgagcacctgccccggccagagcagcagcctggccgtgaccaagaccaacagcgacatcctgcccccccagaagaagaccaagcccagccagaaggtgcagggccggggcagccacggctgccggcagcagaggcaggcccggcagaaggagagcaccctgcggcggcaggagaggaagaatgctgccctggtgaccaggatgaaggcccagaggccagaagaatgtctgaagcacatcatcgtggtgctggaccctgtgctgctgcagatggagggcggcggccagctgctgggcgccctgcagaccatggagtgccgctgcgtcatcgaggcccaggccgtgccctgcagcgtgacctggaggagaagagctggccccagtgaagatcgggaggactgggtggaggagcccaccgtgctggtgctgctgcgggcagaggcctttgtgtccatgattgacaatggcaagcagggcagcctggacagcaccatgaagggcaaggagaccctgcagggctttgtgacagacatcacagccaagacagctgggaaggccctgagcctggtgattgtggaccaggagaagtgcttcagcctggagctgctcttctttgacttcctgccctgcaccagcgcccagaaccccccccggcggggcaagcagggcgccaacaagcagaccaagaagcagcagcagaggcagcctgaggccagcatcggctccatggtgtcccgggtggatgctgaggaggccctggtggacctgcagctgcacacagaggcccaggcccagatcgtgcagagctggaaggagctggccgacttcacctgtgccttcaccaaggctgtggccgaggcccccttcaagaagctgagagatgagaccaccttctccttctgcctggagagtgactgggccggcggcgtgaaggtggacctggccggccggggcctggccctggtgtggaggcggcagatccagcagctgaacagagtgtccctggagatggccagcgctgtggtgaatgcctaccccagcccccagctgctggtgcaggcctaccagcagtgcttcagtgacaaggagcggcagaacctgctggccgacatccaggtgcggcggggggagggcgtgaccagcaccagccgccgcatcggccctgagctgagccgccgcatctacctgcagatgaccaccctgcagccccacctgagcctggacagcgctgactag

SEQ ID NO: 19506 - DNA, 1752 bp, synthetic construct; identical to SEQ ID NO: 19505
  misc_feature 1..1752: note = Description of Artificial Sequence: Synthetic coding sequence
  source 1..1752: mol_type = other DNA

SEQ ID NO: 19507 - DNA, 684 bp, synthetic construct
  misc_feature 1..684: note = Description of Artificial Sequence: Synthetic coding sequence
  source 1..684: mol_type = other DNA
atggctgacctgctgggcagcatcctgagctccatggagaagccacccagcctgggggaccaggagaccaggaggaaggcccgggagcaggccgcccggctgaagaagctgcaggagcaggagaagcagcagaaggtggagttcaggaagaggatggagaaggaggtgtctgacttcatccaggacagcggccagatcaagaagaagttccagcccatgaacaagattgaaagaagcatcctgcatgatgtggtggaggtggccggcctgaccagcttctcctttggagaagatgatgactgccgctacgtgatgatcttcaagaaggagtttgcccccagtgatgaggagctggacagctaccgccgcggggaggagtgggacccccagaaggccgaggagaagaggaagctgaaggagctggcccagaggcaggaggaggaggccgcccagcagggccctgtggtggtgtccccagccagtgactacaaggacaagtacagccacctgattggaaaaggagctgccaaggatgctgcccacatgctgcaggccaacaagacctacggctgtgtgcctgtggccaacaagagggacaccaggagcattgaggaggccatgaatgagatccgggccaagaagaggctgcggcagagcggggaggagctgccccccaccagctag

SEQ ID NO: 19508 - DNA, 1788 bp, synthetic construct
  misc_feature 1..1788: note = Description of Artificial Sequence: Synthetic coding sequence
  source 1..1788: mol_type = other DNA
atgaccatgaccctgcacaccaaggccagcggcatggccctgctgcaccagatccagggcaatgagctggagcccctgaaccggccccagctgaagatccccctggagcggcccctgggggaggtgtacctggacagcagcaagccagctgtgtacaactacccagagggcgccgcctatgagttcaatgctgctgctgctgccaatgcccaggtgtatggccagacaggcctgccctacggccctggcagcgaggccgccgccttcggcagcaatggcctgggcggcttcccccccctgaacagcgtgagccccagccccctgatgctgctgcaccccccaccccagctgagccccttcctgcagccccacggccagcaggtgccctactacctggagaatgagcccagcggctacacagtgcgggaggccggccccccagccttctaccggcccaacagcgacaacagacggcagggcggccgggagcggctggccagcaccaatgacaagggctccatggccatggagagcgccaaggagacccgctactgtgctgtgtgcaatgactatgccagcggctaccactatggagtgtggagctgtgagggctgcaaggccttcttcaagaggagcatccagggccacaatgactacatgtgcccagccaccaaccagtgcaccatcgacaagaacagaaggaagagctgccaggcctgccgcctgaggaagtgctatgaggtgggcatgatgaagggcggcatcaggaaggacagaagaggaggccgcatgctgaagcacaagaggcagagagatgatggagagggccgcggggaggtgggcagcgctggggacatgagagctgccaacctgtggcccagccccctgatgatcaagaggagcaagaagaacagcctggccctgagcctgacagctgaccagatggtgtctgccctgctggatgctgagccccccatcctgtacagtgaatatgaccccacccggcccttcagcgaggcctccatgatgggcctgctgaccaacctggccgaccgggagctggtgcacatgatcaactgggccaagagggtgcccggctttgtggacctgaccctgcatgaccaggtgcacctgctggagtgtgcctggctggagatcctgatgattggcctggtgtggaggtccatggagcaccctgggaagctgctgtttgcccccaacctgctgctggacaggaaccagggcaaatgtgtggagggcatggtggagatctttgacatgctgctggccaccagcagccgcttcaggatgatgaacctgcagggcgaggagtttgtgtgcctgaagagcatcatcctgctgaacagcggcgtgtacaccttcctgagcagcaccctgaagagcctggaggagaaggaccacatccaccgggtgctggacaagatcacagacaccctcatccacctgatggccaaggccggcctgaccctgcagcagcagcaccagaggctggcccagctgctgctgatcctgagccacatccgccacatgagcaacaagggcatggagcacctgtacagcatgaagtgcaagaatgtggtgcccctgtatgacctgctgctggagatgctggatgcccaccggctgcacgcccccaccagccggggcggggcctctgtggaggagacagaccagagccacctggccacagctggcagcaccagcagccacagcctgcagaagtactacatcactggagaggccgagggcttccctgccaccgtgtag

SEQ ID NO: 19509 - DNA, 549 bp, synthetic construct
  misc_feature 1..549: note = Description of Artificial Sequence: Synthetic coding sequence
  source 1..549: mol_type = other DNA
atggagagcgccaaggagacccgctactgtgctgtgtgcaatgactatgccagcggctaccactacggcgtgtggagctgtgagggctgcaaggccttcttcaagaggagcatccagggccacaatgactacatgtgcccagccaccaaccagtgcaccatcgacaagaacagaaggaagagctgccaggcctgccgcctgaggaaatgttatgaggtgggcatgatgaagggcggcatcaggaaggaccggcggggcggccgcatgctgaagcacaagctgctgctgatcctgagccacatccgccacatgagcaacaagggcatggagcacctgtacagcatgaagtgcaagaatgtggtgcccctgtatgacctgctgctggagatgctggatgcccaccggctgcacgcccccaccagcagaggaggagcctctgtggaggagacagaccagagccacctggccacagctggcagcaccagcagccacagcctgcagaagtactacatcaccggggaggccgagggcttccctgccaccgtgtag

SEQ ID NO: 19510 - DNA, 255 bp, synthetic construct
  misc_feature 1..255: note = Description of Artificial Sequence: Synthetic coding sequence
  source 1..255: mol_type = other DNA
atgaccatgaccctgcacaccaaggccagcggcatggccctgctgcaccagatccagggcaatgagctggagcccctgaaccggccccagctgaagatccccctggagcggcccctgggggaggtgtacctggacagcagcaagccagctgtgtacaactacccagagggcgccgcctatgagttcaatgctgctgctgctgccaatgcccaggtgtatggccagacaggcctgccctacggccctggcagctag

SEQ ID NO: 19511 - DNA, 1005 bp, synthetic construct
  misc_feature 1..1005: note = Description of Artificial Sequence: Synthetic coding sequence
  source 1..1005: mol_type = other DNA
atgaccatgaccctgcacaccaaggccagcggcatggccctgctgcaccagatccagggcaatgagctggagcccctgaaccggccccagctgaagatccccctggagcggcccctgggggaggtgtacctggacagcagcaagccagctgtgtacaactacccagagggcgccgcctatgagttcaatgctgctgctgctgccaatgcccaggtgtatggccagacaggcctgccctacggccctggcagcgaggccgccgccttcggcagcaatggcctgggcggcttcccccccctgaacagcgtgagccccagccccctgatgctgctgcaccccccaccccagctgagccccttcctgcagccccacggccagcaggtgccctactacctggagaatgagcccagcggctacacagtgcgggaggccggccccccagccttctacagaaaccagggcaaatgtgtggagggcatggtggagatctttgacatgctgctggccaccagcagccgcttcaggatgatgaacctgcagggcgaggagtttgtgtgcctgaagagcatcatcctgctgaacagcggcgtgtacaccttcctgagcagcaccctgaagagcctggaggagaaggaccacatccaccgggtgctggacaagatcacagacaccctcatccacctgatggccaaggccggcctgaccctgcagcagcagcaccagaggctggcccagctgctgctgatcctgagccacatccgccacatgagcaacaagggcatggagcacctgtacagcatgaagtgcaagaatgtggtgcccctgtatgacctgctgctggagatgctggatgcccaccggctgcacgcccccaccagcagaggaggagcctctgtggaggagacagaccagagccacctggccacagctggcagcaccagcagccacagcctgcagaagtactacatcaccggggaggccgagggcttccctgccaccgtgtag

SEQ ID NO: 19512 - DNA, 324 bp, synthetic construct
  misc_feature 1..324: note = Description of Artificial Sequence: Synthetic coding sequence
  source 1..324: mol_type = other DNA
cacaatgactacatgtgcccagccaccaaccagtgcaccatcgacaagaacagaaggaagagctgccaggcctgccgcctgaggaaatgttatgaggtgggcatgatgaagggcggctttgtggacctgaccctgcatgaccaggtgcacctgctggagtgtgcctggctggagatcctgatgattggcctggtgtggaggtccatggagcaccctgggaagctgctgtttgcccccaacctgctgctggacaggaaccagggcaaatgtgtggagggcatggtggagatctttgacatgctgctggccaccagcagcaggtag

SEQ ID NO: 19513 - DNA, 1167 bp, synthetic construct
  misc_feature 1..1167: note = Description of Artificial Sequence: Synthetic coding sequence
  source 1..1167: mol_type = other DNA
tgactgaagatcatcagctgccagcccagcgacaagcctgtgcccccaggagaaaatgcccctgagtggagggctggccagcccggcagcgcccccaggagccactgcggccgctctgctgctggccctggccaccggcggcccctgtgtgacttcaatggagagggccccaacagcgacaacagacggcagggcggccgggagcggctggccagcaccaatgacaagggctccatggccatggagagcgccaaggagacccgctactgtgctgtgtgcaatgactatgccagcggctaccactacggcgtgtggagctgtgagggctgcaaggccttcttcaagaggagcatccagggccacaatgactacatgtgcccagccaccaaccagtgcaccatcgacaagaacagaaggaagagctgccaggcctgccgcctgaggaaatgttatgaggtgggcatgatgaagggcggcatcaggaaggaccggcggggcggccgcatgctgaagcacaagaggcagagagatgatggagagggccgcggggaggtgggcagcgctggggacatgagagctgccaacctgtggcccagccccctgatgatcaagaggagcaagaagaacagcctggccctgagcctgacagctgaccagatggtgtctgccctgctggatgctgagccccccatcctgtacagtgaatatgaccccacccggcccttcagcgaggcctccatgatgggcctgctgaccaacctggccgaccgggagctggtgcacatgatcaactgggccaagagggtgcccggctttgtggacctgaccctgcatgaccaggtgcacctgctggagtgtgcctggctggagatcctgatgattggcctggtgtggaggtccatggagcaccctgggaagctgctgtttgcccccaacctgctgctggacaggaaccagggcaaatgtgtggagggcatggtggagatctttgacatgctgctggccaccagcagccgcttcaggatgatgaacctgcagggcgaggagtttgtgtgcctgaagagcatcatcctgctgaacagcggcatcagccacgtggaggccaagaagaggatcctgaacctgcaccccaagatcttcggcaacaagtggttcccccgggtgtag

SEQ ID NO: 19514 - DNA, 813 bp, synthetic construct
  misc_feature 1..813: note = Description of Artificial Sequence: Synthetic coding sequence
  source 1..813: mol_type = other DNA
atgtgcccagccaccaaccagtgcaccatcgacaagaacagaaggaagagctgccaggcctgccgcctgaggaaatgttatgaggtgggcatgatgaagggcggcatcaggaaggaccggcggggcggccgcatgctgaagcacaagaggcagagagatgatggagagggccgcggggaggtgggcagcgctggggacatgagagctgccaacctgtggcccagccccctgatgatcaagaggagcaagaagaacagcctggccctgagcctgacagctgaccagatggtgtctgccctgctggatgctgagccccccatcctgtacagtgaatatgaccccacccggcccttcagcgaggcctccatgatgggcctgctgaccaacctggccgaccgggagctggtgcacatgatcaactgggccaagagggtgcccggctttgtggacctgaccctgcatgaccaggtgcacctgctggagtgtgcctggctggagatcctgatgattggcctggtgtggaggtccatggagcaccctgggaagctgctgtttgcccccaacctgctgctggacagcaacaagggcatggagcacctgtacagcatgaagtgcaagaatgtggtgcccctgtatgacctgctgctggagatgctggatgcccaccggctgcacgcccccaccagcagaggaggagcctctgtggaggagacagaccagagccacctggccacagctggcagcaccagcagccacagcctgcagaagtactacatcaccggggaggccgagggcttccctgccaccgtgtag

SEQ ID NO: 19515 - DNA, 1572 bp, synthetic construct
  misc_feature 1..1572: note = Description of Artificial Sequence: Synthetic coding sequence
  source 1..1572: mol_type = other DNA
atgaccatgaccctgcacaccaaggccagcggcatggccctgctgcaccagatccagggcaatgagctggagcccccacccctgaacagcgtgagccccagccccctgatgctgctgcaccccccaccccagctgagccccttcctgcagccccacggccagcaggtgccctactacctggagaatgagcccagcggctacacagtgcgggaggccggccccccagccttctaccggcccaacagcgacaacagacggcagggcggccgggagcggctggccagcaccaatgacaagggctccatggccatggagagcgccaaggagacccgctactgtgctgtgtgcaatgactatgccagcggctaccactatggagtgtggagctgtgagggctgcaaggccttcttcaagaggagcatccagggccacaatgactacatgtgcccagccaccaaccagtgcaccatcgacaagaacagaaggaagagctgccaggcctgccgcctgaggaagtgctatgaggtgggcatgatgaagggcggcatcaggaaggacagaagaggaggccgcatgctgaagcacaagaggcagagagatgatggagagggccgcggggaggtgggcagcgctggggacatgagagctgccaacctgtggcccagccccctgatgatcaagaggagcaagaagaacagcctggccctgagcctgacagctgaccagatggtgtctgccctgctggatgctgagccccccatcctgtacagtgaatatgaccccacccggcccttcagcgaggcctccatgatgggcctgctgaccaacctggccgaccgggagctggtgcacatgatcaactgggccaagagggtgcccggctttgtggacctgaccctgcatgaccaggtgcacctgctggagtgtgcctggctggagatcctgatgattggcctggtgtggaggtccatggagcaccctgggaagctgctgtttgcccccaacctgctgctggacaggaaccagggcaaatgtgtggagggcatggtggagatctttgacatgctgctggccaccagcagccgcttcaggatgatgaacctgcagggcgaggagtttgtgtgcctgaagagcatcatcctgctgaacagcggcgtgtacaccttcctgagcagcaccctgaagagcctggaggagaaggaccacatccaccgggtgctggacaagatcacagacaccctcatccacctgatggccaaggccggcctgaccctgcagcagcagcaccagaggctggcccagctgctgctgatcctgagccacatccgccacatgagcaacaagggcatggagcacctgtacagcatgaagtgcaagaatgtggtgcccctgtatgacctgctgctggagatgctggatgcccaccggctgcacgcccccaccagccggggcggggcctctgtggaggagacagaccagagccacctggccacagctggcagcaccagcagccacagcctgcagaagtactacatcactggagaggccgagggcttccctgccaccgtgtag

SEQ ID NO: 19516 - DNA, 1788 bp, synthetic construct; identical to SEQ ID NO: 19508
  misc_feature 1..1788: note = Description of Artificial Sequence: Synthetic coding sequence
  source 1..1788: mol_type = other DNA

SEQ ID NO: 19517 - DNA, 1788 bp, synthetic construct; identical to SEQ ID NO: 19508
  misc_feature 1..1788: note = Description of Artificial Sequence: Synthetic coding sequence
  source 1..1788: mol_type = other DNA

SEQ ID NO: 19518 - DNA, 348 bp, synthetic construct
  misc_feature 1..348: note = Description of Artificial Sequence: Synthetic coding sequence
  source 1..348: mol_type = other DNA
atgaccatgaccctgcacaccaaggccagcggcatggccctgctgcaccagatccagggcaatgagctggagcccctgaaccggccccagctgaagatccccctggagcggcccctgggggaggtgtacctggacagcagcaagccagctgtgtacaactacccagagggcgccgcctatgagttcaatgctgctgctgctgccaatgcccaggtgtatggccagacaggcctgccctacggccctggcagcgaggccgccgccttcggcagcaatggcctgggcggcttcccccccctgaacagcgtgagccccagccccctgatgctgctgcaccccccaccctag

SEQ ID NO: 19519 - DNA, 1452 bp, synthetic construct
  misc_feature 1..1452: note = Description of Artificial Sequence: Synthetic coding sequence
  source 1..1452: mol_type = other DNA
atgaccatgaccctgcacaccaaggccagcggcatggccctgctgcaccagatccagggcaatgagctggagcccctgaaccggccccagctgaagatccccctggagcggcccctgggggaggtgtacctggacagcagcaagccagctgtgtacaactacccagagggcgccgcctatgagttcaatgctgctgctgctgccaatgcccaggtgtatggccagacaggcctgccctacggccctggcagcgaggccgccgccttcggcagcaatggcctgggcggcttcccccccctgaacagcgtgagccccagccccctgatgctgctgcaccccccaccccagctgagccccttcctgcagccccacggccagcaggtgccctactacctggagaatgagcccagcggctacacagtgcgggaggccggccccccagccttctaccggcccaacagcgacaacagacggcagggcggccgggagcggctggccagcaccaatgacaagggctccatggccatggagagcgccaaggagacccgctactgtgctgtgtgcaatgactatgccagcggctaccactatggagtgtggagctgtgagggctgcaaggccttcttcaagaggagcatccagggccacaatgactacatgtgcccagccaccaaccagtgcaccatcgacaagaacagaaggaagagctgccaggcctgccgcctgaggaagtgctatgaggtgggcatgatgaagggcggctttgtggacctgaccctgcatgaccaggtgcacctgctggagtgtgcctggctggagatcctgatgattggcctggtgtggaggtccatggagcaccctgggaagctgctgtttgcccccaacctgctgctggacaggaaccagggcaaatgtgtggagggcatggtggagatctttgacatgctgctggccaccagcagccgcttcaggatgatgaacctgcagggcgaggagtttgtgtgcctgaagagcatcatcctgctgaacagcggcgtgtacaccttcctgagcagcaccctgaagagcctggaggagaaggaccacatccaccgggtgctggacaagatcacagacaccctcatccacctgatggccaaggccggcctgaccctgcagcagcagcaccagaggctggcccagctgctgctgatcctgagccacatccgccacatgagcaacaagggcatggagcacctgtacagcatgaagtgcaagaatgtggtgcccctgtatgacctgctgctggagatgctggatgcccaccggctgcacgcccccaccagccggggcggggcctctgtggaggagacagaccagagccacctggccacagctggcagcaccagcagccacagcctgcagaagtactacatcactggagaggccgagggcttccctgccaccgtgtag

SEQ ID NO: 19520 - DNA, 933 bp, synthetic construct
  misc_feature 1..933: note = Description of Artificial Sequence: Synthetic coding sequence
  source 1..933: mol_type = other DNA
atggccatggagagcgccaaggagacccgctactgtgctgtgtgcaatgactatgccagcggctaccactacggcgtgtggagctgtgagggctgcaaggccttcttcaagaggagcatccagggccacaatgactacatgtgcccagccaccaaccagtgcaccatcgacaagaacagaaggaagagctgccaggcctgccgcctgaggaaatgttatgaggtgggcatgatgaagggcggcatcaggaaggaccggcggggcggccgcatgctgaagcacaagaggcagagagatgatggagagggccgcggggaggtgggcagcgctggggacatgagagctgccaacctgtggcccagccccctgatgatcaagaggagcaagaagaacagcctggccctgagcctgacagctgaccagatggtgtctgccctgctggatgctgagccccccatcctgtacagtgaatatgaccccacccggcccttcagcgaggcctccatgatgggcctgctgaccaacctggccgaccgggagctggtgcacatgatcaactgggccaagagggtgcccggctttgtggacctgaccctgcatgaccaggtgcacctgctggagtgtgcctggctggagatcctgatgattggcctggtgtggaggtccatggagcaccctgggaagctgctgtttgcccccaacctgctgctggacaggaaccagggcaaatgtgtggagggcatggtggagatctttgacatgctgctggccaccagcagccgcttcaggatgatgaacctgcagggcgaggagtttgtgtgcctgaagagcatcatcctgctgaacagcggcatcagccacgtggaggccaagaagaggatcctgaacctgcaccccaagatcttcggcaacaagtggttcccccgggtgtag

SEQ ID NO: 19521 - DNA, 1320 bp, synthetic construct
  misc_feature 1..1320: note = Description of Artificial Sequence: Synthetic coding sequence
  source 1..1320: mol_type = other DNA
atggacatcaagaacagccccagcagcctgaacagccccagcagctacaactgcagccagagcatcctgcccctggagcacggcagcatctacatccccagcagctatgtggacagccaccacgagtacccagccatgaccttctacagccctgctgtgatgaactacagcatccccagcaatgtgaccaacctggagggcggccctggccggcagaccaccagccccaacgtgctgtggcccaccccaggccacctgagccccctggtggtgcaccggcagctgagccacctgtatgcagagccccagaagagcccctggtgtgaggcccggagcctggagcacaccctgcctgtgaaccgggagaccctgaagaggaaggtgtctggcaacagatgtgccagccctgtgacaggccctggcagcaagagagatgcccacttctgtgctgtgtgcagcgactatgccagcggctaccactatggagtgtggagctgtgagggctgcaaggccttcttcaagaggagcatccagggccacaatgactacatctgcccagccaccaaccagtgcaccatcgacaagaacagaaggaagagctgccaggcctgccgcctgaggaagtgctatgaggtgggcatggtgaagtgtggcagccggcgggagcgctgtggctaccgcctggtgcggcggcagaggtctgcagatgagcagctgcactgtgccggcaaggccaagaggtctgggggccacgccccccgggtgcgggagctgctgctggatgccctgagccctgagcagctggtgctgaccctgctggaggccgagccccctcatgtgctgatcagccggcccagcgcccccttcacagaggcctccatgatgatgagcctgaccaagctggccgacaaggagctggtgcacatgatctcctgggccaagaagatccctggcatgtaccccctggtgacagccacccaggatgctgacagcagcaggaagctggcccacctgctgaatgctgtgacagatgccctggtgtgggtgattgccaagagcggcatcagcagccagcagcagagcatgaggctggccaacctgctgatgctgctgagccacgtgagacatgccagcaacaagggcatggagcacctgctgaacatgaagtgcaagaatgtggtgcctgtgtatgacctgctgctggagatgctgaatgcccacgtgctgcggggctgcaagagcagcatcactggaagtgagtgcagccctgctgaggacagcaagagcaaggagggcagccagaacccccagagccagtag

SEQ ID NO: 19522 - DNA, 1593 bp, synthetic construct
  misc_feature 1..1593: note = Description of Artificial Sequence: Synthetic coding sequence
  source 1..1593: mol_type = other DNA
atggacatcaagaacagccccagcagcctgaacagccccagcagctacaactgcagccagagcatcctgcccctggagcacggcagcatctacatccccagcagctatgtggacagccaccacgagtacccagccatgaccttctacagccctgctgtgatgaactacagcatccccagcaatgtgaccaacctggagggcggccctggccggcagaccaccagccccaacgtgctgtggcccaccccaggccacctgagccccctggtggtgcaccggcagctgagccacctgtatgcagagccccagaagagcccctggtgtgaggcccggagcctggagcacaccctgcctgtgaaccgggagaccctgaagaggaaggtgtctggcaacagatgtgccagccctgtgacaggccctggcagcaagagagatgcccacttctgtgctgtgtgcagcgactatgccagcggctaccactatggagtgtggagctgtgagggctgcaaggccttcttcaagaggagcatccagggccacaatgactacatctgcccagccaccaaccagtgcaccatcgacaagaacagaaggaagagctgccaggcctgccgcctgaggaagtgctatgaggtgggcatggtgaagtgtggcagccggcgggagcgctgtggctaccgcctggtgcggcggcagaggtctgcagatgagcagctgcactgtgccggcaaggccaagaggtctgggggccacgccccccgggtgcgggagctgctgctggatgccctgagccctgagcagctggtgctgaccctgctggaggccgagccccctcatgtgctgatcagccggcccagcgcccccttcacagaggcctccatgatgatgagcctgaccaagctggccgacaaggagctggtgcacatgatctcctgggccaagaagatccctggctttgtggagctgagcctgtttgaccaggtgcggctgctggagagctgctggatggaggtgctgatgatgggcctgatgtggaggagcattgaccaccctgggaagctgatctttgccccagacctggtgctggacagagatgagggcaaatgtgtggagggcatcctggagatctttgacatgctgctggccaccaccagccgcttccgggagctgaagctgcagcacaaggagtacctgtgtgtgaaggccatgatcctgctgaacagctccatgtaccccctggtgacagccacccaggatgctgacagcagcaggaagctggcccacctgctgaatgctgtgacagatgccctggtgtgggtgattgccaagagcggcatcagcagccagcagcagagcatgaggctggccaacctgctgatgctgctgagccacgtgagacatgccagcaacaagggcatggagcacctgctgaacatgaagtgcaagaatgtggtgcctgtgtatgacctgctgctggagatgctgaatgcccacgtgctgcggggctgcaagagcagcatcaccggctctgaatgttctccagctgaggacagcaagagcaaggagggcagccagaacccccagagccagtag

SEQ ID NO: 19523 - DNA, 1488 bp, synthetic construct
  misc_feature 1..1488: note = Description of Artificial Sequence: Synthetic coding sequence
  source 1..1488: mol_type = other DNA
atggacatcaagaacagccccagcagcctgaacagccccagcagctacaactgcagccagagcatcctgcccctggagcacggcagcatctacatccccagcagctatgtggacagccaccacgagtacccagccatgaccttctacagccctgctgtgatgaactacagcatccccagcaatgtgaccaacctggagggcggccctggccggcagaccaccagccccaacgtgctgtggcccaccccaggccacctgagccccctggtggtgcaccggcagctgagccacctgtatgcagagccccagaagagcccctggtgtgaggcccggagcctggagcacaccctgcctgtgaaccgggagaccctgaagaggaaggtgtctggcaacagatgtgccagccctgtgacaggccctggcagcaagagagatgcccacttctgtgctgtgtgcagcgactatgccagcggctaccactatggagtgtggagctgtgagggctgcaaggccttcttcaagaggagcatccagggccacaatgactacatctgcccagccaccaaccagtgcaccatcgacaagaacagaaggaagagctgccaggcctgccgcctgaggaagtgctatgaggtgggcatggtgaagtgtggcagccggcgggagcgctgtggctaccgcctggtgcggcggcagaggtctgcagatgagcagctgcactgtgccggcaaggccaagaggtctgggggccacgccccccgggtgcgggagctgctgctggatgccctgagccctgagcagctggtgctgaccctgctggaggccgagccccctcatgtgctgatcagccggcccagcgcccccttcacagaggcctccatgatgatgagcctgaccaagctggccgacaaggagctggtgcacatgatctcctgggccaagaagatccctggctttgtggagctgagcctgtttgaccaggtgcggctgctggagagctgctggatggaggtgctgatgatgggcctgatgtggaggagcattgaccaccctgggaagctgatctttgccccagacctggtgctggacagagatgagggcaaatgtgtggagggcatcctggagatctttgacatgctgctggccaccaccagccgcttccgggagctgaagctgcagcacaaggagtacctgtgtgtgaaggccatgatcctgctgaacagctccatgtaccccctggtgacagccacccaggatgctgacagcagcaggaagctggcccacctgctgaatgctgtgacagatgccctggtgtgggtgattgccaagagcggcatcagcagccagcagcagagcatgaggctggccaacctgctgatgctgctgagccacgtgagacatgcccgggcagagaaggccagccagaccctgaccagctttggcatgaagatggagaccctgctgcctgaggccaccatggagcagtag

SEQ ID NO: 19524 - DNA, 1446 bp, synthetic construct
  misc_feature 1..1446: note = Description of Artificial Sequence: Synthetic coding sequence
  source 1..1446: mol_type = other DNA
atggacatcaagaacagccccagcagcctgaacagccccagcagctacaactgcagccagagcatcctgcccctggagcacggcagcatctacatccccagcagctatgtggacagccaccacgagtacccagccatgaccttctacagccctgctgtgatgaactacagcatccccagcaatgtgaccaacctggagggcggccctggccggcagaccaccagccccaacgtgctgtggcccaccccaggccacctgagccccctggtggtgcaccggcagctgagccacctgtatgcagagccccagaagagcccctggtgtgaggcccggagcctggagcacaccctgcctgtgaaccgggagaccctgaagaggaaggtgtctggcaacagatgtgccagccctgtgacaggccctggcagcaagagagatgcccacttctgtgctgtgtgcagcgactatgccagcggctaccactatggagtgtggagctgtgagggctgcaaggccttcttcaagaggagcatccagggccacaatgactacatctgcccagccaccaaccagtgcaccatcgacaagaacagaaggaagagctgccaggcctgccgcctgaggaagtgctatgaggtgggcatggtgaagtgtggcagccggcgggagcgctgtggctaccgcctggtgcggcggcagaggtctgcagatgagcagctgcactgtgccggcaaggccaagaggtctgggggccacgccccccgggtgcgggagctgctgctggatgccctgagccctgagcagctggtgctgaccctgctggaggccgagccccctcatgtgctgatcagccggcccagcgcccccttcacagaggcctccatgatgatgagcctgaccaagctggccgacaaggagctggtgcacatgatctcctgggccaagaagatccctggctttgtggagctgagcctgtttgaccaggtgcggctgctggagagctgctggatggaggtgctgatgatgggcctgatgtggaggagcattgaccaccctgggaagctgatctttgccccagacctggtgctggacagagatgagggcaaatgtgtggagggcatcctggagatctttgacatgctgctggccaccaccagccgcttccgggagctgaagctgcagcacaaggagtacctgtgtgtgaaggccatgatcctgctgaacagctccatgtaccccctggtgacagccacccaggatgctgacagcagcaggaagctggcccacctgctgaatgctgtgacagatgccctggtgtgggtgattgccaagagcggcatcagcagccagcagcagagcatgaggctggccaacctgctgatgctgctgagccacgtgagacatgcccgctggggcgagaagcagttcatccacctgaagctgtcctag

SEQ ID NO: 19525 - DNA, 1488 bp, synthetic construct; identical to SEQ ID NO: 19523
  misc_feature 1..1488: note = Description of Artificial Sequence: Synthetic coding sequence
  source 1..1488: mol_type = other DNA

SEQ ID NO: 19526 - DNA, 1542 bp, synthetic construct
  misc_feature 1..1542: note = Description of Artificial Sequence: Synthetic coding sequence
  source 1..1542: mol_type = other DNA
atggacatcaagaacagccccagcagcctgaacagccccagcagctacaactgcagccagagcatcctgcccctggagcacggcagcatctacatccccagcagctatgtggacagccaccacgagtacccagccatgaccttctacagccctgctgtgatgaactacagcatccccagcaatgtgaccaacctggagggcggccctggccggcagaccaccagccccaacgtgctgtggcccaccccaggccacctgagccccctggtggtgcaccggcagctgagccacctgtatgcagagccccagaagagcccctggtgtgaggcccggagcctggagcacaccctgcctgtgaaccgggagaccctgaagaggaaggtgtctggcaacagatgtgccagccctgtgacaggccctggcagcaagagagatgcccacttctgtgctgtgtgcagcgactatgccagcggctaccactatggagtgtggagctgtgagggctgcaaggccttcttcaagaggagcatccagggccacaatgactacatctgcccagccaccaaccagtgcaccatcgacaagaacagaaggaagagctgccaggcctgccgcctgaggaagtgctatgaggtgggcatggtgaagtgtggcagccggcgggagcgctgtggctaccgcctggtgcggcggcagaggtctgcagatgagcagctgcactgtgccggcaaggccaagaggtctgggggccacgccccccgggtgcgggagctgctgctggatgccctgagccctgagcagctggtgctgaccctgctggaggccgagccccctcatgtgctgatcagccggcccagcgcccccttcacagaggcctccatgatgatgagcctgaccaagctggccgacaaggagctggtgcacatgatctcctgggccaagaagatccctggctttgtggagctgagcctgtttgaccaggtgcggctgctggagagctgctggatggaggtgctgatgatgggcctgatgtggaggagcattgaccaccctgggaagctgatctttgccccagacctggtgctggacagagatgagggcaaatgtgtggagggcatcctggagatctttgacatgctgctggccaccaccagccgcttccgggagctgaagctgcagcacaaggagtacctgtgtgtgaaggccatgatcctgctgaacagctccatgtaccccctggtgacagccacccaggatgctgacagcagcaggaagctggcccacctgctgaatgctgtgacagatgccctggtgtgggtgattgccaagagcggcatcagcagccagcagcagagcatgaggctggccaacctgctgatgctgctgagccacgtgagacatgccagcagcctgagcctgtcctggaggctcttcatgctgcgggaggccagctgccacggcgtgcggcagacccctgggggcgcccacgtgtctgtgagccgcagccgcagctttgaggcctgccagcagccccgggagtag

SEQ ID NO: 19527 - DNA, 1488 bp, synthetic construct; identical to SEQ ID NO: 19523
  misc_feature 1..1488: note = Description of Artificial Sequence: Synthetic coding sequence
  source 1..1488: mol_type = other DNA

SEQ ID NO: 19528 - DNA, 1419 bp, synthetic construct
  misc_feature 1..1419: note = Description of Artificial Sequence: Synthetic coding sequence
  source 1..1419: mol_type = other DNA
atggacatcaagaacagccccagcagcctgaacagccccagcagctacaactgcagccagagcatcctgcccctggagcacggcagcatctacatccccagcagctatgtggacagccaccacgagtacccagccatgaccttctacagccctgctgtgatgaactacagcatccccagcaatgtgaccaacctggagggcggccctggccggcagaccaccagccccaacgtgctgtggcccaccccaggccacctgagccccctggtggtgcaccggcagctgagccacctgtatgcagagccccagaagagcccctggtgtgaggcccggagcctggagcacaccctgcctgtgaaccgggagaccctgaagaggaaggtgtctggcaacagatgtgccagccctgtgacaggccctggcagcaagagagatgcccacttctgtgctgtgtgcagcgactatgccagcggctaccactatggagtgtggagctgtgagggctgcaaggccttcttcaagaggagcatccagggccacaatgactacatctgcccagccaccaaccagtgcaccatcgacaagaacagaaggaagagctgccaggcctgccgcctgaggaagtgctatgaggtgggcatggtgaagtgtggcagccggcgggagcgctgtggctaccgcctggtgcggcggcagaggtctgcagatgagcagctgcactgtgccggcaaggccaagaggtctgggggccacgccccccgggtgcgggagctgctgctggatgccctgagccctgagcagctggtgctgaccctgctggaggccgagccccctcatgtgctgatcagccggcccagcgcccccttcacagaggcctccatgatgatgagcctgaccaagctggccgacaaggagctggtgcacatgatctcctgggccaagaagatccctggctttgtggagctgagcctgtttgaccaggtgcggctgctggagagctgctggatggaggtgctgatgatgggcctgatgtggaggagcattgaccaccctgggaagctgatctttgccccagacctggtgctggacagagatgagggcaaatgtgtggagggcatcctggagatctttgacatgctgctggccaccaccagccgcttccgggagctgaagctgcagcacaaggagtacctgtgtgtgaaggccatgatcctgctgaacagctccatgtaccccctggtgacagccacccaggatgctgacagcagcaggaagctggcccacctgctgaatgctgtgacagatgccctggtgtgggtgattgccaagagcggcatcagcagccagcagcagagcatgaggctggccaacctgctgatgctgctgagccacgtgagacatgcccgctatgccccctag

SEQ ID NO: 19529 - DNA, 1446 bp, synthetic construct; identical to SEQ ID NO: 19524
  misc_feature 1..1446: note = Description of Artificial Sequence: Synthetic coding sequence
  source 1..1446: mol_type = other DNA

SEQ ID NO: 19530 - DNA, 1380 bp, synthetic construct
  misc_feature 1..1380: note = Description of Artificial Sequence: Synthetic coding sequence
  source 1..1380: mol_type = other DNA
atggatggcttctatgaccagcaggtgccctacatggtgaccaacagccagaggggcaggaactgcaatgagaagcccaccaacgtgaggaagaggaagttcatcaacagagacctggcccatgattctgaggagctgttccaggacctgagccagctgcaggagacctggctggccgaggtggccttccacggcctgcccctgaagatcaagaaggagccccacagcccctgcagcgagatcagcagcgcctgcagccaggagcagcccttcaagttctcctatggagagaagtgcctgtacaacgtgtctgcctatgaccagaagccccaggtgggcatgaggcccagcaacccccccacccccagcagcacccctgtgagccccctgcaccacgccagccccaacagcacccacacccccaagccagaccgggccttccctgcccacctgccccccagccagagcatcccagacagcagctaccccatggaccaccgcttccggcggcagctgtctgagccctgcaacagcttcccccccctgcccaccatgccccgggagggccggcccatgtaccagaggcagatgtctgagcccaacatccccttccccccccagggcttcaagcaggagtaccatgaccctgtgtatgagcacaacaccatggtgggcagcgctgccagccagagcttccccccacccctgatgatcaagcaggagccccgggactttgcctatgattctgaggtgcccagctgccacagcatctacatgaggcaggagggcttcctggcccaccccagcaggacagagggctgcatgtttgagaagggcccccggcagttctatgatgacacctgtgtggtgcctgagaagtttgatggagacatcaagcaggagcccggcatgtaccgggagggccccacctaccagaggcggggcagcctgcagctgtggcagttcctggtggccctgctggatgaccccagcaacagccacttcatcgcctggacaggccggggcatggagttcaagctgattgagcctgaggaggtggcccggcgctggggcatccagaagaacagacctgccatgaactatgacaagctgagccgcagcctgcgctactactatgagaagggcatcatgcagaaggtggccggggagcgctacgtgtacaagtttgtgtgtgaccctgaggccctcttctccatggccttcccagacaaccagaggcccctgctgaagacagacatggagcggcacatcaatgaagaagatactgtgcccctgagccactttgatgagagcatggcctacatgcctgagggcggctgctgcaacccccacccctacaatgaaggctacgtgtactag

SEQ ID NO: 19531 - DNA, 1380 bp, synthetic construct; identical to SEQ ID NO: 19530
  misc_feature 1..1380: note = Description of Artificial Sequence: Synthetic coding sequence
  source 1..1380: mol_type = other DNA

SEQ ID NO: 19532 - DNA, 1125 bp, synthetic construct
  misc_feature 1..1125: note = Description of Artificial Sequence: Synthetic coding sequence
  source 1..1125: mol_type = other DNA
atgctgcaggacctgagcgccagcgtcttcttccccccctgcagccagcacaggaccctggcccaggtgcctgacaatgatgagcagtttgtgcctgactaccaggccgagagcctggccttccacggcctgcccctgaagatcaagaaggagccccacagcccctgcagcgagatcagcagcgcctgcagccaggagcagcccttcaagttctcctatggagagaagtgcctgtacaacgtgcgcttccggcggcagctgtctgagccctgcaacagcttcccccccctgcccaccatgccccgggagggccggcccatgtaccagaggcagatgtctgagcccaacatccccttccccccccagggcttcaagcaggagtaccatgaccctgtgtatgagcacaacaccatggtgggcagcgctgccagccagagcttccccccacccctgatgatcaagcaggagccccgggactttgcctatgacagcgaggtgcccagctgccacagcatctacatgaggcaggagggcttcctggcccaccccagcaggacagagggctgcatgtttgagaagggcccccggcagttctatgatgacacctgtgtggtgcctgagaagtttgatggagacatcaagcaggagcccggcatgtaccgggagggccccacctaccagaggcggggcagcctgcagctgtggcagttcctggtggccctgctggatgaccccagcaacagccacttcatcgcctggacaggccggggcatggagttcaagctgattgagcctgaggaggtggcccggcgctggggcatccagaagaacagacctgccatgaactatgacaagctgagccgcagcctgcgctactactatgagaagggcatcatgcagaaggtggccggggagagatatgtgtacaagtttgtgtgtgaccctgaggccctcttctccatggccttcccagacaaccagaggcccctgctgaagacagacatggagcggcacatcaatgaggaggacacagtgcccctgagccactttgatgagagcatggcctacatgcctgagggcggctgctgcaacccccacccctacaatgaaggctacgtgtactag

SEQ ID NO: 19533 - DNA, 1380 bp, synthetic construct; identical to SEQ ID NO: 19530
  misc_feature 1..1380: note = Description of Artificial Sequence: Synthetic coding sequence
  source 1..1380: mol_type = other DNA

SEQ ID NO: 19534 - DNA, 1434 bp, synthetic construct
  misc_feature 1..1434: note = Description of Artificial Sequence: Synthetic coding sequence
  source 1..1434: mol_type = other DNA
atggatggcttctatgaccagcaggtgccctacatggtgaccaacagccagaggggcaggaactgcaatgagaagcccaccaacgtgaggaagaggaagttcatcaacagagacctggcccatgattctgaggagctgttccaggacctgagccagctgcaggagacctggctggccgaggcccaggtgcctgacaatgatgagcagtttgtgcctgactaccaggccgagagcctggccttccacggcctgcccctgaagatcaagaaggagccccacagcccctgcagcgagatcagcagcgcctgcagccaggagcagcccttcaagttctcctatggagagaagtgcctgtacaacgtgtctgcctatgaccagaagccccaggtgggcatgaggcccagcaacccccccacccccagcagcacccctgtgagccccctgcaccacgccagccccaacagcacccacacccccaagccagaccgggccttccctgcccacctgccccccagccagagcatcccagacagcagctaccccatggaccaccgcttccggcggcagctgtctgagccctgcaacagcttcccccccctgcccaccatgccccgggagggccggcccatgtaccagaggcagatgtctgagcccaacatccccttccccccccagggcttcaagcaggagtaccatgaccctgtgtatgagcacaacaccatggtgggcagcgctgccagccagagcttccccccacccctgatgatcaagcaggagccccgggactttgcctatgattctgaggtgcccagctgccacagcatctacatgaggcaggagggcttcctggcccaccccagcaggacagagggctgcatgtttgagaagggcccccggcagttctatgatgacacctgtgtggtgcctgagaagtttgatggagacatcaagcaggagcccggcatgtaccgggagggccccacctaccagaggcggggcagcctgcagctgtggcagttcctggtggccctgctggatgaccccagcaacagccacttcatcgcctggacaggccggggcatggagttcaagctgattgagcctgaggaggtggcccggcgctggggcatccagaagaacagacctgccatgaactatgacaagctgagccgcagcctgcgctactactatgagaagggcatcatgcagaaggtggccggggagcgctacgtgtacaagtttgtgtgtgaccctgaggccctcttctccatggccttcccagacaaccagaggcccctgctgaagacagacatggagcggcacatcaatgaagaagatactgtgcccctgagccactttgatgagagcatggcctacatgcctgagggcggctgctgcaacccccacccctacaatgaaggctacgtgtactag

SEQ ID NO: 19535 - DNA, 1260 bp, synthetic construct
  misc_feature 1..1260: note = Description of Artificial Sequence: Synthetic coding sequence
  source 1..1260: mol_type = other DNA
atgctgcaggacctgagcgccagcgtcttcttccccccctgcagccagcacaggaccctggtggccttccacggcctgcccctgaagatcaagaaggagccccacagcccctgcagcgagatcagcagcgcctgcagccaggagcagcccttcaagttctcctatggagagaagtgcctgtacaacgtgtctgcctatgaccagaagccccaggtgggcatgaggcccagcaacccccccacccccagcagcacccctgtgagccccctgcaccacgccagccccaacagcacccacacccccaagccagaccgggccttccctgcccacctgccccccagccagagcatcccagacagcagctaccccatggaccaccgcttccggcggcagctgtctgagccctgcaacagcttcccccccctgcccaccatgccccgggagggccggcccatgtaccagaggcagatgtctgagcccaacatccccttccccccccagggcttcaagcaggagtaccatgaccctgtgtatgagcacaacaccatggtgggcagcgctgccagccagagcttccccccacccctgatgatcaagcaggagccccgggactttgcctatgattctgaggtgcccagctgccacagcatctacatgaggcaggagggcttcctggcccaccccagcaggacagagggctgcatgtttgagaagggcccccggcagttctatgatgacacctgtgtggtgcctgagaagtttgatggagacatcaagcaggagcccggcatgtaccgggagggccccacctaccagaggcggggcagcctgcagctgtggcagttcctggtggccctgctggatgaccccagcaacagccacttcatcgcctggacaggccggggcatggagttcaagctgattgagcctgaggaggtggcccggcgctggggcatccagaagaacagacctgccatgaactatgacaagctgagccgcagcctgcgctactactatgagaagggcatcatgcagaaggtggccggggagcgctacgtgtacaagtttgtgtgtgaccctgaggccctcttctccatggccttcccagacaaccagaggcccctgctgaagacagacatggagcggcacatcaatgaagaagatactgtgcccctgagccactttgatgagagcatggcctacatgcctgagggcggctgctgcaacccccacccctacaatgaaggctacgtgtactag

SEQ ID NO: 19536 - DNA, 372 bp, synthetic construct
  misc_feature 1..372: note = Description of Artificial Sequence: Synthetic coding sequence
  source 1..372: mol_type = other DNA
atggatggcttctatgaccagcaggtgccctacatggtgaccaacagccagaggggcaggaactgcaatgagaagcccaccaacgtgaggaagaggaagttcatcaacagagacctggcccatgattctgaggagctgttccaggacctgagccagctgcaggagacctggctggccgaggcccaggtgcctgacaatgatgagcagtttgtgcctgactaccaggccgagagcctggccttccacggcctgcccctgaagatcaagaaggagccccacagcccctgcagcgagatcagcagcgcctgcagccaggagcagcccttcaagttctcctatggagagaagtgcctgtacaacgtgtctgcctag

SEQ ID NO: 19537 - DNA, 1434 bp, synthetic construct; identical to SEQ ID NO: 19534
  misc_feature 1..1434: note = Description of Artificial Sequence: Synthetic coding sequence
  source 1..1434: mol_type = other DNA

SEQ ID NO: 19538 - DNA, 288 bp, synthetic construct
  misc_feature 1..288: note = Description of Artificial Sequence: Synthetic coding sequence
  source 1..288: mol_type = other DNA
atggatggcttctatgaccagcaggtgccctacatggtgaccaacagccagaggggcaggaactgcaatgagaagcccaccaacgtgaggaagaggaagttcatcaacagagacctggcccatgattctgaggagctgttccaggacctgagccagctgcaggagacctggctggccgaggcccaggtgcctgacaatgatgagcagtttgtgcctgactaccaggccgagagcctggccttccacggcctgcccctgaagatcaagaaggagccccacagcccctag

SEQ ID NO: 19539 - DNA, 63 bp, synthetic construct
  misc_feature 1..63: note = Description of Artificial Sequence: Synthetic coding sequence
  source 1..63: mol_type = other DNA
atggatggcttctatgaccagcaggtgccctacatggtgaccaacagccagaggggccgctag

SEQ ID NO: 19540 - DNA, 1314 bp, synthetic construct
  misc_feature 1..1314: note = Description of Artificial Sequence: Synthetic coding sequence
  source 1..1314: mol_type = other DNA
atgctgcaggacctgagcgccagcgtcttcttccccccctgcagccagcacaggaccctggcccaggtgcctgacaatgatgagcagtttgtgcctgactaccaggccgagagcctggccttccacggcctgcccctgaagatcaagaaggagccccacagcccctgcagcgagatcagcagcgcctgcagccaggagcagcccttcaagttctcctatggagagaagtgcctgtacaacgtgtctgcctatgaccagaagccccaggtgggcatgaggcccagcaacccccccacccccagcagcacccctgtgagccccctgcaccacgccagccccaacagcacccacacccccaagccagaccgggccttccctgcccacctgccccccagccagagcatcccagacagcagctaccccatggaccaccgcttccggcggcagctgtctgagccctgcaacagcttcccccccctgcccaccatgccccgggagggccggcccatgtaccagaggcagatgtctgagcccaacatccccttccccccccagggcttcaagcaggagtaccatgaccctgtgtatgagcacaacaccatggtgggcagcgctgccagccagagcttccccccacccctgatgatcaagcaggagccccgggactttgcctatgattctgaggtgcccagctgccacagcatctacatgaggcaggagggcttcctggcccaccccagcaggacagagggctgcatgtttgagaagggcccccggcagttctatgatgacacctgtgtggtgcctgagaagtttgatggagacatcaagcaggagcccggcatgtaccgggagggccccacctaccagaggcggggcagcctgcagctgtggcagttcctggtggccctgctggatgaccccagcaacagccacttcatcgcctggacaggccggggcatggagttcaagctgattgagcctgaggaggtggcccggcgctggggcatccagaagaacagacctgccatgaactatgacaagctgagccgcagcctgcgctactactatgagaagggcatcatgcagaaggtggccggggagcgctacgtgtacaagtttgtgtgtgaccctgaggccctcttctccatggccttcccagacaaccagaggcccctgctgaagacagacatggagcggcacatcaatgaagaagatactgtgcccctgagccactttgatgagagcatggcctacatgcctgagggcggctgctgcaacccccacccctacaatgaaggctacgtgtactag

SEQ ID NO: 19541 - DNA, 1365 bp, synthetic construct
  misc_feature 1..1365: note = Description of Artificial Sequence: Synthetic coding sequence
  source 1..1365: mol_type = other DNA
atggatggcttctatgaccagcaggtgccctacatggtgaccaacagccagaggggcaggaactgcaatgagaagcccaccaacgtgaggaagaggaagttcatcaacagagacctggcccatgattctgaggagctgttccaggacctgagccagctgcaggagacctggctggccgaggcccaggtgcctgacaatgatgagcagtttgtgcctgactaccaggccgagagcctggccttccacggcctgcccctgaagatcaagaaggagccccacagcccctgcagcgagatcagcagcgcctgcagccaggagcagcccttcaagttctcctatggagagaagtgcctgtacaacgtgtctgcctatgaccagaagccccaggtgggcatgaggcccagcaacccccccacccccagcagcacccctgtgagccccctgcaccacgccagccccaacagcacccacacccccaagccagaccgggccttccctgcccacctgccccccagccagagcatcccagacagcagctaccccatggaccaccgcttccggcggcagctgtctgagccctgcaacagcttcccccccctgcccaccatgccccgggagggccggcccatgtaccagaggcagatgtctgagcccaacatccccttccccccccagggcttcaagcaggagtaccatgaccctgtgtatgagcacaacaccatggtgggcagcgctgccagccagagcttccccccacccctgatgatcaagcaggagccccgggactttgcctatgattctggctgcatgtttgagaagggcccccggcagttctatgatgacacctgtgtggtgcctgagaagtttgatggagacatcaagcaggagcccggcatgtaccgggagggccccacctaccagaggcggggcagcctgcagctgtggcagttcctggtggccctgctggatgaccccagcaacagccacttcatcgcctggacaggccggggcatggagttcaagctgattgagcctgaggaggtggcccggcgctggggcatccagaagaacagacctgccatgaactatgacaagctgagccgcagcctgcgctactactatgagaagggcatcatgcagaaggtggccggggagagatatgtgtacaagtttgtgtgtgaccctgaggccctcttctccatggccttcccagacaaccagaggcccctgctgaagacagacatggagcggcacatcaatgaggaggacacagtgcccctgagccactttgatgagagcatggcctacatgcctgagggcggctgctgcaacccccacccctacaatgaaggctacgtgtactag

SEQ ID NO: 19542 - DNA, 1455 bp, synthetic construct
  misc_feature 1..1455: note = Description of Artificial Sequence: Synthetic coding sequence
  source 1..1455: mol_type = other DNA
atggagaggaggatgaaggccggctacctggaccagcaggtgccctacaccttcagcagcaagagccctggaaatggcagcctgcgggaggccctgattggccccctgggcaagctgatggaccccggcagcctgccccccctggacagtgaagatctcttccaggacctgagccacttccaggagacctggctggccgaggcccaggtgcctgacagtgatgagcagtttgtgcctgacttccacagcgagaacctggccttccacagccccaccacccgcatcaagaaggagccccagagccccaggacagatcctgccctgagctgcagcaggaagccacccctgccctaccaccacggggagcagtgcctgtacagcagcgcctatgaccccccccggcagatcgccatcaagagccctgcccctggggccctgggccagagccccctgcagcccttccccagggctgagcagaggaacttcctgcggagcagcggcaccagccagccccaccctggccacggctacctgggggagcacagctctgtgttccagcagcccctggacatctgccacagcttcaccagccagggcggcggccgggagcccctgcctgccccctaccagcaccagctgtctgagccctgccccccctacccccagcagagcttcaagcaggagtaccatgaccccctgtatgagcaggccggccagcctgctgtggaccagggcggcgtgaatggccaccgctacccaggagctggggtggtgatcaagcaggagcagacagactttgcctatgacagtgatgtgacaggctgtgcctccatgtacctgcacacagagggcttcagcggccccagccctggagatggagccatgggctacggctatgagaagcccctgcggcccttcccagatgatgtgtgtgtggtgcctgagaagtttgaaggagacatcaagcaggagggcgtgggcgccttccgggagggccccccctaccagaggagaggagccctgcagctgtggcagttcctggtggccctgctggatgaccccaccaatgcccacttcatcgcctggacaggccggggcatggagttcaagctgattgagcctgaggaggtggcccggctgtggggcatccagaagaacagacctgccatgaactatgacaagctgagccgcagcctgcgctactactatgagaagggcatcatgcagaaggtggccggggagcgctacgtgtacaagtttgtgtgtgagcctgaggccctcttcagcctggccttcccagacaaccagaggcctgccctgaaggccgagtttgacaggcctgtgtctgaagaagatactgtgcccctgagccacctggatgagagccctgcctacctgcctgagctggccggccctgcccagcccttcggccccaagggcggctacagctactag

SEQ ID NO: 19543 - DNA, 1455 bp, synthetic construct; identical to SEQ ID NO: 19542
  misc_feature 1..1455: note = Description of Artificial Sequence: Synthetic coding sequence
  source 1..1455: mol_type = other DNA

SEQ ID NO: 19544 - DNA, 1338 bp, synthetic construct
  misc_feature 1..1338: note = Description of Artificial Sequence: Synthetic coding sequence
  source 1..1338: mol_type = other DNA
atggaccccggcagcctgccccccctggacagcgaggacctcttccaggacctgagccacttccaggagacctggctggccgaggcccaggtgcctgacagtgatgagcagtttgtgcctgacttccacagcgagaacctggccttccacagccccaccacccgcatcaagaaggagccccagagccccaggacagatcctgccctgagctgcagcaggaagccacccctgccctaccaccacggggagcagtgcctgtacagcagcgcctatgaccccccccggcagatcgccatcaagagccctgcccctggggccctgggccagagccccctgcagcccttccccagggctgagcagaggaacttcctgcggagcagcggcaccagccagccccaccctggccacggctacctgggggagcacagcagcgtcttccagcagcccctggacatctgccacagcttcaccagccagggcggcggccgggagcccctgcctgccccctaccagcaccagctgtctgagccctgccccccctacccccagcagagcttcaagcaggagtaccatgaccccctgtatgagcaggccggccagcctgctgtggaccagggcggcgtgaatggccaccgctacccaggggccggcgtggtgatcaagcaggagcagacagactttgcctatgacagtgatgtgacaggctgtgcctccatgtacctgcacacagagggcttcagcggccccagccctggagatggagccatgggctacggctatgagaagcccctgcggcccttcccagatgatgtgtgtgtggtgcctgagaagtttgaaggagacatcaagcaggagggcgtgggcgccttccgggagggccccccctaccagaggagaggagccctgcagctgtggcagttcctggtggccctgctggatgaccccaccaatgcccacttcatcgcctggacaggccggggcatggagttcaagctgattgagcctgaggaggtggcccggctgtggggcatccagaagaacagacctgccatgaactatgacaagctgagccgcagcctgcgctactactatgagaagggcatcatgcagaaggtggccggggagagatatgtgtacaagtttgtgtgtgagcctgaggccctcttcagcctggccttcccagacaaccagaggcctgccctgaaggccgagtttgacaggcctgtgtctgaggaggacacagtgcccctgagccacctggatgagagccctgcctacctgcctgagctggccggccctgcccagcccttcggccccaagggcggctacagctactag

SEQ ID NO: 19545 - DNA, 1293 bp, synthetic construct
  misc_feature 1..1293: note = Description of Artificial Sequence: Synthetic coding sequence
  source 1..1293: mol_type = other DNA
atggagaggaggatgaaggccggctacctggaccagcaggtgccctacaccttcagcagcaagagccctggaaatggcagcctgcgggaggccctgattggccccctgggcaagctgatggaccccggcagcctgccccccctggacagtgaagatctcttccaggacctgagccacttccaggagacctggctggccgaggcccaggtgcctgacagtgatgagcagtttgtgcctgacttccacagcgagaacctggccttccacagccccaccacccgcatcaagaaggagccccagagccccaggacagatcctgccctgagctgcagcaggaagccacccctgccctaccaccacggggagcagtgcctgtacagcagctctgtgttccagcagcccctggacatctgccacagcttcaccagccagggcggcggccgggagcccctgcctgccccctaccagcaccagctgtctgagccctgccccccctacccccagcagagcttcaagcaggagtaccatgaccccctgtatgagcaggccggccagcctgctgtggaccagggcggcgtgaatggccaccgctacccaggagctggggtggtgatcaagcaggagcagacagactttgcctatgacagtgatgtgacaggctgtgcctccatgtacctgcacacagagggcttcagcggccccagccctggagatggagccatgggctacggctatgagaagcccctgcggcccttcccagatgatgtgtgtgtggtgcctgagaagtttgaaggagacatcaagcaggagggcgtgggcgccttccgggagggccccccctaccagaggagaggagccctgcagctgtggcagttcctggtggccctgctggatgaccccaccaatgcccacttcatcgcctggacaggccggggcatggagttcaagctgattgagcctgaggaggtggcccggctgtggggcatccagaagaacagacctgccatgaactatgacaagctgagccgcagcctgcgctactactatgagaagggcatcatgcagaaggtggccggggagcgctacgtgtacaagtttgtgtgtgagcctgaggccctcttcagcctggccttcccagacaaccagaggcctgccctgaaggccgagtttgacaggcctgtgtctgaagaagatactgtgcccctgagccacctggatgagagccctgcctacctgcctgagctggccggccctgcccagcccttcggccccaagggcggctacagctactag

SEQ ID NO: 19546 - DNA, 1338 bp, synthetic construct; identical to SEQ ID NO: 19544
  misc_feature 1..1338: note = Description of Artificial Sequence: Synthetic coding sequence
  source 1..1338: mol_type = other DNA

SEQ ID NO: 19547 - DNA, 1791 bp, synthetic construct
  misc_feature 1..1791: note = Description of Artificial Sequence: Synthetic coding sequence
  source 1..1791: mol_type = other DNA
atggccggccggcgggtgaatgtgaatgtgggcgtgctgggccacatcgacagcggcaagacagccctggcccgggccctgagcaccacagccagcacagctgcctttgacaagcagccccagagccgggagcggggcatcaccctggacctgggcttcagctgcttctctgtgcccctgcctgcccggctgcggagcagcctgcctgagttccaggccgcccctgaggccgagcctgagcctggagagcccctgctgcaggtgaccctggtggactgccccggccacgccagcctcatccgcaccatcatcggcggggcccagatcatcgacctgatgatgctggtgattgatgtgaccaagggcatgcagacccagagcgcagaatgtctggtgattggccagatcgcctgccagaagctggtggtggtgctgaacaagattgacctgctgcctgagggcaagaggcaggccgccatcgacaagatgaccaagaagatgcagaagaccctggagaacaccaagttccggggggcccccatcatccctgtggccgccaagccaggcggccctgaggcccctgagacagaggccccccagggcatccctgagctgattgagctgctgaccagccagatcagcatccccacccgggaccccagcggccccttcctgatgtctgtggaccactgcttcagcatcaagggccagggcaccgtgatgacaggcaccatcctgagcggcagcatcagcctgggggacagcgtggagatcccagccctgaaggtggtgaagaaggtgaagtccatgcagatgttccacatgcccatcaccagcgccatgcagggcgaccggctgggcatctgtgtgacccagtttgaccccaagctgctggagcggggcctggtgtgtgcccctgagagcctgcacacagtgcacgccgccctgatctctgtggagaagatcccctacttccggggccccctgcagaccaaggccaagttccacatcaccgtgggccatgaaacagtgatgggccgcctgatgttcttctccccagccccagacaactttgaccaggagcccatcctggacagcttcaacttcagccaggagtacctgttccaggagcagtacctgagcaaggacctgaccccagctgtgacagacaatgatgaggccgacaagaaggccggccaggccacagagggccactgcccccggcagcagtgggccctggtggagtttgagaagcctgtgacctgcccccggctgtgcctggtgattggcagccggctggatgctgacatccacaccaacacctgccgcctggccttccacggcatcctgctgcacggcctggaggacagaaattatgctgacagcttcctgccccggctgaaggtgtacaagctgaagcacaagcacggcctggtggagcgggccatggatgactacagcgtgattggccgcagcctcttcaagaaggagaccaacatccagctgtttgtgggcctgaaggtgcacctgagcactggagagctgggcatcatcgacagcgccttcggccagagcggcaagttcaagatccacatccctgggggcctgagccctgagagcaagaagatcctgaccccagccctgaagaagagggcccgggccggccgcggggaggccacccggcaggaggagagcgctgagaggtctgagcccagccagcacgtggtgctgagcctgaccttcaagcgctacgtgtttgacacccacaagaggatggtgcagagcccctag

SEQ ID NO: 19548 - DNA, 1233 bp, synthetic construct
  misc_feature 1..1233: note = Description of Artificial Sequence: Synthetic coding sequence
  source 1..1233: mol_type = other DNA
atggctgctgagatccacagccggccccagagcagcaggcctgtgctgctgagcaagattgagggccaccaggatgctgtgacagctgccctgctgatccccaaggaggatggagtcatcacagccagcgaggacaggaccatccgggtgtggctgaagagggacagcggccagtactggcccagcatctaccacaccatggccagcccctgcagcgccatggcctaccaccacgacagccgccgcatctttgtgggccaggacaatggagctgtgatggagttccacgtgtctgaggacttcaacaagatgaacttcatcaagacctacccagcccaccagaacagagtgtctgccatcatcttcagcctggccacagagtgggtgatcagcacaggccatgacaagtgtgtgtcctggatgtgcaccaggagcggcaacatgctgggccgccacttcttcacctcctgggccagctgcctgcagtatgactttgacacccagtatgcctttgtgggggactacagcggccagatcaccctgctgaagctggagcagaacacctgcagcgtcatcaccaccctgaagggccacgagggctctgtggcctgcctgtggtgggaccccatccagaggctgctcttcagcggggccagtgacaacagcatcatcatgtgggacatcggcggcaggaagggccgcaccctgctgctgcagggccaccacgacaaggtgcagagcctgtgctacctgcagctgacccggcagctggtgtcctgcagcagtgatggcggcattgctgtgtggaacatggatgtgtcccgggaggaggccccccagtggctggagagtgacagctgccagaagtgtgagcagcccttcttctggaacatcaagcagatgtgggacaccaagaccctgggcctgcggcagcaccactgcaggaaatgtggccaggccgtgtgtgggaagtgcagcagcaagaggagcagctaccctgtgatgggctttgagttccaggtgcgggtgtgtgacagctgctatgacagcatcaaggatgaggacaggaccagcctggccaccttccacgagggcaagcacaacatcagccacatgtccatggacatcgcccggggcctgatggtgacctgtggcacagacagaattgtgaagatctgggacatgacccctgtggtgggctgcagcctggccaccggcttcagcccccactag

SEQ ID NO: 19549 - DNA, 1092 bp, synthetic construct
  misc_feature 1..1092: note = Description of Artificial Sequence: Synthetic coding sequence
  source 1..1092: mol_type = other DNA
atggccggggacctgtctgctggcttcttcatggaggagctgaacacctaccggcagaagcagggcgtggtgctgaagtaccaggagctgcccaacagcggcccccctcatgaccggcgcttcaccttccaggtgatcattgatggccgggagttccctgagggggagggccgcagcaagaaggaggccaagaatgctgctgccaagctggccgtggagatcctgaacaaggagaagaaggctgtgagccccctgctgctgaccaccaccaacagcagcgagggcctgtccatgggcaactacatcggcctcatcaaccgcatcgcccagaagaagaggctgactgtgaactatgagcagtgtgccagcggcgtgcacggccctgagggcttccactacaagtgcaagatgggccagaaggagtacagcatcggcaccggcagcaccaagcaggaggccaagcagctggccgccaagctggcctacctgcagatcctgtctgaggagacctctgtgaagagtgactacctgagcagcggcagctttgccaccacctgtgagagccagagcaacagcctggtgaccagcaccctggccagcgagagcagcagcgagggggacttctctgctgacaccagcgagatcaacagcaacagcgacagcctgaacagcagcagcctgctgatgaatggcctgaggaacaaccagaggaaggccaagaggagcctggcccccaggtttgacctgcctgacatgaaggagaccaagtacacagtggacaagagatttggcatggacttcaaggagattgagctgattggcagcggcggcttcggccaggtgttcaaggccaagcacagaattgatggcaagacctacgtgatcaagagggtgaagtacaacaatgaaagcaagaccaagtgcctcttcatccagatggagttctgtgacaagggcaccctggagcagtggattgagaagagaagaggagagaagctggacaaggtgctggccctggagctgtttgagcagatcaccaagggcgtggactacatccacagcaagaagaagaagaagaagaagaagaagtag

SEQ ID NO: 19550 - DNA, 309 bp, synthetic construct
  misc_feature 1..309: note = Description of Artificial Sequence: Synthetic coding sequence
  source 1..309: mol_type = other DNA
atggccggggacctgtctgctggcttcttcatggaggagctgaacacctaccggcagaagcagggcgtggtgctgaagtaccaggagctgcccaacagcggcccccctcatgaccggcgcttcaccttccaggtgatcattgatggccgggagttccctgagggggagggccgcagcaagaaggaggccaagaatgctgctgccaagctggccgtggagatcctgaacaaggagaagaaggctgtgagccccctgctgctgaccaccaccaacagcagcgagggcctgtccatgggcaactacatctag

SEQ ID NO: 19551 - DNA, 1656 bp, synthetic construct
  misc_feature 1..1656: note = Description of Artificial Sequence: Synthetic coding sequence
  source 1..1656: mol_type = other DNA
atggccggggacctgtctgctggcttcttcatggaggagctgaacacctaccggcagaagcagggcgtggtgctgaagtaccaggagctgcccaacagcggcccccctcatgaccggcgcttcaccttccaggtgatcattgatggccgggagttccctgagggggagggccgcagcaagaaggaggccaagaatgctgctgccaagctggccgtggagatcctgaacaaggagaagaaggctgtgagccccctgctgctgaccaccaccaacagcagcgagggcctgtccatgggcaactacatcggcctcatcaaccgcatcgcccagaagaagaggctgactgtgaactatgagcagtgtgccagcggcgtgcacggccctgagggcttccactacaagtgcaagatgggccagaaggagtacagcatcggcaccggcagcaccaagcaggaggccaagcagctggccgccaagctggcctacctgcagatcctgtctgaggagacctctgtgaagagtgactacctgagcagcggcagctttgccaccacctgtgagagccagagcaacagcctggtgaccagcaccctggccagcgagagcagcagcgagggggacttctctgctgacaccagcgagatcaacagcaacagcgacagcctgaacagcagcagcctgctgatgaatggcctgaggaacaaccagaggaaggccaagaggagcctggcccccaggtttgacctgcctgacatgaaggagaccaagtacacagtggacaagagatttggcatggacttcaaggagattgagctgattggcagcggcggcttcggccaggtgttcaaggccaagcacagaattgatggcaagacctacgtgatcaagagggtgaagtacaacaatgagaaggccgagcgggaggtgaaggccctggccaagctggaccacgtgaacatcgtgcactacaacggctgctgggatggctttgattatgaccctgagaccagtgatgacagcctggagagcagtgactatgaccctgagaacagcaagaacagcagccgcagcaagaccaagtgcctcttcatccagatggagttctgtgacaagggcaccctggagcagtggattgagaagagaagaggagagaagctggacaaggtgctggccctggagctgtttgagcagatcaccaagggcgtggactacatccacagcaagaagctgatccaccgggacctgaagcccagcaacatcttcctggtggacaccaagcaggtgaagatcggggactttggcctggtgaccagcctgaagaatgatggcaagaggaccaggagcaagggcaccctgcgctacatgagccctgagcagatcagcagccaggactatggcaaggaggtggacctgtatgccctgggcctcatcctggccgagctgctgcacgtgtgtgacacagcctttgagaccagcaagttcttcacagacctgagagatggcatcatcagtgacatctttgacaagaaggagaagaccctgctgcagaagctgctgagcaagaagccagaggaccggcccaacaccagcgagatcctgcggaccctgactgtgtggaagaagagccctgagaagaatgaaagacacacctgctag

SEQ ID NO: 19552 - DNA, 351 bp, synthetic construct
  misc_feature 1..351: note = Description of Artificial Sequence: Synthetic coding sequence
  source 1..351: mol_type = other DNA
atggccggggacctgtctgctggcttcttcatggaggagctgaacacctaccggcagaagcagggcgtggtgctgaagtaccaggagctgcccaacagcggcccccctcatgaccggcgcttcaccttccaggtgatcattgatggccgggagttccctgagggggagggccgcagcaagaaggaggccaagaatgctgctgccaagctggccgtggagatcctgaacaaggagaagaaggctgtgagccccctgctgctgaccaccaccaacagcagcgagggcctgtccatgggcaactacatcggcctcatcaaccgcatcgcccagaagaagaggctgactgtgtag

SEQ ID NO: 19553 - DNA, 1533 bp, synthetic construct
  misc_feature 1..1533: note = Description of Artificial Sequence: Synthetic coding sequence
  source 1..1533: mol_type = other DNA
atggccggggacctgtctgctggcttcttcatggaggagctgaacacctaccggcagaagcagggcgtggtgctgaagtaccaggagctgcccaacagcggcccccctcatgaccggcgcttcaccttccaggtgatcattgatggccgggagttccctgagggggagggccgcagcaagaaggaggccaagaatgctgctgccaagctggccgtggagatcctgaacaaggagaagaaggctgtgagccccctgctgctgaccaccaccaacagcagcgagggcctgtccatgggcaactacatcggcctcatcaaccgcatcgcccagaagaagaggctgactgtgaactatgagcagtgtgccagcggcgtgcacggccctgagggcttccactacaagtgcaagatgggccagaaggagtacagcatcggcaccggcagcaccaagcaggaggccaagcagctggccgccaagctggcctacctgcagatcctgtctgaggagacctctgtgaagagtgactacctgagcagcggcagctttgccaccacctgtgagagccagagcaacagcctggtgaccagcaccctggccagcgagagcagcagcgagggggacttctctgctgacaccagcgagatcaacagcaacagcgacagcctgaacagcagcagcctgctgatgaatggcctgaggaacaaccagaggaaggccaagaggagcctggcccccaggtttgacctgcctgacatgaaggagaccaagtacacagtggacaagaggaaggccgagcgggaggtgaaggccctggccaagctggaccacgtgaacatcgtgcactacaacggctgctgggatggctttgattatgaccctgagaccagtgatgacagcctggagagcagtgactatgaccctgagaacagcaagaacagcagccgcagcaagaccaagtgcctcttcatccagatggagttctgtgacaagggcaccctggagcagtggattgagaagagaagaggagagaagctggacaaggtgctggccctggagctgtttgagcagatcaccaagggcgtggactacatccacagcaagaagctgatccaccgggacctgaagcccagcaacatcttcctggtggacaccaagcaggtgaagattggagactttggcctggtgaccagcctgaagaatgatggcaagaggaccaggagcaagggcaccctgcgctacatgagccctgagcagatcagcagccaggactatggcaaggaggtggacctgtatgccctgggcctcatcctggccgagctgctgcacgtgtgtgacacagcctttgagaccagcaagttcttcacagacctgagagatggcatcatcagtgacatctttgacaagaaggagaagaccctgctgcagaagctgctgagcaagaagccagaagatcggcccaacaccagcgagatcctgcggaccctgactgtgtggaagaagagccctgagaagaatgaaagacacacctgctag

SEQ ID NO: 19554 - DNA, 4800 bp, synthetic construct
  misc_feature 1..4800: note = Description of Artificial Sequence: Synthetic coding sequence
  source 1..4800: mol_type = other DNA
atgaacaaggccccccagagcacaggccccccaccagcccccagccctggcctgccccagcctgccttccccccaggccagacagcccctgtggtgttcagcaccccccaggccacccagatgaacacccccagccagccccggcagcacttctaccccagccgggcccagccccccagcagcgctgccagccgggtgcagagcgctgccccagcccggcccggccctgctgcccacgtgtacccagctggcagccaggtgatgatgatccccagccagatctcctacccagccagccagggcgcctactacatccctggccagggccgcagcacctacgtggtgcccacccagcagtaccctgtgcagcccggggcccctggcttctacccaggggccagccccacagaatttggcacctacgccggggcctactacccagcccagggcgtgcagcagttccccaccggggtggcccccacccctgtgctgatgaaccagcccccccagatcgcccccaagcgggagaggaagaccatccgcatccgggaccccaaccagggcggcaaggacatcacagaggagatcatgtctggggccaggacagccagcacccccaccccaccccagacaggaggcggcctggagccccaggccaacggggagaccccccaggtggccgtgattgtgcggccagatgacaggagccagggcgccatcatcgctgacaggcctggcctgcccggccctgagcacagccccagcgagagccagcccagcagccccagccccacccccagccccagccctgtgctggagcccggcagcgagcccaacctggccgtgctgagcatccctggggacaccatgaccaccatccagatgtctgtggaggagagcacccccatcagccgggagactggagagccctaccgcctgagccctgagcccacccccctggccgagcccatcctggaggtggaggtgaccctgagcaagcctgtgcctgagagcgagttcagcagcagccccctgcaggcccccacccccctggccagccacacagtggagatccacgagcccaacggcatggtgcccagcgaggacctggagcctgaggtggagagcagccctgagctggcccctcctccagcctgccccagcgagagccctgtgcccatcgcccccacagcccagcctgaggagctgctgaatggagcccccagccccccagctgtggacctgagccctgtgtctgagcctgaggagcaggccaaggaggtgacagcctccatggccccacccaccatccccagcgccaccccagccacagcccccagcgccaccagccctgcccaggaggaggagatggaggaggaggaggaggaggaggagggggaggccggggaggccggggaggccgagagcgagaagggcggggaggagctgctgcccccagagagcacccccatcccagccaacctgagccagaacctggaggccgctgctgccacccaggtggccgtgtctgtgcccaagagaagaaggaagatcaaggagctgaacaagaaggaggccgtgggggacctgctggatgccttcaaggaggccaacccagctgtgcctgaggtggagaaccagcccccagctggcagcaaccctggccctgagagcgagggcagcggcgtgccccccaggcctgaggaggctgatgagacctgggacagcaaggaggacaagatccacaatgctgagaacatccagcctggagagcagaagtatgagtacaagagtgaccagtggaagcccctgaacctggaggagaagaagagatatgaccgggagttcctgctgggcttccagttcatctttgcctccatgcagaagccagagggcctgccccacatcagtgatgtggtgctggacaaggccaacaagacccccctgcggcccctggaccccacccggctgcagggcatcaactgtggccctgacttcacccccagctttgccaacctgggccgcaccaccctgagcacccggggccccccccggggcggccctggaggagagctgccccggggccctgctggcctgggcccccggcgcagccagcagggccccaggaaggagcccaggaagatcatcgccaccgtgctgatgacagaggacatcaagctgaacaaggccgagaaggcctggaagcccagcagcaagaggacagctgctgacaaggacagaggagaggaggatgctgatggcagcaagacccaggacctcttccggcgggtgcgcagcatcctgaacaagctgaccccccagatgttccagcagctgatgaagcaggtgacccagctggccatcgacacagaggagcggctgaagggcgtcatcgacctgatctttgagaaggccatcagcgagcccaacttctctgtggcctatgccaacatgtgccgctgcctgatggccctgaaggtgcccaccacagagaagcccaccgtgacagtgaacttcaggaagctgctgctgaaccgctgccagaaggagtttgagaaggacaaggatgatgatgaggtgtttgagaagaagcagaaggagatggatgaagctgccacagctgaggagcggggccgcctgaaggaggagctggaggaggcccgggacatcgccaggagaagaagcctgggcaacatcaagttcatcggggagctgttcaagctgaagatgctgacagaggccatcatgcatgactgtgtggtgaagctgctgaagaaccatgatgaggagagcctggagtgcctgtgccgcctgctgaccaccatcggcaaggacctggactttgagaaggccaagcccaggatggaccagtacttcaaccagatggagaagatcatcaaggagaagaagaccagcagccgcatccgcttcatgctgcaggatgtgctggacctgcggggcagcaactgggtgcccaggagaggagaccagggccccaagaccatcgaccagatccacaaggaggccgagatggaggagcaccgggagcacatcaaggtgcagcagctgatggccaagggcagtgacaagagaagaggaggccccccaggcccccccatcagccggggcctgcccctggtggatgatggcggctggaacacagtgcccatcagcaagggcagccggcccatcgacaccagccggctgaccaagatcaccaagccaggcagcattgacagcaacaaccagctgtttgcccctgggggccgcctgtcctggggcaagggcagcagcggcggcagcggggccaagcccagtgatgctgccagcgaggccgcccggcctgccaccagcaccctgaaccgcttcagcgccctgcagcaggccgtgcccacagagagcacagacaacagaagagtggtgcagaggagcagcctgagccgggagcggggggagaaggccggggacagaggagaccggctggagaggtctgagcggggcggggacagaggagaccggctggaccgggcccggaccccagccaccaagaggagcttcagcaaggaggtggaggagaggagccgggagcggcccagccagcctgagggcctgaggaaggccgccagcctgacagaggaccgggaccggggcagagatgctgtgaagcgggaggccgccctgccccctgtgagccccctgaaggccgccctgtctgaggaggagctggagaagaagagcaaggccatcatcgaggagtacctgcacctgaatgacatgaaggaggccgtgcagtgtgtgcaggagctggccagccccagcctgctcttcatctttgtgagacatggagtggagagcaccctggagaggtctgccatcgcccgggagcacatgggccagctgctgcaccagctgctgtgtgccggccacctgagcacagcccagtactaccagggcctgtatgagatcctggagctggccgaggacatggagattgacatcccccacgtgtggctgtacctggccgagctggtgacccccatcctgcaggagggcggcgtgcccatgggagagctgttccgggagatcaccaagcccctgcggcccctgggcaaggccgccagcctgctgctggagatcctgggcctgctgtgcaagtccatgggccccaagaaggtgggcaccctgtggagggaggccggcctgtcctggaaggagttcctgcctgagggccaggacattggagcctttgtggccgagcagaaggtggagtacaccctgggggaggagagcgaggcccctggccagagggccctgcccagcgaggagctgaaccggcagctggagaagctgctgaaggagggcagcagcaaccagagggtgtttgactggattgaggccaacctgtctgagcagcagatcgtgagcaacaccctggtgcgggccctgatgacagctgtgtgctacagcgccatcatctttgagacccccctgcgggtggatgtggccgtgctgaaggcccgggccaagctgctgcagaagtacctgtgtgatgagcagaaggagctgcaggccctgtatgccctgcaggccctggtggtgaccctggagcagccccccaacctgctgaggatgttctttgatgccctgtatgatgaagatgtggtgaaggaggatgccttctacagctgggagagcagcaaggaccctgctgagcagcagggcaaaggagtggccctgaagtctgtgacagccttcttcaagtggctgcgggaggccgaggaggagagtgaccacaactag

SEQ ID NO: 19555 - DNA, 4803 bp, synthetic construct
  misc_feature 1..4803: note = Description of Artificial Sequence: Synthetic coding sequence
  source 1..4803: mol_type = other DNA
atgaacaaggccccccagagcacaggccccccaccagcccccagccctggcctgccccagcctgccttccccccaggccagacagcccctgtggtgttcagcaccccccaggccacccagatgaacacccccagccagccccggcagcacttctaccccagccgggcccagccccccagcagcgctgccagccgggtgcagagcgctgccccagcccggcccggccctgctgcccacgtgtacccagctggcagccaggtgatgatgatccccagccagatctcctacccagccagccagggcgcctactacatccctggccagggccgcagcacctacgtggtgcccacccagcagtaccctgtgcagcccggggcccctggcttctacccaggggccagccccacagaatttggcacctacgccggggcctactacccagcccagggcgtgcagcagttccccaccggggtggcccccacccctgtgctgatgaaccagcccccccagatcgcccccaagcgggagaggaagaccatccgcatccgggaccccaaccagggcggcaaggacatcacagaggagatcatgtctggggccaggacagccagcacccccaccccaccccagacaggaggcggcctggagccccaggccaacggggagaccccccaggtggccgtgattgtgcggccagatgacaggagccagggcgccatcatcgctgacaggcctggcctgcccggccctgagcacagccccagcgagagccagcccagcagccccagccccacccccagccccagccctgtgctggagcccggcagcgagcccaacctggccgtgctgagcatccctggggacaccatgaccaccatccagatgtctgtggaggagagcacccccatcagccgggagactggagagccctaccgcctgagccctgagcccacccccctggccgagcccatcctggaggtggaggtgaccctgagcaagcctgtgcctgagagcgagttcagcagcagccccctgcaggcccccacccccctggccagccacacagtggagatccacgagcccaacggcatggtgcccagcgaggacctggagcctgaggtggagagcagccctgagctggcccctcctccagcctgccccagcgagagccctgtgcccatcgcccccacagcccagcctgaggagctgctgaatggagcccccagccccccagctgtggacctgagccctgtgtctgagcctgaggagcaggccaaggaggtgacagcctccatggccccacccaccatccccagcgccaccccagccacagcccccagcgccaccagccctgcccaggaggaggagatggaggaggaggaggaggaggaggagggggaggccggggaggccggggaggccgagagcgagaagggcggggaggagctgctgcccccagagagcacccccatcccagccaacctgagccagaacctggaggccgctgctgccacccaggtggccgtgtctgtgcccaagagaagaaggaagatcaaggagctgaacaagaaggaggccgtgggggacctgctggatgccttcaaggaggccaacccagctgtgcctgaggtggagaaccagcccccagctggcagcaaccctggccctgagagcgagggcagcggcgtgccccccaggcctgaggaggctgatgagacctgggacagcaaggaggacaagatccacaatgctgagaacatccagcctggagagcagaagtatgagtacaagagtgaccagtggaagcccctgaacctggaggagaagaagagatatgaccgggagttcctgctgggcttccagttcatctttgcctccatgcagaagccagagggcctgccccacatcagtgatgtggtgctggacaaggccaacaagacccccctgcggcccctggaccccacccggctgcagggcatcaactgtggccctgacttcacccccagctttgccaacctgggccgcaccaccctgagcacccggggccccccccggggcggccctggaggagagctgccccggggcccccaggccggcctgggccccaggaggagccagcagggccccaggaaggagcccaggaagatcatcgccaccgtgctgatgacagaggacatcaagctgaacaaggccgagaaggcctggaagcccagcagcaagaggacagctgctgacaaggacagaggagaagaagatgctgatggcagcaagacccaggacctcttcagaagagtgcgcagcatcctgaacaagctgaccccccagatgttccagcagctgatgaagcaggtgacccagctggccatcgacacagaggagcggctgaagggcgtgattgacctgatctttgagaaggccatcagcgagcccaacttctctgtggcctatgccaacatgtgccgctgcctgatggccctgaaggtgcccaccacagagaagcccaccgtgacagtgaacttcaggaagctgctgctgaaccgctgccagaaggagtttgagaaggacaaggatgatgatgaggtgtttgagaagaagcagaaggagatggatgaggccgccacagctgaggagcggggccgcctgaaggaggagctggaggaggcccgggacatcgcccggcggcgcagcctgggcaacatcaagttcatcggggagctgttcaagctgaagatgctgacagaggccatcatgcatgactgtgtggtgaagctgctgaagaaccatgatgaggagagcctggagtgcctgtgccgcctgctgaccaccatcggcaaggacctggactttgagaaggccaagcccaggatggaccagtacttcaaccagatggagaagatcatcaaggagaagaagaccagcagccgcatccgcttcatgctgcaggatgtgctggacctgcggggcagcaactgggtgccccggcggggggaccagggccccaagaccatcgaccagatccacaaggaggccgagatggaggagcaccgggagcacatcaaggtgcagcagctgatggccaagggcagtgacaagaggcggggcggccccccaggcccccccatcagccggggcctgcccctggtggatgatggcggctggaacacagtgcccatcagcaagggcagccggcccatcgacaccagccggctgaccaagatcaccaagccaggcagcattgacagcaacaaccagctgtttgcccctgggggccgcctgtcctggggcaagggcagcagcggcggcagcggggccaagcccagtgatgctgccagcgaggccgcccggcctgccaccagcaccctgaaccgcttcagcgccctgcagcaggccgtgcccacagagagcacagacaacagaagagtggtgcagaggagcagcctgagccgggagcggggggagaaggccggggacagaggagaccggctggagaggtctgagcggggcggggacagaggagaccggctggaccgggcccggaccccagccaccaagaggagcttcagcaaggaggtggaggagaggagccgggagcggcccagccagcctgagggcctgaggaaggccgccagcctgacagaagatcgggaccggggcagagatgctgtgaagcgggaggccgccctgccccctgtgagccccctgaaggccgccctgtctgaggaggagctggagaagaagagcaaggccatcatcgaggagtacctgcacctgaatgacatgaaggaggccgtgcagtgtgtgcaggagctggccagccccagcctgctcttcatctttgtgagacatggagtggagagcaccctggagaggtctgccatcgcccgggagcacatgggccagctgctgcaccagctgctgtgtgccggccacctgagcacagcccagtactaccagggcctgtatgagatcctggagctggccgaggacatggagattgacatcccccacgtgtggctgtacctggccgagctggtgacccccatcctgcaggagggcggcgtgcccatgggagagctgttccgggagatcaccaagcccctgcggcccctgggcaaggccgccagcctgctgctggagatcctgggcctgctgtgcaagtccatgggccccaagaaggtgggcaccctgtggagggaggccggcctgtcctggaaggagttcctgcctgagggccaggacatcggggcctttgtggccgagcagaaggtggagtacaccctgggggaggagagcgaggcccctggccagagggccctgcccagcgaggagctgaaccggcagctggagaagctgctgaaggagggcagcagcaaccagagggtgtttgactggattgaggccaacctgtctgagcagcagatcgtgagcaacaccctggtgcgggccctgatgacagctgtgtgctacagcgccatcatctttgagacccccctgcgggtggatgtggccgtgctgaaggcccgggccaagctgctgcagaagtacctgtgtgatgagcagaaggagctgcaggccctgtatgccctgcaggccctggtggtgaccctggagcagccccccaacctgctgaggatgttctttgatgccctgtatgatgaagatgtggtgaaggaggatgccttctacagctgggagagcagcaaggaccctgctgagcagcagggcaagggcgtggccctgaagtctgtgacagccttcttcaagtggctgcgggaggccgaggaggagagtgaccacaactag

SEQ ID NO: 19556 - DNA, 4800 bp, synthetic construct; identical to SEQ ID NO: 19554
  misc_feature 1..4800: note = Description of Artificial Sequence: Synthetic coding sequence
  source 1..4800: mol_type = other DNA

SEQ ID NO: 19557 - DNA, 4308 bp, synthetic construct
  misc_feature 1..4308: note = Description of Artificial Sequence: Synthetic coding sequence
  source 1..4308: mol_type = other DNA
atgaaccagcccccccagatcgcccccaagcgggagaggaagaccatccgcatccgggaccccaaccagggcggcaaggacatcacagaggagatcatgtctggggccaggacagccagcacccccaccccaccccagacaggaggcggcctggagccccaggccaacggggagaccccccaggtggccgtgattgtgcggccagatgacaggagccagggcgccatcatcgctgacaggcctggcctgcccggccctgagcacagccccagcgagagccagcccagcagccccagccccacccccagccccagccctgtgctggagcccggcagcgagcccaacctggccgtgctgagcatccctggggacaccatgaccaccatccagatgtctgtggaggagagcacccccatcagccgggagactggagagccctaccgcctgagccctgagcccacccccctggccgagcccatcctggaggtggaggtgaccctgagcaagcctgtgcctgagagcgagttcagcagcagccccctgcaggcccccacccccctggccagccacacagtggagatccacgagcccaacggcatggtgcccagcgaggacctggagcctgaggtggagagcagccctgagctggcccctcctccagcctgccccagcgagagccctgtgcccatcgcccccacagcccagcctgaggagctgctgaatggagcccccagccccccagctgtggacctgagccctgtgtctgagcctgaggagcaggccaaggaggtgacagcctccatggccccacccaccatccccagcgccaccccagccacagcccccagcgccaccagccctgcccaggaggaggagatggaggaggaggaggaggaggaggagggggaggccggggaggccggggaggccgagagcgagaagggcggggaggagctgctgcccccagagagcacccccatcccagccaacctgagccagaacctggaggccgctgctgccacccaggtggccgtgtctgtgcccaagagaagaaggaagatcaaggagctgaacaagaaggaggccgtgggggacctgctggatgccttcaaggaggccaacccagctgtgcctgaggtggagaaccagcccccagctggcagcaaccctggccctgagagcgagggcagcggcgtgccccccaggcctgaggaggctgatgagacctgggacagcaaggaggacaagatccacaatgctgagaacatccagcctggagagcagaagtatgagtacaagagtgaccagtggaagcccctgaacctggaggagaagaagagatatgaccgggagttcctgctgggcttccagttcatctttgcctccatgcagaagccagagggcctgccccacatcagtgatgtggtgctggacaaggccaacaagacccccctgcggcccctggaccccacccggctgcagggcatcaactgtggccctgacttcacccccagctttgccaacctgggccgcaccaccctgagcacccggggccccccccggggcggccctggaggagagctgccccggggccctgctggcctgggcccccggcgcagccagcagggccccaggaaggagcccaggaagatcatcgccaccgtgctgatgacagaggacatcaagctgaacaaggccgagaaggcctggaagcccagcagcaagaggacagctgctgacaaggacagaggagaggaggatgctgatggcagcaagacccaggacctcttccggcgggtgcgcagcatcctgaacaagctgaccccccagatgttccagcagctgatgaagcaggtgacccagctggccatcgacacagaggagcggctgaagggcgtcatcgacctgatctttgagaaggccatcagcgagcccaacttctctgtggcctatgccaacatgtgccgctgcctgatggccctgaaggtgcccaccacagagaagcccaccgtgacagtgaacttcaggaagctgctgctgaaccgctgccagaaggagtttgagaaggacaaggatgatgatgaggtgtttgagaagaagcagaaggagatggatgaagctgccacagctgaggagcggggccgcctgaaggaggagctggaggaggcccgggacatcgccaggagaagaagcctgggcaacatcaagttcatcggggagctgttcaagctgaagatgctgacagaggccatcatgcatgactgtgtggtgaagctgctgaagaaccatgatgaggagagcctggagtgcctgtgccgcctgctgaccaccatcggcaaggacctggactttgagaaggccaagcccaggatggaccagtacttcaaccagatggagaagatcatcaaggagaagaagaccagcagccgcatccgcttcatgctgcaggatgtgctggacctgcggggcagcaactgggtgcccaggagaggagaccagggccccaagaccatcgaccagatccacaaggaggccgagatggaggagcaccgggagcacatcaaggtgcagcagctgatggccaagggcagtgacaagagaagaggaggccccccaggcccccccatcagccggggcctgcccctggtggatgatggcggctggaacacagtgcccatcagcaagggcagccggcccatcgacaccagccggctgaccaagatcaccaagccaggcagcattgacagcaacaaccagctgtttgcccctgggggccgcctgtcctggggcaagggcagcagcggcggcagcggggccaagcccagtgatgctgccagcgaggccgcccggcctgccaccagcaccctgaaccgcttcagcgccctgcagcaggccgtgcccacagagagcacagacaacagaagagtggtgcagaggagcagcctgagccgggagcggggggagaaggccggggacagaggagaccggctggagaggtctgagcggggcggggacagaggagaccggctggaccgggcccggaccccagccaccaagaggagcttcagcaaggaggtggaggagaggagccgggagcggcccagccagcctgagggcctgaggaaggccgccagcctgacagaggaccgggaccggggcagagatgctgtgaagcgggaggccgccctgccccctgtgagccccctgaaggccgccctgtctgaggaggagctggagaagaagagcaaggccatcatcgaggagtacctgcacctgaatgacatgaaggaggccgtgcagtgtgtgcaggagctggccagccccagcctgctcttcatctttgtgagacatggagtggagagcaccctggagaggtctgccatcgcccgggagcacatgggccagctgctgcaccagctgctgtgtgccggccacctgagcacagcccagtactaccagggcctgtatgagatcctggagctggccgaggacatggagattgacatcccccacgtgtggctgtacctggccgagctggtgacccccatcctgcaggagggcggcgtgcccatgggagagctgttccgggagatcaccaagcccctgcggcccctgggcaaggccgccagcctgctgctggagatcctgggcctgctgtgcaagtccatgggccccaagaaggtgggcaccctgtggagggaggccggcctgtcctggaaggagttcctgcctgagggccaggacattggagcctttgtggccgagcagaaggtggagtacaccctgggggaggagagcgaggcccctggccagagggccctgcccagcgaggagctgaaccggcagctggagaagctgctgaaggagggcagcagcaaccagagggtgtttgactggattgaggccaacctgtctgagcagcagatcgtgagcaacaccctggtgcgggccctgatgacagctgtgtgctacagcgccatcatctttgagacccccctgcgggtggatgtggccgtgctgaaggcccgggccaagctgctgcagaagtacctgtgtgatgagcagaaggagctgcaggccctgtatgccctgcaggccctggtggtgaccctggagcagccccccaacctgctgaggatgttctttgatgccctgtatgatgaagatgtggtgaaggaggatgccttctacagctgggagagcagcaaggaccctgctgagcagcagggcaaaggagtggccctgaagtctgtgacagccttcttcaagtggctgcgggaggccgaggaggagagtgaccacaactag

SEQ ID NO: 19558 - DNA, 4821 bp, synthetic construct
  misc_feature 1..4821: note = Description of Artificial Sequence: Synthetic coding sequence
  source 1..4821: mol_type = other DNA
atgaacaaggccccccagagcacaggccccccaccagcccccagccctggcctgccccagcctgccttccccccaggccagacagcccctgtggtgttcagcaccccccaggccacccagatgaacacccccagccagccccggcagggcggcttccgcagcctgcagcacttctaccccagccgggcccagccccccagcagcgctgccagccgggtgcagagcgctgccccagcccggcccggccctgctgcccacgtgtacccagctggcagccaggtgatgatgatccccagccagatctcctacccagccagccagggcgcctactacatccctggccagggccgcagcacctacgtggtgcccacccagcagtaccctgtgcagcccggggcccctggcttctacccaggggccagccccacagaatttggcacctacgccggggcctactacccagcccagggcgtgcagcagttccccactggagtggcccccacccctgtgctgatgaaccagcccccccagatcgcccccaagcgggagaggaagaccatccgcatccgggaccccaaccagggcggcaaggacatcacagaggagatcatgtctggggccaggacagccagcacccccaccccaccccagacaggaggcggcctggagccccaggccaatggagagaccccccaggtggccgtcatcgtgcggccagatgacaggagccagggcgccatcatcgctgaccggcccggcctgcccggccctgagcacagccccagcgagagccagcccagcagccccagccccacccccagccccagccctgtgctggagcccggcagcgagcccaacctggccgtgctgagcatccctggggacaccatgaccaccatccagatgtctgtggaggagagcacccccatcagccgggagaccggggagccctaccgcctgagccctgagcccacccccctggccgagcccatcctggaggtggaggtgaccctgagcaagcctgtgcctgagagcgagttcagcagcagccccctgcaggcccccacccccctggccagccacacagtggagatccacgagcccaacggcatggtgcccagcgaggacctggagcctgaggtggagagcagccctgagctggcccctcctccagcctgccccagcgagagccctgtgcccatcgcccccacagcccagcctgaggagctgctgaatggagcccccagccccccagctgtggacctgagccctgtgtctgagcctgaggagcaggccaaggaggtgacagcctccatggccccacccaccatccccagcgccaccccagccacagcccccagcgccaccagccctgcccaggaggaggagatggaggaggaggaggaggaggaggagggggaggccggggaggccggggaggccgagagcgagaagggcggggaggagctgctgcccccagagagcacccccatcccagccaacctgagccagaacctggaggccgccgccgccacccaggtggccgtgtctgtgcccaagagaagaaggaagatcaaggagctgaacaagaaggaggccgtgggggacctgctggatgccttcaaggaggccaacccagctgtgcctgaggtggagaaccagcccccagctggcagcaaccctggccctgagagcgagggcagcggcgtgccccccaggcctgaggaggctgatgagacctgggacagcaaagaagacaagatccacaatgctgagaacatccagcccggggagcagaagtatgagtacaagagtgaccagtggaagcccctgaacctggaggagaagaagagatatgaccgggagttcctgctgggcttccagttcatctttgcctccatgcagaagccagagggcctgccccacatcagtgatgtggtgctggacaaggccaacaagacccccctgcggcccctggaccccacccggctgcagggcatcaactgtggccctgacttcacccccagctttgccaacctgggccgcaccaccctgagcacccggggccccccccggggcggccctggaggagagctgccccggggccctgctggcctgggccccaggaggagccagcagggccccaggaaggagcccaggaagatcatcgccaccgtgctgatgacagaggacatcaagctgaacaaggccgagaaggcctggaagcccagcagcaagaggacagctgctgacaaggacagaggagaagaagatgctgatggcagcaagacccaggacctcttcagaagagtgcgcagcatcctgaacaagctgaccccccagatgttccagcagctgatgaagcaggtgacccagctggccatcgacacagaggagcggctgaagggcgtgattgacctgatctttgagaaggccatcagcgagcccaacttctctgtggcctatgccaacatgtgccgctgcctgatggccctgaaggtgcccaccacagagaagcccaccgtgacagtgaacttcaggaagctgctgctgaaccgctgccagaaggagtttgagaaggacaaggatgatgatgaggtgtttgagaagaagcagaaggagatggatgaggccgccacagctgaggagcggggccgcctgaaggaggagctggaggaggcccgggacatcgcccggcggcgcagcctgggcaacatcaagttcatcggggagctgttcaagctgaagatgctgacagaggccatcatgcatgactgtgtggtgaagctgctgaagaaccatgatgaggagagcctggagtgcctgtgccgcctgctgaccaccatcggcaaggacctggactttgagaaggccaagcccaggatggaccagtacttcaaccagatggagaagatcatcaaggagaagaagaccagcagccgcatccgcttcatgctgcaggatgtgctggacctgcggggcagcaactgggtgccccggcggggggaccagggccccaagaccatcgaccagatccacaaggaggccgagatggaggagcaccgggagcacatcaaggtgcagcagctgatggccaagggcagtgacaagaggcggggcggccccccaggcccccccatcagccggggcctgcccctggtggatgatggcggctggaacacagtgcccatcagcaagggcagccggcccatcgacaccagccggctgaccaagatcaccaagccaggcagcattgacagcaacaaccagctgtttgcccctgggggccgcctgtcctggggcaagggcagcagcggcggcagcggggccaagcccagtgatgctgccagcgaggccgcccggcctgccaccagcaccctgaaccgcttcagcgccctgcagcaggccgtgcccacagagagcacagacaacagaagagtggtgcagaggagcagcctgagccgggagcggggggagaaggccggggacagaggagaccggctggagaggtctgagcggggcggggacagaggagaccggctggaccgggcccggaccccagccaccaagaggagcttcagcaaggaggtggaggagaggagccgggagcggcccagccagcctgagggcctgaggaaggccgccagcctgacagaagatcgggaccggggcagagatgctgtgaagcgggaggccgccctgccccctgtgagccccctgaaggccgccctgtctgaggaggagctggagaagaagagcaaggccatcatcgaggagtacctgcacctgaatgacatgaaggaggccgtgcagtgtgtgcaggagctggccagccccagcctgctcttcatctttgtgagacatggagtggagagcaccctggagaggtctgccatcgcccgggagcacatgggccagctgctgcaccagctgctgtgtgccggccacctgagcacagcccagtactaccagggcctgtatgagatcctggagctggccgaggacatggagattgacatcccccacgtgtggctgtacctggccgagctggtgacccccatcctgcaggagggcggcgtgcccatgggagagctgttccgggagatcaccaagcccctgcggcccctgggcaaggccgccagcctgctgctggagatcctgggcctgctgtgcaagtccatgggccccaagaaggtgggcaccctgtggagggaggccggcctgtcctggaaggagttcctgcctgagggccaggacatcggggcctttgtggccgagcagaaggtggagtacaccctgggggaggagagcgaggcccctggccagagggccctgcccagcgaggagctgaaccggcagctggagaagctgctgaaggagggcagcagcaaccagagggtgtttgactggattgaggccaacctgtctgagcagcagatcgtgagcaacaccctggtgcgggccctgatgacagctgtgtgctacagcgccatcatctttgagacccccctgcgggtggatgtggccgtgctgaaggcccgggccaagctgctgcagaagtacctgtgtgatgagcagaaggagctgcaggccctgtatgccctgcaggccctggtggtgaccctggagcagccccccaacctgctgaggatgttctttgatgccctgtatgatgaagatgtggtgaaggaggatgccttctacagctgggagagcagcaaggaccctgctgagcagcagggcaagggcgtggccctgaagtctgtgacagccttcttcaagtggctgcgggaggccgaggaggagagtgaccacaactag

SEQ ID NO: 19559 - DNA, 4821 bp, synthetic construct; identical to SEQ ID NO: 19558
  misc_feature 1..4821: note = Description of Artificial Sequence: Synthetic coding sequence
  source 1..4821: mol_type = other DNA

SEQ ID NO: 19560 - DNA, 4539 bp, synthetic construct
  misc_feature 1..4539: note = Description of Artificial Sequence: Synthetic coding sequence
  source 1..4539: mol_type = other DNA
atgatgatccccagccagatctcctacccagccagccagggcgcctactacatccctggccagggccgcagcacctacgtggtgcccacccagcagtaccctgtgcagcccggggcccctggcttctacccaggggccagccccacagaatttggcacctacgccggggcctactacccagcccagggcgtgcagcagttccccactggagtggcccccacccctgtgctgatgaaccagcccccccagatcgcccccaagcgggagaggaagaccatccgcatccgggaccccaaccagggcggcaaggacatcacagaggagatcatgtctggggccaggacagccagcacccccaccccaccccagacaggaggcggcctggagccccaggccaatggagagaccccccaggtggccgtcatcgtgcggccagatgacaggagccagggcgccatcatcgctgaccggcccggcctgcccggccctgagcacagccccagcgagagccagcccagcagccccagccccacccccagccccagccctgtgctggagcccggcagcgagcccaacctggccgtgctgagcatccctggggacaccatgaccaccatccagatgtctgtggaggagagcacccccatcagccgggagaccggggagccctaccgcctgagccctgagcccacccccctggccgagcccatcctggaggtggaggtgaccctgagcaagcctgtgcctgagagcgagttcagcagcagccccctgcaggcccccacccccctggccagccacacagtggagatccacgagcccaacggcatggtgcccagcgaggacctggagcctgaggtggagagcagccctgagctggcccctcctccagcctgccccagcgagagccctgtgcccatcgcccccacagcccagcctgaggagctgctgaatggagcccccagccccccagctgtggacctgagccctgtgtctgagcctgaggagcaggccaaggaggtgacagcctccatggccccacccaccatccccagcgccaccccagccacagcccccagcgccaccagccctgcccaggaggaggagatggaggaggaggaggaggaggaggagggggaggccggggaggccggggaggccgagagcgagaagggcggggaggagctgctgcccccagagagcacccccatcccagccaacctgagccagaacctggaggccgccgccgccacccaggtggccgtgtctgtgcccaagagaagaaggaagatcaaggagctgaacaagaaggaggccgtgggggacctgctggatgccttcaaggaggccaacccagctgtgcctgaggtggagaaccagcccccagctggcagcaaccctggccctgagagcgagggcagcggcgtgccccccaggcctgaggaggctgatgagacctgggacagcaaagaagacaagatccacaatgctgagaacatccagcccggggagcagaagtatgagtacaagagtgaccagtggaagcccctgaacctggaggagaagaagagatatgaccgggagttcctgctgggcttccagttcatctttgcctccatgcagaagccagagggcctgccccacatcagtgatgtggtgctggacaaggccaacaagacccccctgcggcccctggaccccacccggctgcagggcatcaactgtggccctgacttcacccccagctttgccaacctgggccgcaccaccctgagcacccggggccccccccggggcggccctggaggagagctgccccggggccctgctggcctgggccccaggaggagccagcagggccccaggaaggagcccaggaagatcatcgccaccgtgctgatgacagaggacatcaagctgaacaaggccgagaaggcctggaagcccagcagcaagaggacagctgctgacaaggacagaggagaagaagatgctgatggcagcaagacccaggacctcttcagaagagtgcgcagcatcctgaacaagctgaccccccagatgttccagcagctgatgaagcaggtgacccagctggccatcgacacagaggagcggctgaagggcgtgattgacctgatctttgagaaggccatcagcgagcccaacttctctgtggcctatgccaacatgtgccgctgcctgatggccctgaaggtgcccaccacagagaagcccaccgtgacagtgaacttcaggaagctgctgctgaaccgctgccagaaggagtttgagaaggacaaggatgatgatgaggtgtttgagaagaagcagaaggagatggatgaggccgccacagctgaggagcggggccgcctgaaggaggagctggaggaggcccgggacatcgcccggcggcgcagcctgggcaacatcaagttcatcggggagctgttcaagctgaagatgctgacagaggccatcatgcatgactgtgtggtgaagctgctgaagaaccatgatgaggagagcctggagtgcctgtgccgcctgctgaccaccatcggcaaggacctggactttgagaaggccaagcccaggatggaccagtacttcaaccagatggagaagatcatcaaggagaagaagaccagcagccgcatccgcttcatgctgcaggatgtgctggacctgcggggcagcaactgggtgccccggcggggggaccagggccccaagaccatcgaccagatccacaaggaggccgagatggaggagcaccgggagcacatcaaggtgcagcagctgatggccaagggcagtgacaagaggcggggcggccccccaggcccccccatcagccggggcctgcccctggtggatgatggcggctggaacacagtgcccatcagcaagggcagccggcccatcgacaccagccggctgaccaagatcaccaagccaggcagcattgacagcaacaaccagctgtttgcccctgggggccgcctgtcctggggcaagggcagcagcggcggcagcggggccaagcccagtgatgctgccagcgaggccgcccggcctgccaccagcaccctgaaccgcttcagcgccctgcagcaggccgtgcccacagagagcacagacaacagaagagtggtgcagaggagcagcctgagccgggagcggggggagaaggccggggacagaggagaccggctggagaggtctgagcggggcggggacagaggagaccggctggaccgggcccggaccccagccaccaagaggagcttcagcaaggaggtggaggagaggagccgggagcggcccagccagcctgagggcctgaggaaggccgccagcctgacagaagatcgggaccggggcagagatgctgtgaagcgggaggccgccctgccccctgtgagccccctgaaggccgccctgtctgaggaggagctggagaagaagagcaaggccatcatcgaggagtacctgcacctgaatgacatgaaggaggccgtgcagtgtgtgcaggagctggccagccccagcctgctcttcatctttgtgagacatggagtggagagcaccctggagaggtctgccatcgcccgggagcacatgggccagctgctgcaccagctgctgtgtgccggccacctgagcacagcccagtactaccagggcctgtatgagatcctggagctggccgaggacatggagattgacatcccccacgtgtggctgtacctggccgagctggtgacccccatcctgcaggagggcggcgtgcccatgggagagctgttccgggagatcaccaagcccctgcggcccctgggcaaggccgccagcctgctgctggagatcctgggcctgctgtgcaagtccatgggccccaagaaggtgggcaccctgtggagggaggccggcctgtcctggaaggagttcctgcctgagggccaggacatcggggcctttgtggccgagcagaaggtggagtacaccctgggggaggagagcgaggcccctggccagagggccctgcccagcgaggagctgaaccggcagctggagaagctgctgaaggagggcagcagcaaccagagggtgtttgactggattgaggccaacctgtctgagcagcagatcgtgagcaacaccctggtgcgggccctgatgacagctgtgtgctacagcgccatcatctttgagacccccctgcgggtggatgtggccgtgctgaaggcccgggccaagctgctgcagaagtacctgtgtgatgagcagaaggagctgcaggccctgtatgccctgcaggccctggtggtgaccctggagcagccccccaacctgctgaggatgttctttgatgccctgtatgatgaagatgtggtgaaggaggatgccttctacagctgggagagcagcaaggaccctgctgagcagcagggcaagggcgtggccctgaagtctgtgacagccttcttcaagtggctgcgggaggccgaggaggagagtgaccacaactag

SEQ ID NO: 19561 - DNA, 4539 bp, synthetic construct; identical to SEQ ID NO: 19560
  misc_feature 1..4539: note = Description of Artificial Sequence: Synthetic coding sequence
  source 1..4539: mol_type = other DNA

SEQ ID NO: 19562 - DNA, 4683 bp, synthetic construct
  misc_feature 1..4683: note = Description of Artificial Sequence: Synthetic coding sequence
  source 1..4683: mol_type = other DNA
atgaacacccccagccagccccggcagcacttctaccccagccgggcccagccccccagcagcgctgccagccgggtgcagagcgctgccccagcccggcccggccctgctgcccacgtgtacccagctggcagccaggtgatgatgatccccagccagatctcctacccagccagccagggcgcctactacatccctggccagggccgcagcacctacgtggtgcccacccagcagtaccctgtgcagcccggggcccctggcttctacccaggggccagccccacagaatttggcacctacgccggggcctactacccagcccagggcgtgcagcagttccccaccggggtggcccccacccctgtgctgatgaaccagcccccccagatcgcccccaagcgggagaggaagaccatccgcatccgggaccccaaccagggcggcaaggacatcacagaggagatcatgtctggggccaggacagccagcacccccaccccaccccagacaggaggcggcctggagccccaggccaacggggagaccccccaggtggccgtgattgtgcggccagatgacaggagccagggcgccatcatcgctgacaggcctggcctgcccggccctgagcacagccccagcgagagccagcccagcagccccagccccacccccagccccagccctgtgctggagcccggcagcgagcccaacctggccgtgctgagcatccctggggacaccatgaccaccatccagatgtctgtggaggagagcacccccatcagccgggagactggagagccctaccgcctgagccctgagcccacccccctggccgagcccatcctggaggtggaggtgaccctgagcaagcctgtgcctgagagcgagttcagcagcagccccctgcaggcccccacccccctggccagccacacagtggagatccacgagcccaacggcatggtgcccagcgaggacctggagcctgaggtggagagcagccctgagctggcccctcctccagcctgccccagcgagagccctgtgcccatcgcccccacagcccagcctgaggagctgctgaatggagcccccagccccccagctgtggacctgagccctgtgtctgagcctgaggagcaggccaaggaggtgacagcctccatggccccacccaccatccccagcgccaccccagccacagcccccagcgccaccagccctgcccaggaggaggagatggaggaggaggaggaggaggaggagggggaggccggggaggccggggaggccgagagcgagaagggcggggaggagctgctgcccccagagagcacccccatcccagccaacctgagccagaacctggaggccgctgctgccacccaggtggccgtgtctgtgcccaagagaagaaggaagatcaaggagctgaacaagaaggaggccgtgggggacctgctggatgccttcaaggaggccaacccagctgtgcctgaggtggagaaccagcccccagctggcagcaaccctggccctgagagcgagggcagcggcgtgccccccaggcctgaggaggctgatgagacctgggacagcaaggaggacaagatccacaatgctgagaacatccagcctggagagcagaagtatgagtacaagagtgaccagtggaagcccctgaacctggaggagaagaagagatatgaccgggagttcctgctgggcttccagttcatctttgcctccatgcagaagccagagggcctgccccacatcagtgatgtggtgctggacaaggccaacaagacccccctgcggcccctggaccccacccggctgcagggcatcaactgtggccctgacttcacccccagctttgccaacctgggccgcaccaccctgagcacccggggccccccccggggcggccctggaggagagctgccccggggcccccaggccggcctgggccccaggaggagccagcagggccccaggaaggagcccaggaagatcatcgccaccgtgctgatgacagaggacatcaagctgaacaaggccgagaaggcctggaagcccagcagcaagaggacagctgctgacaaggacagaggagaagaagatgctgatggcagcaagacccaggacctcttcagaagagtgcgcagcatcctgaacaagctgaccccccagatgttccagcagctgatgaagcaggtgacccagctggccatcgacacagaggagcggctgaagggcgtgattgacctgatctttgagaaggccatcagcgagcccaacttctctgtggcctatgccaacatgtgccgctgcctgatggccctgaaggtgcccaccacagagaagcccaccgtgacagtgaacttcaggaagctgctgctgaaccgctgccagaaggagtttgagaaggacaaggatgatgatgaggtgtttgagaagaagcagaaggagatggatgaggccgccacagctgaggagcggggccgcctgaaggaggagctggaggaggcccgggacatcgcccggcggcgcagcctgggcaacatcaagttcatcggggagctgttcaagctgaagatgctgacagaggccatcatgcatgactgtgtggtgaagctgctgaagaaccatgatgaggagagcctggagtgcctgtgccgcctgctgaccaccatcggcaaggacctggactttgagaaggccaagcccaggatggaccagtacttcaaccagatggagaagatcatcaaggagaagaagaccagcagccgcatccgcttcatgctgcaggatgtgctggacctgcggggcagcaactgggtgccccggcggggggaccagggccccaagaccatcgaccagatccacaaggaggccgagatggaggagcaccgggagcacatcaaggtgcagcagctgatggccaagggcagtgacaagaggcggggcggccccccaggcccccccatcagccggggcctgcccctggtggatgatggcggctggaacacagtgcccatcagcaagggcagccggcccatcgacaccagccggctgaccaagatcaccaagccaggcagcattgacagcaacaaccagctgtttgcccctgggggccgcctgtcctggggcaagggcagcagcggcggcagcggggccaagcccagtgatgctgccagcgaggccgcccggcctgccaccagcaccctgaaccgcttcagcgccctgcagcaggccgtgcccacagagagcacagacaacagaagagtggtgcagaggagcagcctgagccgggagcggggggagaaggccggggacagaggagaccggctggagaggtctgagcggggcggggacagaggagaccggctggaccgggcccggaccccagccaccaagaggagcttcagcaaggaggtggaggagaggagccgggagcggcccagccagcctgagggcctgaggaaggccgccagcctgacagaagatcgggaccggggcagagatgctgtgaagcgggaggccgccctgccccctgtgagccccctgaaggccgccctgtctgaggaggagctggagaagaagagcaaggccatcatcgaggagtacctgcacctgaatgacatgaaggaggccgtgcagtgtgtgcaggagctggccagccccagcctgctcttcatctttgtgagacatggagtggagagcaccctggagaggtctgccatcgcccgggagcacatgggccagctgctgcaccagctgctgtgtgccggccacctgagcacagcccagtactaccagggcctgtatgagatcctggagctggccgaggacatggagattgacatcccccacgtgtggctgtacctggccgagctggtgacccccatcctgcaggagggcggcgtgcccatgggagagctgttccgggagatcaccaagcccctgcggcccctgggcaaggccgccagcctgctgctggagatcctgggcctgctgtgcaagtccatgggccccaagaaggtgggcaccctgtggagggaggccggcctgtcctggaaggagttcctgcctgagggccaggacatcggggcctttgtggccgagcagaaggtggagtacaccctgggggaggagagcgaggcccctggccagagggccctgcccagcgaggagctgaaccggcagctggagaagctgctgaaggagggcagcagcaaccagagggtgtttgactggattgaggccaacctgtctgagcagcagatcgtgagcaacaccctggtgcgggccctgatgacagctgtgtgctacagcgccatcatctttgagacccccctgcgggtggatgtggccgtgctgaaggcccgggccaagctgctgcagaagtacctgtgtgatgagcagaaggagctgcaggccctgtatgccctgcaggccctggtggtgaccctggagcagccccccaacctgctgaggatgttctttgatgccctgtatgatgaagatgtggtgaaggaggatgccttctacagctgggagagcagcaaggaccctgctgagcagcagggcaagggcgtggccctgaagtctgtgacagccttcttcaagtggctgcgggaggccgaggaggagagtgaccacaactag

SEQ ID NO: 19563 - DNA, 4680 bp, synthetic construct
  misc_feature 1..4680: note = Description of Artificial Sequence: Synthetic coding sequence
  source 1..4680: mol_type = other DNA
atgaacacccccagccagccccggcagcacttctaccccagccgggcccagccccccagcagcgctgccagccgggtgcagagcgctgccccagcccggcccggccctgctgcccacgtgtacccagctggcagccaggtgatgatgatccccagccagatctcctacccagccagccagggcgcctactacatccctggccagggccgcagcacctacgtggtgcccacccagcagtaccctgtgcagcccggggcccctggcttctacccaggggccagccccacagaatttggcacctacgccggggcctactacccagcccagggcgtgcagcagttccccaccggggtggcccccacccctgtgctgatgaaccagcccccccagatcgcccccaagcgggagaggaagaccatccgcatccgggaccccaaccagggcggcaaggacatcacagaggagatcatgtctggggccaggacagccagcacccccaccccaccccagacaggaggcggcctggagccccaggccaacggggagaccccccaggtggccgtgattgtgcggccagatgacaggagccagggcgccatcatcgctgacaggcctggcctgcccggccctgagcacagccccagcgagagccagcccagcagccccagccccacccccagccccagccctgtgctggagcccggcagcgagcccaacctggccgtgctgagcatccctggggacaccatgaccaccatccagatgtctgtggaggagagcacccccatcagccgggagactggagagccctaccgcctgagccctgagcccacccccctggccgagcccatcctggaggtggaggtgaccctgagcaagcctgtgcctgagagcgagttcagcagcagccccctgcaggcccccacccccctggccagccacacagtggagatccacgagcccaacggcatggtgcccagcgaggacctggagcctgaggtggagagcagccctgagctggcccctcctccagcctgccccagcgagagccctgtgcccatcgcccccacagcccagcctgaggagctgctgaatggagcccccagccccccagctgtggacctgagccctgtgtctgagcctgaggagcaggccaaggaggtgacagcctccatggccccacccaccatccccagcgccaccccagccacagcccccagcgccaccagccctgcccaggaggaggagatggaggaggaggaggaggaggaggagggggaggccggggaggccggggaggccgagagcgagaagggcggggaggagctgctgcccccagagagcacccccatcccagccaacctgagccagaacctggaggccgctgctgccacccaggtggccgtgtctgtgcccaagagaagaaggaagatcaaggagctgaacaagaaggaggccgtgggggacctgctggatgccttcaaggaggccaacccagctgtgcctgaggtggagaaccagcccccagctggcagcaaccctggccctgagagcgagggcagcggcgtgccccccaggcctgaggaggctgatgagacctgggacagcaaggaggacaagatccacaatgctgagaacatccagcctggagagcagaagtatgagtacaagagtgaccagtggaagcccctgaacctggaggagaagaagagatatgaccgggagttcctgctgggcttccagttcatctttgcctccatgcagaagccagagggcctgccccacatcagtgatgtggtgctggacaaggccaacaagacccccctgcggcccctggaccccacccggctgcagggcatcaactgtggccctgacttcacccccagctttgccaacctgggccgcaccaccctgagcacccggggccccccccggggcggccctggaggagagctgccccggggccctgctggcctgggcccccggcgcagccagcagggccccaggaaggagcccaggaagatcatcgccaccgtgctgatgacagaggacatcaagctgaacaaggccgagaaggcctggaagcccagcagcaagaggacagctgctgacaaggacagaggagaggaggatgctgatggcagcaagacccaggacctcttccggcgggtgcgcagcatcctgaacaagctgaccccccagatgttccagcagctgatgaagcaggtgacccagctggccatcgacacagaggagcggctgaagggcgtcatcgacctgatctttgagaaggccatcagcgagcccaacttctctgtggcctatgccaacatgtgccgctgcctgatggccctgaaggtgcccaccacagagaagcccaccgtgacagtgaacttcaggaagctgctgctgaaccgctgccagaaggagtttgagaaggacaaggatgatgatgaggtgtttgagaagaagcagaaggagatggatgaagctgccacagctgaggagcggggccgcctgaaggaggagctggaggaggcccgggacatcgccaggagaagaagcctgggcaacatcaagttcatcggggagctgttcaagctgaagatgctgacagaggccatcatgcatgactgtgtggtgaagctgctgaagaaccatgatgaggagagcctggagtgcctgtgccgcctgctgaccaccatcggcaaggacctggactttgagaaggccaagcccaggatggaccagtacttcaaccagatggagaagatcatcaaggagaagaagaccagcagccgcatccgcttcatgctgcaggatgtgctggacctgcggggcagcaactgggtgcccaggagaggagaccagggccccaagaccatcgaccagatccacaaggaggccgagatggaggagcaccgggagcacatcaaggtgcagcagctgatggccaagggcagtgacaagagaagaggaggccccccaggcccccccatcagccggggcctgcccctggtggatgatggcggctggaacacagtgcccatcagcaagggcagccggcccatcgacaccagccggctgaccaagatcaccaagccaggcagcattgacagcaacaaccagctgtttgcccctgggggccgcctgtcctggggcaagggcagcagcggcggcagcggggccaagcccagtgatgctgccagcgaggccgcccggcctgccaccagcaccctgaaccgcttcagcgccctgcagcaggccgtgcccacagagagcacagacaacagaagagtggtgcagaggagcagcctgagccgggagcggggggagaaggccggggacagaggagaccggctggagaggtctgagcggggcggggacagaggagaccggctggaccgggcccggaccccagccaccaagaggagcttcagcaaggaggtggaggagaggagccgggagcggcccagccagcctgagggcctgaggaaggccgccagcctgacagaggaccgggaccggggcagagatgctgtgaagcgggaggccgccctgccccctgtgagccccctgaaggccgccctgtctgaggaggagctggagaagaagagcaaggccatcatcgaggagtacctgcacctgaatgacatgaaggaggccgtgcagtgtgtgcaggagctggccagccccagcctgctcttcatctttgtgagacatggagtggagagcaccctggagaggtctgccatcgcccgggagcacatgggccagctgctgcaccagctgctgtgtgccggccacctgagcacagcccagtactaccagggcctgtatgagatcctggagctggccgaggacatggagattgacatcccccacgtgtggctgtacctggccgagctggtgacccccatcctgcaggagggcggcgtgcccatgggagagctgttccgggagatcaccaagcccctgcggcccctgggcaaggccgccagcctgctgctggagatcctgggcctgctgtgcaagtccatgggccccaagaaggtgggcaccctgtggagggaggccggcctgtcctggaaggagttcctgcctgagggccaggacattggagcctttgtggccgagcagaaggtggagtacaccctgggggaggagagcgaggcccctggccagagggccctgcccagcgaggagctgaaccggcagctggagaagctgctgaaggagggcagcagcaaccagagggtgtttgactggattgaggccaacctgtctgagcagcagatcgtgagcaacaccctggtgcgggccctgatgacagctgtgtgctacagcgccatcatctttgagacccccctgcgggtggatgtggccgtgctgaaggcccgggccaagctgctgcagaagtacctgtgtgatgagcagaaggagctgcaggccctgtatgccctgcaggccctggtggtgaccctggagcagccccccaacctgctgaggatgttctttgatgccctgtatgatgaagatgtggtgaaggaggatgccttctacagctgggagagcagcaaggaccctgctgagcagcagggcaaaggagtggccctgaagtctgtgacagccttcttcaagtggctgcgggaggccgaggaggagagtgaccacaactag

SEQ ID NO: 19564 - DNA, 4821 bp, synthetic construct; identical to SEQ ID NO: 19558
  misc_feature 1..4821: note = Description of Artificial Sequence: Synthetic coding sequence
  source 1..4821: mol_type = other DNA

SEQ ID NO: 19565 - DNA, 492 bp, synthetic construct
  misc_feature 1..492: note = Description of Artificial Sequence: Synthetic coding sequence
  source 1..492: mol_type = other DNA
atgtctggggccaggacagccagcacccccaccccaccccagacaggaggcggcctggagccccaggccaacggggagaccccccaggtggccgtgattgtgcggccagatgacaggagccagggcgccatcatcgctgacaggcctggcctgcccggccctgagcacagccccagcgagagccagcccagcagccccagccccacccccagccccagccctgtgctggagcccggcagcgagcccaacctggccgtgctgagcatccctggggacaccatgaccaccatccagatgtctgtggaggagagcacccccatcagccgggagactggagagccctaccgcctgagccctgagcccacccccctggccgagcccatcctggaggtggaggtgaccctgagcaagcctgtgcctgagagcgagttcagcagcagccccctgcaggcccccacccccctggccagccacacagtggagatccactag

SEQ ID NO: 19566 - DNA, 4542 bp, synthetic construct
  misc_feature 1..4542: note = Description of Artificial Sequence: Synthetic coding sequence
  source 1..4542: mol_type = other DNA
atgatgatccccagccagatctcctacccagccagccagggcgcctactacatccctggccagggccgcagcacctacgtggtgcccacccagcagtaccctgtgcagcccggggcccctggcttctacccaggggccagccccacagaatttggcacctacgccggggcctactacccagcccagggcgtgcagcagttccccactggagtggcccccacccctgtgctgatgaaccagcccccccagatcgcccccaagcgggagaggaagaccatccgcatccgggaccccaaccagggcggcaaggacatcacagaggagatcatgtctggggccaggacagccagcacccccaccccaccccagacaggaggcggcctggagccccaggccaatggagagaccccccaggtggccgtcatcgtgcggccagatgacaggagccagggcgccatcatcgctgaccggcccggcctgcccggccctgagcacagccccagcgagagccagcccagcagccccagccccacccccagccccagccctgtgctggagcccggcagcgagcccaacctggccgtgctgagcatccctggggacaccatgaccaccatccagatgtctgtggaggagagcacccccatcagccgggagaccggggagccctaccgcctgagccctgagcccacccccctggccgagcccatcctggaggtggaggtgaccctgagcaagcctgtgcctgagagcgagttcagcagcagccccctgcaggcccccacccccctggccagccacacagtggagatccacgagcccaacggcatggtgcccagcgaggacctggagcctgaggtggagagcagccctgagctggcccctcctccagcctgccccagcgagagccctgtgcccatcgcccccacagcccagcctgaggagctgctgaatggagcccccagccccccagctgtggacctgagccctgtgtctgagcctgaggagcaggccaaggaggtgacagcctccatggccccacccaccatccccagcgccaccccagccacagcccccagcgccaccagccctgcccaggaggaggagatggaggaggaggaggaggaggaggagggggaggccggggaggccggggaggccgagagcgagaagggcggggaggagctgctgcccccagagagcacccccatcccagccaacctgagccagaacctggaggccgccgccgccacccaggtggccgtgtctgtgcccaagagaagaaggaagatcaaggagctgaacaagaaggaggccgtgggggacctgctggatgccttcaaggaggccaacccagctgtgcctgaggtggagaaccagcccccagctggcagcaaccctggccctgagagcgagggcagcggcgtgccccccaggcctgaggaggctgatgagacctgggacagcaaagaagacaagatccacaatgctgagaacatccagcccggggagcagaagtatgagtacaagagtgaccagtggaagcccctgaacctggaggagaagaagagatatgaccgggagttcctgctgggcttccagttcatctttgcctccatgcagaagccagagggcctgccccacatcagtgatgtggtgctggacaaggccaacaagacccccctgcggcccctggaccccacccggctgcagggcatcaactgtggccctgacttcacccccagctttgccaacctgggccgcaccaccctgagcacccggggccccccccggggcggccctggaggagagctgccccggggcccccaggccggcctgggcccccggcgcagccagcagggccccaggaaggagcccaggaagatcatcgccaccgtgctgatgacagaggacatcaagctgaacaaggccgagaaggcctggaagcccagcagcaagaggacagctgctgacaaggacagaggagaggaggatgctgatggcagcaagacccaggacctcttccggcgggtgcgcagcatcctgaacaagctgaccccccagatgttccagcagctgatgaagcaggtgacccagctggccatcgacacagaggagcggctgaagggcgtcatcgacctgatctttgagaaggccatcagcgagcccaacttctctgtggcctatgccaacatgtgccgctgcctgatggccctgaaggtgcccaccacagagaagcccaccgtgacagtgaacttcaggaagctgctgctgaaccgctgccagaaggagtttgagaaggacaaggatgatgatgaggtgtttgagaagaagcagaaggagatggatgaagctgccacagctgaggagcggggccgcctgaaggaggagctggaggaggcccgggacatcgccaggagaagaagcctgggcaacatcaagttcatcggggagctgttcaagctgaagatgctgacagaggccatcatgcatgactgtgtggtgaagctgctgaagaaccatgatgaggagagcctggagtgcctgtgccgcctgctgaccaccatcggcaaggacctggactttgagaaggccaagcccaggatggaccagtacttcaaccagatggagaagatcatcaaggagaagaagaccagcagccgcatccgcttcatgctgcaggatgtgctggacctgcggggcagcaactgggtgcccaggagaggagaccagggccccaagaccatcgaccagatccacaaggaggccgagatggaggagcaccgggagcacatcaaggtgcagcagctgatggccaagggcagtgacaagagaagaggaggccccccaggcccccccatcagccggggcctgcccctggtggatgatggcggctggaacacagtgcccatcagcaagggcagccggcccatcgacaccagccggctgaccaagatcaccaagccaggcagcattgacagcaacaaccagctgtttgcccctgggggccgcctgtcctggggcaagggcagcagcggcggcagcggggccaagcccagtgatgctgccagcgaggccgcccggcctgccaccagcaccctgaaccgcttcagcgccctgcagcaggccgtgcccacagagagcacagacaacagaagagtggtgcagaggagcagcctgagccgggagcggggggagaaggccggggacagaggagaccggctggagaggtctgagcggggcggggacagaggagaccggctggaccgggcccggaccccagccaccaagaggagcttcagcaaggaggtggaggagaggagccgggagcggcccagccagcctgagggcctgaggaaggccgccagcctgacagaggaccgggaccggggcagagatgctgtgaagcgggaggccgccctgccccctgtgagccccctgaaggccgccctgtctgaggaggagctggagaagaagagcaaggccatcatcgaggagtacctgcacctgaatgacatgaaggaggccgtgcagtgtgtgcaggagctggccagccccagcctgctcttcatctttgtgagacatggagtggagagcaccctggagaggtctgccatcgcccgggagcacatgggccagctgctgcaccagctgctgtgtgccggccacctgagcacagcccagtactaccagggcctgtatgagatcctggagctggccgaggacatggagattgacatcccccacgtgtggctgtacctggccgagctggtgacccccatcctgcaggagggcggcgtgcccatgggagagctgttccgggagatcaccaagcccctgcggcccctgggcaaggccgccagcctgctgctggagatcctgggcctgctgtgcaagtccatgggccccaagaaggtgggcaccctgtggagggaggccggcctgtcctggaaggagttcctgcctgagggccaggacattggagcctttgtggccgagcagaaggtggagtacaccctgggggaggagagcgaggcccctggccagagggccctgcccagcgaggagctgaaccggcagctggagaagctgctgaaggagggcagcagcaaccagagggtgtttgactggattgaggccaacctgtctgagcagcagatcgtgagcaacaccctggtgcgggccctgatgacagctgtgtgctacagcgccatcatctttgagacccccctgcgggtggatgtggccgtgctgaaggcccgggccaagctgctgcagaagtacctgtgtgatgagcagaaggagctgcaggccctgtatgccctgcaggccctggtggtgaccctggagcagccccccaacctgctgaggatgttctttgatgccctgtatgatgaagatgtggtgaaggaggatgccttctacagctgggagagcagcaaggaccctgctgagcagcagggcaaaggagtggccctgaagtctgtgacagccttcttcaagtggctgcgggaggccgaggaggagagtgaccacaactag

SEQ ID NO: 19567 - DNA, 432 bp, synthetic construct
  misc_feature 1..432: note = Description of Artificial Sequence: Synthetic coding sequence
  source 1..432: mol_type = other DNA
atgtctggggccaggacagccagcacccccaccccaccccagacaggaggcggcctggagccccaggccaacggggagaccccccaggtggccgtgattgtgcggccagatgacaggagccagggcgccatcatcgctgacaggcctggcctgcccggccctgagcacagccccagcgagagccagcccagcagccccagccccacccccagccccagccctgtgctggagcccggcagcgagcccaacctggccgtgctgagcatccctggggacaccatgaccaccatccagatgtctgtggaggagagcacccccatcagccgggagactggagagccctaccgcctgagccctgagcccacccccctggccgagcccatcctggaggtggaggtgaccctgagcaagcctgtgcctgagagcgagtag

SEQ ID NO: 19568 - DNA, 4215 bp, synthetic construct
  misc_feature 1..4215: note = Description of Artificial Sequence: Synthetic coding sequence
  source 1..4215: mol_type = other DNA
atgtctggggccaggacagccagcacccccaccccaccccagacaggaggcggcctggagccccaggccaacggggagaccccccaggtggccgtgattgtgcggccagatgacaggagccagggcgccatcatcgctgacaggcctggcctgcccggccctgagcacagccccagcgagagccagcccagcagccccagccccacccccagccccagccctgtgctggagcccggcagcgagcccaacctggccgtgctgagcatccctggggacaccatgaccaccatccagatgtctgtggaggagagcacccccatcagccgggagactggagagccctaccgcctgagccctgagcccacccccctggccgagcccatcctggaggtggaggtgaccctgagcaagcctgtgcctgagagcgagttcagcagcagccccctgcaggcccccacccccctggccagccacacagtggagatccacgagcccaacggcatggtgcccagcgaggacctggagcctgaggtggagagcagccctgagctggcccctcctccagcctgccccagcgagagccctgtgcccatcgcccccacagcccagcctgaggagctgctgaatggagcccccagccccccagctgtggacctgagccctgtgtctgagcctgaggagcaggccaaggaggtgacagcctccatggccccacccaccatccccagcgccaccccagccacagcccccagcgccaccagccctgcccaggaggaggagatggaggaggaggaggaggaggaggagggggaggccggggaggccggggaggccgagagcgagaagggcggggaggagctgctgcccccagagagcacccccatcccagccaacctgagccagaacctggaggccgctgctgccacccaggtggccgtgtctgtgcccaagagaagaaggaagatcaaggagctgaacaagaaggaggccgtgggggacctgctggatgccttcaaggaggccaacccagctgtgcctgaggtggagaaccagcccccagctggcagcaaccctggccctgagagcgagggcagcggcgtgccccccaggcctgaggaggctgatgagacctgggacagcaaggaggacaagatccacaatgctgagaacatccagcctggagagcagaagtatgagtacaagagtgaccagtggaagcccctgaacctggaggagaagaagagatatgaccgggagttcctgctgggcttccagttcatctttgcctccatgcagaagccagagggcctgccccacatcagtgatgtggtgctggacaaggccaacaagacccccctgcggcccctggaccccacccggctgcagggcatcaactgtggccctgacttcacccccagctttgccaacctgggccgcaccaccctgagcacccggggccccccccggggcggccctggaggagagctgccccggggcccccaggccggcctgggccccaggaggagccagcagggccccaggaaggagcccaggaagatcatcgccaccgtgctgatgacagaggacatcaagctgaacaaggccgagaaggcctggaagcccagcagcaagaggacagctgctgacaaggacagaggagaagaagatgctgatggcagcaagacccaggacctcttcagaagagtgcgcagcatcctgaacaagctgaccccccagatgttccagcagctgatgaagcaggtgacccagctggccatcgacacagaggagcggctgaagggcgtgattgacctgatctttgagaaggccatcagcgagcccaacttctctgtggcctatgccaacatgtgccgctgcctgatggccctgaaggtgcccaccacagagaagcccaccgtgacagtgaacttcaggaagctgctgctgaaccgctgccagaaggagtttgagaaggacaaggatgatgatgaggtgtttgagaagaagcagaaggagatggatgaggccgccacagctgaggagcggggccgcctgaaggaggagctggaggaggcccgggacatcgcccggcggcgcagcctgggcaacatcaagttcatcggggagctgttcaagctgaagatgctgacagaggccatcatgcatgactgtgtggtgaagctgctgaagaaccatgatgaggagagcctggagtgcctgtgccgcctgctgaccaccatcggcaaggacctggactttgagaaggccaagcccaggatggaccagtacttcaaccagatggagaagatcatcaaggagaagaagaccagcagccgcatccgcttcatgctgcaggatgtgctggacctgcggggcagcaactgggtgccccggcggggggaccagggccccaagaccatcgaccagatccacaaggaggccgagatggaggagcaccgggagcacatcaaggtgcagcagctgatggccaagggcagtgacaagaggcggggcggccccccaggcccccccatcagccggggcctgcccctggtggatgatggcggctggaacacagtgcccatcagcaagggcagccggcccatcgacaccagccggctgaccaagatcaccaagccaggcagcattgacagcaacaaccagctgtttgcccctgggggccgcctgtcctggggcaagggcagcagcggcggcagcggggccaagcccagtgatgctgccagcgaggccgcccggcctgccaccagcaccctgaaccgcttcagcgccctgcagcaggccgtgcccacagagagcacagacaacagaagagtggtgcagaggagcagcctgagccgggagcggggggagaaggccggggacagaggagaccggctggagaggtctgagcggggcggggacagaggagaccggctggaccgggcccggaccccagccaccaagaggagcttcagcaaggaggtggaggagaggagccgggagcggcccagccagcctgagggcctgaggaaggccgccagcctgacagaagatcgggaccggggcagagatgctgtgaagcgggaggccgccctgccccctgtgagccccctgaaggccgccctgtctgaggaggagctggagaagaagagcaaggccatcatcgaggagtacctgcacctgaatgacatgaaggaggccgtgcagtgtgtgcaggagctggccagccccagcctgctcttcatctttgtgagacatggagtggagagcaccctggagaggtctgccatcgcccgggagcacatgggccagctgctgcaccagctgctgtgtgccggccacctgagcacagcccagtactaccagggcctgtatgagatcctggagctggccgaggacatggagattgacatcccccacgtgtggctgtacctggccgagctggtgacccccatcctgcaggagggcggcgtgcccatgggagagctgttccgggagatcaccaagcccctgcggcccctgggcaaggccgccagcctgctgctggagatcctgggcctgctgtgcaagtccatgggccccaagaaggtgggcaccctgtggagggaggccggcctgtcctggaaggagttcctgcctgagggccaggacatcggggcctttgtggccgagcagaaggtggagtacaccctgggggaggagagcgaggcccctggccagagggccctgcccagcgaggagctgaaccggcagctggagaagctgctgaaggagggcagcagcaaccagagggtgtttgactggattgaggccaacctgtctgagcagcagatcgtgagcaacaccctggtgcgggccctgatgacagctgtgtgctacagcgccatcatctttgagacccccctgcgggtggatgtggccgtgctgaaggcccgggccaagctgctgcagaagtacctgtgtgatgagcagaaggagctgcaggccctgtatgccctgcaggccctggtggtgaccctggagcagccccccaacctgctgaggatgttctttgatgccctgtatgatgaagatgtggtgaaggaggatgccttctacagctgggagagcagcaaggaccctgctgagcagcagggcaagggcgtggccctgaagtctgtgacagccttcttcaagtggctgcgggaggccgaggaggagagtgaccacaactag

SEQ ID NO: 19569 - DNA, 4212 bp, synthetic construct
  misc_feature 1..4212: note = Description of Artificial Sequence: Synthetic coding sequence
  source 1..4212: mol_type = other DNA
atgtctggggccaggacagccagcacccccaccccaccccagacaggaggcggcctggagccccaggccaacggggagaccccccaggtggccgtgattgtgcggccagatgacaggagccagggcgccatcatcgctgacaggcctggcctgcccggccctgagcacagccccagcgagagccagcccagcagccccagccccacccccagccccagccctgtgctggagcccggcagcgagcccaacctggccgtgctgagcatccctggggacaccatgaccaccatccagatgtctgtggaggagagcacccccatcagccgggagactggagagccctaccgcctgagccctgagcccacccccctggccgagcccatcctggaggtggaggtgaccctgagcaagcctgtgcctgagagcgagttcagcagcagccccctgcaggcccccacccccctggccagccacacagtggagatccacgagcccaacggcatggtgcccagcgaggacctggagcctgaggtggagagcagccctgagctggcccctcctccagcctgccccagcgagagccctgtgcccatcgcccccacagcccagcctgaggagctgctgaatggagcccccagccccccagctgtggacctgagccctgtgtctgagcctgaggagcaggccaaggaggtgacagcctccatggccccacccaccatccccagcgccaccccagccacagcccccagcgccaccagccctgcccaggaggaggagatggaggaggaggaggaggaggaggagggggaggccggggaggccggggaggccgagagcgagaagggcggggaggagctgctgcccccagagagcacccccatcccagccaacctgagccagaacctggaggccgctgctgccacccaggtggccgtgtctgtgcccaagagaagaaggaagatcaaggagctgaacaagaaggaggccgtgggggacctgctggatgccttcaaggaggccaacccagctgtgcctgaggtggagaaccagcccccagctggcagcaaccctggccctgagagcgagggcagcggcgtgccccccaggcctgaggaggctgatgagacctgggacagcaaggaggacaagatccacaatgctgagaacatccagcctggagagcagaagtatgagtacaagagtgaccagtggaagcccctgaacctggaggagaagaagagatatgaccgggagttcctgctgggcttccagttcatctttgcctccatgcagaagccagagggcctgccccacatcagtgatgtggtgctggacaaggccaacaagacccccctgcggcccctggaccccacccggctgcagggcatcaactgtggccctgacttcacccccagctttgccaacctgggccgcaccaccctgagcacccggggccccccccggggcggccctggaggagagctgccccggggccctgctggcctgggcccccggcgcagccagcagggccccaggaaggagcccaggaagatcatcgccaccgtgctgatgacagaggacatcaagctgaacaaggccgagaaggcctggaagcccagcagcaagaggacagctgctgacaaggacagaggagaggaggatgctgatggcagcaagacccaggacctcttccggcgggtgcgcagcatcctgaacaagctgaccccccagatgttccagcagctgatgaagcaggtgacccagctggccatcgacacagaggagcggctgaagggcgtcatcgacctgatctttgagaaggccatcagcgagcccaacttctctgtggcctatgccaacatgtgccgctgcctgatggccctgaaggtgcccaccacagagaagcccaccgtgacagtgaacttcaggaagctgctgctgaaccgctgccagaaggagtttgagaaggacaaggatgatgatgaggtgtttgagaagaagcagaaggagatggatgaagctgccacagctgaggagcggggccgcctgaaggaggagctggaggaggcccgggacatcgccaggagaagaagcctgggcaacatcaagttcatcggggagctgttcaagctgaagatgctgacagaggccatcatgcatgactgtgtggtgaagctgctgaagaaccatgatgaggagagcctggagtgcctgtgccgcctgctgaccaccatcggcaaggacctggactttgagaaggccaagcccaggatggaccagtacttcaaccagatggagaagatcatcaaggagaagaagaccagcagccgcatccgcttcatgctgcaggatgtgctggacctgcggggcagcaactgggtgcccaggagaggagaccagggccccaagaccatcgaccagatccacaaggaggccgagatggaggagcaccgggagcacatcaaggtgcagcagctgatggccaagggcagtgacaagagaagaggaggccccccaggcccccccatcagccggggcctgcccctggtggatgatggcggctggaacacagtgcccatcagcaagggcagccggcccatcgacaccagccggctgaccaagatcaccaagccaggcagcattgacagcaacaaccagctgtttgcccctgggggccgcctgtcctggggcaagggcagcagcggcggcagcggggccaagcccagtgatgctgccagcgaggccgcccggcctgccaccagcaccctgaaccgcttcagcgccctgcagcaggccgtgcccacagagagcacagacaacagaagagtggtgcagaggagcagcctgagccgggagcggggggagaaggccggggacagaggagaccggctggagaggtctgagcggggcggggacagaggagaccggctggaccgggcccggaccccagccaccaagaggagcttcagcaaggaggtggaggagaggagccgggagcggcccagccagcctgagggcctgaggaaggccgccagcctgacagaggaccgggaccggggcagagatgctgtgaagcgggaggccgccctgccccctgtgagccccctgaaggccgccctgtctgaggaggagctggagaagaagagcaaggccatcatcgaggagtacctgcacctgaatgacatgaaggaggccgtgcagtgtgtgcaggagctggccagccccagcctgctcttcatctttgtgagacatggagtggagagcaccctggagaggtctgccatcgcccgggagcacatgggccagctgctgcaccagctgctgtgtgccggccacctgagcacagcccagtactaccagggcctgtatgagatcctggagctggccgaggacatggagattgacatcccccacgtgtggctgtacctggccgagctggtgacccccatcctgcaggagggcggcgtgcccatgggagagctgttccgggagatcaccaagcccctgcggcccctgggcaaggccgccagcctgctgctggagatcctgggcctgctgtgcaagtccatgggccccaagaaggtgggcaccctgtggagggaggccggcctgtcctggaaggagttcctgcctgagggccaggacattggagcctttgtggccgagcagaaggtggagtacaccctgggggaggagagcgaggcccctggccagagggccctgcccagcgaggagctgaaccggcagctggagaagctgctgaaggagggcagcagcaaccagagggtgtttgactggattgaggccaacctgtctgagcagcagatcgtgagcaacaccctggtgcgggccctgatgacagctgtgtgctacagcgccatcatctttgagacccccctgcgggtggatgtggccgtgctgaaggcccgggccaagctgctgcagaagtacctgtgtgatgagcagaaggagctgcaggccctgtatgccctgcaggccctggtggtgaccctggagcagccccccaacctgctgaggatgttctttgatgccctgtatgatgaagatgtggtgaaggaggatgccttctacagctgggagagcagcaaggaccctgctgagcagcagggcaaaggagtggccctgaagtctgtgacagccttcttcaagtggctgcgggaggccgaggaggagagtgaccacaactag

SEQ ID NO: 19570 - DNA, 4311 bp, synthetic construct
  misc_feature 1..4311: note = Description of Artificial Sequence: Synthetic coding sequence
  source 1..4311: mol_type = other DNA
atgaaccagcccccccagatcgcccccaagcgggagaggaagaccatccgcatccgggaccccaaccagggcggcaaggacatcacagaggagatcatgtctggggccaggacagccagcacccccaccccaccccagacaggaggcggcctggagccccaggccaacggggagaccccccaggtggccgtgattgtgcggccagatgacaggagccagggcgccatcatcgctgacaggcctggcctgcccggccctgagcacagccccagcgagagccagcccagcagccccagccccacccccagccccagccctgtgctggagcccggcagcgagcccaacctggccgtgctgagcatccctggggacaccatgaccaccatccagatgtctgtggaggagagcacccccatcagccgggagactggagagccctaccgcctgagccctgagcccacccccctggccgagcccatcctggaggtggaggtgaccctgagcaagcctgtgcctgagagcgagttcagcagcagccccctgcaggcccccacccccctggccagccacacagtggagatccacgagcccaacggcatggtgcccagcgaggacctggagcctgaggtggagagcagccctgagctggcccctcctccagcctgccccagcgagagccctgtgcccatcgcccccacagcccagcctgaggagctgctgaatggagcccccagccccccagctgtggacctgagccctgtgtctgagcctgaggagcaggccaaggaggtgacagcctccatggccccacccaccatccccagcgccaccccagccacagcccccagcgccaccagccctgcccaggaggaggagatggaggaggaggaggaggaggaggagggggaggccggggaggccggggaggccgagagcgagaagggcggggaggagctgctgcccccagagagcacccccatcccagccaacctgagccagaacctggaggccgctgctgccacccaggtggccgtgtctgtgcccaagagaagaaggaagatcaaggagctgaacaagaaggaggccgtgggggacctgctggatgccttcaaggaggccaacccagctgtgcctgaggtggagaaccagcccccagctggcagcaaccctggccctgagagcgagggcagcggcgtgccccccaggcctgaggaggctgatgagacctgggacagcaaggaggacaagatccacaatgctgagaacatccagcctggagagcagaagtatgagtacaagagtgaccagtggaagcccctgaacctggaggagaagaagagatatgaccgggagttcctgctgggcttccagttcatctttgcctccatgcagaagccagagggcctgccccacatcagtgatgtggtgctggacaaggccaacaagacccccctgcggcccctggaccccacccggctgcagggcatcaactgtggccctgacttcacccccagctttgccaacctgggccgcaccaccctgagcacccggggccccccccggggcggccctggaggagagctgccccggggcccccaggccggcctgggccccaggaggagccagcagggccccaggaaggagcccaggaagatcatcgccaccgtgctgatgacagaggacatcaagctgaacaaggccgagaaggcctggaagcccagcagcaagaggacagctgctgacaaggacagaggagaagaagatgctgatggcagcaagacccaggacctcttcagaagagtgcgcagcatcctgaacaagctgaccccccagatgttccagcagctgatgaagcaggtgacccagctggccatcgacacagaggagcggctgaagggcgtgattgacctgatctttgagaaggccatcagcgagcccaacttctctgtggcctatgccaacatgtgccgctgcctgatggccctgaaggtgcccaccacagagaagcccaccgtgacagtgaacttcaggaagctgctgctgaaccgctgccagaaggagtttgagaaggacaaggatgatgatgaggtgtttgagaagaagcagaaggagatggatgaggccgccacagctgaggagcggggccgcctgaaggaggagctggaggaggcccgggacatcgcccggcggcgcagcctgggcaacatcaagttcatcggggagctgttcaagctgaagatgctgacagaggccatcatgcatgactgtgtggtgaagctgctgaagaaccatgatgaggagagcctggagtgcctgtgccgcctgctgaccaccatcggcaaggacctggactttgagaaggccaagcccaggatggaccagtacttcaaccagatggagaagatcatcaaggagaagaagaccagcagccgcatccgcttcatgctgcaggatgtgctggacctgcggggcagcaactgggtgccccggcggggggaccagggccccaagaccatcgaccagatccacaaggaggccgagatggaggagcaccgggagcacatcaaggtgcagcagctgatggccaagggcagtgacaagaggcggggcggccccccaggcccccccatcagccggggcctgcccctggtggatgatggcggctggaacacagtgcccatcagcaagggcagccggcccatcgacaccagccggctgaccaagatcaccaagccaggcagcattgacagcaacaaccagctgtttgcccctgggggccgcctgtcctggggcaagggcagcagcggcggcagcggggccaagcccagtgatgctgccagcgaggccgcccggcctgccaccagcaccctgaaccgcttcagcgccctgcagcaggccgtgcccacagagagcacagacaacagaagagtggtgcagaggagcagcctgagccgggagcggggggagaaggccggggacagaggagaccggctggagaggtctgagcggggcggggacagaggagaccggctggaccgggcccggaccccagccaccaagaggagcttcagcaaggaggtggaggagaggagccgggagcggcccagccagcctgagggcctgaggaaggccgccagcctgacagaagatcgggaccggggcagagatgctgtgaagcgggaggccgccctgccccctgtgagccccctgaaggccgccctgtctgaggaggagctggagaagaagagcaaggccatcatcgaggagtacctgcacctgaatgacatgaaggaggccgtgcagtgtgtgcaggagctggccagccccagcctgctcttcatctttgtgagacatggagtggagagcaccctggagaggtctgccatcgcccgggagcacatgggccagctgctgcaccagctgctgtgtgccggccacctgagcacagcccagtactaccagggcctgtatgagatcctggagctggccgaggacatggagattgacatcccccacgtgtggctgtacctggccgagctggtgacccccatcctgcaggagggcggcgtgcccatgggagagctgttccgggagatcaccaagcccctgcggcccctgggcaaggccgccagcctgctgctggagatcctgggcctgctgtgcaagtccatgggccccaagaaggtgggcaccctgtggagggaggccggcctgtcctggaaggagttcctgcctgagggccaggacatcggggcctttgtggccgagcagaaggtggagtacaccctgggggaggagagcgaggcccctggccagagggccctgcccagcgaggagctgaaccggcagctggagaagctgctgaaggagggcagcagcaaccagagggtgtttgactggattgaggccaacctgtctgagcagcagatcgtgagcaacaccctggtgcgggccctgatgacagctgtgtgctacagcgccatcatctttgagacccccctgcgggtggatgtggccgtgctgaaggcccgggccaagctgctgcagaagtacctgtgtgatgagcagaaggagctgcaggccctgtatgccctgcaggccctggtggtgaccctggagcagccccccaacctgctgaggatgttctttgatgccctgtatgatgaagatgtggtgaaggaggatgccttctacagctgggagagcagcaaggaccctgctgagcagcagggcaagggcgtggccctgaagtctgtgacagccttcttcaagtggctgcgggaggccgaggaggagagtgaccacaactag

SEQ ID NO: 19571 - DNA, 384 bp, synthetic construct
  misc_feature 1..384: note = Description of Artificial Sequence: Synthetic coding sequence
  source 1..384: mol_type = other DNA
atgtctggggccaggacagccagcacccccaccccaccccagacaggaggcggcctggagccccaggccaacggggagaccccccaggtggccgtgattgtgcggccagatgacaggagccagggcgccatcatcgctgacaggcctggcctgcccggccctgagcacagccccagcgagagccagcccagcagccccagccccacccccagccccagccctgtgctggagcccggcagcgagcccaacctggccgtgctgagcatccctggggacaccatgaccaccatccagatgtctgtggaggagagcacccccatcagccgggagactggagagccctaccgcctgagccctgagcccacccccctggccgagccctag

SEQ ID NO: 19572 - DNA, 264 bp, synthetic construct
  misc_feature 1..264: note = Description of Artificial Sequence: Synthetic coding sequence
  source 1..264: mol_type = other DNA
atgaacacccccagccagccccggcagcacttctaccccagccgggcccagccccccagcagcgctgccagccgggtgcagagcgctgccccagcccggcccggccctgctgcccacgtgtacccagctggcagccaggtgatgatgatccccagccagatctcctacccagccagccagggcgcctactacatccctggccagggccgcagcacctacgtggtgcccacccagcagtaccctgtgcagcccggggccccctag

SEQ ID NO: 19573 - DNA, 858 bp, synthetic construct
  misc_feature 1..858: note = Description of Artificial Sequence: Synthetic coding sequence
  source 1..858: mol_type = other DNA
atgtctggggccaggacagccagcacccccaccccaccccagacaggaggcggcctggagccccaggccaacggggagaccccccaggtggccgtgattgtgcggccagatgacaggagccagggcgccatcatcgctgacaggcctggcctgcccggccctgagcacagccccagcgagagccagcccagcagccccagccccacccccagccccagccctgtgctggagcccggcagcgagcccaacctggccgtgctgagcatccctggggacaccatgaccaccatccagatgtctgtggaggagagcacccccatcagccgggagactggagagccctaccgcctgagccctgagcccacccccctggccgagcccatcctggaggtggaggtgaccctgagcaagcctgtgcctgagagcgagttcagcagcagccccctgcaggcccccacccccctggccagccacacagtggagatccacgagcccaacggcatggtgcccagcgaggacctggagcctgaggtggagagcagccctgagctggcccctcctccagcctgccccagcgagagccctgtgcccatcgcccccacagcccagcctgaggagctgctgaatggagcccccagccccccagctgtggacctgagccctgtgtctgagcctgaggagcaggccaaggaggtgacagcctccatggccccacccaccatccccagcgccaccccagccacagcccccagcgccaccagccctgcccaggaggaggagatggaggaggaggaggaggaggaggagggggaggccggggaggccggggaggccgagagcgagaagggcggggagtag

SEQ ID NO: 19574 - DNA, 1836 bp, synthetic construct
  misc_feature 1..1836: note = Description of Artificial Sequence: Synthetic coding sequence
  source 1..1836: mol_type = other DNA
atggccgccagcgccaagaagaagaacaagaagggcaagaccatcagcctgacagacttcctggctgaagatggcggcactggaggcggcagcacctacgtgtccaagcctgtgtcctgggcagatgaaacagatgacctggagggagatgtgtccaccacctggcacagcaatgatgatgatgtgtaccgggccccacccatcgacaggagcatcctgcccacagcccccagggctgcccgggagcccaacatcgacaggagccggctgcccaagagccccccctacacagccttcctgggcaacctgccctatgatgtgacagaggagagcatcaaggagttcttccggggcctgaacatctctgctgtgcggctgccccgggagcccagcaaccctgagcggctgaagggcttcggctacgccgagtttgaggacctggacagcctgctgagcgccctgagcctgaatgaggagagcctgggcaacagacgcatccgggtggatgtggccgaccaggcccaggacaaggacagagatgacaggagctttggccgggacaggaacagagacagcgacaagacagacacagactggagggcccggcctgccacagacagctttgatgactacccacccaggagaggagatgacagctttggagacaagtacagagacagatatgacagcgaccgctacagagatggctacagagatggctacagagatggcccccggcgggacatggacagatatggaggccgggacagatatgatgaccggggcagccgggactatgaccggggctatgacagccgcatcggcagcggccggcgggcctttggaagtggctacagaagagatgatgactacagaggaggaggagacagatatgaagatagatatgacagaagagatgaccgctcctggagcagcagagatgactacagcagagatgactacagaagagatgaccggggccccccccagaggcccaagctgaacctgaagcccaggagcacccccaaggaggatgacagcagcgccagcaccagccagagcaccagggctgccagcatctttggaggagccaagcctgtggacacagctgcccgggagcgggaggtggaggagcggctgcagaaggagcaggagaagctgcagaggcagctggatgagcccaagctggagcggcggccccgggagcggcaccccagctggaggtctgaggagacccaggagcgggagaggagcaggacaggcagcgagagcagccagacaggcaccagcaccaccagcagcagaaatgccaggagaagagagagcgagaagagcctggagaatgagaccctgaacaaggaggaggactgccacagccccaccagcaagccacccaagccagaccagcccctgaaggtgatgcctgcccccccacccaaggaaaatgcctgggtgaagaggagcagcaaccccccagcccggagccagagcagtgacacagagcagcagagccccaccagcggcggcggcaaggtggccccagcccagcccagcgaggagggccctggcaggaaggatgagaacaaggtggatggcatgaatgcccccaagggccagacaggcaacagcagccggggccctggagatggcggcaacagagaccactggaaggagagtgacaggaaggatggcaagaaggaccaggacagccgcagcgcccctgagcccaagaagccagaagaaaatcctgccagcaagttcagcagcgccagcaaatatgctgccctgtctgtggatggagaagatgaaaatgaaggagaagattatgcagagtag

SEQ ID NO: 19575 - DNA, 1764 bp, synthetic construct
  misc_feature 1..1764: note = Description of Artificial Sequence: Synthetic coding sequence
  source 1..1764: mol_type = other DNA
atggccgccagcgccaagaagaagaacaagaagggcaagaccatcagcctgacagacttcctggctgaagatggcggcactggaggcggcagcacctacgtgtccaagcctgtgtcctgggcagatgaaacagatgacctggagggagatgtgtccaccacctggcacagcaatgatgatgatgtgtaccgggccccacccatcgacaggagcatcctgcccacagcccccagggctgcccgggagcccaacatcgacaggagccggctgcccaagagccccccctacacagccttcctgggcaacctgccctatgatgtgacagaggagagcatcaaggagttcttccggggcctgaacatctctgctgtgcggctgccccgggagcccagcaaccctgagcggctgaagggcttcggctacgccgagtttgaggacctggacagcctgctgagcgccctgagcctgaatgaggagagcctgggcaacagacgcatccgggtggatgtggccgaccaggcccaggacaaggacagagatgacaggagctttggccgggacaggaacagagacagcgacaagacagacacagactggagggcccggcctgccacagacagctttgatgactacccacccaggagaggagatgacagctttggagacaagtacagagacagatatggaggccgggacagatatgatgaccggggcagccgggactatgaccggggctatgacagccgcatcggcagcggccggcgggcctttggaagtggctacagaagagatgatgactacagaggaggaggagacagatatgaagatagatatgacagaagagatgaccgctcctggagcagcagagatgactacagcagagatgactacagaagagatgaccggggccccccccagaggcccaagctgaacctgaagcccaggagcacccccaaggaggatgacagcagcgccagcaccagccagagcaccagggctgccagcatctttggaggagccaagcctgtggacacagctgcccgggagcgggaggtggaggagcggctgcagaaggagcaggagaagctgcagaggcagctggatgagcccaagctggagcggcggccccgggagcggcaccccagctggaggtctgaggagacccaggagcgggagaggagcaggacaggcagcgagagcagccagacaggcaccagcaccaccagcagcagaaatgccaggagaagagagagcgagaagagcctggagaatgagaccctgaacaaggaggaggactgccacagccccaccagcaagccacccaagccagaccagcccctgaaggtgatgcctgcccccccacccaaggaaaatgcctgggtgaagaggagcagcaaccccccagcccggagccagagcagtgacacagagcagcagagccccaccagcggcggcggcaaggtggccccagcccagcccagcgaggagggccctggcaggaaggatgagaacaaggtggatggcatgaatgcccccaagggccagacaggcaacagcagccggggccctggagatggcggcaacagagaccactggaaggagagtgacaggaaggatggcaagaaggaccaggacagccgcagcgcccctgagcccaagaagccagaagaaaatcctgccagcaagttcagcagcgccagcaaatatgctgccctgtctgtggatggagaagatgaaaatgaaggagaagattatgcagagtag

SEQ ID NO: 19576 - DNA, 714 bp, synthetic construct
  misc_feature 1..714: note = Description of Artificial Sequence: Synthetic coding sequence
  source 1..714: mol_type = other DNA
atgctggacctgaccagccggggccaggtgggcaccagcaggaggatggccgaggccgcctgcagcgcccacttcctggagaccacccccacccccaacccccccaccacagaggaggagaagacagagagcaaccaggaggtggccaaccctgagcactacatcaagcaccccctgcagaaccgctgggccctgtggttcttcaagaatgacaagagcaagacctggcaggccaacctgcggctcatcagcaagtttgacacagtggaggacttctgggccctgtacaaccacatccagctgagcagcaacctgatgcctggctgtgactacagcctcttcaaggatggcatcgagcccatgtgggaggatgagaagaacaagaggggcggccgctggctgatcaccctgaacaagcagcagaggagaagtgacctggaccgcttctggctggagaccctgctgtgcctgattggagagagctttgatgactacagtgatgatgtgtgtggggctgtggtgaatgtgcgggccaagggggacaagatcgccatctggaccacagaatgtgaaaatcgggaggccgtgacccacatcggccgggtgtacaaggagcggctgggcctgccccccaagatcgtgattggctaccagagccatgctgacacagccaccaagagcggcagcaccaccaagaacagatttgtggtgtag

SEQ ID NO: 19577 - DNA, 654 bp, synthetic construct
  misc_feature 1..654: note = Description of Artificial Sequence: Synthetic coding sequence
  source 1..654: mol_type = other DNA
atggccaccgtggagcctgagaccacccccacccccaacccccccaccacagaggaggagaagacagagagcaaccaggaggtggccaaccctgagcactacatcaagcaccccctgcagaaccgctgggccctgtggttcttcaagaatgacaagagcaagacctggcaggccaacctgcggctcatcagcaagtttgacacagtggaggacttctgggccctgtacaaccacatccagctgagcagcaacctgatgcctggctgtgactacagcctcttcaaggatggcatcgagcccatgtgggaggatgagaagaacaagaggggcggccgctggctgatcaccctgaacaagcagcagaggagaagtgacctggaccgcttctggctggagaccctgctgtgcctgattggagagagctttgatgactacagtgatgatgtgtgtggggctgtggtgaatgtgcgggccaagggggacaagatcgccatctggaccacagaatgtgaaaatcgggaggccgtgacccacatcggccgggtgtacaaggagcggctgggcctgccccccaagatcgtgattggctaccagagccatgctgacacagccaccaagagcggcagcaccaccaagaacagatttgtggtgtag

SEQ ID NO: 19578 - DNA, 747 bp, synthetic construct
  misc_feature 1..747: note = Description of Artificial Sequence: Synthetic coding sequence
  source 1..747: mol_type = other DNA
atggccaccgtggagcctgagaccacccccacccccaacccccccaccacagaggaggagaagacagagagcaaccaggaggtggccaaccctgagcactacatcaagcaccccctgcagaaccgctgggccctgtggttcttcaagaatgacaagagcaagacctggcaggccaacctgcggctcatcagcaagtttgacacagtggaggacttctgggccctgtacaaccacatccagctgagcagcaacctgatgcctggctgtgactacagcctcttcaaggatggcatcgagcccatgtgggaggatgagaagaacaagaggggcggccgctggctgatcaccctgaacaagcagcagaggagaagtgacctggaccgcttctggctggagacccgctgggacctggccatgctgccccggctggtgagcaacttctggccccaggtgatcctgcccctgcagccccccaaggtgctggagctgcagctgctgtgcctgattggagagagctttgatgactacagtgatgatgtgtgtggggctgtggtgaatgtgcgggccaagggggacaagatcgccatctggaccacagaatgtgagaaccgggaggccgtgacccacatcggccgggtgtacaaggagcggctgggcctgccccccaagatcgtcatcggctaccagagccacgccgacacagccaccaagagcggcagcaccaccaagaacagatttgtggtgtag

SEQ ID NO: 19579 - DNA, 357 bp, synthetic construct
  misc_feature 1..357: note = Description of Artificial Sequence: Synthetic coding sequence
  source 1..357: mol_type = other DNA
atgtctgggggcagcagctgcagccagacccccagccgggccatcccagccaccaggagagtggtgctgggagatggagtgcagctgcccccaggggactacagcaccacccctgggggcaccctcttcagcaccaccccaggcggcacccgcatcatctatgacaggaagttcctgatggagtgcaggaacagccctgtgaccaagaccccaccccgggacctgcccaccatccctggggtgaccagccccagcagtgatgagccccccatggaggccagccagagccacctgaggaacagccctgaggacaagagagctggaggagaggagagccagtttgagatggacatctag

SEQ ID NO: 19580 - DNA, 1857 bp, synthetic construct
  misc_feature 1..1857: note = Description of Artificial Sequence: Synthetic coding sequence
  source 1..1857: mol_type = other DNA
atggccagcacagactacagcacctacagccaggccgccgcccagcagggctacagcgcctacacagcccagcccacccagggctacgcccagaccacccaggcctacggccagcagagctatggcacctacggccagcccacagatgtgtcctacacccaggcccagaccacagccacctacggccagacagcctatgccaccagctatggccagcccccaacaggctacaccacccccacagccccccaggcctacagccagcctgtgcagggctatggaactggagcctatgacaccaccacagccaccgtgaccaccacccaggccagctatgctgcccagagcgcctacggcacccagcctgcctacccagcctacggccagcagcctgctgccacagcccccacccggccccaggacggcaacaagcccacagagaccagccagccccagagcagcactggaggctacaaccagcccagcctgggctacggccagagcaactacagctacccccaggtgcccggcagctaccccatgcagcctgtgacagcccctccttcctacccacccaccagctacagcagcacccagcccaccagctatgaccagagcagctacagccagcagaacacctacggccagcccagcagctatggccagcagagcagctatggccagcagagcagctatggccagcagccccccaccagctacccaccccagacaggcagctacagccaggcccccagccagtacagccagcagagcagcagctatggccagcagagcagcttccggcaggaccaccccagctccatgggcgtgtatggccaggagagcggcggcttcagcggccctggagagaacagatccatgagcggccctgacaacagaggccggggccggggcggctttgaccggggcggcatgagccgggaccctgatgaggacagcgacaacagcgccatctacgtgcagggcctgaatgattctgtgaccctggatgacctggccgacttcttcaagcagtgtggggtggtgaagatgaacaagaggacaggccagcccatgatccacatctacctggacaaggagaccgggaagcccaagggagatgccaccgtgtcctatgaggaccccccaacagccaaggctgctgtggagtggtttgatggcaaggacttccagggcagcaagctgaaggtgtccctggccaggaagaagccacccatgaacagcatgaggggcggcctgcccccccgggagggccggggcatgcccccacccctgcggggcggccctgggggccctgggggccctgggggccccatgggccgcatgggcggccggggcggggacagaggaggcttccccccccggggcccccggggcagccggggcaaccccagcggcggcggcaatgtgcagcacagagctggggactggcagtgccccaaccctggctgcggcaaccagaactttgcctggaggacagagtgcaaccagtgcaaggcccccaagccagagggcttcctgcccccacccttccccccacctggaggagaccggggccggggcggccctgggggcatgagaggaggccggggcggcctgatggaccggggcggccctgggggcatgttccggggcggccggggcggggacagaggaggcttccggggcggccggggcatggaccggggcggctttggaggcggccggcggggcggccctgggggccccccaggccccctgatggagcagatgggcggccggcggggcggccggggcggccctgggaagatggacaagggggagcaccggcaggagcggcgggaccggccctactag

SEQ ID NO: 19581 - DNA, 1803 bp, synthetic construct
  misc_feature 1..1803: note = Description of Artificial Sequence: Synthetic coding sequence
  source 1..1803: mol_type = other DNA
atggccagcacagactacagcacctacagccaggccgccgcccagcagggctacagcgcctacacagcccagcccacccagggctacgcccagaccacccaggcctacggccagcagagctatggcacctacggccagcccacagatgtgtcctacacccaggcccagaccacagccacctacggccagacagcctatgccaccagctatggccagcccccaacaggctacaccacccccacagccccccaggcctacagccagcctgtgcagggctatggaactggagcctatgacaccaccacagccaccgtgaccaccacccaggccagctatgctgcccagagcgcctacggcacccagcctgcctacccagcctacggccagcagcctgctgccacagcccccaccagctacagcagcacccagcccaccagctatgaccagagcagctacagccagcagaacacctacggccagcccagcagctatggccagcagagcagctatggccagcagagcagctatggccagcagccccccaccagctacccaccccagacaggcagctacagccaggcccccagccagtacagccagcagagcagcagctatggccagcagagcagcttccggcaggaccaccccagctccatgggcgtgtatggccaggagagcggcggcttcagcggccctggagagaacagatccatgagcggccctgacaacagaggccggggccggggcggctttgaccggggcggcatgagcagaggaggccggggcggcggccggggcggcatgggcagcgctggggagcggggcggcttcaacaagccaggcggccccatggatgagggccctgacctggacctgggcccccctgtggaccctgatgaggacagcgacaacagcgccatctacgtgcagggcctgaatgattctgtgaccctggatgacctggccgacttcttcaagcagtgtggggtggtgaagatgaacaagaggacaggccagcccatgatccacatctacctggacaaggagaccgggaagcccaagggagatgccaccgtgtcctatgaggaccccccaacagccaaggctgctgtggagtggtttgatggcaaggacttccagggcagcaagctgaaggtgtccctggccaggaagaagccacccatgaacagcatgaggggcggcctgcccccccgggagggccggggcatgcccccacccctgcggggcggccctgggggccctgggggccctgggggccccatgggccgcatgggcggccggggcggggacagaggaggcttccccccccggggcccccggggcagccggggcaaccccagcggcggcggcaatgtgcagcacagagctggggactggcagtgccccaaccctggctgcggcaaccagaactttgcctggaggacagagtgcaaccagtgcaaggcccccaagccagagggcttcctgcccccacccttccccccacctggaggagaccggggccggggcggccctgggggcatgagaggaggccggggcggcctgatggaccggggcggccctgggggcatgttccggggcggccggggcggggacagaggaggcttccggggcggccggggcatggaccggggcggctttggaggcggccggcggggcggccctgggggccccccaggccccctgatggagcagatgggcggccggcggggcggccggggcggccctgggaagatggacaagggggagcaccggcaggagcggcgggaccggccctactag

SEQ ID NO: 19582 - DNA, 1752 bp, synthetic construct
  misc_feature 1..1752: note = Description of Artificial Sequence: Synthetic coding sequence
  source 1..1752: mol_type = other DNA
atggccagcacagactacagcacctacagccaggccgccgcccagcagggctacagcgcctacacagcccagcccacccagggctacgcccagaccacccaggcctacggccagcagagctatggcacctacggccagcccacagatgtgtcctacacccaggcccagaccacagccacctacggccagacagcctatgccaccagctatggccagcccccaacaggctacaccacccccacagccccccaggcctacagccagcctgtgcagggctatggaactggagcctatgacaccaccacagccaccgtgaccaccacccaggccagctatgctgcccagagcgcctacggcacccagcctgcctacccagcctacggccagcagcctgctgccacagcccccacccggccccaggacggcaacaagcccacagagaccagccagccccagagcagcactggaggctacaaccagcccagcctgggctacggccagagcaactacagctacccccaggtgcccggcagctaccccatgcagcctgtgacagcccctccttcctacccacccaccagctacagcagcacccagcccaccagctatgaccagagcagctacagccagcagaacacctacggccagcccagcagctatggccagcagagcagctatggccagcagagcagctatggccagcagccccccaccagctacccaccccagacaggcagctacagccaggcccccagccagtacagccagcagagcagcagctatggccagcagaggcccatggatgagggccctgacctggacctgggcccccctgtggaccctgatgaagattctgacaacagcgccatctacgtgcagggcctgaatgacagcgtgaccctggatgacctggccgacttcttcaagcagtgtggggtggtgaagatgaacaagaggacaggccagcccatgatccacatctacctggacaaggagaccgggaagcccaagggagatgccaccgtgtcctatgaagatcctcccacagccaaggctgctgtggagtggtttgatggcaaggacttccagggcagcaagctgaaggtgtccctggccaggaagaagccacccatgaacagcatgagaggaggcctgcccccccgggagggccggggcatgcccccacccctgcggggcggccctgggggccctgggggccctgggggccccatgggccgcatgggcggccggggcggggaccggggcggcttccccccccggggcccccggggcagccggggcaaccccagcggcggcggcaatgtgcagcaccgggccggggactggcagtgccccaaccctggctgcggcaaccagaactttgcctggaggacagagtgcaaccagtgcaaggcccccaagccagagggcttcctgcccccacccttccccccacctggaggagaccggggccggggcggccctgggggcatgaggggcggccggggcggcctgatggacagaggaggccctgggggcatgttccggggcggccggggcggggaccggggcggcttccggggcggccggggcatggacagaggaggctttggaggcggcagaagaggaggccctgggggccccccaggccccctgatggagcagatgggcggcagaagaggaggccggggcggccctgggaagatggacaagggggagcaccggcaggagcggcgggaccggccctactag

SEQ ID NO: 19583 - DNA, 1971 bp, synthetic construct
  misc_feature 1..1971: note = Description of Artificial Sequence: Synthetic coding sequence
  source 1..1971: mol_type = other DNA
atggccagcacagactacagcacctacagccaggccgccgcccagcagggctacagcgcctacacagcccagcccacccagggctacgcccagaccacccaggcctacggccagcagagctatggcacctacggccagcccacagatgtgtcctacacccaggcccagaccacagccacctacggccagacagcctatgccaccagctatggccagcccccaacaggctacaccacccccacagccccccaggcctacagccagcctgtgcagggctatggaactggagcctatgacaccaccacagccaccgtgaccaccacccaggccagctatgctgcccagagcgcctacggcacccagcctgcctacccagcctacggccagcagcctgctgccacagcccccacccggccccaggacggcaacaagcccacagagaccagccagccccagagcagcactggaggctacaaccagcccagcctgggctacggccagagcaactacagctacccccaggtgcccggcagctaccccatgcagcctgtgacagcccctccttcctacccacccaccagctacagcagcacccagcccaccagctatgaccagagcagctacagccagcagaacacctacggccagcccagcagctatggccagcagagcagctatggccagcagagcagctatggccagcagccccccaccagctacccaccccagacaggcagctacagccaggcccccagccagtacagccagcagagcagcagctatggccagcagagcagcttccggcaggaccaccccagctccatgggcgtgtatggccaggagagcggcggcttcagcggccctggagagaacagatccatgagcggccctgacaacagaggccggggccggggcggctttgaccggggcggcatgagcagaggaggccggggcggcggccggggcggcatgggcagcgctggggagcggggcggcttcaacaagccaggcggccccatggatgagggccctgacctggacctgggcccccctgtggaccctgatgaggacagcgacaacagcgccatctacgtgcagggcctgaatgattctgtgaccctggatgacctggccgacttcttcaagcagtgtggggtggtgaagatgaacaagaggacaggccagcccatgatccacatctacctggacaaggagaccgggaagcccaagggagatgccaccgtgtcctatgaggaccccccaacagccaaggctgctgtggagtggtttgatggcaaggacttccagggcagcaagctgaaggtgtccctggccaggaagaagccacccatgaacagcatgaggggcggcctgcccccccgggagggccggggcatgcccccacccctgcggggcggccctgggggccctgggggccctgggggccccatgggccgcatgggcggccggggcggggacagaggaggcttccccccccggggcccccggggcagccggggcaaccccagcggcggcggcaatgtgcagcacagagctggggactggcagtgccccaaccctggctgcggcaaccagaactttgcctggaggacagagtgcaaccagtgcaaggcccccaagccagagggcttcctgcccccacccttccccccacctggaggagaccggggccggggcggccctgggggcatgagaggaggccggggcggcctgatggaccggggcggccctgggggcatgttccggggcggccggggcggggacagaggaggcttccggggcggccggggcatggaccggggcggctttggaggcggccggcggggcggccctgggggccccccaggccccctgatggagcagatgggcggccggcggggcggccggggcggccctgggaagatggacaagggggagcaccggcaggagcggcgggaccggccctactag

SEQ ID NO: 19584 - DNA, 1968 bp, synthetic construct
  misc_feature 1..1968: note = Description of Artificial Sequence: Synthetic coding sequence
  source 1..1968: mol_type = other DNA
atggccagcacagactacagcacctacagccaggccgccgcccagcagggctacagcgcctacacagcccagcccacccagggctacgcccagaccacccaggcctacggccagcagagctatggcacctacggccagcccacagatgtgtcctacacccaggcccagaccacagccacctacggccagacagcctatgccaccagctatggccagcccccaacaggctacaccacccccacagccccccaggcctacagccagcctgtgcagggctatggaactggagcctatgacaccaccacagccaccgtgaccaccacccaggccagctatgctgcccagagcgcctacggcacccagcctgcctacccagcctacggccagcagcctgctgccacagcccccacccggccccaggacggcaacaagcccacagagaccagccagccccagagcagcactggaggctacaaccagcccagcctgggctacggccagagcaactacagctacccccaggtgcccggcagctaccccatgcagcctgtgacagcccctccttcctacccacccaccagctacagcagcacccagcccaccagctatgaccagagcagctacagccagcagaacacctacggccagcccagcagctatggccagcagagcagctatggccagcagagcagctatggccagcagccccccaccagctacccaccccagacaggcagctacagccaggcccccagccagtacagccagcagagcagcagctatggccagcagagcagcttccggcaggaccaccccagctccatgggcgtgtatggccaggagagcggcggcttcagcggccctggagagaacagatccatgagcggccctgacaacagaggccggggccggggcggctttgaccggggcggcatgagcagaggaggccggggcggcggccggggcggcatgggcgctggggagcggggcggcttcaacaagccaggcggccccatggatgagggccctgacctggacctgggcccccctgtggaccctgatgaagattctgacaacagcgccatctacgtgcagggcctgaatgacagcgtgaccctggatgacctggccgacttcttcaagcagtgtggggtggtgaagatgaacaagaggacaggccagcccatgatccacatctacctggacaaggagaccgggaagcccaagggagatgccaccgtgtcctatgaagatcctcccacagccaaggctgctgtggagtggtttgatggcaaggacttccagggcagcaagctgaaggtgtccctggccaggaagaagccacccatgaacagcatgagaggaggcctgcccccccgggagggccggggcatgcccccacccctgcggggcggccctgggggccctgggggccctgggggccccatgggccgcatgggcggccggggcggggaccggggcggcttccccccccggggcccccggggcagccggggcaaccccagcggcggcggcaatgtgcagcaccgggccggggactggcagtgccccaaccctggctgcggcaaccagaactttgcctggaggacagagtgcaaccagtgcaaggcccccaagccagagggcttcctgcccccacccttccccccacctggaggagaccggggccggggcggccctgggggcatgaggggcggccggggcggcctgatggacagaggaggccctgggggcatgttccggggcggccggggcggggaccggggcggcttccggggcggccggggcatggacagaggaggctttggaggcggcagaagaggaggccctgggggccccccaggccccctgatggagcagatgggcggcagaagaggaggccggggcggccctgggaagatggacaagggggagcaccggcaggagcggcgggaccggccctactag

SEQ ID NO: 19585 - DNA, 1986 bp, synthetic construct
  misc_feature 1..1986: note = Description of Artificial Sequence: Synthetic coding sequence
  source 1..1986: mol_type = other DNA
atggccagcacagactacagcacctacagccaggccgccgcccagcagggctacagcgcctacacagcccagcccacccagggctacgcccagaccacccaggcctacggccagcagagctatggcacctacggccagcccacagatgtgtcctacacccaggcccagaccacagccacctacggccagacagcctatgccaccagctatggccagcccccaacagtggagggcaccagcacaggctacaccacccccacagccccccaggcctacagccagcctgtgcagggctatggaactggagcctatgacaccaccacagccaccgtgaccaccacccaggccagctatgctgcccagagcgcctacggcacccagcctgcctacccagcctacggccagcagcctgctgccacagcccccacccggccccaggacggcaacaagcccacagagaccagccagccccagagcagcactggaggctacaaccagcccagcctgggctacggccagagcaactacagctacccccaggtgcccggcagctaccccatgcagcctgtgacagcccctccttcctacccacccaccagctacagcagcacccagcccaccagctatgaccagagcagctacagccagcagaacacctacggccagcccagcagctatggccagcagagcagctatggccagcagagcagctatggccagcagccccccaccagctacccaccccagacaggcagctacagccaggcccccagccagtacagccagcagagcagcagctatggccagcagagcagcttccggcaggaccaccccagctccatgggcgtgtatggccaggagagcggcggcttcagcggccctggagagaacagatccatgagcggccctgacaacagaggccggggccggggcggctttgaccggggcggcatgagcagaggaggccggggcggcggccggggcggcatgggcgctggggagcggggcggcttcaacaagccaggcggccccatggatgagggccctgacctggacctgggcccccctgtggaccctgatgaagattctgacaacagcgccatctacgtgcagggcctgaatgacagcgtgaccctggatgacctggccgacttcttcaagcagtgtggggtggtgaagatgaacaagaggacaggccagcccatgatccacatctacctggacaaggagaccgggaagcccaagggagatgccaccgtgtcctatgaagatcctcccacagccaaggctgctgtggagtggtttgatggcaaggacttccagggcagcaagctgaaggtgtccctggccaggaagaagccacccatgaacagcatgagaggaggcctgcccccccgggagggccggggcatgcccccacccctgcggggcggccctgggggccctgggggccctgggggccccatgggccgcatgggcggccggggcggggaccggggcggcttccccccccggggcccccggggcagccggggcaaccccagcggcggcggcaatgtgcagcaccgggccggggactggcagtgccccaaccctggctgcggcaaccagaactttgcctggaggacagagtgcaaccagtgcaaggcccccaagccagagggcttcctgcccccacccttccccccacctggaggagaccggggccggggcggccctgggggcatgaggggcggccggggcggcctgatggacagaggaggccctgggggcatgttccggggcggccggggcggggaccggggcggcttccggggcggccggggcatggacagaggaggctttggaggcggcagaagaggaggccctgggggccccccaggccccctgatggagcagatgggcggcagaagaggaggccggggcggccctgggaagatggacaagggggagcaccggcaggagcggcgggaccggccctactag

SEQ ID NO: 19586 - DNA, 543 bp, synthetic construct
  misc_feature 1..543: note = Description of Artificial Sequence: Synthetic coding sequence
  source 1..543: mol_type = other DNA
atggccagcacagactacagcacctacagccaggccgccgcccagcagggctacagcgcctacacagcccagcccacccagggctacgcccagaccacccaggccagctatgctgcccagagcgcctacggcacccagcctgcctacccagcctacggccagcagcctgctgccacagcccccacccggccccaggacggcaacaagcccacagagaccagccagccccagagcagcactggaggctacaaccagcccagcctgggctacggccagagcaactacagctacccccaggtgcccggcagctaccccatgcagcctgtgacagccccacccagctacccacccaccagctacagcagcacccagcccaccagctatgaccagagcagctacagccagcagaacacctacggccagcccagcagctatggccagcagagcagctatggccagcagagcagctatggccagcagccccccaccagctacccaccccagacaggcagctacagccaggcccccagccagtacagctag

SEQ ID NO: 19587 - DNA, 1065 bp, synthetic construct
  misc_feature 1..1065: note = Description of Artificial Sequence: Synthetic coding sequence
  source 1..1065: mol_type = other DNA
atggccagcacagactacagcacctacagccaggccgccgcccagcagggctacagcgcctacacagcccagcccacccagggctacgcccagaccacccaggcctacggccagcagagctatggcacctacggccagcccacagatgtgtcctacacccaggcccagaccacagccacctacggccagacagcctatgccaccagctatggccagcccccaacaggctacaccacccccacagccccccaggcctacagccagcctgtgcagggctatggaactggagcctatgacaccaccacagccaccgtgaccaccacccaggccagctatgctgcccagagcgcctacggcacccagcctgcctacccagcctacggccagcagcctgctgccacagcccccacccggccccaggacggcaacaagcccacagagaccagccagccccagagcagcactggaggctacaaccagcccagcctgggctacggccagagcaactacagctacccccaggtgcccggcagctaccccatgcagcctgtgacagcccctccttcctacccacccaccagctacagcagcacccagcccaccagctatgaccagagcagctacagccagcagaacacctacggccagcccagcagctatggccagcagagcagctatggccagcagagcagctatggccagcagccccccaccagctacccaccccagacaggcagctacagccaggcccccagccagtacagccagcagagcagcagctatggccagcagagcagcttccggcaggaccaccccagctccatgggcgtgtatggccaggagagcggcggcttcagcggccctggagagaacagatccatgagcggccctgacaacagaggccggggccggggcggctttgaccggggcggcatgagcagaggaggccggggcggcggccggggcggcatgggcctgcagagcgagagcctggtgtacaccagcatcctgaagaagtacccctacagcgtgctgagccggcagcacaatgagaagtgggactag

SEQ ID NO: 19588 - DNA, 972 bp, synthetic construct
  misc_feature 1..972: note = Description of Artificial Sequence: Synthetic coding sequence
  source 1..972: mol_type = other DNA
atggaccccgggaaggacaaggagggcgtgccccagcccagcggccccccagccaggaagaagtttgtgatccccctggatgaagatgaggtgcccccaggagtggccaagcccctcttccgcagcacccagagcctgcccaccgtggacaccagcgcccaggccgccccccagacctatgcagaatatgccatcagccagcccctggagggcgctggggccacctgccccaccggcagcgagcccctggccggggagacccccaaccaggccctgaagccaggggccaagagcaacagcatcatcgtgagcccccggcagaggggcaaccctgtgctgaagtttgtgagaaatgtgccctgggagtttggagatgtgatcccagactatgtgctgggccagagcacctgtgccctcttcctgagcctgcgctaccacaacctgcacccagactacatccacggccgcctgcagagcctgggcaagaactttgccctgcgggtgctgctggtgcaggtggatgtgaaggacccccagcaggccctgaaggagctggccaagatgtgcatcctggccgactgcaccctcatcctggcctggagccctgaggaggccggccgctacctggagacctacaaggcctatgagcagaagccagctgacctgctgatggagaagctggagcaggactttgtgtcccgggtgacagaatgtctgaccaccgtgaagtctgtgaacaagacagacagccagaccctgctgaccaccttcggcagcctggagcagctgattgctgccagccgggaggacctggccctgtgccccggcctgggcccccagaaggtgcgggccctgggcaagaaccccaggtcctggggcaaggagcgggcccccaacaagcacaacctgcggccccagagcttcaaggtgaagaaggagcccaagaccaggcacagcggcttccggctgtag

SEQ ID NO: 19589 - DNA, 894 bp, synthetic construct
  misc_feature 1..894: note = Description of Artificial Sequence: Synthetic coding sequence
  source 1..894: mol_type = other DNA
atggaccccgggaaggacaaggagggcgtgccccagcccagcggccccccagccaggaagaagtttgtgatccccctggatgaagatgaggtgcccccaggagtggccaagcccctcttccgcagcacccagagcctgcccaccgtggacaccagcgcccaggccgccccccagacctatgcagaatatgccatcagccagcccctggagggcgctggggccacctgccccaccggcagcgagcccctggccggggagacccccaaccaggccctgaagccaggggccaagagcaacagcatcatcgtgagcccccggcagaggggcaaccctgtgctgaagtttgtgagaaatgtgccctgggagtttggagatgtgatcccagactatgtgctgggccagagcacctgtgccctcttcctgagcctgcgctaccacaacctgcacccagactacatccacggccgcctgcagagcctgggcaagaactttgccctgcgggtgctgctggtgcaggtggatgtgaaggacccccagcaggccctgaaggagctggccaagatgtgcatcctggccgactgcaccctcatcctggcctggagccctgaggaggccggccgctacctggagacctacaaggcctatgagcagaagccagctgacctgctgatggagaagctggagcaggactttgtgtcccgggtgacagaatgtctgaccaccgtgaagtctgtgaacaagacagacagccagaccctgctgaccaccttcggcagcctggagcagctgattgctgccagccgggaggacctggccctgtgccccggcctgggcccccagaaggcccggcggctgtttgatgtgctgcacgagcccttcctgaaggtgccctag

SEQ ID NO: 19590 - DNA, 822 bp, synthetic construct
  misc_feature 1..822: note = Description of Artificial Sequence: Synthetic coding sequence
  source 1..822: mol_type = other DNA
atggaccccgggaaggacaaggagggcgtgccccagcccagcggccccccagccaggaagaagtttgtgatccccctggatgaagatgaggtgcccccaggagtggccaagcccctcttccgcagcacccagagcctgcccaccgtggacaccagcgcccaggccgccccccagacctatgcagaatatgccatcagccagcccctggagggcgctggggccacctgccccaccggcagcgagcccctggccggggagacccccaaccaggccctgaagccaggggccaagagcaacagcatcatcgtgagcccccggcagaggggcaaccctgtgctgaagtttgtgagaaatgtgccctgggagtttggagatgtgatcccagactatgtgctgggccagagcacctgtgccctcttcctgagcctgcgctaccacaacctgcacccagactacatccacggccgcctgcagagcctgggcaagaactttgccctgcgggtgctgctggtgcaggtggatgtgaaggacccccagcaggccctgaaggagctggccaagatgtgcatcctggccgactgcaccctcatcctggcctggagccctgaggaggccggccgctacctggagacctacaaggcctatgagcagaagccagctgacctgctgatggagaagctggagcaggactttgtgagccgcagcctggagcagctgattgctgccagccgggaggacctggccctgtgccccggcctgggcccccagaaggcccggcggctgtttgatgtgctgcacgagcccttcctgaaggtgccctag

SEQ ID NO: 19591 - DNA, 678 bp, synthetic construct
  misc_feature 1..678: note = Description of Artificial Sequence: Synthetic coding sequence
  source 1..678: mol_type = other DNA
atggaccccgggaaggacaaggagggcgtgccccagcccagcggccccccagccaggaagaagtttgtgatccccctggatgaagatgaggtgcccccaggagtgcggggcaaccctgtgctgaagtttgtgagaaatgtgccctgggagtttggagatgtgatcccagactatgtgctgggccagagcacctgtgccctcttcctgagcctgcgctaccacaacctgcacccagactacatccacggccgcctgcagagcctgggcaagaactttgccctgcgggtgctgctggtgcaggtggatgtgaaggacccccagcaggccctgaaggagctggccaagatgtgcatcctggccgactgcaccctcatcctggcctggagccctgaggaggccggccgctacctggagacctacaaggcctatgagcagaagccagctgacctgctgatggagaagctggagcaggactttgtgtcccgggtgacagaatgtctgaccaccgtgaagtctgtgaacaagacagacagccagaccctgctgaccaccttcggcagcctggagcagctgattgctgccagccgggaggacctggccctgtgccccggcctgggcccccagaaggcccggcggctgtttgatgtgctgcacgagcccttcctgaaggtgccctag

SEQ ID NO: 19592 - DNA, 120 bp, synthetic construct
  misc_feature 1..120: note = Description of Artificial Sequence: Synthetic coding sequence
  source 1..120: mol_type = other DNA
atggaccccgggaaggacaaggagggcgtgccccagcccagcggccccccagccaggaagaagtttgtgatccccctggatgaagatgaggtgcccccaggagtgtccaagcccctgtag

SEQ ID NO: 19593 - DNA, 726 bp, synthetic construct
  misc_feature 1..726: note = Description of Artificial Sequence: Synthetic coding sequence
  source 1..726: mol_type = other DNA
atggccagcctgagcggcctggccagcgccctggagagctaccggggccgggacaggctcatccgggtgctgggctactgctgccagctggtgggcggcgtgctggtggagcagtgcccagcccggtctgaggtgggcacccggctgctggtggtgtccacccagctgagccactgcaggaccatcctgcggctgtttgatgacctggccatgtttgtgtacaccaagcagtatggcctgggcgcccaggaggaggatgcctttgtgcgctgtgtgtctgtgctgggcaacctggccgaccagctgtactacccctgtgagcacgtggcctgggccgcagatgcccgggtgctgcacgtggacagcagccgctggtggaccctgagcaccaccctgtgggccctgagcctgctgctgggcgtggcccggagcctgtggatgctgctgaagctgcggcagaggctgcggagccccacagcccccttcaccagccccctgccccggggcaagagaagagccatggaggcccagatgcagagcgaggccctgagcctgctgagcaacctggccgacctggccaatgctgtgcactggctgccccggggcgtgctgtgggccggccgcttccccccctggctggtgggcctgatgggcaccatcagcagcatcctgtccatgtaccaggccgcccgggccggcggccaggccgaggccaccaccccctag

SEQ ID NO: 19594 - DNA, 1218 bp, synthetic construct
  misc_feature 1..1218: note = Description of Artificial Sequence: Synthetic coding sequence
  source 1..1218: mol_type = other DNA
atgagggagctgaagaggaccctggatgccaagggccatggagtgctggagatgcccagcggcaccgggaagacagtgtccctgctggccctgatcatggcctaccagagggcctaccccctggaggtgaccaagctgatctactgcagcaggacagtgcctgagattgagaaggtgattgaggagctgaggaagctgctgaacttctatgagaagcaggagggggagaagctgcccttcctgggcctggccctgagcagcaggaagaacctgtgcatccaccctgaggtgacccccctgcgctttgggaaggatgtggatggcaagtgccacagcctgacagccagctatgtgcgggcccagtaccagcacgacaccagcctgccccactgccgcttctatgaggagtttgatgcccacggccgggaggtgcccctgcctgctggcatctacaacctggatgacctgaaggccctgggccggcggcagggctggtgcccctacttcctggcccgctacagcatcctgcacgccaacgtggtggtgtacagctaccactacctgctggaccccaagattgctgacctggtgtccaaggagctggccaggaaggctgtggtggtgtttgatgaggcccacaacatcgacaacgtgtgcatcgacagcatgtctgtgaacctgaccaggaggaccctggaccgctgccagggcaacctggagaccctgcagaagacagtgctgcgcatcaaggagacagatgagcagaggctgagagatgagtaccgccgcctggtggagggcctgcgggaggccagcgctgcccgggagacagatgcccacctggccaaccctgtgctgcctgatgaggtgctgcaggaggccgtgcccggcagcatcagaacagctgagcacttcctgggcttcctgcggcggctgctggagtatgtgaagtggaggctgcgggtgcagcacgtggtgcaggagagccccccagccttcctgagcggcctggcccagagggtgtgcatccagaggaagcccctgcgcttctgtgccgagcggctgcggagcctgctgcacaccctggagatcacagacctggccgacttcagccccctgaccctgctggccaactttgccaccctggtgtccacctacgccaagggccaggcccagcactgcggcagcagcaggaaccagaagaggagccacccctag

SEQ ID NO: 19595 - DNA, 2133 bp, synthetic construct
  misc_feature 1..2133: note = Description of Artificial Sequence: Synthetic coding sequence
  source 1..2133: mol_type = other DNA
atgagggagctgaagaggaccctggatgccaaggcctaccccctggaggtgaccaagctgatctactgcagcaggacagtgcctgagattgagaaggtgattgaggagctgaggaagctgctgaacttctatgagaagcaggagggggagaagctgcccttcctgggcctggccctgagcagcaggaagaacctgtgcatccaccctgaggtgacccccctgcgctttgggaaggatgtggatggcaagtgccacagcctgacagccagctatgtgcgggcccagtaccagcacgacaccagcctgccccactgccgcttctatgaggagtttgatgcccacggccgggaggtgcccctgcctgctggcatctacaacctggatgacctgaaggccctgggccggcggcagggctggtgcccctacttcctggcccgctacagcatcctgcacgccaacgtggtggtgtacagctaccactacctgctggaccccaagattgctgacctggtgtccaaggagctggccaggaaggctgtggtggtgtttgatgaggcccacaacatcgacaacgtgtgcatcgacagcatgtctgtgaacctgaccaggaggaccctggaccgctgccagggcaacctggagaccctgcagaagacagtgctgcgcatcaaggagacagatgagcagaggctgagagatgagtaccgccgcctggtggagggcctgcgggaggccagcgctgcccgggagacagatgcccacctggccaaccctgtgctgcctgatgaggtgctgcaggaggccgtgcccggcagcatcagaacagctgagcacttcctgggcttcctgcggcggctgctggagtatgtgaagtggaggctgcgggtgcagcacgtggtgcaggagagccccccagccttcctgagcggcctggcccagagggtgtgcatccagaggaagcccctgcgcttctgtgccgagcggctgcggagcctgctgcacaccctggagatcacagacctggccgacttcagccccctgaccctgctggccaactttgccaccctggtgtccacctacgccaagggcttcaccatcatcatcgagccctttgatgacaggacccccaccatcgccaaccccatcctgcacttcagctgcatggatgccagcctggccatcaagcctgtgtttgagcgcttccagagcgtcatcatcaccagcggcaccctgagccccctggacatctaccccaagatcctggacttccaccctgtgaccatggccaccttcaccatgaccctggcccgggtgtgcctgtgccccatgatcatcggcagaggaaatgaccaggtggccatcagcagcaagtttgagacccgggaggacattgctgtgatccggaactacggcaacctgctgctggagatgtctgctgtggtgcctgatggcatcgtggccttcttcaccagctaccagtacatggagagcacagtggcctcctggtatgagcagggcatcctggagaacatccagaggaacaagctgctcttcatcgagacccaggatggagctgagacctctgtggccctggagaagtaccaggaggcctgtgaaaatggccgcggggccatcctgctgtctgtggcccggggcaaggtgtctgagggcatcgactttgtgcaccactacggccgggctgtgatcatgtttggagtgccctacgtgtacacccagagccgcatcctgaaggcccggctggagtacctgcgggaccagttccagatccgggagaatgacttcctgacctttgatgccatgagacatgctgcccagtgtgtgggccgggccatccggggcaagacagattatggcctgatggtgtttgctgacaagagatttgcccggggggacaagaggggcaagctgccccgctggatccaggagcacctgacagatgccaacctgaacctgactgtggatgaaggagtgcaggtggccaagtacttcctgcggcagatggcccagcccttccaccgggaggaccagctgggcctgagcctgctgagcctggagcagctggagagcgaggagaccctgaagagaattgagcagatcgcccagcagctgtag

SEQ ID NO: 19596 - DNA, 2211 bp, synthetic construct
  misc_feature 1..2211: note = Description of Artificial Sequence: Synthetic coding sequence
  source 1..2211: mol_type = other DNA
atgagggagctgaagaggaccctggatgccaagggccatggagtgctggagatgcccagcggcaccgggaagacagtgtccctgctggccctgatcatggcctaccagagggcctaccccctggaggtgaccaagctgatctactgcagcaggacagtgcctgagattgagaaggtgattgaggagctgaggaagctgctgaacttctatgagaagcaggagggggagaagctgcccttcctgggcctggccctgagcagcaggaagaacctgtgcatccaccctgaggtgacccccctgcgctttgggaaggatgtggatggcaagtgccacagcctgacagccagctatgtgcgggcccagtaccagcacgacaccagcctgccccactgccgcttctatgaggagtttgatgcccacggccgggaggtgcccctgcctgctggcatctacaacctggatgacctgaaggccctgggccggcggcagggctggtgcccctacttcctggcccgctacagcatcctgcacgccaacgtggtggtgtacagctaccactacctgctggaccccaagattgctgacctggtgtccaaggagctggccaggaaggctgtggtggtgtttgatgaggcccacaacatcgacaacgtgtgcatcgacagcatgtctgtgaacctgaccaggaggaccctggaccgctgccagggcaacctggagaccctgcagaagacagtgctgcgcatcaaggagacagatgagcagaggctgagagatgagtaccgccgcctggtggagggcctgcgggaggccagcgctgcccgggagacagatgcccacctggccaaccctgtgctgcctgatgaggtgctgcaggaggccgtgcccggcagcatcagaacagctgagcacttcctgggcttcctgcggcggctgctggagtatgtgaagtggaggctgcgggtgcagcacgtggtgcaggagagccccccagccttcctgagcggcctggcccagagggtgtgcatccagaggaagcccctgcgcttctgtgccgagcggctgcggagcctgctgcacaccctggagatcacagacctggccgacttcagccccctgaccctgctggccaactttgccaccctggtgtccacctacgccaagggcttcaccatcatcatcgagccctttgatgacaggacccccaccatcgccaaccccatcctgcacttcagctgcatggatgccagcctggccatcaagcctgtgtttgagcgcttccagagcgtcatcatcaccagcggcaccctgagccccctggacatctaccccaagatcctggacttccaccctgtgaccatggccaccttcaccatgaccctggcccgggtgtgcctgtgccccatgatcatcggcagaggaaatgaccaggtggccatcagcagcaagtttgagacccgggaggacattgctgtgatccggaactacggcaacctgctgctggagatgtctgctgtggtgcctgatggcatcgtggccttcttcaccagctaccagtacatggagagcacagtggcctcctggtatgagcagggcatcctggagaacatccagaggaacaagctgctcttcatcgagacccaggatggagctgagacctctgtggccctggagaagtaccaggaggcctgtgaaaatggccgcggggccatcctgctgtctgtggcccggggcaaggtgtctgagggcatcgactttgtgcaccactacggccgggctgtgatcatgtttggagtgccctacgtgtacacccagagccgcatcctgaaggcccggctggagtacctgcgggaccagttccagatccgggagaatgacttcctgacctttgatgccatgagacatgctgcccagtgtgtgggccgggccatccggggcaagacagattatggcctgatggtgtttgctgacaagagatttgcccggggggacaagaggggcaagctgccccgctggatccaggagcacctgacagatgccaacctgaacctgactgtggatgaaggagtgcaggtggccaagtacttcctgcggcagatggcccagcccttccaccgggaggaccagctgggcctgagcctgctgagcctggagcagctggagagcgaggagaccctgaagagaattgagcagatcgcccagcagctgtag

SEQ ID NO: 19597 - DNA, 2049 bp, synthetic construct
  misc_feature 1..2049: note = Description of Artificial Sequence: Synthetic coding sequence
  source 1..2049: mol_type = other DNA
atgaagctgaatgtggatggcctgctggtgtacttcccctatgactacatctacccagagcagttctcctacatgagggagctgaagaggaccctggatgccaagggccatggagtgctggagatgcccagcggcaccgggaagacagtgtccctgctggccctgatcatggcctaccagagggcctaccccctggaggtgaccaagctgatctactgcagcaggacagtgcctgagattgagaaggtgattgaggagctgaggaagctgctgaacttctatgagaagcaggagggggagaagctgcccttcctgggcctggccctgagcagcaggaagaacctgtgcatccaccctgagatcctgcacgccaacgtggtggtgtacagctaccactacctgctggaccccaagattgctgacctggtgtccaaggagctggccaggaaggctgtggtggtgtttgatgaggcccacaacatcgacaacgtgtgcatcgacagcatgtctgtgaacctgaccaggaggaccctggaccgctgccagggcaacctggagaccctgcagaagacagtgctgcgcatcaaggagacagatgagcagaggctgagagatgagtaccgccgcctggtggagggcctgcgggaggccagcgctgcccgggagacagatgcccacctggccaaccctgtgctgcctgatgaggtgctgcaggaggccgtgcccggcagcatcagaacagctgagcacttcctgggcttcctgcggcggctgctggagtatgtgaagtggaggctgcgggtgcagcacgtggtgcaggagagccccccagccttcctgagcggcctggcccagagggtgtgcatccagaggaagcccctgcgcttctgtgccgagcggctgcggagcctgctgcacaccctggagatcacagacctggccgacttcagccccctgaccctgctggccaactttgccaccctggtgtccacctacgccaagggcttcaccatcatcatcgagccctttgatgacaggacccccaccatcgccaaccccatcctgcacttcagctgcatggatgccagcctggccatcaagcctgtgtttgagcgcttccagagcgtcatcatcaccagcggcaccctgagccccctggacatctaccccaagatcctggacttccaccctgtgaccatggccaccttcaccatgaccctggcccgggtgtgcctgtgccccatgatcatcggcagaggaaatgaccaggtggccatcagcagcaagtttgagacccgggaggacattgctgtgatccggaactacggcaacctgctgctggagatgtctgctgtggtgcctgatggcatcgtggccttcttcaccagctaccagtacatggagagcacagtggcctcctggtatgagcagggcatcctggagaacatccagaggaacaagctgctcttcatcgagacccaggatggagctgagacctctgtggccctggagaagtaccaggaggcctgtgaaaatggccgcggggccatcctgctgtctgtggcccggggcaaggtgtctgagggcatcgactttgtgcaccactacggccgggctgtgatcatgtttggagtgccctacgtgtacacccagagccgcatcctgaaggcccggctggagtacctgcgggaccagttccagatccgggagaatgacttcctgacctttgatgccatgagacatgctgcccagtgtgtgggccgggccatccggggcaagacagattatggcctgatggtgtttgctgacaagagatttgcccggggggacaagaggggcaagctgccccgctggatccaggagcacctgacagatgccaacctgaacctgactgtggatgaaggagtgcaggtggccaagtacttcctgcggcagatggcccagcccttccaccgggaggaccagctgggcctgagcctgctgagcctggagcagctggagagcgaggagaccctgaagagaattgagcagatcgcccagcagctgtag

SEQ ID NO: 19598 - DNA, 2283 bp, synthetic construct
  misc_feature 1..2283: note = Description of Artificial Sequence: Synthetic coding sequence
  source 1..2283: mol_type = other DNA
atgaagctgaatgtggatggcctgctggtgtacttcccctatgactacatctacccagagcagttctcctacatgagggagctgaagaggaccctggatgccaagggccatggagtgctggagatgcccagcggcaccgggaagacagtgtccctgctggccctgatcatggcctaccagagggcctaccccctggaggtgaccaagctgatctactgcagcaggacagtgcctgagattgagaaggtgattgaggagctgaggaagctgctgaacttctatgagaagcaggagggggagaagctgcccttcctgggcctggccctgagcagcaggaagaacctgtgcatccaccctgaggtgacccccctgcgctttgggaaggatgtggatggcaagtgccacagcctgacagccagctatgtgcgggcccagtaccagcacgacaccagcctgccccactgccgcttctatgaggagtttgatgcccacggccgggaggtgcccctgcctgctggcatctacaacctggatgacctgaaggccctgggccggcggcagggctggtgcccctacttcctggcccgctacagcatcctgcacgccaacgtggtggtgtacagctaccactacctgctggaccccaagattgctgacctggtgtccaaggagctggccaggaaggctgtggtggtgtttgatgaggcccacaacatcgacaacgtgtgcatcgacagcatgtctgtgaacctgaccaggaggaccctggaccgctgccagggcaacctggagaccctgcagaagacagtgctgcgcatcaaggagacagatgagcagaggctgagagatgagtaccgccgcctggtggagggcctgcgggaggccagcgctgcccgggagacagatgcccacctggccaaccctgtgctgcctgatgaggtgctgcaggaggccgtgcccggcagcatcagaacagctgagcacttcctgggcttcctgcggcggctgctggagtatgtgaagtggaggctgcgggtgcagcacgtggtgcaggagagccccccagccttcctgagcggcctggcccagagggtgtgcatccagaggaagcccctgcgcttctgtgccgagcggctgcggagcctgctgcacaccctggagatcacagacctggccgacttcagccccctgaccctgctggccaactttgccaccctggtgtccacctacgccaagggcttcaccatcatcatcgagccctttgatgacaggacccccaccatcgccaaccccatcctgcacttcagctgcatggatgccagcctggccatcaagcctgtgtttgagcgcttccagagcgtcatcatcaccagcggcaccctgagccccctggacatctaccccaagatcctggacttccaccctgtgaccatggccaccttcaccatgaccctggcccgggtgtgcctgtgccccatgatcatcggcagaggaaatgaccaggtggccatcagcagcaagtttgagacccgggaggacattgctgtgatccggaactacggcaacctgctgctggagatgtctgctgtggtgcctgatggcatcgtggccttcttcaccagctaccagtacatggagagcacagtggcctcctggtatgagcagggcatcctggagaacatccagaggaacaagctgctcttcatcgagacccaggatggagctgagacctctgtggccctggagaagtaccaggaggcctgtgaaaatggccgcggggccatcctgctgtctgtggcccggggcaaggtgtctgagggcatcgactttgtgcaccactacggccgggctgtgatcatgtttggagtgccctacgtgtacacccagagccgcatcctgaaggcccggctggagtacctgcgggaccagttccagatccgggagaatgacttcctgacctttgatgccatgagacatgctgcccagtgtgtgggccgggccatccggggcaagacagattatggcctgatggtgtttgctgacaagagatttgcccggggggacaagaggggcaagctgccccgctggatccaggagcacctgacagatgccaacctgaacctgactgtggatgaaggagtgcaggtggccaagtacttcctgcggcagatggcccagcccttccaccgggaggaccagctgggcctgagcctgctgagcctggagcagctggagagcgaggagaccctgaagagaattgagcagatcgcccagcagctgtag

SEQ ID NO: 19599 - DNA, 2751 bp, synthetic construct
  misc_feature 1..2751: note = Description of Artificial Sequence: Synthetic coding sequence
  source 1..2751: mol_type = other DNA
atggagagcggccagcctgcccggcgcatcgccatggcccccctgctggagtatgaaaggcagctggtgctggagctgctggacacagatggcctggtggtgtgtgcccggggcctgggcgctgaccggctgctgtaccacttcctgcagctgcactgccacccagcctgcctggtgctggtgctgaacacccagcctgctgaggaggagtacttcatcaaccagctgaagattgagggcgtggagcacctgccccggcgggtgaccaatgagatcaccagcaacagccgctatgaggtgtacacccagggcggcgtcatctttgccaccagccgcatcctggtggtggacttcctgacagaccgcatccccagcgacctgatcaccggcatcctggtgtaccgggcccaccgcatcatcgagagctgccaggaggccttcatcctgcggctcttccggcagaagaacaagaggggcttcatcaaggccttcacagacaatgctgtggcctttgacaccggcttctgccacgtggagcgggtgatgaggaacctgtttgtgaggaagctgtacctgtggccccgcttccacgtggccgtgaacagcttcctggagcagcacaagccagaggtggtggagatccacgtgtccatgacccccaccatgctggccatccagacagccatcctggacatcctgaatgcctgcctgaaggagctgaagtgccacaaccccagcctggaggtggaggacctgagcctggagaatgccatcggcaagccctttgacaagaccatccgccactacctggaccccctgtggcaccagctgggcgccaagaccaagagcctggtgcaggacctgaagatcctgcggaccctgctgcagtacctgagccagtatgactgtgtgaccttcctgaacctgctggagagcctgcgggccacagagaaggccttcggccagaacagcggctggctgttcctggacagcagcacctccatgttcatcaatgcccgggcccgggtgtaccacctgcctgatgccaagatgagcaagaaggagaagatcagcgagaagatggagatcaaggagggggaggagaccaagaaggagctggtgctggagagcaaccccaagtgggaggccctgacagaggtgctgaaggagattgaagctgagaacaaggagagcgaggccctgggcggccctggccaggtgctgatctgtgccagtgatgacaggacctgcagccagctgcgggactacatcaccctgggcgctgaggccttcctgctgcggctgtacaggaagacctttgagaaggacagcaaggccgaggaggtgtggatgaagttcaggaaggaggacagcagcaagaggatcaggaagagccacaagaggcccaaggacccccagaacaaggagcgggccagcaccaaggagaggaccctgaagaagaagaagaggaagctgaccctgacccagatggtgggcaagccagaggagctggaggaggagggagatgtggaggagggctacagaagagagatcagcagcagccctgagagctgcccagaggagatcaagcatgaggagtttgatgtgaacctgagcagtgatgctgccttcggcatcctgaaggagcccctgaccatcatccaccccctgctgggctgcagcgacccctatgccctgaccagggtgctgcacgaggtggagcccaggtatgtggtgctgtatgatgctgagctgacctttgtgcggcagctggagatctaccgggccagcaggcctgggaagcccctgcgggtgtacttcctgatctacggcggcagcacagaggagcagcgctacctgacagccctgaggaaggagaaggaggcctttgagaagctgatccgggagaaggcctccatggtggtgcctgaggagcgggagggcagagatgagaccaacctggacctggtgcggggcacagccagcgcagatgtgtccacagacaccaggaaggccggcggccaggagcagaatggcacccagcagagcatcgtggtggacatgagggagttccgctctgagctgcccagcctcatccacagaagaggcatcgacatcgagcctgtgaccctggaggtgggggactacatcctgaccccagagatgtgtgtggagaggaagagcatcagtgacctgattggcagcctgaacaacggccgcctgtacagccagtgcatctccatgagccgctactacaagaggcctgtgctgctgattgaatttgaccccagcaagcccttcagcctgaccagcagaggagccctcttccaggagatcagcagcaatgacatcagcagcaagctgaccctgctgaccctgcacttcccccggctgcgcatcctgtggtgccccagcccccacgccacagctgagctgtttgaggagctgaagcagagcaagccccagccagatgctgccacagccctggccatcacagctgacagcgagaccctgcctgagagcgagaagtacaaccctggcccccaggacttcctgctgaagatgcctggggtgaatgccaagaactgccgcagcctgatgcaccacgtgaagaacattgctgagctggccgccctgagccaggatgagctgaccagcatcctgggcaatgctgccaatgccaagcagctgtatgacttcatccacaccagctttgctgaggtggtgtccaagggcaagggcaagaagtag

SEQ ID NO: 19600 - DNA, 2715 bp, synthetic construct
  misc_feature 1..2715: note = Description of Artificial Sequence: Synthetic coding sequence
  source 1..2715: mol_type = other DNA
atggcccccctgctggagtatgagcggcagctggtgctggagctgctggacacagatggcctggtggtgtgtgcccggggcctgggcgctgaccggctgctgtaccacttcctgcagctgcactgccacccagcctgcctggtgctggtgctgaacacccagcctgctgaggaggagtacttcatcaaccagctgaagattgaaggagtggagcacctgcccaggagagtgaccaatgagatcaccagcaacagccgctatgaggtgtacacccagggcggcgtcatctttgccaccagccgcatcctggtggtggacttcctgacagaccgcatccccagcgacctgatcaccggcatcctggtgtaccgggcccaccgcatcatcgagagctgccaggaggccttcatcctgcggctcttccggcagaagaacaagaggggcttcatcaaggccttcacagacaatgctgtggcctttgacaccggcttctgccacgtggagcgggtgatgaggaacctgtttgtgaggaagctgtacctgtggccccgcttccacgtggccgtgaacagcttcctggagcagcacaagccagaggtggtggagatccacgtgtccatgacccccaccatgctggccatccagacagccatcctggacatcctgaatgcctgcctgaaggagctgaagtgccacaaccccagcctggaggtggaggacctgagcctggagaatgccatcggcaagccctttgacaagaccatccgccactacctggaccccctgtggcaccagctgggcgccaagaccaagagcctggtgcaggacctgaagatcctgcggaccctgctgcagtacctgagccagtatgactgtgtgaccttcctgaacctgctggagagcctgcgggccacagagaaggccttcggccagaacagcggctggctgttcctggacagcagcacctccatgttcatcaatgcccgggcccgggtgtaccacctgcctgatgccaagatgagcaagaaggagaagatcagcgagaagatggagatcaaggagggggaggagaccaagaaggagctggtgctggagagcaaccccaagtgggaggccctgacagaggtgctgaaggagattgaagctgagaacaaggagagcgaggccctgggcggccctggccaggtgctgatctgtgccagtgatgacaggacctgcagccagctgcgggactacatcaccctgggcgctgaggccttcctgctgcggctgtacaggaagacctttgagaaggacagcaaggccgaggaggtgtggatgaagttcagaaaagaagacagcagcaagaggatcaggaagagccacaagaggcccaaggacccccagaacaaggagcgggccagcaccaaggagaggaccctgaagaagaagaagaggaagctgaccctgacccagatggtgggcaagccagaggagctggaggaggagggagatgtggaggagggctaccgccgggagatcagcagcagccctgagagctgcccagaggagatcaagcatgaggagtttgatgtgaacctgagcagtgatgctgccttcggcatcctgaaggagcccctgaccatcatccaccccctgctgggctgcagcgacccctatgccctgaccagggtgctgcacgaggtggagccccgctacgtggtgctgtatgatgctgagctgacctttgtgcggcagctggagatctaccgggccagcaggcctgggaagcccctgcgctacttcctgatctacggcggcagcacagaggagcagcgctacctgacagccctgaggaaggagaaggaggcctttgagaagctgatccgggagaaggcctccatggtggtgcctgaggagcgggagggcagagatgagaccaacctggacctggtgcggggcacagccagcgcagatgtgtccacagacaccaggaaggccggcggccaggagcagaatggcacccagcagagcatcgtggtggacatgagggagttccgctctgagctgcccagcctcatccacagaagaggcatcgacatcgagcctgtgaccctggaggtgggggactacatcctgaccccagagatgtgtgtggagaggaagagcatcagtgacctgattggcagcctgaacaacggccgcctgtacagccagtgcatctccatgagccgctactacaagaggcctgtgctgctgattgaatttgaccccagcaagcccttcagcctgaccagcagaggagccctcttccaggagatcagcagcaatgacatcagcagcaagctgaccctgctgaccctgcacttcccccggctgcgcatcctgtggtgccccagcccccacgccacagctgagctgtttgaggagctgaagcagagcaagccccagccagatgctgccacagccctggccatcacagctgacagcgagaccctgcctgagagcgagaagtacaaccctggcccccaggacttcctgctgaagatgcctggggtgaatgccaagaactgccgcagcctgatgcaccacgtgaagaacattgctgagctggccgccctgagccaggatgagctgaccagcatcctgggcaatgctgccaatgccaagcagctgtatgacttcatccacaccagctttgctgaggtggtgtccaagggcaagggcaagaagtag

SEQ ID NO: 19601 - DNA, 1071 bp, synthetic construct
  misc_feature 1..1071: note = Description of Artificial Sequence: Synthetic coding sequence
  source 1..1071: mol_type = other DNA
atggcccccctgctggagtatgagcggcagctggtgctggagctgctggacacagatggcctggtggtgtgtgcccggggcctgggcgctgaccggctgctgtaccacttcctgcagctgcactgccacccagcctgcctggtgctggtgctgaacacccagcctgctgaggaggagtacttcatcaaccagctgaagattgaaggagtggagcacctgcccaggagagtgaccaatgagatcaccagcaacagccgctatgaggtgtacacccagggcggcgtcatctttgccaccagccgcatcctggtggtggacttcctgacagaccgcatccccagcgacctgatcaccggcatcctggtgtaccgggcccaccgcatcatcgagagctgccaggaggccttcatcctgcggctcttccggcagaagaacaagaggggcttcatcaaggccttcacagacaatgctgtggcctttgacaccggcttctgccacgtggagcgggtgatgaggaacctgtttgtgaggaagctgtacctgtggccccgcttccacgtggccgtgaacagcttcctggagcagcacaagccagaggtggtggagatccacgtgtccatgacccccaccatgctggccatccagacagccatcctggacatcctgaatgcctgcctgaaggagctgaagtgccacaaccccagcctggaggtggaggacctgagcctggagaatgccatcggcaagccctttgacaagaccatccgccactacctggaccccctgtggcaccagctgggcgccaagaccaagagcctggtgcaggacctgaagatcctgcggaccctgctgcagtacctgagccagtatgactgtgtgaccttcctgaacctgctggagagcctgcgggccacagagaaggccttcggccagaacagcggctggctgttcctggacagcagcacctccatgttcatcaatgcccgggcccgggtgtaccacctgcctgatgccaagatgagcaagaaggagaagatcagcgagaagatcaagaagaagaagaagaagtag

SEQ ID NO: 19602 - DNA, 3561 bp, synthetic construct
  misc_feature 1..3561: note = Description of Artificial Sequence: Synthetic coding sequence
  source 1..3561: mol_type = other DNA
atgggcgtgcagggcctgtggaagctgctggagtgcagcggccggcaggtgtccccagaggccctggagggcaagatcctggccgtggacatcagcatctggctgaaccaggccctgaagggcgtgcgggacagacatggcaacagcattgagaacccccacctgctgaccctcttccaccggctgtgcaagctgctcttcttccgcatccggcccatctttgtgtttgatggagatgcccccctgctgaagaagcagaccctggtgaagaggcggcagaggaaggacctggccagcagtgacagcaggaagaccacagagaagctgctgaagaccttcctgaagaggcaggccatcaagacagccttccgcagcaagagagatgaggccctgcccagcctgacccaggtgcggcgggagaatgacctgtatgtgctgccccccctgcaggaggaggagaagcacagcagcgaggaggaggatgagaaggagtggcaggagaggatgaaccagaagcaggccctgcaggaggagttcttccacaacccccaggccatcgacatcgagagcgaggacttcagcagcctgcccccagaggtgaagcatgagatcctgacagacatgaaggagttcaccaagagaagaaggaccctgtttgaggccatgcctgaggagagtgatgacttcagccagtaccagctgaagggcctgctgaagaagaactacctgaaccagcacattgaacatgtgcagaaggagatgaaccagcagcacagcggccacatccggcggcagtatgaagatgagggcggcttcctgaaggaggtggagagcagaagagtggtgtctgaggacaccagccactacatcctgatcaagggcatccaggccaagacagtggccgaggtggacagcgagagcctgcccagcagcagcaagatgcacggcatgagctttgatgtgaagagcagcccctgtgagaagctgaagacagagaaggagccagatgccaccccacccagccccaggaccctgctggccatgcaggccgccctgctgggcagcagcagcgaggaggagctggagagcgagaacagacggcaggcccggggcagaaatgccccagctgctgtggatgagggcagcatcagccccaggaccctgagcgccatcaagagggccctggatgatgatgaagatgtgaaggtgtgtgctggagatgatgtgcagacaggaggccctggagctgaggagatgaggatcaacagcagcacagagaacagtgatgagggcctgaaggtgagagatggcaagggcatccccttcaccgccaccctggccagcagctctgtgaacagcgctgaggagcacgtggccagcaccaatgaaggccgggagcccacagacagcgtgcccaaggagcagatgagcctggtgcacgtgggcacagaggccttccccatcagtgatgagagcatgatcaaggacaggaaggaccggctgcccctggagagcgctgtggtgcgccacagtgatgcccctggcctgcccaacggccgggagctgaccccagccagccccacctgcaccaacagcgtgtccaagaatgagacccacgccgaggtgctggagcagcagaatgagctgtgcccctatgagagcaagtttgacagcagcctgctgagcagtgatgatgagaccaagtgcaagcccaacagcgccagcgaggtgattggccctgtgtccctgcaggagaccagcagcatcgtgtctgtgcccagcgaggccgtggacaacgtggagaatgtggtgtccttcaatgccaaggagcacgagaacttcctggagaccatccaggagcagcagaccacagagagcgctggccaggacctgatcagcatccccaaggctgtggagcccatggagattgattctgaggagagcgagagtgatggcagcttcatcgaggtgcagagcgtcatcagtgatgaggagctgcaggccgagttccctgagaccagcaagccacccagcgagcagggcgaggaggagctggtgggcacccgggagggggaggccccagctgagagcgagagcctgctgcgggacaacagcgagagagatgatgtggatggagagccccaggaggccgagaaggatgctgaggacagcctgcacgagtggcaggacatcaacctggaggagctggagaccctggagagcaacctgctggcccagcagaacagcctgaaggcccagaagcagcagcaggagagaattgctgccaccgtgacaggccagatgttcctggagagccaggagctgctgcggctgtttggcatcccctacatccaggcccccatggaggccgaggcccagtgtgccatcctggacctgacagaccagaccagcggcaccatcacagatgacagcgacatctggctgtttggagcccggcacgtgtacagaaacttcttcaacaagaacaagtttgtggagtactaccagtatgtggacttccacaaccagctgggcctggacaggaacaagctgatcaacctggcctacctgctgggcagtgactacacagagggcatccccaccgtgggctgtgtgacagccatggagatcctgaatgagttccctggccacggcctggagcccctgctgaagttcagcgagtggtggcatgaggcccagaagaaccccaagatccggcccaacccccatgacaccaaggtgaagaagaagctgcggaccctgcagctgaccccaggcttccccaacccagctgtggccgaggcctacctgaagcctgtggtggatgacagcaagggcagcttcctgtggggcaagccagacctggacaagatccgggagttctgccagcgctacttcggctggaacagaaccaagacagatgagagcctcttccctgtgctgaagcagctggatgcccagcagacccagctgagaattgacagcttcttccggctggcccagcaggagaaggaggatgccaagaggatcaagagccagaggctgaacagagctgtgacctgcatgctgaggaaggagaaggaggccgccgccagcgagattgaggccgtgtctgtggccatggagaaggagtttgagctgctggacaaggccaagggcaagacccagaagaggggcatcaccaacaccctggaggagagcagcagcctgaagaggaagaggctgagtgacagcaagggcaagaacacctgtggcggcttcctgggggagacctgcctgtctgagagcagtgatggcagcagcagtgaagatgctgagagcagcagcctgatgaatgtgcagaggagaacagctgccaaggagcccaagaccagcgccagtgacagccagaacagcgtgaaggaggcccctgtgaagaatggaggagccaccaccagcagcagcagtgacagtgatgatgatggcggcaaggagaagatggtgctggtgacagcccggtctgtgtttgggaagaagaggaggaagctgcggcgggcccggggcaggaagaggaagacctag

SEQ ID NO: 19603 - DNA, 1260 bp, synthetic construct
  misc_feature 1..1260: note = Description of Artificial Sequence: Synthetic coding sequence
  source 1..1260: mol_type = other DNA
atgttcctggagagccaggagctgctgcggctgtttggcatcccctacatccaggcccccatggaggccgaggcccagtgtgccatcctggacctgacagaccagaccagcggcaccatcacagatgacagcgacatctggctgtttggagcccggcacgtgtacagaaacttcttcaacaagaacaagtttgtggagtactaccagtatgtggacttccacaaccagctgggcctggacaggaacaagctgatcaacctggcctacctgctgggcagtgactacacagagggcatccccaccgtgggctgtgtgacagccatggagatcctgaatgagttccctggccacggcctggagcccctgctgaagttcagcgagtggtggcatgaggcccagaagaaccccaagatccggcccaacccccatgacaccaaggtgaagaagaagctgcggaccctgcagctgaccccaggcttccccaacccagctgtggccgaggcctacctgaagcctgtggtggatgacagcaagggcagcttcctgtggggcaagccagacctggacaagatccgggagttctgccagcgctacttcggctggaacagaaccaagacagatgagagcctcttccctgtgctgaagcagctggatgcccagcagacccagctgagaattgacagcttcttccggctggcccagcaggagaaggaggatgccaagaggatcaagagccagaggctgaacagagctgtgacctgcatgctgaggaaggagaaggaggccgccgccagcgagattgaagctgtgtctgtggccatggagaaggagtttgagctgctggacaaggccaagggcaagacccagaagaggggcatcaccaacaccctggaggagagcagcagcctgaagaggaagaggctgagtgacagcaagggcaagaacacctgtggcggcttcctgggggagacctgcctgtctgagagcagtgatggcagcagcagtgaagatgctgagagcagcagcctgatgaatgtgcagaggagaacagctgccaaggagcccaagaccagcgccagtgacagccagaacagcgtgaaggaggcccctgtgaagaatggaggagccaccaccagcagcagcagtgacagtgatgatgatggcggcaaggagaagatggtgctggtgacagcccggtctgtgtttgggaagaagaggaggaagctgcggcgggcccggggcaggaagaggaagacctag

SEQ ID NO: 19604 - DNA, 3057 bp, synthetic construct
  misc_feature 1..3057: note = Description of Artificial Sequence: Synthetic coding sequence
  source 1..3057: mol_type = other DNA
atgaaccagaagcaggccctgcaggaggagttcttccacaacccccaggccatcgacatcgagagcgaggacttcagcagcctgcccccagaggtgaagcatgagatcctgacagacatgaaggagttcaccaagagaagaaggaccctgtttgaggccatgcctgaggagagtgatgacttcagccagtaccagctgaagggcctgctgaagaagaactacctgaaccagcacattgaacatgtgcagaaggagatgaaccagcagcacagcggccacatccggcggcagtatgaagatgagggcggcttcctgaaggaggtggagagcagaagagtggtgtctgaggacaccagccactacatcctgatcaagggcatccaggccaagacagtggccgaggtggacagcgagagcctgcccagcagcagcaagatgcacggcatgagctttgatgtgaagagcagcccctgtgagaagctgaagacagagaaggagccagatgccaccccacccagccccaggaccctgctggccatgcaggccgccctgctgggcagcagcagcgaggaggagctggagagcgagaacagacggcaggcccggggcagaaatgccccagctgctgtggatgagggcagcatcagccccaggaccctgagcgccatcaagagggccctggatgatgatgaagatgtgaaggtgtgtgctggagatgatgtgcagacaggaggccctggagctgaggagatgaggatcaacagcagcacagagaacagtgatgagggcctgaaggtgagagatggcaagggcatccccttcaccgccaccctggccagcagctctgtgaacagcgctgaggagcacgtggccagcaccaatgaaggccgggagcccacagacagcgtgcccaaggagcagatgagcctggtgcacgtgggcacagaggccttccccatcagtgatgagagcatgatcaaggacaggaaggaccggctgcccctggagagcgctgtggtgcgccacagtgatgcccctggcctgcccaacggccgggagctgaccccagccagccccacctgcaccaacagcgtgtccaagaatgagacccacgccgaggtgctggagcagcagaatgagctgtgcccctatgagagcaagtttgacagcagcctgctgagcagtgatgatgagaccaagtgcaagcccaacagcgccagcgaggtgattggccctgtgtccctgcaggagaccagcagcatcgtgtctgtgcccagcgaggccgtggacaacgtggagaatgtggtgtccttcaatgccaaggagcacgagaacttcctggagaccatccaggagcagcagaccacagagagcgctggccaggacctgatcagcatccccaaggctgtggagcccatggagattgattctgaggagagcgagagtgatggcagcttcatcgaggtgcagagcgtcatcagtgatgaggagctgcaggccgagttccctgagaccagcaagccacccagcgagcagggcgaggaggagctggtgggcacccgggagggggaggccccagctgagagcgagagcctgctgcgggacaacagcgagagagatgatgtggatggagagccccaggaggccgagaaggatgctgaggacagcctgcacgagtggcaggacatcaacctggaggagctggagaccctggagagcaacctgctggcccagcagaacagcctgaaggcccagaagcagcagcaggagagaattgctgccaccgtgacaggccagatgttcctggagagccaggagctgctgcggctgtttggcatcccctacatccaggcccccatggaggccgaggcccagtgtgccatcctggacctgacagaccagaccagcggcaccatcacagatgacagcgacatctggctgtttggagcccggcacgtgtacagaaacttcttcaacaagaacaagtttgtggagtactaccagtatgtggacttccacaaccagctgggcctggacaggaacaagctgatcaacctggcctacctgctgggcagtgactacacagagggcatccccaccgtgggctgtgtgacagccatggagatcctgaatgagttccctggccacggcctggagcccctgctgaagttcagcgagtggtggcatgaggcccagaagaaccccaagatccggcccaacccccatgacaccaaggtgaagaagaagctgcggaccctgcagctgaccccaggcttccccaacccagctgtggccgaggcctacctgaagcctgtggtggatgacagcaagggcagcttcctgtggggcaagccagacctggacaagatccgggagttctgccagcgctacttcggctggaacagaaccaagacagatgagagcctcttccctgtgctgaagcagctggatgcccagcagacccagctgagaattgacagcttcttccggctggcccagcaggagaaggaggatgccaagaggatcaagagccagaggctgaacagagctgtgacctgcatgctgaggaaggagaaggaggccgccgccagcgagattgaggccgtgtctgtggccatggagaaggagtttgagctgctggacaaggccaagggcaagacccagaagaggggcatcaccaacaccctggaggagagcagcagcctgaagaggaagaggctgagtgacagcaagggcaagaacacctgtggcggcttcctgggggagacctgcctgtctgagagcagtgatggcagcagcagtgaagatgctgagagcagcagcctgatgaatgtgcagaggagaacagctgccaaggagcccaagaccagcgccagtgacagccagaacagcgtgaaggaggcccctgtgaagaatggaggagccaccaccagcagcagcagtgacagtgatgatgatggcggcaaggagaagatggtgctggtgacagcccggtctgtgtttgggaagaagaggaggaagctgcggcgggcccggggcaggaagaggaagacctag

SEQ ID NO: 19605 - DNA, 4836 bp, synthetic construct
  misc_feature 1..4836: note = Description of Artificial Sequence: Synthetic coding sequence
  source 1..4836: mol_type = other DNA
cagggcgctgtgaagagcttctgcaccagcgccagcggggcccccctgggccccaagggagatggccactacccctggagctgccctgtgacccacacccgggagaagatctatgccatctgcagcgactatgccttcctgaaccaggccaccagcatctacaagacccccaaccccagccgcagcccctgcctgcctgacagcaccagcctgtctgctggcaacaacagcagccgctacatcggcatccccaccagcaccagcgagatcatctacaatgaggagaacagcctggagaacctgagcaacagcctgggcaagctgcccctggcctgggagattgacaagtcagaatttgatggagtgaccaccaacagcaagcacaagtctggaaatgccaagaagcaggtgtccaagaggaagaccagtgacaagaagggccgctaccagaaggagtgcccccagcacagccccctggaggacatcaagcagaggaaggtgctggacctgcggcgctggtactgcatcagccggccccagtacaagaccagctgtggcatcagcagcctcatcagctgctggaacttcctgtacagcaccatgggcgccggcaacctgccccccatcacccaggaggaggccctgcacatcctgggcttccagcccccatttgaggacatccgcttcggccccttcaccggcaacaccaccctgatgcgctggttccggcagatcaatgaccacttccacgtgaagggctgcagctatgtgctgtacaagccccacggcaagaacaagacagctggggagacagccagcggggccctgagcaagctgacccggggcctgaaggatgagagcctggcctacatctaccactgccagaaccactacttctgccccatcggctttgaggccacccctgtgaaggccaacaaggccttcagccggggccccctgagcccccaggaggtggagtactggatcctgattggagagagcagcaggaagcacccagccatccactgcaagaagtgggccgacatcgtgacagacctgaacacccagaaccctgagtacctggacatccgccacctggagcggggcctgcagtacaggaagaccaagaaggtgggcggcaacctgcactgcatcatcgccttccagaggctgaactggcagcgcttcggcctgtggaacttccccttcggcaccatccggcaggagagccagccccccacccacgcccagggcatcgccaagtctgagagcgaggacaacatcagcaagaagcagcacggccgcctgggccgctccttcagcgccagcttccaccaggacagcgcctggaagaagatgagcaacatcagcatctggctgaaccaggccctgaagggcgtgcgggacagacatggcaacagcattgagaacccccacctgctgaccctcttccaccggctgtgcaagctgctcttcttccgcatccggcccatctttgtgtttgatggagatgcccccctgctgaagaagcagaccctggtgaagaggcggcagaggaaggacctggccagcagtgacagcaggaagaccacagagaagctgctgaagaccttcctgaagaggcaggccatcaagacagccttccgcagcaagagagatgaggccctgcccagcctgacccaggtgagaagagaaaatgacctgtatgtgctgccccccctgcaggaggaggagaagcacagcagcgaggaggaggatgagaaggagtggcaggagaggatgaaccagaagcaggccctgcaggaggagttcttccacaacccccaggccattgatattgaaagtgaggacttcagcagcctgcccccagaggtgaagcatgagatcctgacagacatgaaggagttcaccaagagaagaaggaccctgtttgaggccatgcctgaggagagtgatgacttcagccagtaccagctgaagggcctgctgaagaagaactacctgaaccagcacatcgagcacgtgcagaaggagatgaaccagcagcacagcggccacatccggcggcagtatgaagatgaaggaggcttcctgaaggaggtggagagccggcgggtggtgtctgaggacaccagccactacatcctgatcaagggcatccaggccaagacagtggccgaggtggacagcgagagcctgcccagcagcagcaagatgcacggcatgagctttgatgtgaagagcagcccctgtgagaagctgaagacagagaaggagccagatgccaccccacccagccccaggaccctgctggccatgcaggccgccctgctgggcagcagcagcgaggaggagctggagagtgaaaatcggcggcaggcccggggcagaaatgccccagctgctgtggatgagggcagcatcagccccaggaccctgagcgccatcaagagggccctggatgatgatgaagatgtgaaggtgtgtgctggagatgatgtgcagacaggaggccctggagctgaggagatgaggatcaacagcagcacagaaaattctgatgagggcctgaaggtgagagatggcaagggcatccccttcaccgccaccctggccagcagctctgtgaacagcgctgaggagcacgtggccagcaccaatgaaggccgggagcccacagattctgtgcccaaggagcagatgagcctggtgcacgtgggcacagaggccttccccatcagtgatgagagcatgatcaaggacaggaaggaccggctgcccctggagagcgctgtggtgcgccacagtgatgcccctggcctgcccaacggccgggagctgaccccagccagccccacctgcaccaacagcgtgtccaagaatgagacccatgctgaggtgctggagcagcagaatgagctgtgcccctatgagagcaagtttgacagcagcctgctgagcagtgatgatgagaccaagtgcaagcccaacagcgccagcgaggtgattggccctgtgtccctgcaggagaccagcagcatcgtgtctgtgcccagcgaggccgtggacaacgtggagaatgtggtgtccttcaatgccaaggagcacgagaacttcctggagaccatccaggagcagcagaccacagaatctgctggccaggacctgatcagcatccccaaggctgtggagcccatggagattgacagcgaggagagcgagagtgatggcagcttcatcgaggtgcagagcgtcatcagtgatgaggagctgcaggccgagttccctgagaccagcaagcccccatctgagcagggcgaggaggagctggtgggcacccgggagggggaggccccagctgagagcgagagcctgctgcgggacaacagcgagagagatgatgtggatggagagccccaggaggccgagaaggatgctgaggacagcctgcacgagtggcaggacatcaacctggaggagctggagaccctggagagcaacctgctggcccagcagaacagcctgaaggcccagaagcagcagcaggagagaattgctgccaccgtgacaggccagatgttcctggagagccaggagctgctgcggctgtttggcatcccctacatccaggcccccatggaggccgaggcccagtgtgccatcctggacctgacagaccagaccagcggcaccatcacagatgacagcgacatctggctgtttggagcccggcacgtgtacagaaacttcttcaacaagaacaagtttgtggagtactaccagtatgtggacttccacaaccagctgggcctggacaggaacaagctgatcaacctggcctacctgctgggcagtgactacacagagggcatccccaccgtgggctgtgtgacagccatggagatcctgaatgagttccctggccacggcctggagcccctgctgaagttcagcgagtggtggcatgaggcccagaagaaccccaagatccggcccaacccccatgacaccaaggtgaagaagaagctgcggaccctgcagctgaccccaggcttccccaacccagctgtggccgaggcctacctgaagcctgtggtggatgacagcaagggcagcttcctgtggggcaagccagacctggacaagatccgggagttctgccagcgctacttcggctggaacagaaccaagacagatgagagcctcttccctgtgctgaagcagctggatgcccagcagacccagctgagaattgacagcttcttccggctggcccagcaggagaaggaggatgccaagaggatcaagagccagaggctgaacagagctgtgacctgcatgctgaggaaggagaaggaggccgccgccagcgagattgaagctgtgtctgtggccatggagaaggagtttgagctgctggacaaggccaagggcaagacccagaagaggggcatcaccaacaccctggaggagagcagcagcctgaagaggaagaggctgagtgacagcaagggcaagaacacctgtggcggcttcctgggggagacctgcctgtctgagagcagtgatggcagcagcagtgaagatgctgagagcagcagcctgatgaatgtgcagaggagaacagctgccaaggagcccaagaccagcgccagtgacagccagaacagcgtgaaggaggcccctgtgaagaatggaggagccaccaccagcagcagcagtgacagtgatgatgatggcggcaaggagaagatggtgctggtgacagcccggtctgtgtttgggaagaagaggaggaagctgcggcgggcccggggcaggaagaggaagacctag

SEQ ID NO: 19606 - DNA, 699 bp, synthetic construct
  misc_feature 1..699: note = Description of Artificial Sequence: Synthetic coding sequence
  source 1..699: mol_type = other DNA
atgggcgtgcagggcctgtggaagctgctggagtgcagcggccggcaggtgtccccagaggccctggagggcaagatcctggccgtggacatcagcatctggctgaaccaggccctgaagggcgtgcgggacagacatggcaacagcattgagaacccccacctgctgaccctcttccaccggctgtgcaagctgctcttcttccgcatccggcccatctttgtgtttgatggagatgcccccctgctgaagaagcagaccctggtgaagaggcggcagaggaaggacctggccagcagtgacagcaggaagaccacagagaagctgctgaagaccttcctgaagaggcaggccatcaagacagccttccgcagcaagagagatgaggccctgcccagcctgacccaggtgcggcgggagaatgacctgtatgtgctgccccccctgcaggaggaggagaagcacagcagcgaggaggaggatgagaaggagtggcaggagaggatgaaccagaagcaggccctgcaggaggagttcttccacaacccccaggccatcgacatcgagagcgaggacttcagcagcctgcccccagaggtgaagcatgagatcctgacagacatgaaggagttcaccaagagaagaaggaccctgtttgaggccatgcctgaggtgtacctgcccctgctgcagccctag

SEQ ID NO: 19607 - DNA, 4482 bp, synthetic construct
  misc_feature 1..4482: note = Description of Artificial Sequence: Synthetic coding sequence
  source 1..4482: mol_type = other DNA
atgcccaatgaaggcatcccccacagcagccagacccaggagcaggactgcctgcagagccagcctgtgagcaacaatgaggagatggccatcaagcaggagagcggaggagatggagaggtggaggagtacctgtccttccgctctgtgggagatggcctgagcaccagcgctgtgggctgtgccagcgctgccccccggcggggccctgccctgctgcacatcgacagacaccagatccaggccgtggagcccagcgcccaggccctggagctgcagggcctgggcgtggatgtgtatgaccaggatgtgctggagcagggcgtgctgcagcaggtggacaatgccatccacgaggccagccgggccagccagctggtggatgtggagaaggagtacagatctgtgctggatgacctgaccagctgcaccaccagcctgcggcagatcaacaagatcatcgagcagctgagcccccaggccgccaccagccgggacatcaacaggaagctggacagcgtgaagaggcagaagtacaacaaggagcagcagctgaagaagatcacagccaagcagaagcacctgcaggccatcctgggcggcgctgaggtgaagattgagctggaccacgccagcctggaggaggatgctgagcccggccccagcagcctgggctccatgctgatgcctgtgcaggagacagcctgggaggagctgatcagaacaggccagatgacccccttcggcacccagatcccccagaagcaggagaagaagcccaggaagatcatgctgaatgaggccagcggctttgagaagtacctggccgaccaggccaagctgagctttgagaggaagaagcagggctgcaacaagagagctgccaggaaggccccagcccctgtgaccccaccagcccctgtgcagaacaagaacaagcccaacaagaaggcccgggtgctgagcaagaaggaggagcggctgaagaagcacatcaagaagctgcagaagagggccctgcagttccagggcaaggtgggcctgcccaaggcccggcggccctgggagagtgacatgaggcctgaggccgagggggacagcgagggggaggagagcgagtacttccccacagaggaggaggaggaggaggaggatgatgaggtggagggcgctgaggccgacctgtctggagatggaacagattatgagctgaagcccctgcccaagggcggcaagaggcagaagaaggtgcctgtgcaggagattgatgatgacttcttccccagcagcggggaggaggccgaggccgcctctgtgggggagggcggcggcggcggcaggaaggtgggccgctacagagatgatggagatgaggactactacaagcagaggctgcggcgctggaacaagctgcggctgcaggacaaggagaagaggctgaagctggaggatgacagcgaggagagtgatgctgagtttgatgagggcttcaaggtgcccggcttcctgttcaagaagctgttcaagtaccagcagacaggagtgcgctggctgtgggagctgcactgccagcaggccggcggcatcctgggagatgagatgggcctgggcaagaccatccagatcatcgccttcctggccggcctgagctacagcaagatccgcacccggggcagcaactacagatttgagggcctgggccccaccgtgattgtgtgccccaccaccgtgatgcaccagtgggtgaaggagttccacacctggtggccacccttccgggtggccatcctgcacgagaccggcagctacacccacaagaaggagaagctgatcagagatgtggcccactgccacggcatcctgatcaccagctacagctacatccggctgatgcaggatgacatcagccgctatgactggcactacgtgatcctggatgagggccacaagatccggaaccccaatgctgctgtgaccctggcctgcaagcagttccgcaccccccaccgcatcatcctgagcggcagccccatgcagaacaacctgcgggagctgtggagcctgtttgacttcatcttccctgggaagctgggcaccctgcctgtgttcatggagcagttctctgtgcccatcaccatgggcggctacagcaatgccagccctgtgcaggtgaagacagcctacaagtgtgcctgtgtgctgcgggacaccatcaacccctacctgctgcggaggatgaagagtgatgtgaagatgagcctgagcctgcctgacaagaatgagcaggtgctcttctgccgcctgacagatgagcagcacaaggtgtaccagaactttgtggacagcaaggaggtgtaccgcatcctgaatggagagatgcagatcttcagcggcctcatcgccctgaggaagatctgcaaccacccagacctcttcagcggcggccccaagaacctgaagggcctgcctgatgatgagctggaggaggaccagtttggctactggaagaggtctgggaagatgattgtggtggagagcctgctgaagatctggcacaagcagggccagagggtgctgctcttcagccagagccggcagatgctggacatcctggaggtgttcctgcgggcccagaagtacacctacctgaagatggatggcaccaccaccatcgccagccggcagcccctcatcacccgctacaatgaagacaccagcatctttgtgttcctgctgaccaccagggtgggcggcctgggcgtgaacctgaccggggccaacagagtggtgatctatgaccctgactggaaccccagcacagacacccaggcccgggagcgggcctggagaattggccagaagaagcaggtgacagtgtaccgcctgctgacagctggcaccatcgaggagaagatctaccaccggcagatcttcaagcagttcctgaccaacagagtgctgaaggaccccaagcagaggcgcttcttcaagagcaatgacctgtatgagctgttcaccctgaccagcccagatgccagccagagcacagagaccagcgccatctttgctggcactggaagtgatgtgcagacccccaagtgccacctgaagaggcgcatccagcctgccttcggggctgaccatgatgtgcccaagaggaagaagtttcctgccagcaacatctctgtgaatgatgccaccagcagcgaggagaagtctgaggccaagggagctgaggtgaatgctgtgaccagcaacagaagtgaccccctgaaggatgacccccacatgagcagcaatgtgaccagcaatgaccggctgggggaggagaccaatgctgtgtctggccctgaggagctgagcgtcatctctggaaatggagagtgcagcaacagcagcggcaccgggaagacctccatgcccagcggagatgagagcattgatgagaagctgggcctgagctacaagcgggagcggcccagccaggcccagacagaggccttctgggagaacaagcagatggagaacaacttctacaagcacaagagcaagaccaagcaccacagcgtggccgaggaggagaccctggagaagcacctgcggcccaagcagaagcccaagaacagcaagcactgcagagatgccaagtttgagggcacccgcatcccccacctggtgaagaagaggcgctaccagaagcaggacagcgagaacaagtctgaggccaaggagcagagcaatgatgattatgtgctggagaagctgttcaagaagtctgtgggcgtgcacagcgtgatgaagcatgatgccatcatggatggagccagcccagactatgtgctggtggaggccgaggccaacagagtggcccaggatgccctgaaggccctgcggctgagccggcagcgctgcctgggcgctgtgtctggagtgcccacctggacaggccaccggggcatcagcggggccccagctgggaagaagagcagatttgggaagaagaggaacagcaacttctctgtgcagcaccccagcagcaccagccccacagagaagtgccaggacggcatcatgaagaaggagggcaaggacaacgtgcctgagcacttcagcggccgggcagaagatgctgacagcagcagcggccccctggccagcagcagcctgctggccaagatgagggccaggaaccacctgatcctgcctgagcggctggagagcgagagcggccacctgcaggaggccagcgccctgctgcccaccacagaacatgatgacctgctggtggagatgaggaacttcatcgccttccaggcccacacagatggccaggccagcacccgggagatcctgcaggagtttgagagcaagctgagcgccagccagagctgtgtgttccgggagctgctgaggaacctgtgcaccttccacaggaccagcggcggggagggcatctggaagctgaagccagagtactgctag

SEQ ID NO: 19608 - DNA, 2613 bp, synthetic construct
  misc_feature 1..2613: note = Description of Artificial Sequence: Synthetic coding sequence
  source 1..2613: mol_type = other DNA
cagcagcccttccaccgccacctgctgatgaccacagccctgcacagcgagaagctgatcagagatgtggcccactgccacggcatcctgatcaccagctacagctacatccggctgatgcaggatgacatcagccgctatgactggcactacgtgatcctggatgagggccacaagatccggaaccccaatgctgctgtgaccctggcctgcaagcagttccgcaccccccaccgcatcatcctgagcggcagccccatgcagaacaacctgcgggagctgtggagcctgtttgacttcatcttccctgggaagctgggcaccctgcccgtcttcatggagcagttctctgtgcccatcaccatgggcggctacagcaatgccagccctgtgcaggtgaagacagcctacaagtgtgcctgtgtgctgcgggacaccatcaacccctacctgctgcggaggatgaagagtgatgtgaagatgagcctgagcctgcctgacaagaatgagcagatcttcagcggcctgattgccctgaggaagatctgcaaccacccagacctcttcagcggcggccccaagaacctgaagggcctgcctgatgatgagctggaggaggaccagtttggctactggaagaggtctgggaagatgattgtggtggagagcctgctgaagatctggcacaagcagggccagagggtgctgctcttcagccagagccggcagatgctggacatcctggaggtgttcctgcgggcccagaagtacacctacctgaagatggatggcaccaccaccatcgccagccggcagcccctcatcacccgctacaatgaagacaccagcatctttgtgttcctgctgaccaccagggtgggcggcctgggcgtgaacctgactggagccaacagagtggtgatctatgaccctgactggaaccccagcacagacacccaggcccgggagcgggcctggagaattggccagaagaagcaggtgacagtgtaccgcctgctgacagctggcaccatcgaggagaagatctaccaccggcagatcttcaagcagttcctgaccaacagagtgctgaaggaccccaagcagaggcgcttcttcaagagcaatgacctgtatgagctgttcaccctgaccagcccagatgccagccagagcacagagaccagcgccatctttgctggcaccggcagtgatgtgcagacccccaagtgccacctgaagaggcgcatccagcctgcctttggagctgaccatgatgtgcccaagaggaagaagtttcctgccagcaacatctctgtgaatgatgccaccagcagcgaggagaagtctgaggccaagggagctgaggtgaatgctgtgaccagcaacagaagtgaccccctgaaggatgacccccacatgagcagcaatgtgaccagcaatgaccggctgggggaggagaccaatgctgtgtctggccctgaggagctgagcgtcatctctggaaatggagaatgtagcaacagcagcggcaccgggaagacctccatgcccagcggagatgagagcattgatgagaagctgggcctgagctacaagcgggagcggcccagccaggcccagacagaggccttctgggagaacaagcagatggagaacaacttctacaagcacaagagcaagaccaagcaccacagcgtggccgaggaggagaccctggagaagcacctgcggcccaagcagaagcccaagaacagcaagcactgcagagatgccaagtttgagggcacccgcatcccccacctggtgaagaagaggcgctaccagaagcaggacagcgagaacaagtctgaggccaaggagcagagcaatgatgattatgtgctggagaagctgttcaagaagtctgtgggcgtgcacagcgtgatgaagcatgatgccatcatggatggagccagcccagactatgtgctggtggaggccgaggccaacagagtggcccaggatgccctgaaggccctgcggctgagccggcagcgctgcctgggcgctgtgtctggagtgcccacctggacaggccaccggggcatcagcggggccccagctgggaagaagagcagatttgggaagaagaggaacagcaacttctctgtgcagcaccccagcagcaccagccccacagagaagtgccaggacggcatcatgaagaaggagggcaaggacaacgtgcctgagcacttcagcggccgggcagaagatgctgacagcagcagcggccccctggccagcagcagcctgctggccaagatgagggccaggaaccacctgatcctgcctgagcggctggagagcgagagcggccacctgcaggaggccagcgccctgctgcccaccacagaacatgatgacctgctggtggagatgaggaacttcatcgccttccaggcccacacagatggccaggccagcacccgggagatcctgcaggagtttgagagcaagctgagcgccagccagagctgtgtgttccgggagctgctgaggaacctgtgcaccttccacaggaccagcggcggggagggcatctggaagctgaagccagagtactgctag

SEQ ID NO: 19609 - DNA, 540 bp, synthetic construct
  misc_feature 1..540: note = Description of Artificial Sequence: Synthetic coding sequence
  source 1..540: mol_type = other DNA
atgcccaatgaaggcatcccccacagcagccagacccaggagcaggactgcctgcagagccagcctgtgagcaacaatgaggagatggccatcaagcaggagagcggaggagatggagaggtggaggagtacctgtccttccgctctgtgggagatggcctgagcaccagcgctgtgggctgtgccagcgctgccccccggcggggccctgccctgctgcacatcgacagacaccagatccaggccgtggagcccagcgcccaggccctggagctgcagggcctgggcgtggatgtgtatgaccaggatgtgctggagcagggcgtgctgcagcaggtggacaatgccatccacgaggccagccgggccagccagctggtggatgtggagaaggagtacagatctgtgctggatgacctgaccagctgcaccaccagcctgcggcagatcaacaagatcatcgagcagctgagcccccaggccgccaccagccgggacatcaacaggaagctggacagcgtgaagaggcagaagtactag

SEQ ID NO: 19610 - DNA, 318 bp, synthetic construct
  misc_feature 1..318: note = Description of Artificial Sequence: Synthetic coding sequence
  source 1..318: mol_type = other DNA
atgagcctgagcctgcctgacaagaatgagcaggtgctcttctgccgcctgacagatgagcagcacaaggtgtaccagaactttgtggacagcaaggaggtgtaccgcatcctgaatggagagatgcaggaggtgctgcagagcttcaccagcatccacctgcacgagagccccctgaacttcttccgctccttccaggtgcggggcagccgcagccactacccaggcaagggcatgcagaccaccctgggcatcgtgaacttcctggtggtgaccctgaagaggaagaagaggaaccgcttctccccagacctgtag

SEQ ID NO: 19611 - DNA, 2592 bp, synthetic construct
  misc_feature 1..2592: note = Description of Artificial Sequence: Synthetic coding sequence
  source 1..2592: mol_type = other DNA
atgcaggatgacatcagccgctatgactggcactacgtgatcctggatgagggccacaagatccggaaccccaatgctgctgtgaccctggcctgcaagcagttccgcaccccccaccgcatcatcctgagcggcagccccatgcagaacaacctgcgggagctgtggagcctgtttgacttcatcttccctgggaagctgggcaccctgcctgtgttcatggagcagttctctgtgcccatcaccatgggcggctacagcaatgccagccctgtgcaggtgaagacagcctacaagtgtgcctgtgtgctgcgggacaccatcaacccctacctgctgcggaggatgaagagtgatgtgaagatgagcctgagcctgcctgacaagaatgagcaggtgctcttctgccgcctgacagatgagcagcacaaggtgtaccagaactttgtggacagcaaggaggtgtaccgcatcctgaatggagagatgcagatcttcagcggcctcatcgccctgaggaagatctgcaaccacccagacctcttcagcggcggccccaagaacctgaagggcctgcctgatgatgagctggaggaggaccagtttggctactggaagaggtctgggaagatgattgtggtggagagcctgctgaagatctggcacaagcagggccagagggtgctgctcttcagccagagccggcagatgctggacatcctggaggtgttcctgcgggcccagaagtacacctacctgaagatggatggcaccaccaccatcgccagccggcagcccctcatcacccgctacaatgaagacaccagcatctttgtgttcctgctgaccaccagggtgggcggcctgggcgtgaacctgaccggggccaacagagtggtgatctatgaccctgactggaaccccagcacagacacccaggcccgggagcgggcctggagaattggccagaagaagcaggtgacagtgtaccgcctgctgacagctggcaccatcgaggagaagatctaccaccggcagatcttcaagcagttcctgaccaacagagtgctgaaggaccccaagcagaggcgcttcttcaagagcaatgacctgtatgagctgttcaccctgaccagcccagatgccagccagagcacagagaccagcgccatctttgctggcactggaagtgatgtgcagacccccaagtgccacctgaagaggcgcatccagcctgccttcggggctgaccatgatgtgcccaagaggaagaagtttcctgccagcaacatctctgtgaatgatgccaccagcagcgaggagaagtctgaggccaagggagctgaggtgaatgctgtgaccagcaacagaagtgaccccctgaaggatgacccccacatgagcagcaatgtgaccagcaatgaccggctgggggaggagaccaatgctgtgtctggccctgaggagctgagcgtcatctctggaaatggagagtgcagcaacagcagcggcaccgggaagacctccatgcccagcggagatgagagcattgatgagaagctgggcctgagctacaagcgggagcggcccagccaggcccagacagaggccttctgggagaacaagcagatggagaacaacttctacaagcacaagagcaagaccaagcaccacagcgtggccgaggaggagaccctggagaagcacctgcggcccaagcagaagcccaagaacagcaagcactgcagagatgccaagtttgagggcacccgcatcccccacctggtgaagaagaggcgctaccagaagcaggacagcgagaacaagtctgaggccaaggagcagagcaatgatgattatgtgctggagaagctgttcaagaagtctgtgggcgtgcacagcgtgatgaagcatgatgccatcatggatggagccagcccagactatgtgctggtggaggccgaggccaacagagtggcccaggatgccctgaaggccctgcggctgagccggcagcgctgcctgggcgctgtgtctggagtgcccacctggacaggccaccggggcatcagcggggccccagctgggaagaagagcagatttgggaagaagaggaacagcaacttctctgtgcagcaccccagcagcaccagccccacagagaagtgccaggacggcatcatgaagaaggagggcaaggacaacgtgcctgagcacttcagcggccgggcagaagatgctgacagcagcagcggccccctggccagcagcagcctgctggccaagatgagggccaggaaccacctgatcctgcctgagcggctggagagcgagagcggccacctgcaggaggccagcgccctgctgcccaccacagaacatgatgacctgctggtggagatgaggaacttcatcgccttccaggcccacacagatggccaggccagcacccgggagatcctgcaggagtttgagagcaagctgagcgccagccagagctgtgtgttccgggagctgctgaggaacctgtgcaccttccacaggaccagcggcggggagggcatctggaagctgaagccagagtactgctag

SEQ ID NO: 19612 - DNA, 1191 bp, synthetic construct
  misc_feature 1..1191: note = Description of Artificial Sequence: Synthetic coding sequence
  source 1..1191: mol_type = other DNA
atgctgggcttcctgagcgcccggcagacaggcctggaggaccccctgcggctgcggcgggcagagagcaccaggagagtgctgggcctggagctgaacaaggacagagatgtggagcgcatccacggcggcggcatcaacaccctggacatcgagcctgtggagggccgctacatgctgagcggcggcagtgatggagtcatcgtgctgtatgacctggagaacagcagccggcagagctactacacctgcaaggctgtgtgcagcatcggccgggaccacccagatgtgcaccgctacagcgtggagaccgtgcagtggtacccccatgacaccggcatgttcaccagcagcagctttgacaagaccctgaaggtgtgggacaccaacaccctgcagacagcagatgtgttcaactttgaggagaccgtgtacagccaccacatgagccctgtgtccaccaagcactgcctggtggccgtgggcacccggggccccaaggtgcagctgtgtgacctgaagagcggcagctgcagccacatcctgcagggccaccggcaggagatcctggccgtgtcctggagccccaggtatgactacatcctggccacagccagcgctgacagccgggtgaagctgtgggatgtgagaagagccagcggctgcctgatcaccctggaccagcacaacgggaagaagagccaggccgtggagagcgccaacacagcccacaacgggaaggtgaatggcctgtgcttcaccagtgatggcctgcacctgctgactgtgggcacagacaacaggatgaggctgtggaacagcagcaatggagagaacaccctggtgaactacggcaaggtgtgcaacaacagcaagaagggcctgaagttcaccgtgtcctgtggctgcagcagcgagtttgtgtttgtgccctacggcagcaccatcgctgtgtacacagtgtacagcggggagcagatcaccatgctgaagggccactacaagacagtggactgctgcgtgttccagagcaacttccaggagctgtacagcggcagccgggactgcaacatcctggcctgggtgcccagcctgtatgagcctgtgcctgatgatgatgagaccaccaccaagagccagctgaacccagcctttgaagatgcctggagcagcagtgatgaggagggctag

SEQ ID NO: 19613 - DNA, 1017 bp, synthetic construct
  misc_feature 1..1017: note = Description of Artificial Sequence: Synthetic coding sequence
  source 1..1017: mol_type = other DNA
atgctgagcggcggcagtgatggagtcatcgtgctgtatgacctggagaacagcagccggcagagctactacacctgcaaggctgtgtgcagcatcggccgggaccacccagatgtgcaccgctacagcgtggagaccgtgcagtggtacccccatgacaccggcatgttcaccagcagcagctttgacaagaccctgaaggtgtgggacaccaacaccctgcagacagcagatgtgttcaactttgaggagaccgtgtacagccaccacatgagccctgtgtccaccaagcactgcctggtggccgtgggcacccggggccccaaggtgcagctgtgtgacctgaagagcggcagctgcagccacatcctgcagggccaccggcaggagatcctggccgtgtcctggagccccaggtatgactacatcctggccacagccagcgctgacagccgggtgaagctgtgggatgtgagaagagccagcggctgcctgatcaccctggaccagcacaacgggaagaagagccaggccgtggagagcgccaacacagcccacaacgggaaggtgaatggcctgtgcttcaccagtgatggcctgcacctgctgactgtgggcacagacaacaggatgaggctgtggaacagcagcaatggagagaacaccctggtgaactacggcaaggtgtgcaacaacagcaagaagggcctgaagttcaccgtgtcctgtggctgcagcagcgagtttgtgtttgtgccctacggcagcaccatcgctgtgtacacagtgtacagcggggagcagatcaccatgctgaagggccactacaagacagtggactgctgcgtgttccagagcaacttccaggagctgtacagcggcagccgggactgcaacatcctggcctgggtgcccagcctgtatgagcctgtgcctgatgatgatgagaccaccaccaagagccagctgaacccagcctttgaagatgcctggagcagcagtgatgaggagggctag

SEQ ID NO: 19614 - DNA, 1188 bp, synthetic construct
  misc_feature 1..1188: note = Description of Artificial Sequence: Synthetic coding sequence
  source 1..1188: mol_type = other DNA
atggccaccagcagcgccccagctggggtgaggaccaggtatgctggggtgtttgtgaggaccccaaatggatttggaggccccagcagccccagcgagagccgggtgaacacagagagctttggaacaggcatcaacaccctggacatcgagcctgtggagggccgctacatgctgagcggcggcagtgatggagtgattgtgctgtatgacctggagaacagcagccggcagagctactacacctgcaaggctgtgtgcagcatcggccgggaccacccagatgtgcaccgctacagcgtggagaccgtgcagtggtacccccatgacaccggcatgttcaccagcagcagctttgacaagaccctgaaggtgtgggacaccaacaccctgcagacagcagatgtgttcaactttgaggagaccgtgtacagccaccacatgagccctgtgtccaccaagcactgcctggtggccgtgggcacccggggccccaaggtgcagctgtgtgacctgaagagcggcagctgcagccacatcctgcagggccaccggcaggagatcctggccgtgtcctggagccccaggtatgactacatcctggccacagccagcgctgacagccgggtgaagctgtgggatgtgcggcgggccagcggctgcctgatcaccctggaccagcacaacgggaagaagagccaggccgtggagagcgccaacacagcccacaacgggaaggtgaatggcctgtgcttcaccagtgatggcctgcacctgctgactgtgggcacagacaacaggatgaggctgtggaacagcagcaatggagagaacaccctggtgaactacggcaaggtgtgcaacaacagcaagaagggcctgaagttcaccgtgtcctgtggctgcagcagcgagtttgtgtttgtgccctacggcagcaccatcgctgtgtacacagtgtacagcggggagcagatcaccatgctgaagggccactacaagacagtggactgctgcgtgttccagagcaacttccaggagctgtacagcggcagccgggactgcaacatcctggcctgggtgcccagcctgtatgagcctgtgcctgatgatgatgagaccaccaccaagagccagctgaacccagcctttgaagatgcctggagcagcagtgatgaggagggctag

SEQ ID NO: 19615 - DNA, 732 bp, synthetic construct
  misc_feature 1..732: note = Description of Artificial Sequence: Synthetic coding sequence
  source 1..732: mol_type = other DNA
atgggctacaagtacatcaccatcggcacccggggccccaaggtgcagctgtgtgacctgaagagcggcagctgcagccacatcctgcagggccaccggcaggagatcctggccgtgtcctggagccccaggtatgactacatcctggccacagccagcgctgacagccgggtgaagctgtgggatgtgcggcgggccagcggctgcctgatcaccctggaccagcacaacgggaagaagagccaggccgtggagagcgccaacacagcccacaacgggaaggtgaatggcctgtgcttcaccagtgatggcctgcacctgctgactgtgggcacagacaacaggatgaggctgtggaacagcagcaatggagagaacaccctggtgaactacggcaaggtgtgcaacaacagcaagaagggcctgaagttcaccgtgtcctgtggctgcagcagcgagtttgtgtttgtgccctacggcagcaccatcgctgtgtacacagtgtacagcggggagcagatcaccatgctgaagggccactacaagacagtggactgctgcgtgttccagagcaacttccaggagctgtacagcggcagccgggactgcaacatcctggcctgggtgcccagcctgtatgagcctgtgcctgatgatgatgagaccaccaccaagagccagctgaacccagcctttgaagatgcctggagcagcagtgatgaggagggctag

SEQ ID NO: 19616 - DNA, 2541 bp, synthetic construct
  misc_feature 1..2541: note = Description of Artificial Sequence: Synthetic coding sequence
  source 1..2541: mol_type = other DNA
atgggcatccagggcctgctgcagttcatcaaggaggccagcgagcccatccacgtgaggaagtacaagggccaggtggtggccgtggacacctactgctggctgcacaagggggccatcgcctgtgccgagaagctggccaagggggagcccacagacagatatgtgggcttctgcatgaagtttgtgaacatgctgctgagccacggcatcaagcccatcctggtgtttgatggctgcaccctgcccagcaagaaggaggtggagaggagccggcgggagcggcggcaggccaacctgctgaagggcaagcagctgctgcgggagggcaaggtgtctgaggcccgggagtgcttcaccaggagcatcaacatcacccacgccatggcccacaaggtgatcaaggccgcccggagccagggcgtggactgcctggtggccccctatgaagcagatgcccagctggcctacctgaacaaggccggcatcgtgcaggccatcatcacagaggacagcgacctgctggccttcggctgcaagaaggtgatcctgaagatggaccagtttggaaatggcctggagattgaccaggcccggctgggcatgtgccggcagctgggagatgtgttcacagaggagaagttccgctacatgtgcatcctgagcggctgtgactacctgagcagcctgcggggcatcggcctggccaaggcctgcaaggtgctgcggctggccaacaacccagacatcgtgaaggtgatcaagaagattggccactacctgaagatgaacatcaccgtgcctgaggactacatcaatggcttcatccgggccaacaacaccttcctgtaccagctggtgtttgaccccatcaagaggaagctgatccccctgaatgcctatgaagatgatgtggaccctgagaccctgtcctatgccggccagtatgtggatgacagcatcgccctgcagatcgccctgggcaacaaggacatcaacacctttgagcagattgatgactacaacccagacacagccatgcctgcccacagccgcagccacagctgggatgacaagacctgccagaagagcgccaacgtgagcagcatctggcacaggaactacagccccaggcctgagagcggcaccgtgtctgatgccccccagctgaaggagaaccccagcacagtgggcgtggagagggtcatcagcaccaagggcctgaacctgcccaggaagagcagcatcgtgaagaggcccaggtctgctgagctgtctgaagatgacctgctgagccagtacagcctgtccttcaccaagaagaccaagaagaacagcagcgagggcaacaagagcctgtccttcagcgaggtgtttgtgcctgacctggtgaatggccccaccaacaagaagtctgtgtccaccccacccaggaccaggaacaagtttgccaccttcctgcagaggaagaatgaggagagcggggctgtggtggtgcccggcaccaggagccgcttcttctgcagcagtgacagcacagactgtgtgagcaacaaggtgtccatccagcccctggatgaaacagctgtgacagacaaggagaacaacctgcacgagagtgaatatggagaccaggagggcaagaggctggtggacacagatgtggccaggaacagcagtgatgacatccccaacaaccacatccctggggaccacatcccagacaaggccaccgtcttcacagatgaggagagctacagctttgagagcagcaagttcaccaggaccatcagcccccccaccctgggcaccctgcggagctgcttctcctggagcggcggcctgggggacttcagcaggacccccagccccagccccagcacagccctgcagcagttccggaggaagagtgacagccccaccagcctgcctgagaacaacatgtctgatgtgtcccagctgaagtctgaggagagcagtgatgatgagagccaccccctgcgggaggaggcctgcagcagccagagccaggagagcggggagttcagcctgcagagcagcaatgccagcaagctgagccagtgcagcagcaaggacagcgacagcgaggagagtgactgcaacatcaagctgctggacagccagagcgaccagaccagcaagctgcggctgagccacttcagcaagaaggacacccccctgaggaacaaggtgcccggcctgtacaagagcagcagcgctgacagcctgagcaccaccaagatcaagcccctgggccctgcccgggccagcggcctgagcaagaagccagccagcatccagaagaggaagcaccacaatgctgagaacaagccaggcctgcagatcaagctgaatgagctgtggaagaactttggcttcaagaaggacagcgagaagctgcccccctgcaagaagcccctgagccctgtgcgggacaacatccagctgaccccagaggccgaggaggacatcttcaacaagccagaatgtggccgggtgcagagggccatcttccagtag

SEQ ID NO: 19617 - DNA, 510 bp, synthetic construct
  misc_feature 1..510: note = Description of Artificial Sequence: Synthetic coding sequence
  source 1..510: mol_type = other DNA
atgggcatccagggcctgctgcagttcatcaaggaggccagcgagcccatccacgtgaggaagtacaagggccaggtggtggccgtggacacctactgctggctgcacaagggggccatcgcctgtgccgagaagctggccaagggggagcccacagacagaagacggcaggccaacctgctgaagggcaagcagctgctgcgggagggcaaggtgtctgaggcccgggagtgcttcaccaggagcatcaacatcacccacgccatggcccacaaggtgatcaaggccgcccggagccagggcgtggactgcctggtggccccctatgaagcagatgcccagctggcctacctgaacaaggccggcatcgtgcaggccatcatcacagaggacagcgacctgctggccttcggctgcaagaaggtgatcctgaagatggaccagtttggaaatggcctggagattgaccaggcccggctgggcatgtgccggcagctgggagatgtgtag

SEQ ID NO: 19618 - DNA, 2541 bp, synthetic construct; identical to SEQ ID NO: 19616
  misc_feature 1..2541: note = Description of Artificial Sequence: Synthetic coding sequence
  source 1..2541: mol_type = other DNA

SEQ ID NO: 19619 - DNA, 408 bp, synthetic construct
  misc_feature 1..408: note = Description of Artificial Sequence: Synthetic coding sequence
  source 1..408: mol_type = other DNA
atgggcatccagggcctgctgcagttcatcaaggaggccagcgagcccatccacgtgaggaagtacaagggccaggtggtggccgtggacacctactgctggctgcacaagggggccatcgcctgtgccgagaagctggccaagggggagcccacagacagatatgtgggcttctgcatgaagtttgtgaacatgctgctgagccacggcatcaagcccatcctggtgtttgatggctgcaccctgcccagcaagaaggaggtggagaggagccggcgggagcggcggcaggccaacctgctgaagggcaagcagctgctgcgggagggcaaggtgtctgaggcccgggagtgcttcaccaggagcatcaacatcacccacgccatggcccacaaggtgatcaagtag

SEQ ID NO: 19620 - DNA, 2412 bp, synthetic construct
  misc_feature 1..2412: note = Description of Artificial Sequence: Synthetic coding sequence
  source 1..2412: mol_type = other DNA
atgggcatccagggcctgctgcagttcatcaaggaggccagcgagcccatccacgtgaggaagtacaagggccaggtggtggccgtggacacctactgctggctgcacaagggggccatcgcctgtgccgagaagctggccaagggggagcccacagacagatatgtgggcttctgcatgaagtttgtgaacatgctgctgagccacggcatcaagcccatcctggtgtttgatggctgcaccctgcccagcaagaaggaggtggagaggagccggcgggagcggcggcaggccaacctgctgaagggcaagcagctgctgcgggagggcaaggtgtctgaggcccgggagtgcttcaccaggagcatcaacatcacccacgccatggcccacaaggtgatcaaggccgcccggagccagggcgtggactgcctggtggccccctatgaagcagatgcccagctggcctacctgaacaaggccggcatcgtgcaggccatcatcacagaggacagcgacctgctggccttcggctgcaagaaggtgatcctgaagatggaccagtttggaaatggcctggagattgaccaggcccggctgggcatgtgccggcagctgggagatgtgttcacagaggagaagttccgctacatgtgcatcctgagcggctgtgactacctgagcagcctgcggggcatcggcctggccaaggcctgcaaggtgctgcggctggccaacaacccagacatcgtgaaggtgatcaagaagattggccactacctgaagatgaacatcaccgtgcctgaggactacatcaatggcttcatccgggccaacaacaccttcctgtaccagctggtgtttgaccccatcaagaggaagctgatccccctgaatgcctatgaagatgatgtggaccctgagaccctgtcctatgccggccagtatgtggatgacagcatcgccctgcagatcgccctgggcaacaaggacatcaacacctttgagcagattgatgactacaacccagacacagccatgcctgcccacagccgcagccacagctgggatgacaagacctgccagaagagcgccaacgtgagcagcatctggcacaggaactacagccccaggcctgagagcggcaccgtgtctgatgccccccagctgaaggagaaccccagcacagtgggcgtggagagggtcatcagcaccaagggcctgaacctgcccaggaagagcagcatcgtgaagaggcccaggtctgctgagctgtctgaagatgacctgctgagccagtacagcctgtccttcaccaagaagaccaagaagaacagcagcgagggcaacaagagcctgtccttcagcgaggtgtttgtgcctgacctggtgaatggccccaccaacaagaagtctgtgtccaccccacccaggaccaggaacaagtttgccaccttcctgcagaggaagaatgaggagagcggggctgtggtggtgcccggcaccaggagccgcttcttctgcagcagtgacagcacagactgtgtgagcaacaaggtgtccatccagcccctggatgaaacagctgtgacagacaaggagaacaacctgcacgagagtgaatatggagaccaggagggcaagaggctggtggacacagatgtggccaggaacagcagtgatgacatccccaacaaccacatccctggggaccacatcccagacaaggccaccgtcttcacagatgaggagagctacagctttgagagcagcaagttcaccaggaccatcagcccccccaccctgggcaccctgcggagctgcttctcctggagcggcggcctgggggacttcagcaggacccccagccccagccccagcacagccctgcagcagttccggaggaagagtgacagccccaccagcctgcctgagaacaacatgtctgatgtgtcccagctgaagtctgaggagagcagtgatgatgagagccaccccctgcgggaggaggcctgcagcagccagagccaggagagcggggagttcagcctgcagagcagcaatgccagcaagctgagccagtgcagcagcaaggacagcgacagcgaggagagtgactgcaacatcaagctgctggacagccagagcgaccagaccagcaagctgcggctgagccacttcagcaagaaggacacccccctgaggaacaaggtgcccggcctgtacaagagcagcagcgctgacagcctgagcaccaccaagatcaagcccctgggccctgcccgggccagcggcctgagcaagaagccagccagcatccagaagaggaagcaccacaatgctgagaacaagccaggcctgcagatcaagctgaatgagctgtggaagaactttggcttcaagaagttctag

SEQ ID NO: 19621 - DNA, 36 bp, synthetic construct; identical to SEQ ID NO: 10645
  misc_feature 1..36: note = Description of Artificial Sequence: Synthetic coding sequence
  source 1..36: mol_type = other DNA

SEQ ID NO: 19622 - DNA, 2241 bp, synthetic construct
  misc_feature 1..2241: note = Description of Artificial Sequence: Synthetic coding sequence
  source 1..2241: mol_type = other DNA
atgcaggccaagaagcgctacttcatcctgctgtctgctggcagctgcctggccctgctcttctactttggaggcctgcagttccgggccagccgcagccacagccggcgggaggagcacagcggcagaaatggcctgcaccaccccagcccagaccacttctggccccgcttcccagatgccctgcggccctttgtgccctgggaccagctggagaatgaagacagctctgtgcacatcagcccccggcagaagagagatgccaacagcagcatctacaagggcaagaagtgcaggatggagagctgctttgacttcaccctgtgcaagaagaatggcttcaaggtgtatgtgtacccccagcagaagggggagaagattgctgagagctaccagaacatcctggccgccatcgagggcagccgcttctacaccagtgaccccagccaggcctgcctgtttgtgctgagcctggacaccctggaccgggaccagctgagcccccagtatgtgcacaacctgcggagcaaggtgcagagcctgcacctgtggaacaacggcaggaaccacctgatcttcaacctgtacagcggcacctggccagactacacagaagatgtgggctttgatattggccaggccatgctggccaaggccagcatcagcacagagaacttccggcccaactttgatgtgtccatccccctcttcagcaaggaccaccccaggactggaggagagcggggcttcctgaagttcaacaccatcccccccctgaggaagtacatgctggtgttcaagggcaagcgctacctgactggaattggaagtgacaccagaaatgccctgtaccacgtgcacaacggggaggatgtggtgctgctgaccacctgcaagcacggcaaggactggcagaagcacaaggacagccgctgtgaccgggacaacacagaatatgagaagtatgactaccgggagatgctgcacaatgccaccttctgcctggtgccccggggccggcggctgggcagcttccgcttcctggaggccctgcaggccgcctgtgtgcctgtgatgctgagcaatggctgggagctgcccttcagcgaggtgatcaactggaaccaggccgctgtgattggagatgagcggctgctgctgcagatccccagcaccatccgcagcatccaccaggacaagatcctggccctgcggcagcagacccagttcctgtgggaggcctacttcagctctgtggagaagatcgtgctgaccaccctggagatcatccaggaccgcatcttcaagcacatcagcaggaacagcctcatctggaacaagcaccctgggggcctgtttgtgctgccccagtacagcagctacctgggggacttcccctactactatgccaacctgggcctgaagccacccagcaagttcaccgctgtgattcatgctgtgacccccctggtgtcccagagccagcctgtgctgaagctgctggtggccgccgccaagagccagtactgtgcccagatcatcgtgctgtggaactgtgacaagcccctgcctgccaagcaccgctggccagccacagctgtgcctgtggtggtgattgaaggagagagcaaggtgatgagcagccgcttcctgccctatgacaacatcatcacagatgctgtgctgagcctggatgaggacacagtgctgagcaccacagaggtggactttgccttcaccgtgtggcagagcttccctgagagaattgtgggctacccagcccggagccacttctgggacaacagcaaggagcgctggggctacaccagcaagtggaccaatgactacagcatggtgctgactggagctgccatctaccacaagtactaccactacctgtacagccactacctgcctgccagcctgaagaacatggtggaccagctggccaactgtgaggacatcctgatgaacttcctggtgtctgctgtgaccaagctgccccccatcaaggtgacccagaagaagcagtacaaggagaccatgatgggccagaccagccgggccagccgctgggccgaccctgaccactttgcccagaggcagagctgcatgaacacctttgcctcctggtttggctacatgcccctcatccacagccagatgaggctggaccctgtgctcttcaaggaccaggtgtccatcctgaggaagaagtacagagacatcgagcggctgtag

SEQ ID NO: 19623 - DNA, 2157 bp, synthetic construct
  misc_feature 1..2157: note = Description of Artificial Sequence: Synthetic coding sequence
  source 1..2157: mol_type = other DNA
atgtgtgcctctgtgaagtacaacatccggggccctgccctgatccccaggatgaagaccaagcaccgcatctactacatcaccctcttcagcatcgtgctgctgggcctcatcgccaccggcatgttccagttctggccccacagcattgagagcagcaatgactggaatgtggagaagaggagcatcagagatgtgcctgtggtgcggctgcctgctgacagccccatccctgagcggggggacctgagctgcaggatgcacacctgctttgatgtgtaccgctgtggcttcaaccccaagaacaagatcaaggtgtacatctatgccctgaagaagtatgtggatgactttggagtgtctgtgagcaacaccatcagccgggagtacaatgagctgctgatggccatcagtgacagcgactactacacagatgacatcaacagagcctgcctgtttgtgcccagcattgatgtgctgaaccagaacaccctgcgcatcaaggagacagcccaggccatggcccagctgagccgctgggaccggggcaccaaccacctgctcttcaacatgctgcccggcggccccccagactacaacacagccctggatgtgccccgggaccgggccctgctggccggcggcggcttcagcacctggacctaccggcagggctatgatgtgtccatccctgtgtacagccccctgtctgctgaggtggacctgcctgagaagggccctggcccccggcagtacttcctgctgagcagccaggtgggcctgcaccctgagtaccgggaggacctggaggccctgcaggtgaagcacggggagagcgtgctggtgctggacaagtgcaccaacctgtctgagggcgtgctgtctgtgaggaagcgctgccacaagcaccaggtgtttgactacccccaggtgctgcaggaggccaccttctgtgtggtgctgcggggggcccggctgggccaggccgtgctgagtgatgtgctgcaggccggctgtgtgcctgtggtgattgctgacagctacatcctgcccttcagcgaggtgctggactggaagagggcctctgtggtggtgcctgaggagaagatgtctgatgtgtacagcatcctgcagagcatcccccagaggcagatcgaggagatgcagaggcaggcccgctggttctgggaggcctacttccagagcatcaaggccatcgccctggccaccctgcagatcatcaatgaccgcatctacccctatgctgccatctcctatgaggagtggaatgaccccccagctgtgaagtggggctctgtgagcaaccccctcttcctgcccctcatccccccccagagccagggcttcaccgccatcgtgctgacctatgacagagtggagagcctcttccgggtcatcacagaggtgtccaaggtgcccagcctgagcaagctgctggtggtgtggaacaaccagaacaagaaccccccagaggacagcctgtggcccaagatccgggtgcccctgaaggtggtgaggacagctgagaacaagctgagcaaccgcttcttcccctatgatgaaattgaaacagaagctgtgctggccattgatgatgacatcatcatgctgaccagtgatgagctgcagtttggctatgaggtgtggagggagttcccagaccggctggtgggctacccaggccgcctgcacctgtgggaccacgagatgaacaagtggaagtatgagagcgagtggaccaatgaggtgtccatggtgctgactggagctgccttctaccacaagtacttcaactacctgtacacctacaagatgcctggggacatcaagaactgggtggatgcccacatgaactgtgaagatattgccatgaacttcctggtggccaacgtgacaggcaaggccgtcatcaaggtgacccccaggaagaagttcaagtgcccagagtgcacagccattgatggcctgagcctggaccagacccacatggtggagaggtctgagtgcatcaacaagtttgcctctgtgtttggcaccatgcccctgaaggtggtggagcacagagctgaccctgtgctgtacaaggatgacttccctgagaagctgaagagcttccccaacatcggcagcctgtag

SEQ ID NO: 19624 - DNA, 2187 bp, synthetic construct
  misc_feature 1..2187: note = Description of Artificial Sequence: Synthetic coding sequence
  source 1..2187: mol_type = other DNA
atgtgtgcctctgtgaagtacaacatccggggccctgccctgatccccaggatgaagaccaagcaccgcatctactacatcaccctcttcagcatcgtgctgctgggcctcatcgccaccggcatgttccagttctggccccacagcattgagagcagcaatgactggaatgtggagaagaggagcatcagagatgtgcctgtggtgcggctgcctgctgacagccccatccctgagcggggggacctgagctgcaggatgcacacctgctttgatgtgtaccgctgtggcttcaaccccaagaacaagatcaaggtgtacatctatgccctgaagaagtatgtggatgactttggagtgtctgtgagcaacaccatcagccgggagtacaatgagctgctgatggccatcagtgacagcgactactacacagatgacatcaacagagcctgcctgtttgtgcccagcattgatgtgctgaaccagaacaccctgcgcatcaaggagacagcccaggccatggcccagctgagccgctgggaccggggcaccaaccacctgctcttcaacatgctgcccggcggccccccagactacaacacagccctggatgtgccccgggaccgggccctgctggccggcggcggcttcagcacctggacctaccggcagggctatgatgtgtccatccctgtgtacagccccctgtctgctgaggtggacctgcctgagaagggccctggcccccggcagtacttcctgctgagcagccaggtgggcctgcaccctgagtaccgggaggacctggaggccctgcaggtgaagcacggggagagcgtgctggtgctggacaagtgcaccaacctgtctgagggcgtgctgtctgtgaggaagcgctgccacaagcaccaggtgtttgactacccccaggtgctgcaggaggccaccttctgtgtggtgctgcggggggcccggctgggccaggccgtgctgagtgatgtgctgcaggccggctgtgtgcctgtggtgattgctgacagctacatcctgcccttcagcgaggtgctggactggaagagggcctctgtggtggtgcctgaggagaagatgtctgatgtgtacagcatcctgcagagcatcccccagaggcagatcgaggagatgcagaggcagctgttcatggagcccgcccggcgggagaactggagcgctgccaaccaccagatgaacagcctcatctggccccgggagcagtgggacagccagatcatcaatgaccgcatctacccctatgctgccatctcctatgaggagtggaatgaccccccagctgtgaagtggggctctgtgagcaaccccctcttcctgcccctcatccccccccagagccagggcttcaccgccatcgtgctgacctatgacagagtggagagcctcttccgggtcatcacagaggtgtccaaggtgcccagcctgagcaagctgctggtggtgtggaacaaccagaacaagaaccccccagaggacagcctgtggcccaagatccgggtgcccctgaaggtggtgaggacagctgagaacaagctgagcaaccgcttcttcccctatgatgaaattgaaacagaagctgtgctggccattgatgatgacatcatcatgctgaccagtgatgagctgcagtttggctatgaggtgtggagggagttcccagaccggctggtgggctacccaggccgcctgcacctgtgggaccacgagatgaacaagtggaagtatgagagcgagtggaccaatgaggtgtccatggtgctgactggagctgccttctaccacaagtacttcaactacctgtacacctacaagatgcctggggacatcaagaactgggtggatgcccacatgaactgtgaagatattgccatgaacttcctggtggccaacgtgacaggcaaggccgtcatcaaggtgacccccaggaagaagttcaagtgcccagagtgcacagccattgatggcctgagcctggaccagacccacatggtggagaggtctgagtgcatcaacaagtttgcctctgtgtttggcaccatgcccctgaaggtggtggagcacagagctgaccctgtgctgtacaaggatgacttccctgagaagctgaagagcttccccaacatcggcagcctgtag

SEQ ID NO: 19625 - DNA, 2256 bp, synthetic construct
  misc_feature 1..2256: note = Description of Artificial Sequence: Synthetic coding sequence
  source 1..2256: mol_type = other DNA
atgagctgtgccagcggcagcggcggcggcctgcggcaccccctgcgctgccagaagccctgggatgaggagtgtgaggaggaggccgtgtgtgtgatcatgtgtgcctctgtgaagtacaacatccggggccctgccctgatccccaggatgaagaccaagcaccgcatctactacatcaccctcttcagcatcgtgctgctgggcctgattgccaccggcatgttccagttctggccccacagcattgagagcagcaatgactggaatgtggagaagaggagcatcagagatgtgcctgtggtgcggctgcctgctgacagccccatccctgagcggggggacctgagctgcaggatgcacacctgctttgatgtgtaccgctgtggcttcaaccccaagaacaagatcaaggtgtacatctatgccctgaagaagtatgtggatgactttggagtgtctgtgagcaacaccatcagccgggagtacaatgagctgctgatggccatcagtgacagcgactactacacagatgacatcaacagagcctgcctgtttgtgcccagcattgatgtgctgaaccagaacaccctgcgcatcaaggagacagcccaggccatggcccagctgagccgctgggaccggggcaccaaccacctgctcttcaacatgctgcccggcggccccccagactacaacacagccctggatgtgccccgggaccgggccctgctggccggcggcggcttcagcacctggacctaccggcagggctatgatgtgtccatccctgtgtacagccccctgtctgctgaggtggacctgcctgagaagggccctggcccccggcagtacttcctgctgagcagccaggtgggcctgcaccctgagtaccgggaggacctggaggccctgcaggtgaagcatggagagagcgtgctggtgctggacaagtgcaccaacctgtctgaaggagtgctgtctgtgaggaagcgctgccacaagcaccaggtgtttgactacccccaggtgctgcaggaggccaccttctgtgtggtgctgcggggggcccggctgggccaggccgtgctgagtgatgtgctgcaggccggctgtgtgcctgtggtgattgctgacagctacatcctgcccttcagcgaggtgctggactggaagagggcctctgtggtggtgcctgaggagaagatgtctgatgtgtacagcatcctgcagagcatcccccagaggcagatcgaggagatgcagaggcaggcccgctggttctgggaggcctacttccagagcatcaaggccatcgccctggccaccctgcagatcatcaatgaccgcatctacccctatgctgccatctcctatgaggagtggaatgaccccccagctgtgaagtggggctctgtgagcaaccccctcttcctgcccctcatccccccccagagccagggcttcaccgccatcgtgctgacctatgacagagtggagagcctcttccgggtcatcacagaggtgtccaaggtgcccagcctgagcaagctgctggtggtgtggaacaaccagaacaagaaccccccagaggacagcctgtggcccaagatccgggtgcccctgaaggtggtgaggacagctgagaacaagctgagcaaccgcttcttcccctatgatgaaattgaaacagaggccgtgctggccattgatgatgacatcatcatgctgaccagtgatgagctgcagtttggctatgaggtgtggagggagttcccagaccggctggtgggctacccaggccgcctgcacctgtgggaccacgagatgaacaagtggaagtatgaaagtgagtggaccaatgaggtgtccatggtgctgaccggggccgccttctaccacaagtacttcaactacctgtacacctacaagatgcctggggacatcaagaactgggtggatgcccacatgaactgtgaggacatcgccatgaacttcctggtggccaacgtgacaggcaaggctgtgatcaaggtgacccccaggaagaagttcaagtgcccagaatgtacagccattgatggcctgagcctggaccagacccacatggtggagaggtctgagtgcatcaacaagtttgcctctgtgtttggcaccatgcccctgaaggtggtggagcacagagctgaccctgtgctgtacaaggatgacttccctgagaagctgaagagcttccccaacatcggcagcctgtag

SEQ ID NO: 19626 - DNA, 339 bp, synthetic construct
  misc_feature 1..339: note = Description of Artificial Sequence: Synthetic coding sequence
  source 1..339: mol_type = other DNA
atgtgtgcctctgtgaagtacaacatccggggccctgccctgatccccaggatgaagaccaagcaccgcatctactacatcaccctcttcagcatcgtgctgctgggcctcatcgccaccggcatgttccagttctggccccacagcattgagagcagcaatgactggaatgtggagaagaggagcatcagagatgtgcctgtggtgcggctgcctgctgacagccccatccctgagcggggggacctgagctgcaggatgcacacctgctttgatgtgtaccgctgtggcttcaaccccaagaacaagatcaaggtgtacatctatgccctgaagtag

SEQ ID NO: 19627 - DNA, 150 bp, synthetic construct
  misc_feature 1..150: note = Description of Artificial Sequence: Synthetic coding sequence
  source 1..150: mol_type = other DNA
atgtgtgcctctgtgaagtacaacatccggggccctgccctgatccccaggatgaagaccaagcaccgcatctactacatcaccctcttcagcatcgtgctgctgggcctcatcgccaccggcatgttccagttctggccccacagctag

SEQ ID NO: 19628 - DNA, 2157 bp, synthetic construct; identical to SEQ ID NO: 19623
  misc_feature 1..2157: note = Description of Artificial Sequence: Synthetic coding sequence
  source 1..2157: mol_type = other DNA

SEQ ID NO: 19629 - DNA, 1761 bp, synthetic construct
  misc_feature 1..1761: note = Description of Artificial Sequence: Synthetic coding sequence
  source 1..1761: mol_type = other DNA
atgcccaagcccatcaacgtgcgggtgaccaccatggatgctgagctggagtttgccatccagcccaacaccaccgggaagcagctgtttgaccaggtggtgaagaccatcggcctgcgggaggtgtggtacttcggcctgcactacgtggacaacaagggcttccccacctggctgaagctggacaagaaggtgtctgcccaggaggtgaggaaagaaaaccccctgcagttcaagttccgggccaagttctacccagaagatgtggccgaggagctgatccaggacatcacccagaagctgttcttcctgcaggtgaaggagggcatcctgagtgatgagatctactgccccccagagacagctgtgctgctgggcagctatgctgtgcaggccaagtttggagactacaacaaggaggtgcacaagagcggctacctgagcagcgagcggctcatcccccagagggtgatggaccagcacaagctgacccgggaccagtgggaggaccgcatccaggtgtggcatgctgagcaccggggcatgctgaaggacaatgccatgctggagtacctgaagatcgcccaggacctggagatgtatggcatcaactactttgagatcaagaacaagaagggcacagacctgtggctgggcgtggatgccctgggcctgaacatctatgagaaggatgacaagctgacccccaagattggcttcccctggagcgagatccggaacatctccttcaatgacaagaagtttgtgatcaagcccatcgacaagaaggccccagactttgtgttctacgccccccggctgcgcatcaacaagaggatcctgcagctgtgcatgggcaaccacgagctgtacatgagaagaaggaagccagacaccatcgaggtgcagcagatgaaggcccaggcccgggaggagaagcaccagaagcagctggagcggcagcagctggagacagagaagaagagaagagagaccgtggagcgggagaaggagcagatgatgagggagaaggaggagctgatgctgcggctgcaggactatgaggagaagaccaagaaggccgagcgggagctgtctgagcagatccagagggccctgcagctggaggaggagaggaagagggcccaggaggaggccgagcggctggaggccgacaggatggccgccctgcgggccaaggaggagctggagcggcaggccgtggaccagatcaagagccaggagcagctggccgctgagctggccgagtacacagccaagatcgccctgctggaggaggcccggcggaggaaagaagatgaggtggaggagtggcagcaccgggccaaggaggcccaggatgacctggtgaagaccaaggaggagctgcacctggtgatgacagcccctcctcctcctcctcctcctgtgtatgagcctgtgtcctaccacgtgcaggagagcctgcaggatgaaggagctgagcccaccggctacagcgctgagctgagcagcgagggcatcagagatgacagaaatgaggagaagaggatcacagaagctgagaagaatgaaagagtgcagaggcagctgctgaccctgagcagcgagctgagccaggccagagatgagaacaagaggacccacaatgacatcatccacaatgaaaacatgaggcagggccgggacaagtacaagaccctgcggcagatccggcagggcaacaccaagcagagaattgatgaatttgaggccctgtag

SEQ ID NO: 19630 - DNA, 1761 bp, synthetic construct; identical to SEQ ID NO: 19629
  misc_feature 1..1761: note = Description of Artificial Sequence: Synthetic coding sequence
  source 1..1761: mol_type = other DNA

SEQ ID NO: 19631 - DNA, 1665 bp, synthetic construct
  misc_feature 1..1665: note = Description of Artificial Sequence: Synthetic coding sequence
  source 1..1665: mol_type = other DNA
atgcccaagcccatcaacgtgcgggtgaccaccatggatgctgagctggagtttgccatccagcccaacaccaccgggaagcagctgtttgaccaggtgtctgcccaggaggtgaggaaagaaaaccccctgcagttcaagttccgggccaagttctacccagaagatgtggccgaggagctgatccaggacatcacccagaagctgttcttcctgcaggtgaaggagggcatcctgagtgatgagatctactgccccccagagacagctgtgctgctgggcagctatgctgtgcaggccaagtttggagactacaacaaggaggtgcacaagagcggctacctgagcagcgagcggctcatcccccagagggtgatggaccagcacaagctgacccgggaccagtgggaggaccgcatccaggtgtggcatgctgagcaccggggcatgctgaaggacaatgccatgctggagtacctgaagatcgcccaggacctggagatgtatggcatcaactactttgagatcaagaacaagaagggcacagacctgtggctgggcgtggatgccctgggcctgaacatctatgagaaggatgacaagctgacccccaagattggcttcccctggagcgagatccggaacatctccttcaatgacaagaagtttgtgatcaagcccatcgacaagaaggccccagactttgtgttctacgccccccggctgcgcatcaacaagaggatcctgcagctgtgcatgggcaaccacgagctgtacatgagaagaaggaagccagacaccatcgaggtgcagcagatgaaggcccaggcccgggaggagaagcaccagaagcagctggagcggcagcagctggagacagagaagaagagaagagagaccgtggagcgggagaaggagcagatgatgagggagaaggaggagctgatgctgcggctgcaggactatgaggagaagaccaagaaggccgagcgggagctgtctgagcagatccagagggccctgcagctggaggaggagaggaagagggcccaggaggaggccgagcggctggaggccgacaggatggccgccctgcgggccaaggaggagctggagcggcaggccgtggaccagatcaagagccaggagcagctggccgctgagctggccgagtacacagccaagatcgccctgctggaggaggcccggcggaggaaagaagatgaggtggaggagtggcagcaccgggccaaggaggcccaggatgacctggtgaagaccaaggaggagctgcacctggtgatgacagcccctcctcctcctcctcctcctgtgtatgagcctgtgtcctaccacgtgcaggagagcctgcaggatgaaggagctgagcccaccggctacagcgctgagctgagcagcgagggcatcagagatgacagaaatgaggagaagaggatcacagaagctgagaagaatgaaagagtgcagaggcagctgctgaccctgagcagcgagctgagccaggccagagatgagaacaagaggacccacaatgacatcatccacaatgaaaacatgaggcagggccgggacaagtacaagaccctgcggcagatccggcagggcaacaccaagcagagaattgatgaatttgaggccctgtag

SEQ ID NO: 19632 - DNA, 900 bp, synthetic construct
  misc_feature 1..900: note = Description of Artificial Sequence: Synthetic coding sequence
  source 1..900: mol_type = other DNA
atgggcaccaaggcccaggtggagaggaagctgctgtgcctcttcatcctggccatcctgctgtgcagcctggccctgggctctgtgacagtgcacagcagcgagcctgaggtgcgcatccctgagaacaaccctgtgaagctgagctgtgcctacagcggcttcagcagcccccgggtggagtggaagtttgaccagggcgacaccacccggctggtgtgctacaacaacaagatcacagccagctatgaggacagagtgaccttcctgcccaccggcatcaccttcaagtctgtgacccgggaggacaccggcacctacacctgcatggtgtctgaggagggcggcaacagctatggagaggtgaaggtgaagctgattgtgctggtgccccccagcaagcccaccgtgaacatccccagcagcgccaccatcggcaacagagctgtgctgacctgcagcgagcaggacggcagcccccccagcgagtacacctggttcaaggatggcatcgtgatgcccaccaaccccaagagcacccgggccttcagcaacagcagctatgtgctgaaccccaccaccggggagctggtgtttgaccccctgagcgccagtgacacaggagagtacagctgtgaggccagaaatggctacggcacccccatgaccagcaatgctgtgaggatggaggccgtggagagaaatgtgggcgtgattgtggccgctgtgctggtgaccctcatcctgctgggcatcctggtgtttggcatctggtttgcctacagccggggccactttgacaggaccaagaagggcaccagcagcaagaaggtgatctacagccagcccagcgcccggtctgagggggagttcaagcagaccagcagcttcctggtgtag

SEQ ID NO: 19633 - DNA, 900 bp, synthetic construct; identical to SEQ ID NO: 19632
  misc_feature 1..900: note = Description of Artificial Sequence: Synthetic coding sequence
  source 1..900: mol_type = other DNA

SEQ ID NO: 19634 - DNA, 900 bp, synthetic construct; identical to SEQ ID NO: 19632
  misc_feature 1..900: note = Description of Artificial Sequence: Synthetic coding sequence
  source 1..900: mol_type = other DNA

SEQ ID NO: 19635 - DNA, 912 bp, synthetic construct
  misc_feature 1..912: note = Description of Artificial Sequence: Synthetic coding sequence
  source 1..912: mol_type = other DNA
atgctgcaggccccccggggccgggcccgggccgccctgcggcggctggccgtggccaccaggaccatggccggcggcagcctggccctgggctctgtgacagtgcacagcagcgagcctgaggtgcgcatccctgagaacaaccctgtgaagctgagctgtgcctacagcggcttcagcagcccccgggtggagtggaagtttgaccagggcgacaccacccggctggtgtgctacaacaacaagatcacagccagctatgaggacagagtgaccttcctgcccaccggcatcaccttcaagtctgtgacccgggaggacaccggcacctacacctgcatggtgtctgaggagggcggcaacagctatggagaggtgaaggtgaagctgattgtgctggtgccccccagcaagcccaccgtgaacatccccagcagcgccaccatcggcaacagagctgtgctgacctgcagcgagcaggacggcagcccccccagcgagtacacctggttcaaggatggcatcgtgatgcccaccaaccccaagagcacccgggccttcagcaacagcagctatgtgctgaaccccaccaccggggagctggtgtttgaccccctgagcgccagtgacacaggagagtacagctgtgaggccagaaatggctacggcacccccatgaccagcaatgctgtgaggatggaggccgtggagagaaatgtgggcgtgattgtggccgctgtgctggtgaccctcatcctgctgggcatcctggtgtttggcatctggtttgcctacagccggggccactttgacaggaccaagaagggcaccagcagcaagaaggtgatctacagccagcccagcgcccggtctgagggggagttcaagcagaccagcagcttcctggtgtag

SEQ ID NO: 19636 - DNA, 753 bp, synthetic construct
  misc_feature 1..753: note = Description of Artificial Sequence: Synthetic coding sequence
  source 1..753: mol_type = other DNA
atgggcaccaaggcccaggtggagaggaagctgctgtgcctcttcatcctggccatcctgctgtgcagcctggccctgggctctgtgacagtgcacagcagcgagcctgaggtgcgcatccctgagaacaaccctgtgaagctgagctgtgcctacagcggcttcagcagcccccgggtggagtggaagtttgaccagggcgacaccacccggctggtgtgctacaacaacaagatcaccgtgccccccagcaagcccaccgtgaacatccccagcagcgccaccatcggcaacagagctgtgctgacctgcagcgagcaggacggcagccccccatctgagtacacctggttcaaggatggcatcgtgatgcccaccaaccccaagagcacccgggccttcagcaacagcagctatgtgctgaaccccaccactggagagctggtgtttgaccccctgagcgccagtgacaccggggagtacagctgtgaggccagaaatggctacggcacccccatgaccagcaatgctgtgaggatggaggccgtggagagaaatgtgggcgtcatcgtggccgctgtgctggtgaccctcatcctgctgggcatcctggtgtttggcatctggtttgcctacagccggggccactttgacaggaccaagaagggcaccagcagcaagaaggtgatctacagccagcccagcgcccggtctgagggggagttcaagcagaccagcagcttcctggtgtag

SEQ ID NO: 19637 - DNA, 3357 bp, synthetic construct
  misc_feature 1..3357: note = Description of Artificial Sequence: Synthetic coding sequence
  source 1..3357: mol_type = other DNA
atgggcgtgcagggcttccaggactacatcgagaagcactgccccagcgctgtggtgcctgtggagctgcagaagctggcccggggcagcctggtgggcggcggccggcagaggcctccccagacccccctgcggctgctggtggatgctgacaactgcctgcaccggctgtatggaggcttctacacagactgggtgtctgggggccagtggaaccacatgctgggctacctggccgccctggccaaggcctgcttcggcggcaacatcgagctgtttgtgttcttcaatggagccctggagaaggcccggctgcacgagtgggtgaagaggcagggcaatgaaaggcagacagcccagcagatcgtgagccacgtgcagaacaagggcaccccaccacccaaggtgtggttcctgccccctgtgtgcatggcccactgcatccggctggccctgatccgcttccacgtgaaggtggcccagagcattgaggaccaccaccaggaggtgattggcttctgccgggagaatggcttccacggcctggtggcctatgacagcgactatgccctgtgcaacatcccctactacttcagcgcccacgccctgaagctgagcagaaatggcaagagcctgaccaccagccagtacctgatgcatgaggtggccaagcagctggacctgaaccccaaccgcttccccatctttgctgccctgctgggcaaccacatcctgcctgatgaggacctggccagcttccactggagcctgctgggccctgagcaccccctggccagcctgaaggtgcgggcccaccagctggtgctgcccccctgtgatgtggtgatcaaggctgtggccgactatgtgaggaacatccaggacaccagtgacctggatgccatcgccaaggatgtgttccagcacagccagagcaggacagatgacaaggtgatccgcttcaagagggccatcggctactacagcgccaccagcaagcccatgtccttccaccccccccactacctggccgcccggcccggccccttcggcatgcctggcatggtgccccctcatgtgcccccccagatgctgaacatcccccagaccagcctgcaggccaagcctgtggccccccaggtgcccagccctgggggcgcccctggccagggcccctacccctacagcctgtctgagcccgcccccctgaccctggacaccagcggcaagaacctgacagagcagaacagctacagcaacatcccccatgagggcaagcacacccccctgtatgaaagaagcagccccatcaacccagcccagagcggcagccccaaccacgtggacagcgcctacttccctggcagcagcaccagcagcagcagtgacaatgatgagggcagcggcggggccaccaaccacatcagcggcaacaagattggctgggagaagacaggcagccacagcgagccccaggcccggggggaccccggggaccagaccaaggccgagggcagcagcacagccagcagcggcagccagctggccgagggcaagggcagccagatgggcaccgtgcagcccatcccctgcctgctgtccatgcccaccaggaaccacatggacatcaccaccccacccctgccccctgtggcccctgaggtgctgcgggtggccgagcaccgccacaagaagggcctgatgtacccctacatcttccacgtgctgaccaagggggagatcaagattgctgtgtccattgaagatgaggccaacaaggacctgcccccagctgccctgctgtacagacctgtgcggcagtatgtgtatggagtgctcttcagcctggccgagagcaggaagaagacagagcggctggccttcaggaagaaccggctgcccccagagttcagccctgtgatcatcaaggagtgggccgcctacaagggcaagagcccccagaccccagagctggtggaggccctggccttccgggagtggacctgccccaacctgaagaggctgtggctgggcaaggctgtggaggacaagaacagaaggatgagggccttcctggcctgcatgagaagtgacaccccagccatgctgaacccagccaacgtgcccacccacctgatggtgctgtgctgcgtgctgcgctacatggtgcagtggccaggggcccgcatcctgcggcggcaggagctggatgccttcctggcccaggccctgagccccaagctgtatgagccagaccagctgcaggagctgaagattgagaacctggacccccggggcatccagctgagcgccctcttcatgtctggagtggacatggccctgtttgccaatgatgcctgtggccagcccatcccctgggagcactgctgcccctggatgtactttgatggcaagctgttccagagcaagctgctgaaggccagccgggagaagacccccctgattgacctgtgtgatggccaggccgaccaggccgccaaggtggagaagatgaggcagagcgtgctggagggcctgtccttcagccggcagagccacaccctgcccttccccccacctccagccctgcccttctacccagccagcgcctaccccaggcactttggacctgtgccccccagccagggccggggccggggctttgctggggtgtgtggctttggaggcccctacggggagaccgtggccaccggcccctaccgggccttccgggtggccgccgccagcggccactgtggggccttcagcggcagtgacagcagcaggaccagcaagagccagggcggcgtgcagcccatccccagccagggcggcaagctggagattgctggcaccgtggtgggccactgggccggcagcagaagaggccggggcggccggggccccttccccctgcaggtggtgtctgtgggcggccctgcccggggccggccccggggcgtcatcagcacccctgtgatccgcaccttcggccggggcggccgctactacggccggggctacaagaaccaggccgccatccagggccggcccccctatgctgccagcgctgaggaggtggccaaggagctgaagagcaagtctggagagagcaagagcagcgccatgagcagtgatggcagcctggctgaaaatggagtgatggccgaggagaagccagccccccagatgaatggcagcactggagatgcccgggcccccagccacagcgagagcgccctgaacaatgacagcaagacctgcaacaccaacccccacctgaatgccctgagcacagattctgcctgccggcgggaggccgccctggaggccgctgtgctgaacaaggaggagtag

SEQ ID NO: 19638 - DNA, 3441 bp, synthetic construct
  misc_feature 1..3441: note = Description of Artificial Sequence: Synthetic coding sequence
  source 1..3441: mol_type = other DNA
atgggcgtgcagggcttccaggactacatcgagaagcactgccccagcgctgtggtgcctgtggagctgcagaagctggcccggggcagcctggtgggcggcggccggcagaggcctccccagacccccctgcggctgctggtggatgctgacaactgcctgcaccggctgtatggaggcttctacacagactgggtgtctgggggccagtggaaccacatgctgggctacctggccgccctggccaaggcctgcttcggcggcaacatcgagctgtttgtgttcttcaatggagccctggagaaggcccggctgcacgagtgggtgaagaggcagggcaatgaaaggcagacagcccagcagatcgtgagccacgtgcagaacaagggcaccccaccacccaaggtgtggttcctgccccctgtgtgcatggcccactgcatccggctggccctgatccgcttccacgtgaaggtggcccagagcattgaggaccaccaccaggaggtgattggcttctgccgggagaatggcttccacggcctggtggcctatgacagcgactatgccctgtgcaacatcccctactacttcagcgcccacgccctgaagctgagcagaaatggcaagagcctgaccaccagccagtacctgatgcatgaggtggccaagcagctggacctgaaccccaaccgcttccccatctttgctgccctgctgggcaaccacatcctgcctgatgaggacctggccagcttccactggagcctgctgggccctgagcaccccctggccagcctgaaggtgcgggcccaccagctggtgctgcccccctgtgatgtggtgatcaaggctgtggccgactatgtgaggaacatccaggacaccagtgacctggatgccatcgccaaggatgtgttccagcacagccagagcaggacagatgacaaggtgatccgcttcaagagggccatcggctactacagcgccaccagcaagcccatgtccttccaccccccccactacctggccgcccggcccggccccttcggcatgcctggcatggtgccccctcatgtgcccccccagatgctgaacatcccccagaccagcctgcaggccaagcctgtggccccccaggtgcccagccctgggggcgcccctggccagggcccctacccctacagcctgtctgagcccgcccccctgaccctggacaccagcggcaagaacctgacagagcagaacagctacagcaacatcccccatgagggcaagcacacccccctgtatgaaagaagcagccccatcaacccagcccagagcggcagccccaaccacgtggacagcgcctacttccctggcagcagcaccagcagcagcagtgacaatgatgagggcagcggcggggccaccaagcccttccagctgtacctgcagaagaactttgtgttccacaaggagaacagcatcgtgctgtgcagccgcatcctgcggcacggccacatcagcggcaacaagattggctgggagaagacaggcagccacagcgagccccaggcccggggggaccccggggaccagaccaaggccgagggcagcagcacagccagcagcggcagccagctggccgagggcaagggcagccagatgggcaccgtgcagcccatcccctgcctgctgtccatgcccaccaggaaccacatggacatcaccaccccacccctgccccctgtggcccctgaggtgctgcgggtggccgagcaccgccacaagaagggcctgatgtacccctacatcttccacgtgctgaccaagggggagatcaagattgctgtgtccattgaagatgaggccaacaaggacctgcccccagctgccctgctgtacagacctgtgcggcagtatgtgtatggagtgctcttcagcctggccgagagcaggaagaagacagagcggctggccttcaggaagaaccggctgcccccagagttcagccctgtgatcatcaaggagtgggccgcctacaagggcaagagcccccagaccccagagctggtggaggccctggccttccgggagtggacctgccccaacctgaagaggctgtggctgggcaaggctgtggaggacaagaacagaaggatgagggccttcctggcctgcatgagaagtgacaccccagccatgctgaacccagccaacgtgcccacccacctgatggtgctgtgctgcgtgctgcgctacatggtgcagtggccaggggcccgcatcctgcggcggcaggagctggatgccttcctggcccaggccctgagccccaagctgtatgagccagaccagctgcaggagctgaagattgagaacctggacccccggggcatccagctgagcgccctcttcatgtctggagtggacatggccctgtttgccaatgatgcctgtggccagcccatcccctgggagcactgctgcccctggatgtactttgatggcaagctgttccagagcaagctgctgaaggccagccgggagaagacccccctgattgacctgtgtgatggccaggccgaccaggccgccaaggtggagaagatgaggcagagcgtgctggagggcctgtccttcagccggcagagccacaccctgcccttccccccacctccagccctgcccttctacccagccagcgcctaccccaggcactttggacctgtgccccccagccagggccggggccggggctttgctggggtgtgtggctttggaggcccctacggggagaccgtggccaccggcccctaccgggccttccgggtggccgccgccagcggccactgtggggccttcagcggcagtgacagcagcaggaccagcaagagccagggcggcgtgcagcccatccccagccagggcggcaagctggagattgctggcaccgtggtgggccactgggccggcagcagaagaggccggggcggccggggccccttccccctgcaggtggtgtctgtgggcggccctgcccggggccggccccggggcgtcatcagcacccctgtgatccgcaccttcggccggggcggccgctactacggccggggctacaagaaccaggccgccatccagggccggcccccctatgctgccagcgctgaggaggtggccaaggagctgaagagcaagtctggagagagcaagagcagcgccatgagcagtgatggcagcctggctgaaaatggagtgatggccgaggagaagccagccccccagatgaatggcagcactggagatgcccgggcccccagccacagcgagagcgccctgaacaatgacagcaagacctgcaacaccaacccccacctgaatgccctgagcacagattctgcctgccggcgggaggccgccctggaggccgctgtgctgaacaaggaggagtag

SEQ ID NO: 19639 - DNA, 3219 bp, synthetic construct
  misc_feature 1..3219: note = Description of Artificial Sequence: Synthetic coding sequence
  source 1..3219: mol_type = other DNA
atgggcgtgcagggcttccaggactacatcgagaagcactgccccagcgctgtggtgcctgtggagctgcagaagctggcccggggcagcctggtgggcggcggccggcagaggcctccccagacccccctgcggctgctggtggatgctgacaactgcctgcaccggctgtatggaggcttctacacagactgggtgtctgggggccagtggaaccacatgctgggctacctggccgccctggccaaggcctgcttcggcggcaacatcgagctgtttgtgttcttcaatggagccctggagaaggcccggctgcacgagtgggtgaagaggcagggcaatgaaaggcagacagcccagcagatcgtgagccacgtgcagaacaagggcaccccaccacccaaggtgtggttcctgccccctgtgtgcatggcccactgcatccggctggccctgatccgcttccacgtgaaggtggcccagagcattgaggaccaccaccaggaggtgattggcttctgccgggagaatggcttccacggcctggtggcctatgacagcgactatgccctgtgcaacatcccctactacttcagcgcccacgccctgaagctgagcagaaatggcaagagcctgaccaccagccagtacctgatgcatgaggtggccaagcagctggacctgaaccccaaccgcttccccatctttgctgccctgctgggcaaccacatcctgcctgatgaggacctggccagcttccactggagcctgctgggccctgagcaccccctggccagcctgaaggtgcgggcccaccagctggtgctgcccccctgtgatgtggtgatcaaggctgtggccgactatgtgaggaacatccaggacaccagtgacctggatgccatcgccaaggatgtgttccagcacagccagagcaggacagatgacaaggtgatccgcttcaagagggccatcggctactacagcgccaccagcaagcccatgtccttccaccccccccactacctggccgcccggcccggccccttcggcatgcctggcatggtgccccctcatgtgcccccccagatgctgaacatcccccagaccagcctgcaggccaagcctgtggccccccaggtgcccagccctgggggcgcccctggccagggcccctacccctacagcctgtctgagcccgcccccctgaccctggacaccagcggcaagaacctgacagagcagaacagctacagcaacatcccccatgagggcaagcacacccccctgtatgaaagaagcagccccatcaacccagcccagagcggcagccccaaccacgtggacagcgcctacttccctggcagcagcaccagcagcagcagtgacaatgatgagggcagcggcggggccaccaaccacatcagcggcaacaagattggctgggagaagacaggcagccacagcgagccccaggcccggggggaccccggggaccagaccaaggccgagggcagcagcacagccagcagcggcagccagctggccgagggcaagggcagccagatgggcaccgtgcagcccatcccctgcctgctgtccatgcccaccaggaaccacatggacatcaccaccccacccctgccccctgtggcccctgaggtgctgcgggtggccgagcaccgccacaagaagggcctgatgtacccctacatcttccacgtgctgaccaagggggagatcaagattgctgtgtccattgaagatgaggccaacaaggacctgcccccagctgccctgctgtacagacctgtgcggcagtatgtgtatggagtgctcttcagcctggccgagagcaggaagaagacagagcggctggccttcaggaagaaccggctgcccccagagttcagccctgtgatcatcaaggagtgggccgcctacaagggcaagagcccccagaccccagagctggtggaggccctggccttccgggagtggacctgccccaacctgaagaggctgtggctgggcaaggctgtggaggacaagaacagaaggatgagggccttcctggcctgcatgagaagtgacaccccagccatgctgaacccagccaacgtgcccacccacctgatggtgctgtgctgcgtgctgcgctacatggtgcagtggccaggggcccgcatcctgcggcggcaggagctggatgccttcctggcccaggccctgagccccaagctgtatgagccagaccagctgcaggagctgaagattgagaacctggacccccggggcatccagctgagcgccctcttcatgtctggagtggacatggccctgtttgccaatgatgcctgtggccagcccatcccctgggagcactgctgcccctggatgtactttgatggcaagctgttccagagcaagctgctgaaggccagccgggagaagacccccctgattgacctgtgtgatggccaggccgaccaggccgccaaggtggagaagatgaggcagagcgtgctggagggcctgtccttcagccggcagagccacaccctgcccttccccccacctccagccctgcccttctacccagccagcgcctaccccaggcactttggacctgtgccccccagccagggccggggccggggctttgctggggtgcagcccatccccagccagggcggcaagctggagattgctggcaccgtggtgggccactgggccggcagcagaagaggccggggcggccggggccccttccccctgcaggtggtgtctgtgggcggccctgcccggggccggccccggggcgtcatcagcacccctgtgatccgcaccttcggccggggcggccgctactacggccggggctacaagaaccaggccgccatccagggccggcccccctatgctgccagcgctgaggaggtggccaaggagctgaagagcaagtctggagagagcaagagcagcgccatgagcagtgatggcagcctggctgaaaatggagtgatggccgaggagaagccagccccccagatgaatggcagcactggagatgcccgggcccccagccacagcgagagcgccctgaacaatgacagcaagacctgcaacaccaacccccacctgaatgccctgagcacagattctgcctgccggcgggaggccgccctggaggccgctgtgctgaacaaggaggagtag

SEQ ID NO: 19640 - DNA, 1887 bp, synthetic construct
  misc_feature 1..1887: note = Description of Artificial Sequence: Synthetic coding sequence
  source 1..1887: mol_type = other DNA
atgggcgtgcagggcttccaggactacatcgagaagcactgccccagcgctgtggtgcctgtggagctgcagaagctggcccggggcagcctggtgggcggcggccggcagaggcctccccagacccccctgcggctgctggtggatgctgacaactgcctgcaccggctgtatggaggcttctacacagactgggtgtctgggggccagtggaaccacatgctgggctacctggccgccctggccaaggcctgcttcggcggcaacatcgagctgtttgtgttcttcaatggagccctggagaaggcccggctgcacgagtgggtgaagaggcagggcaatgaaaggcagacagcccagcagatcgtgagccacgtgcagaacaagggcaccccaccacccaaggtgtggttcctgccccctgtgtgcatggcccactgcatccggctggccctgatccgcttccacgtgaaggtggcccagagcattgaggaccaccaccaggaggtgattggcttctgccgggagaatggcttccacggcctggtggcctatgacagcgactatgccctgtgcaacatcccctactacttcagcgcccacgccctgaagctgagcagaaatggcaagagcctgaccaccagccagtacctgatgcatgaggtggccaagcagctggacctgaaccccaaccgcttccccatctttgctgccctgctgggcaaccacatcctgcctgatgaggacctggccagcttccactggagcctgctgggccctgagcaccccctggccagcctgaaggtgcgggcccaccagctggtgctgcccccctgtgatgtggtgatcaaggctgtggccgactatgtgaggaacatccaggacaccagtgacctggatgccatcgccaaggatgtgttccagcacagccagagcaggacagatgacaaggtgatccgcttcaagagggccatcggctactacagcgccaccagcaagcccatgtccttccaccccccccactacctggccgcccggcccggccccttcggcatgcctggcatggtgccccctcatgtgcccccccagatgctgaacatcccccagaccagcctgcaggccaagcctgtggccccccaggtgcccagccctgggggcgcccctggccagggcccctacccctacagcctgtctgagcccgcccccctgaccctggacaccagcggcaagaacctgacagagcagaacagctacagcaacatcccccatgagggcaagcacacccccctgtatgaaagaagcagccccatcaacccagcccagagcggcagccccaaccacgtggacagcgcctacttccctggcagcagcaccagcagcagcagtgacaatgatgagggcagcggcggggccaccaaccacatcagcggcaacaagattggctgggagaagacaggcagccacagcgagccccaggcccggggggaccccggggaccagaccaaggccgagggcagcagcacagccagcagcggcagccagctggccgagggcaagggcagccagatgggcaccgtgcagcccatcccctgcctgctgtccatgcccaccaggaaccacatggacatcaccaccccacccctgccccctgtggcccctgaggtgctgcgggtggccgagcaccgccacaagaagggcctgatgtacccctacatcttccacgtgctgaccaaggtgctgagcaagggcccctggagcggcttctgctacctgatgagcggccacagctatggctgctttgtgctgctgtccttctttgagcccttcttctgcctgaccaacctgctggagaccaagttcaccttccccttcctgaacattgaatag

SEQ ID NO: 19641 - DNA, 1485 bp, synthetic construct
  misc_feature 1..1485: note = Description of Artificial Sequence: Synthetic coding sequence
  source 1..1485: mol_type = other DNA
ggggagatcaagattgctgtgtccattgaagatgaggccaacaaggacctgcccccagctgccctgctgtacagacctgtgcggcagtatgtgtatggagtgctcttcagcctggccgagagcaggaagaagacagagcggctggccttcaggaagaaccggctgcccccagagttcagccctgtgatcatcaaggagtgggccgcctacaagggcaagagcccccagaccccagagctggtggaggccctggccttccgggagtggacctgccccaacctgaagaggctgtggctgggcaaggctgtggaggacaagaacagaaggatgagggccttcctggcctgcatgagaagtgacaccccagccatgctgaacccagccaacgtgcccacccacctgatggtgctgtgctgcgtgctgcgctacatggtgcagtggccaggggcccgcatcctgcggcggcaggagctggatgccttcctggcccaggccctgagccccaagctgtatgagccagaccagctgcaggagctgaagattgagaacctggacccccggggcatccagctgagcgccctcttcatgtctggagtggacatggccctgtttgccaatgatgcctgtggccagcccatcccctgggagcactgctgcccctggatgtactttgatggcaagctgttccagagcaagctgctgaaggccagccgggagaagacccccctgattgacctgtgtgatggccaggccgaccaggccgccaaggtggagaagatgaggcagagcgtgctggagggcctgtccttcagccggcagagccacaccctgcccttccccccacctccagccctgcccttctacccagccagcgcctaccccaggcactttggacctgtgccccccagccagggccggggccggggctttgctggggtgcagcccatccccagccagggcggcaagctggagattgctggcaccgtggtgggccactgggccggcagcagaagaggccggggcggccggggccccttccccctgcaggtggtgtctgtgggcggccctgcccggggccggccccggggcgtcatcagcacccctgtgatccgcaccttcggccggggcggccgctactacggccggggctacaagaaccaggccgccatccagggccggcccccctatgctgccagcgctgaggaggtggccaaggagctgaagagcaagtctggagagagcaagagcagcgccatgagcagtgatggcagcctggctgaaaatggagtgatggccgaggagaagccagccccccagatgaatggcagcactggagatgcccgggcccccagccacagcgagagcgccctgaacaatgacagcaagacctgcaacaccaacccccacctgaatgccctgagcacagattctgcctgccggcgggaggccgccctggaggccgctgtgctgaacaaggaggagtag

SEQ ID NO: 19642 - DNA, 1485 bp, synthetic construct
  misc_feature 1..1485: note = Description of Artificial Sequence: Synthetic coding sequence
  source 1..1485: mol_type = other DNA
tgagtggcccagagcattgaggaccaccaccaggaggtgattggcttctgcagagaaaatggcttccacggcctggtggcctatgacagcgactatgccctgtgcaacatcccctactacttcagcgcccacgccctgaagctgagcagaaatggcaagagcctgaccaccagccagtacctgatgcatgaggtggccaagcagctggacctgaaccccaaccgcttccccatctttgctgccctgctgggcaaccacatcctgcctgatgaggacctggccagcttccactggagcctgctgggccctgagcaccccctggccagcctgaaggtgcgggcccaccagctggtgctgcccccctgtgatgtggtgatcaaggctgtggccgactatgtgaggaacatccaggacaccagtgacctggatgccatcgccaaggatgtgttccagcacagccagagcaggacagatgacaaggtgatccgcttcaagagggccatcggctactacagcgccaccagcaagcccatgtccttccaccccccccactacctggccgcccggcccggccccttcggcatgcctggcatggtgcccccccacgtgcccccccagatgctgaacatcccccagaccagcctgcaggccaagcctgtggccccccaggtgcccagccctggaggagcccctggccagggcccctacccctacagcctgtctgagcccgcccccctgaccctggacaccagcggcaagaacctgacagagcagaacagctacagcaacatcccccatgagggcaagcacacccccctgtatgaaagaagcagccccatcaacccagcccagagcggcagccccaaccacgtggacagcgcctacttccctggcagcagcaccagcagcagcagtgacaatgatgagggcagcggcggggccaccaaccacatcagcggcaacaagattggctgggagaagacaggcagccacagcgagccccaggcccggggggaccccggggaccagaccaaggccgagggcagcagcacagccagcagcggcagccagctggccgagggcaagggcagccagatgggcaccgtgcagcccatcccctgcctgctgtccatgcccaccaggaaccacatggacatcaccaccccacccctgccccctgtggcccctgaggtgctgcgggtggccgagcaccgccacaagaagggcctgatgtacccctacatcttccacgtgctgaccaagggggagatcaagattgctgtgtccattgaagatgaggccaacaaggacctgcccccagctgccctgctgtacagacctgtgcggcagtatgtgtatggagtgctcttcagcctggccgagagcaggaagaagacagagcggctggccttcaggaagaaccggctgcccccagagtgcatgtactgcaacaaccccctgtttgtgttcctgggcaccagctag

SEQ ID NO: 19643 - DNA, 969 bp, synthetic construct
  misc_feature 1..969: note = Description of Artificial Sequence: Synthetic coding sequence
  source 1..969: mol_type = other DNA
atggtggccgacctggagctgcagcaggacctgattgtgcccctgggccacacccccagccaggagcacttcctgtttgagatcttcagaagaaggctgcaggccctgaccagcggctggagcgtggccgccagcctgcagaggcagcgggagctgctgatgtacaagaggatcctgctgcggctgcccagctctgtgctgtgtggcagcagcttccaggccgagcagcccatcacagcccgctgtgagcagttcttccacctggtgaacagcgagatgaggaacttctgcagccatggaggagccctgacccaggacatcacagcccacttcttccggggcctgctgaatgcctgcctgcggagccgggaccccagcctgatggtggacttcatcctggccaagtgccagaccaagtgccccctcatcctgaccagcgccctggtgtggtggcccagcctggagcctgtgctgctgtgccgctggaggaggcactgccagagccccctgccccgggagctgcagaagctgcaggagggccggcagtttgccagtgacttcctgagccctgaggccgccagccctgcccccaacccagactggctgtctgctgctgccctgcactttgccatccagcaggtgcgggaggagaacatcaggaagcagctgaagaagctggactgtgagcgggaggagctgctggtgttcctgttcttcttcagcctgatgggcctgctgagcagccacctgaccagcaacagcaccacagacctgcccaaggccttccacgtgtgtgccgccatcctggagtgcctggagaagaggaagatctcctggctggccctcttccagctgacagagagcggcaagaagcatgctgctgaggcccagatgagaagagctgccctcttccggggcatcctgcagatggtgaagaatgagcccagcctgcgcttcctggccaagtag

SEQ ID NO: 19644 - DNA, 4368 bp, synthetic construct
  misc_feature 1..4368: note = Description of Artificial Sequence: Synthetic coding sequence
  source 1..4368: mol_type = other DNA
atgtctgacagctgggtgcccaacagcgccagcggccaggaccccggcggcagaagaagagcctgggccgagctgctggccggccgggtgaagcgggagaagtacaaccctgagcgggcccagaagctgaaggagagcgctgtgcggctgctgcggagccaccaggacctgaatgccctgctgctggaggtggagggccccctgtgcaagaagctgagcctgagcaaggtgattgactgtgacagcagcgaggcctatgccaaccacagcagcagcttcatcggcagcgccctgcaggaccaggccagccggctgggcgtgcctgtgggcatcctgtctgctggcatggtggccagctctgtgggccagatctgcacagccccagctgagaccagccaccctgtgctgctgactgtggagcagaggaagaagctgagcagcctgctggagtttgcccagtacctgctggcccacagcatgttcagccggctgtccttctgccaggagctgtggaagatccagagcagcctgctgctggaggccgtgtggcacctgcacgtgcagggcatcgtgtccctgcaggagctgctggagagccacccagacatgcatgctgtgggctcctggctgttcaggaacctgtgctgcctgtgtgagcagatggaggccagctgccagcacgcagatgtggcccgggccatgctgagtgactttgtgcagatgtttgtgctgcggggcttccagaagaacagcgacctgcggaggacagtggagcctgagaagatgccccaggtgacagtggatgtgctgcagaggatgctgatctttgccctggatgccctggccgccggcgtgcaggaggagagcagcacccacaagatcgtgcgctgctggtttggagtcttcagcggccacaccctgggcagcgtcatcagcacagaccccctgaagcgcttcttcagccacaccctgacccagatcctgacccacagccctgtgctgaaggccagtgatgctgtgcagatgcagcgggagtggagctttgcccggacccaccccctgctgaccagcctgtaccgccgcctgtttgtgatgctgtctgctgaggagctggtgggccacctgcaggaggtgctggagacccaggaggtgcactggcagagggtgctgagctttgtgtctgccctggtggtgtgcttccctgaggcccagcagctgctggaggactgggtggcccggctgatggcccaggcctttgagagctgccagctggacagcatggtgacagccttcctggtggtgcggcaggccgccctggagggccccagcgccttcctgtcctatgctgactggttcaaggccagctttggcagcacccggggctaccacggctgcagcaagaaggccctggtgttcctgttcaccttcctgtctgagctggtgccctttgagagcccccgctacctgcaggtgcacatcctgcacccccccctggtgcctgggaagtaccgcagcctgctgacagactacatcagcctggccaagacccggctggccgacctgaaggtgtccattgagaacatgggcctgtatgaggacctgagcagcgctggggacatcacagagccccacagccaggccctgcaggatgtggagaaggccatcatggtgtttgagcacactggaaacatccctgtgacagtgatggaggccagcatcttcagaagaccctactacgtgagccacttcctgcctgccctgctgaccccccgggtgctgcccaaggtgcctgacagccgggtggccttcatcgagagcctgaagagagctgacaagatcccccccagcctgtacagcacctactgccaggcctgcagcgctgctgaggagaagccagaagatgctgccctgggcgtgcgggcagagcccaacagcgctgaggagcccctgggccagctgacagctgccctgggggagctgcgggcctccatgacagaccccagccagagagatgtgatcagcgcccaggtggccgtcatcagcgagcggctgcgggctgtgctgggccacaatgaagatgacagctctgtggagatcagcaagatccagctgagcatcaacaccccccggctggagccccgggagcacatggctgtggacctgctgctgaccagcttctgccagaacctgatggccgccagctctgtggcccctcctgagcggcagggcccctgggccgccctgtttgtgaggaccatgtgtggccgggtgctgcctgctgtgctgacccggctgtgccagctgctgcggcaccagggccccagcctgagcgccccccacgtgctgggcctggccgccctggccgtgcacctgggggagagccgcagcgccctgcctgaggtggatgtgggccccccagcccctggggccggcctgcctgtgcctgccctgtttgacagcctgctgacctgcaggacccgggacagcctcttcttctgcctgaagttctgcacagctgccatctcctacagcctgtgcaagttcagcagccagagccgggacaccctgtgcagctgcctgagccctggcctcatcaagaagttccagttcctgatgttccgcctcttcagcgaggcccggcagcccctgtctgaggaggatgtggccagcctgtcctggaggcccctgcacctgcccagcgctgactggcagagagctgccctgagcctgtggacccacaggaccttccgggaggtgctgaaggaggaggatgtgcacctgacctaccaggactggctgcacctggagctggagatccagcctgaggctgatgccctgagtgacacagagcggcaggacttccaccagtgggccatccacgagcacttcctgcctgagagcagcgccagcggcggctgtgatggagacctgcaggccgcctgcaccatcctggtgaatgccctgatggacttccaccagagcagccgctcctatgaccacagcgagaacagcgacctggtgtttggaggccgcactggaaatgaagacatcatcagccggctgcaggagatggtggccgacctggagctgcagcaggacctgattgtgcccctgggccacacccccagccaggagcacttcctgtttgagatcttcagaagaaggctgcaggccctgaccagcggctggagcgtggccgccagcctgcagaggcagcgggagctgctgatgtacaagaggatcctgctgcggctgcccagctctgtgctgtgtggcagcagcttccaggccgagcagcccatcacagcccgctgtgagcagttcttccacctggtgaacagcgagatgaggaacttctgcagccacggcggggccctgacccaggacatcacagcccacttcttccggggcctgctgaatgcctgcctgcggagccgggaccccagcctgatggtggacttcatcctggccaagtgccagaccaagtgccccctcatcctgaccagcgccctggtgtggtggcccagcctggagcctgtgctgctgtgccgctggaggaggcactgccagagccccctgccccgggagctgcagaagctgcaggagggccggcagtttgccagtgacttcctgagccctgaggccgccagccctgcccccaacccagactggctgtctgctgctgccctgcactttgccatccagcaggtgcgggaggagaacatcaggaagcagctgaagaagctggactgtgagcgggaggagctgctggtgttcctgttcttcttcagcctgatgggcctgctgagcagccacctgaccagcaacagcaccacagacctgcccaaggccttccacgtgtgtgccgccatcctggagtgcctggagaagaggaagatctcctggctggccctcttccagctgacagaaagtgacctgcggctgggccgcctgctgctgcgggtggccccagaccagcacacccggctgctgccctttgccttctacagcctgctgagctacttccatgaagatgctgccatccgggaggaggccttcctgcacgtggccgtggacatgtacctgaagctggtgcagctgtttgtggccggggacaccagcacagtgagccccccagctggccgcagcctggagctgaagggccagggcaaccctgtggagctgatcaccaaggcccggctcttcctgctgcagctgatcccccgctgccccaagaagagcttcagccacgtggccgagctgctggccgacagaggagactgtgaccctgaggtgtctgctgccctgcagagccggcagcaggccgccccagatgctgacctgagccaggagccccacctgttctag

SEQ ID NO: 19645 - DNA, 894 bp, synthetic construct
  misc_feature 1..894: note = Description of Artificial Sequence: Synthetic coding sequence
  source 1..894: mol_type = other DNA
atgtctgacagctgggtgcccaacagcgccagcggccaggaccccggcggcagaagaagagcctgggccgagctgctggccggccgggtgaagcgggagaagtacaaccctgagcgggcccagaagctgaaggagagcgctgtgcggctgctgcggagccaccaggacctgaatgccctgctgctggaggtggagggccccctgtgcaagaagctgagcctgagcaaggtgattgactgtgacagcagcgaggcctatgccaaccacagcagcagcttcatcggcagcgccctgcaggaccaggccagccggctgggcgtgcctgtgggcatcctgtctgctggcatggtggccagctctgtgggccagatctgcacagccccagctgagaccagccaccctgtgctgctgactgtggagcagaggaagaagctgagcagcctgctggagtttgcccagtacctgctggcccacagcatgttcagccggctgtccttctgccaggagctgtggaagatccagagcagcctgctgctggaggccgtgtggcacctgcacgtgcagggcatcgtgtccctgcaggagctgctggagagccacccagacatgcatgctgtgggctcctggctgttcaggaacctgtgctgcctgtgtgagcagatggaggccagctgccagcacgcagatgtggcccgggccatgctgagtgactttgtgcagatgtttgtgctgcggggcttccagaagaacagcgacctgcggaggacagtggagcctgagaagatgccccaggtgacagtggatgtgctgcagaggatgctgatctttgccctggatgccctggccgccggcgtgcaggaggagagcagcacccacaagatcgtgcgctgctag

SEQ ID NO: 19646 - DNA, 909 bp, synthetic construct
  misc_feature 1..909: note = Description of Artificial Sequence: Synthetic coding sequence
  source 1..909: mol_type = other DNA
atgtctgacagctgggtgcccaacagcgccagcggccaggaccccggcggcagaagaagagcctgggccgagctgctggccggccgggtgaagcgggagaagtacaaccctgagcgggcccagaagctgaaggagagcgctgtgcggctgctgcggagccaccaggacctgaatgccctgctgctggaggtggagggccccctgtgcaagaagctgagcctgagcaaggtgattgactgtgacagcagcgaggcctatgccaaccacagcagcagcttcatcggcagcgccctgcaggaccaggccagccggctgggcgtgcctgtgggcatcctgtctgctggcatggtggccagctctgtgggccagatctgcacagccccagctgagaccagccaccctgtgctgctgactgtggagcagaggaagaagctgagcagcctgctggagtttgcccagtacctgctggcccacagcatgttcagccggctgtccttctgccaggagctgtggaagatccagagcagcctgctgctggaggccgtgtggcacctgcacgtgcagggcatcgtgtccctgcaggagctgctggagagccacccagacatgcatgctgtgggctcctggctgttcaggaacctgtgctgcctgtgtgagcagatggaggccagctgccagcacgcagatgtggcccgggccatgctgagtgactttgtgcagatgtttgtgctgcggggcttccagaagaacagcgacctgcggaggacagtggagcctgagaagatgccccaggtgacagtggatgtgctgcagaggatgctgatctttgccctggatgccctggccgccggcgtgcaggaggagagcagcacccacaagatcgtgcgggccagcgctgcccggagctag

SEQ ID NO: 19647 - DNA, 798 bp, synthetic construct
  misc_feature 1..798: note = Description of Artificial Sequence: Synthetic coding sequence
  source 1..798: mol_type = other DNA
atgtctgacagctgggtgcccaacagcgccagcggccaggaccccggcggcagaagaagagcctgggccgagctgctggccggccgggtgaagcgggagaagtacaaccctgagcgggcccagaagctgaaggagagcgctgtgcggctgctgcggagccaccaggacctgaatgccctgctgctggaggtggagggccccctgtgcaagaagctgagcctgagcaaggtgattgactgtgacagcagcgaggcctatgccaaccacagcagcagcttcatcggcagcgccctgcaggaccaggccagccggctgggcgtgcctgtgggcatcctgtctgctggcatggtggccagctctgtgggccagatctgcacagccccagctgagaccagccaccctgtgctgctgactgtggagcagaggagcagcctgctgctggaggccgtgtggcacctgcacgtgcagggcatcgtgtccctgcaggagctgctggagagccacccagacatgcatgctgtgggctcctggctgttcaggaacctgtgctgcctgtgtgagcagatggaggccagctgccagcacgcagatgtggcccgggccatgctgagtgactttgtgcagatgtttgtgctgcggggcttccagaagaacagcgacctgcggaggacagtggagcctgagaagatgccccaggtgacagtggatgtgctgcagaggatgctgatctttgccctggatgccctggccgccggcgtgcaggaggagagcagcacccacaagatcgtgcgctgctag

SEQ ID NO: 19648 - DNA, 1869 bp, synthetic construct
  misc_feature 1..1869: note = Description of Artificial Sequence: Synthetic coding sequence
  source 1..1869: mol_type = other DNA
atgagccggcagaccacctctgtgggcagcagctgcctggacctgtggagggagaagaatgaccggctggtgcggcaggccaaggtggcccagaacagcggcctgaccctgcggcggcagcagctggcccaggatgccctggagggcctgcggggcctgctgcacagcctgcagggcctgcctgctgctgtgcctgtgctgcccctggagctgactgtgacctgcaacttcatcatcctgcgggccagcctggcccagggcttcacagaggaccaggcccaggacatccagaggagcctggagcgggtgctggagacccaggagcagcagggcccccggctggagcagggcctgcgggagctgtgggacagcgtgctgcgggccagctgcctgctgcctgagctgctgagcgccctgcaccggctggtgggcctgcaggccgccctgtggctgtctgctgaccggctgggggacctggccctgctgctggagaccctgaatggcagccagagcggggccagcaaggacctgctgctgctgctgaagacctggagccccccagctgaggagctggatgcccccctgaccctgcaggatgcccagggcctgaaggatgtgctgctgacagcctttgcctaccggcagggcctgcaggagctgatcaccggcaacccagacaaggccctgagcagcctgcatgaagctgccagcggcctgtgccccaggcctgtgctggtgcaggtgtacacagccctgggcagctgccacaggaagatgggcaacccccagagggccctgctgtacctggtggccgccctgaaggagggcagcgcctggggcccccccctgctggaggccagccggctgtaccagcagctgggggacaccacagctgagctggagagcctggagctgctggtggaggccctgaatgtgccctgcagcagcaaggccccccagttcctgattgaggtggagctgctgctgcccccaccagacctggccagccccctgcactgcggcacccagagccagaccaagcacatcctggccagccgctgcctgcagacaggccgggctggagatgctgctgagcactacctggacctgctggccctgctgctggacagcagcgagccccgcttcagccccccacccagccccccaggcccctgcatgcctgaggtgttcctggaggccgctgtggccctgatccaggccggccgggcccaggatgccctgaccctgtgtgaggagctgctgagcaggaccagcagcctgctgcccaagatgagccggctgtgggaggatgccaggaagggcaccaaggagctgccctactgccccctgtgggtgtctgccacccacctgctgcagggccaggcctgggtgcagctgggcgcccagaaggtggccatcagcgagttcagccgctgcctggagctgctcttccgggccaccccagaggagaaggagcagggcgccgccttcaactgtgagcagggctgcaagagtgatgctgccctgcagcagctgcgggctgctgccctgatcagccggggcctggagtgggtggccagcggccaggacaccaaggccctgcaggacttcctgctgtctgtgcagatgtgccccggcaacagagacacctacttccacctgctgcagaccctgaagaggctggacagaagagatgaggccacagccctgtggtggaggctggaggcccagaccaagggcagccatgaagatgccctgtggagcctgcccctgtacctggagagctacctgtcctggatccggcccagcgacagagatgccttcctggaggagttccgcaccagcctgcccaagagctgtgacctgtag

SEQ ID NO: 19649 - DNA, 648 bp, synthetic construct
  misc_feature 1..648: note = Description of Artificial Sequence: Synthetic coding sequence
  source 1..648: mol_type = other DNA
atgagccggcagaccacctctgtgggcagcagctgcctggacctgtggagggagaagaatgaccggctggtgcggcaggccaaggtggcccagaacagcggcctgaccctgcggcggcagcagctggcccaggatgccctggagggcctgcggggcctgctgcacagcctgcagggcctgcctgctgctgtgcctgtgctgcccctggagctgactgtgacctgcaacttcatcatcctgcgggccagcctggcccagggcttcacagaggaccaggcccaggacatccagaggagcctggagcgggtgctggagacccaggagcagcagggcccccggctggagcagggcctgcgggagctgtgggacagcgtgctgcgggccagctgcctgctgcctgagctgctgagcgccctgcaccggctggtgggcctgcaggccgccctgtggctgtctgctgaccggctgggggacctggccctgctgctggagaccctgaatggcagccagagcggggccagcaaggacctgctgctgctgctgaagacctggagccccccagctgaggagctggatgcccccctgaccctgcaggatgcccagggcctgaaggatgtgctgctgacagcctttgcctaccggcagtag

SEQ ID NO: 19650 - DNA, 1347 bp, synthetic construct
  misc_feature 1..1347: note = Description of Artificial Sequence: Synthetic coding sequence
  source 1..1347: mol_type = other DNA
atgagccggcagaccacctctgtgggcagcagctgcctggacctgtggagggagaagaatgaccggctggtgcggcaggccaaggtggcccagaacagcggcctgaccctgcggcggcagcagctggcccaggatgccctggagggcctgcggggcctgctgcacagcctgcagggcctgcctgctgctgtgcctgtgctgcccctggagctgactgtgacctgcaacttcatcatcctgcgggccagcctggcccagggcttcacagaggaccaggcccaggacatccagaggagcctggagcgggtgctggagacccaggagcagcagggcccccggctggagcagggcctgcgggagctgtgggacagcgtgctgcgggccagctgcctgctgcctgagctgctgagcgccctgcaccggctggtgggcctgcaggccgccctgtggctgtctgctgaccggctgggggacctggccctgctgctggagaccctgaatggcagccagagcggggccagcaaggacctgctgctgctgctgaagacctggagccccccagctgaggagctggatgcccccctgaccctgcaggatgcccagggcctgaaggatgtgctgctgacagcctttgcctaccggcagggcctgcaggagctgatcaccggcaacccagacaaggccctgagcagcctgcatgaagctgccagcggcctgtgccccaggcctgtgctggtgcaggtgtacacagccctgggcagctgccacaggaagatgggcaacccccagagggccctgctgtacctggtggccgccctgaaggagggcagcgcctggggcccccccctgctggaggccagccggctgtaccagcagctgggggacaccacagctgagctggagagcctggagctgctggtggaggccctgaatgtgccctgcagcagcaaggccccccagttcctgattgaggtggagctgctgctgcccccaccagacctggccagccccctgcactgcggcacccagagccagaccaagcacatcctggccagccgctgcctgcagacaggccgggctggagatgctgctgagcactacctggacctgctggccctgctgctggacagcagcgagccccgcttcagccccccacccagccccccaggcccctgcatgcctgaggtgttcctggaggccgctgtggccctgatccaggccggccgggcccaggatgccctgaccctgtgtgaggagctgctgagcaggaccagcagcctgctgcccaagatgagccggctgtgggaggatgccaggaagaggacccggggcagcttccagctgtag

SEQ ID NO: 19651 - DNA, 663 bp, synthetic construct
  misc_feature 1..663: note = Description of Artificial Sequence: Synthetic coding sequence
  source 1..663: mol_type = other DNA
atgctgggcatctggaccctgctgcccctggtgctgacctctgtggcccggctgagcagcaagtctgtgaatgcccaggtgacagacatcaacagcaagggcctggagctgaggaagacagtgaccaccgtggagacccagaacctggagggcctgcaccatgatggccagttctgccacaagccctgccccccaggagagaggaaggcccgggactgcaccgtgaatggagatgagccagactgtgtgccctgccaggagggcaaggagtacacagacaaggcccacttcagcagcaagtgccgccgctgccgcctgtgtgatgagggccacggcctggaggtggagatcaactgcaccaggacccagaacaccaagtgccgctgcaagcccaacttcttctgcaacagcacagtgtgtgagcactgtgacccctgcaccaagtgtgaacatggcatcatcaaggagtgcaccctgaccagcaacaccaagtgcaaggaggagggcagccgcagcaacctgggctggctgtgcctgctgctgctgcccatccccctgattgtgtgggtgaagaggaaggaggtgcagaagacctgcaggaagcacaggaaagaaaaccagggcagccatgagagccccaccctgaaccccatgctgacctag

SEQ ID NO: 19652 - DNA, 1008 bp, synthetic construct
  misc_feature 1..1008: note = Description of Artificial Sequence: Synthetic coding sequence
  source 1..1008: mol_type = other DNA
atgctgggcatctggaccctgctgcccctggtgctgacctctgtggcccggctgagcagcaagtctgtgaatgcccaggtgacagacatcaacagcaagggcctggagctgaggaagacagtgaccaccgtggagacccagaacctggagggcctgcaccatgatggccagttctgccacaagccctgccccccaggagagaggaaggcccgggactgcaccgtgaatggagatgagccagactgtgtgccctgccaggagggcaaggagtacacagacaaggcccacttcagcagcaagtgccgccgctgccgcctgtgtgatgagggccacggcctggaggtggagatcaactgcaccaggacccagaacaccaagtgccgctgcaagcccaacttcttctgcaacagcacagtgtgtgagcactgtgacccctgcaccaagtgtgaacatggcatcatcaaggagtgcaccctgaccagcaacaccaagtgcaaggaggagggcagccgcagcaacctgggctggctgtgcctgctgctgctgcccatccccctgattgtgtgggtgaagaggaaggaggtgcagaagacctgcaggaagcacaggaaagaaaaccagggcagccatgagagccccaccctgaaccctgagaccgtggccatcaacctgagtgatgtggacctgagcaagtacatcaccaccatcgccggcgtgatgaccctgagccaggtgaagggctttgtgaggaagaatggagtgaatgaggccaagattgatgagatcaagaatgacaacgtgcaggacacagctgagcagaaggtgcagctgctgaggaactggcaccagctgcacggcaagaaggaggcctatgacaccctcatcaaggacctgaagaaggccaacctgtgcaccctggccgagaagatccagaccatcatcctgaaggacatcaccagtgacagcgagaacagcaacttcagaaatgagatccagagcctggtgtag

SEQ ID NO: 19653 - DNA, 945 bp, synthetic construct
  misc_feature 1..945: note = Description of Artificial Sequence: Synthetic coding sequence
  source 1..945: mol_type = other DNA
atgctgggcatctggaccctgctgcccctggtgctgacctctgtggcccggctgagcagcaagtctgtgaatgcccaggtgacagacatcaacagcaagggcctggagctgaggaagacagtgaccaccgtggagacccagaacctggagggcctgcaccatgatggccagttctgccacaagccctgccccccaggagagaggaaggcccgggactgcaccgtgaatggagatgagccagactgtgtgccctgccaggagggcaaggagtacacagacaaggcccacttcagcagcaagtgccgccgctgccgcctgtgtgatgagggccacggcctggaggtggagatcaactgcaccaggacccagaacaccaagtgccgctgcaagcccaacttcttctgcaacagcacagtgtgtgagcactgtgacccctgcaccaagtgtgaacatggcatcatcaaggagtgcaccctgaccagcaacaccaagtgcaaggaggaggtgaagaggaaggaggtgcagaagacctgcaggaagcacaggaaggagaaccagggcagccatgagagccccaccctgaaccctgagaccgtggccatcaacctgagtgatgtggacctgagcaagtacatcaccaccatcgccggcgtgatgaccctgagccaggtgaagggctttgtgaggaagaatggagtgaatgaggccaagattgatgagatcaagaatgacaacgtgcaggacacagctgagcagaaggtgcagctgctgaggaactggcaccagctgcacggcaagaaggaggcctatgacaccctcatcaaggacctgaagaaggccaacctgtgcaccctggccgagaagatccagaccatcatcctgaaggacatcaccagtgacagcgagaacagcaacttcagaaatgagatccagagcctggtgtag

SEQ ID NO: 19654 - DNA, 735 bp, synthetic construct
  misc_feature 1..735: note = Description of Artificial Sequence: Synthetic coding sequence
  source 1..735: mol_type = other DNA
atgctgggcatctggaccctgctgcccctggtgctgacctctgtggcccggctgagcagcaagtctgtgaatgcccaggtgacagacatcaacagcaagggcctggagctgaggaagacagtgaccaccgtggagacccagaacctggagggcctgcaccatgatggccagttctgccacaagccctgccccccaggagagaggaaggcccgggactgcaccgtgaatggagatgagccagactgtgtgccctgccaggagggcaaggagtacacagacaaggcccacttcagcagcaagtgccgccgctgccgcctgtgtgatgagggccacggcctggaggtggagatcaactgcaccaggacccagaacaccaagtgccgctgcaagcccaacttcttctgcaacagcacagtgtgtgagcactgtgacccctgcaccaagtgtgaacatggcatcatcaaggagtgcaccctgaccagcaacaccaagtgcaaggaggagggcagccgcagcaacctgggctggctgtgcctgctgctgctgcccatccccctgattgtgtgggtgaagaggaaggaggtgcagaagacctgcaggaagcacaggaaagaaaaccagggcagccatgagagccccaccctgaaccctgagaccgtggccatcaacctgagtgatgtggacctgagcaagtaccaccactactgctggagccatgacaccaagagcagctag

SEQ ID NO: 19655 - DNA, 1089 bp, synthetic construct
  misc_feature 1..1089: note = Description of Artificial Sequence: Synthetic coding sequence
  source 1..1089: mol_type = other DNA
atgctgcgggtgtgtgcccagggctggcacgcccagggcctgccccacggcaccaacagcctgctgaagggcggcacagagaccagcctgagcacccccacccggctggtggtgctgacctctgtggcccggctgagcagcaagtctgtgaatgcccaggtgacagacatcaacagcaagggcctggagctgaggaagacagtgaccaccgtggagacccagaacctggagggcctgcaccatgatggccagttctgccacaagccctgccccccaggagagaggaaggcccgggactgcaccgtgaatggagatgagccagactgtgtgccctgccaggagggcaaggagtacacagacaaggcccacttcagcagcaaatgtcgccgctgccgcctgtgtgatgagggccacggcctggaggtggagatcaactgcaccaggacccagaacaccaagtgccgctgcaagcccaacttcttctgcaacagcacagtgtgtgagcactgtgacccctgcaccaagtgtgagcacggcatcatcaaggaatgtaccctgaccagcaacaccaagtgcaaggaggagggcagccgcagcaacctgggctggctgtgcctgctgctgctgcccatccccctcatcgtgtgggtgaagaggaaggaggtgcagaagacctgcaggaagcacaggaaggagaaccagggcagccatgagagccccaccctgaaccctgtgggcattgaaattgacttcagtgatgtggacctgagcaagtacatcaccaccatcgccggcgtgatgaccctgagccaggtgaagggctttgtgaggaagaatggagtgaatgaggccaagattgatgagatcaagaatgacaacgtgcaggacacagctgagcagaaggtgcagctgctgaggaactggcaccagctgcacggcaagaaggaggcctatgacaccctcatcaaggacctgaagaaggccaacctgtgcaccctggccgagaagatccagaccatcatcctgaaggacatcaccagtgacagcgagaacagcaacttcagaaatgagatccagagcctggtgtag

SEQ ID NO: 19656 - DNA, 627 bp, synthetic construct
  misc_feature 1..627: note = Description of Artificial Sequence: Synthetic coding sequence
  source 1..627: mol_type = other DNA
atggaccccttcctggtgctgctgcacagcgtgagcagcagcctgagcagcagcgagctgacagagctgaagttcctgtgcctgggccgggtgggcaagaggaagctggagcgggtgcagagcggcctggacctcttctccatgctgctggagcagaatgacctggagcccggccacacagagctgctgcgggagctgctggccagcctgcggagacatgacctgctgcggcgggtggatgactttgaggccggggctgctgctggggccgcccctggagaggaggacctgtgtgccgccttcaacgtcatctgtgacaacgtgggcaaggactggaggcggctggcccggcagctgaaggtgtctgacaccaagattgacagcattgaggaccgctaccccaggaacctgacagagcgggtgcgggagagcctgcgcatctggaagaacacagagaaggaaaatgccaccgtggcccacctggtgggcgccctgcggagctgccagatgaacctggtggccgacctggtgcaggaggtgcagcaggcccgggacctgcagaacagaagtggggccatgagccccatgtcctggaacagtgatgccagcaccagcgaggccagctag

SEQ ID NO: 19657 - DNA, 384 bp, synthetic construct
  misc_feature 1..384: note = Description of Artificial Sequence: Synthetic coding sequence
  source 1..384: mol_type = other DNA
atgcagcagcccttcaactacccctacccccagatctactgggtggacagcagcgccagcagcccctgggcccctcctggcaccgtgctgccctgccccacctctgtgccccggcggcccggccagaggaggcctcctcctcctcctcctcctccacccctgcccccacctcctcctcctccacccctgccccccctgcccctgccccccctgaagaagaggggcaaccacagcacaggcctgtgcctgctggtgatgttcttcatggtgctggtggccctggtgggcctgggcctgggcatgttccagctgttccacctgcagaaggagctggccgagctgcgggaggccacccctgtgcaccccctgaagaagaggagctag

SEQ ID NO: 19658 - DNA, 846 bp, synthetic construct
  misc_feature 1..846: note = Description of Artificial Sequence: Synthetic coding sequence
  source 1..846: mol_type = other DNA
atgcagcagcccttcaactacccctacccccagatctactgggtggacagcagcgccagcagcccctgggcccctcctggcaccgtgctgccctgccccacctctgtgccccggcggcccggccagaggaggcctcctcctcctcctcctcctccacccctgcccccacctcctcctcctccacccctgccccccctgcccctgccccccctgaagaagaggggcaaccacagcacaggcctgtgcctgctggtgatgttcttcatggtgctggtggccctggtgggcctgggcctgggcatgttccagctgttccacctgcagaaggagctggccgagctgcgggagagcaccagccagatgcacacagccagcagcctggagaagcagatcggccaccccagccccccacctgagaagaaggagctgaggaaggtggcccacctgaccgggaagagcaacagccgctccatgcccctggagtgggaggacacctacggcatcgtgctgctgagcggcgtgaagtacaagaagggcggcctggtgatcaatgagaccggcctgtactttgtgtacagcaaggtgtacttccggggccagagctgcaacaacctgcccctgagccacaaggtgtacatgaggaacagcaagtacccccaggacctggtgatgatggagggcaagatgatgagctactgcaccaccggccagatgtgggcccggagcagctacctgggcgctgtgttcaacctgaccagcgctgaccacctgtatgtgaatgtgtctgagctgagcctggtgaactttgaggagagccagaccttcttcggcctgtacaagctgtag

SEQ ID NO: 19659 - DNA, 13773 bp, synthetic construct
  misc_feature 1..13773: note = Description of Artificial Sequence: Synthetic coding sequence
  source 1..13773: mol_type = other DNA
atgggccgccacctggccctgctgctgctgctgctgctgctcttccagcactttggagacagtgatggcagccagaggctggagcagacccccctgcagttcacccacctggagtacaacgtgacagtgcaggagaacagcgctgccaagacctacgtgggccaccctgtgaagatgggcgtgtacatcacccacccagcctgggaggtgcgctacaagatcgtgtctggggacagcgagaacctcttcaaggccgaggagtacatcctgggggacttctgcttcctgcgcatccgcaccaagggcggcaacacagccatcctgaaccgggaggtgaaggaccactacaccctgattgtgaaggccctggagaagaacaccaacgtggaggcccggaccaaggtgcgggtgcaggtgctggacaccaatgacctgcggcccctcttcagccccaccagctacagcgtgtccctgcctgagaacacagccatccgcaccagcatcgcccgggtgtctgccacagatgctgacatcggcaccaatggagagttctactacagcttcaaggacagaacagacatgtttgccatccaccccaccagcggggtcatcgtgctgaccggccgcctggactacctggagaccaagctgtatgagatggagatcctggccgctgaccggggcatgaagctgtatggcagcagcggcatcagctccatggccaagctgactgtgcacatcgagcaggccaatgaatgtgcccctgtgatcacagctgtgaccctgagccccagcgagctggaccgggaccctgcctatgccatcgtgacagtggatgactgtgaccagggcgccaacggggacatcgccagcctgagcatcgtggccggggacctgctgcagcagttcagaacagtgcgctccttccctggcagcaaggagtacaaggtgaaggccatcggcggcatcgactgggacagccaccccttcggctacaacctgaccctgcaggccaaggacaagggcaccccaccccagttcagctctgtgaaggtgatccacgtgaccagcccccagttcaaggccggccctgtgaagtttgagaaggatgtgtacagagctgagatcagcgagtttgccccacccaacacccctgtggtgatggtgaaggccatcccagcctacagccacctgcgctacgtgttcaagagcacccctgggaaggccaagttcagcctgaactacaacacaggcctcatcagcatcctggagcctgtgaagaggcagcaggccgcccactttgagctggaggtgaccaccagtgacaggaaggccagcaccaaggtgctggtgaaggtgctgggcgccaacagcaaccccccagagttcacccagacagcctacaaggccgcctttgatgaaaatgtgcccatcggcaccaccgtgatgagcctgtctgctgtggaccctgatgaaggagaaaatggctacgtgacctacagcatcgccaacctgaaccacgtgccctttgccatcgaccacttcaccggggctgtgtccaccagcgagaacctggactatgagctgatgccccgggtgtacaccctgcgcatccgggccagtgactggggcctgccctaccgccgggaggtggaggtgctggccaccatcaccctgaacaacctgaatgacaacacccccctgtttgagaagatcaactgtgagggcaccatcccccgggacctgggcgtgggggagcagatcaccaccgtgtctgccattgatgctgatgagctgcagctggtgcagtaccagatcgaggccggaaatgagctggacttcttcagcctgaaccccaacagcggcgtgctgagcctgaagaggagcctgatggatggcctgggcgccaaggtgtccttccacagcctgcgcatcacagccacagatggagaaaattttgccacccccctgtacatcaacatcaccgtggccgccagccacaagctggtgaacctgcagtgtgaggagactggagtggccaagatgctggccgagaagctgctgcaggccaacaagctgcacaaccagggcgaggtggaggacatcttctttgacagccacagcgtgaatgcccacatcccccagttccgcagcaccctgcccaccggcatccaggtgaaggagaaccagcctgtgggcagcagcgtcatcttcatgaacagcacagacctggacaccggcttcaacgggaagctggtgtatgctgtgtctggaggaaatgaagacagctgcttcatgattgacatggagaccggcatgctgaagatcctgagccccctggaccgggagaccacagacaagtacaccctgaacatcaccgtgtatgacctgggcatcccccagaaggccgcctggaggctgctgcacgtggtggtggtggatgccaatgacaaccccccagagttcctgcaggagagctactttgtggaggtgtctgaggacaaggaggtgcacagcgagatcatccaggtggaggccacagacaaggacctgggccccaacggccacgtgacctacagcatcgtgacagacacagacaccttcagcattgacagcgtgactggagtggtgaacatcgcccggcccctggaccgggagctgcagcacgagcacagcctgaagattgaggcccgggaccaggcccgggaggagccccagctgttcagcacagtggtggtgaaggtgtccctggaggatgtgaatgacaacccccccaccttcatcccccccaactacagagtgaaggtgcgggaggacctgcctgagggcaccgtcatcatgtggctggaggcccatgaccctgacctgggccagagcggccaggtgcgctacagcctgctggaccatggagagggcaactttgatgtggacaagctgagcggggctgtgagaattgtgcagcagctggactttgagaagaagcaggtgtacaacctgactgtgcgggccaaggacaagggcaagcctgtgtccctgagcagcacctgctacgtggaggtggaggtggtggatgtgaatgaaaacctgcacccccctgtgttcagcagctttgtggagaagggcaccgtgaaggaggatgcccctgtgggcagcctggtgatgacagtgtctgcccatgatgaagatgccaggagagatggagagatccgctacagcatcagagatggcagcggcgtgggcgtcttcaagatcggggaggagaccggggtgattgagaccagtgaccggctggaccgggagagcaccagccactactggctgactgtgtttgccacagaccagggcgtggtgcccctgagcagcttcatcgagatctacatcgaggtggaggatgtgaatgacaatgccccccagaccagcgagcctgtgtactacccagagatcatggagaacagccccaaggatgtgtctgtggtgcagatcgaggcctttgatcctgacagcagcagcaatgacaagctgatgtacaagatcaccagcggcaacccccagggcttcttcagcatccaccccaagacaggcctcatcaccaccaccagcaggaagctggaccgggagcagcaggatgagcacatcctggaggtgacagtgacagacaatggcagcccccccaagagcaccatcgcccgggtcatcgtgaagatcctggatgaaaatgacaacaagccccagttcctgcagaagttctacaagatccggctgcctgagcgggagaagccagaccgggagagaaatgcccggcgggagcccctgtaccacgtgattgccacagacaaggatgagggccccaatgctgagatctcctacagcattgaagatggaaatgaacatggcaagttcttcatcgagcccaagacaggagtggtgagcagcaagcgcttctctgctgctggggagtatgacatcctgagcatcaaggctgtggacaatggccggccccagaagagcagcaccacccggctgcacatcgagtggatcagcaagcccaagcccagcctggagcccatcagctttgaggagagcttcttcaccttcaccgtgatggagagtgaccctgtggcccacatgattggagtcatctctgtggagcccccaggcatccccctgtggtttgacatcaccggcggcaactatgacagccactttgatgtggacaagggcaccggcaccatcatcgtggccaagcccctggatgctgagcagaagagcaactacaacctgactgtggaggccacagatggcaccaccaccatcctgacccaggtgttcatcaaggtgattgacaccaatgaccaccggccccagttcagcaccagcaaatatgaggtggtgattcctgaggacacagcccctgagacagagatcctgcagatctctgctgtggaccaggatgagaagaacaagctgatctacaccctgcagagcagccgggaccccctgagcctgaagaagttccggctggaccctgccaccggcagcctgtacaccagcgagaagctggaccacgaggccgtgcctgcccacctgactgtgatggtgcgggaccaggatgtgcctgtgaagaggaactttgccagaattgtggtgaatgtgtctgacaccaatgaccacgccccctggttcaccgccagcagctacaagggccgggtgtatgaatctgctgctgtgggctctgtggtgctgcaggtgacagccctggacaaggacaagggcaagaatgctgaggtgctgtacagcattgagagcggcacctttggaaacatcggcaacagcttcatgattgatcctgtgctgggcagcatcaagacagccaaggagctggacaggagcaaccaggccgagtatgacctgatggtgaaggccacagacaagggcagcccccccatgtctgagatcacctctgtgcgcatctttgtgaccatcgctgacaatgccagccccaagttcaccagcaaggagtacagcgtggagctgtctgaaacagtgtccatcggcagctttgtgggcatggtgacagcccacagccagagctctgtggtgtatgagatcaaggatggcaacacaggagatgcctttgacatcaacccccacagcggcaccatcatcacccagaaggccctggactttgagaccctgcccatctacaccctcatcatccagggcaccaacatggccggcctgagcaccaacaccaccgtgctggtgcacctgcaggatgaaaatgacaatgcccctgtgttcatgcaggccgagtacacaggcctcatcagcgagagcgccagcatcaacagcgtggtgctgacagacagaaatgtgcccctggtgatccgggctgctgatgctgacaaggacagcaatgccctgctggtgtaccacatcgtggagcccagcgtgcacacctactttgccatcgacagcagcactggagccatccacacagtgctgagcctggactatgaggagaccagcatcttccacttcaccgtgcaggtgcatgacatgggcaccccccggctgtttgctgaatatgctgccaacgtgacagtgcacgtgattgacatcaatgactgcccccctgtgtttgccaagcccctgtatgaggccagcctgctgctgcccacctacaagggcgtgaaggtgatcaccgtgaatgccacagatgctgacagcagcgccttcagccagctgatctacagcatcacagagggcaacattggagagaagttctccatggactacaagacaggagccctgactgtgcagaacaccacccagctgcggagccgctatgagctgactgtgcgggccagtgatggccgctttgctggcctgacctctgtgaagatcaacgtgaaggagagcaaggagagccacctgaagttcacccaggatgtgtacagcgctgtggtgaaggagaacagcacagaagctgagaccctggccgtcatcacagccatcggcaaccccatcaatgagcccctcttctaccacatcctgaacccagaccggcgcttcaagatcagcaggaccagcggcgtgctgagcaccaccggcaccccatttgaccgggagcagcaggaggcctttgatgtggtggtggaggtgacagaggagcacaagcccagcgctgtggcccacgtggtggtgaaggtgattgtggaggaccagaatgacaatgcccctgtgtttgtgaacctgccctactatgctgtggtgaaggtggacacagaggtgggccacgtgatccgctacgtgacagctgtggaccgggacagcggcagaaatggagaggtgcactactacctgaaggagcaccacgagcacttccagatcggccccctgggggagatcagcctgaagaagcagtttgagctggacaccctgaacaaggagtacctggtgacagtggtggccaaggatggcggcaacccagccttctctgctgaggtgattgtgcccatcaccgtgatgaacaaggccatgcctgtgtttgagaagcccttctacagcgctgagattgctgagagcatccaggtgcacagccctgtggtgcacgtgcaggccaacagccctgagggcctgaaggtgttctacagcatcacagatggagaccccttcagccagttcaccatcaacttcaacacaggagtcatcaacgtgattgcccccctggactttgaggcccacccagcctacaagctgagcatccgggccacagacagcctgactggagcccatgctgaggtgtttgtggacatcatcgtggatgacatcaatgacaacccccctgtgtttgcccagcagagctatgctgtgaccctgtctgaggccagcgtcatcggcacctctgtggtgcaggtgcgggccacagacagcgacagcgagcccaacagaggcatctcctaccagatgtttggaaaccacagcaagagccatgaccacttccacgtggacagcagcacaggcctcatcagcctgctgcggaccctggactatgagcagagccggcagcacaccatctttgtgcgggctgtggatggcggcatgcccaccctgagcagtgatgtgattgtgacagtggatgtgacagacctgaatgacaacccccccctgtttgagcagcagatctatgaggcccgcatcagcgagcacgcccctcatggccactttgtgacctgtgtgaaggcctatgatgctgacagcagtgacatcgacaagctgcagtacagcatcctgtctggaaatgaccacaagcacttcgtcatcgacagcgccaccggcatcatcaccctgagcaacctgcacagacatgccctgaagcccttctacagcctgaacctgtctgtgtctgatggagtcttccgcagcagcacccaggtgcacgtgacagtgattggaggcaacctgcacagccctgccttcctgcagaatgaatatgaggtggagctggctgaaaatgcccccctgcacaccctggtgatggaggtgaagaccacagatggagacagcggcatctacggccacgtgacctaccacatcgtgaatgactttgccaaggaccgcttctacatcaatgaaagaggccagatcttcaccctggagaagctggaccgggagaccccagctgagaaggtgatctctgtgcggctgatggccaaggatgctgggggcaaggtggccttctgcaccgtgaatgtcatcctgacagatgacaatgacaatgccccccagttccgggccaccaagtatgaggtgaacatcggcagcagcgctgccaagggcacctctgtggtgaaggtgctggccagtgatgctgatgagggcagcaatgctgacatcacctacgccattgaagctgacagcgagagcgtgaaggagaacctggagatcaacaagctgagcggggtcatcaccaccaaggagagcctcatcggcctggagaatgagttcttcaccttctttgtgcgggctgtggacaatggcagccccagcaaggagagcgtggtgctggtgtatgtgaagatcctgcccccagagatgcagctgcccaagttcagcgagcccttctacaccttcaccgtgtctgaagatgtgcccatcggcacagaaattgacctgatccgggcagagcacagcggcaccgtgctgtacagcctggtgaagggcaacaccccagagagcaacagagatgagagctttgtgattgaccggcagagcggccgcctgaagctggagaagagcctggaccacgagaccaccaagtggtaccagttcagcatcctggcccgctgcacccaggatgaccacgagatggtggcctctgtggatgtgtccatccaggtgaaggatgccaatgacaacagccctgtgtttgagagcagcccctatgaggccttcatcgtggagaacctgcccggcggcagcagggtcatccagatccgggccagtgatgctgacagcggcaccaacggccaggtgatgtacagcctggaccagagccagagcgtggaggtgattgagagctttgccatcaacatggagaccggctggatcaccaccctgaaggagctggaccacgagaagagggacaactaccagatcaaggtggtggccagtgaccacggggagaagatccagctgagcagcacagccatcgtggatgtgacagtgacagatgtgaatgacagccccccacgcttcaccgctgagatctacaagggcaccgtgtctgaagatgacccccagggcggcgtgattgccatcctgagcaccacagatgctgacagcgaggagatcaaccggcaggtgacctacttcatcactggaggagaccccctgggccagtttgctgtggagaccatccagaatgagtggaaggtgtatgtgaagaagcccctggaccgggagaagagggacaactacctgctgaccatcacagccacagatggcaccttcagcagcaaggccatcgtggaggtgaaggtgctggatgccaatgacaacagccctgtgtgtgagaagaccctgtacagcgacaccatcccagaagatgtgctgcccgggaagctgatcatgcagatcagcgccacagatgctgacatccgcagcaatgctgagatcacctacaccctgctgggcagcggggctgagaagttcaagctgaacccagacaccggggagctgaagaccagcacccccctggaccgggaggagcaggccgtgtaccacctgctggtgcgggccacagatggcggcggccgcttctgccaggccagcatcgtgctgaccctggaggatgtgaatgacaatgcccctgagttctctgctgacccctatgccatcaccgtgtttgagaacacagagcccggcaccctgctgaccagggtgcaggccacagatgctgatgctggcctgaacaggaagatcctgtacagcctgattgattctgcagatggccagttcagcatcaatgagctgagcggcatcatccagctggagaagcccctggaccgggagctgcaggccgtgtacaccctgagcctgaaggctgtggaccagggcctgccccggcggctgacagccactggaacagtgattgtgtctgtgctggacatcaatgacaacccccctgtgtttgagtaccgggagtatggagccaccgtgtctgaggacatcctggtgggcacagaggtgctgcaggtgtatgctgccagccgggacatcgaggccaatgctgagatcacctacagcatcatctctggaaatgaacatggcaagttcagcattgacagcaagacaggagctgtgttcatcatcgagaacctggactatgagagcagccatgagtactacctgactgtggaggccacagatggcggcacccccagcctgagtgatgtggccaccgtgaatgtgaatgtgacagacatcaatgacaacacccctgtgttcagccaggacacctacaccaccgtcatcagtgaagatgctgtgctggagcagagcgtcatcaccgtgatggctgatgatgctgatggccccagcaacagccacatccactacagcatcattgatggcaaccagggcagcagcttcaccattgatcctgtgcggggggaggtgaaggtgaccaagctgctggaccgggagaccatcagcggctacaccctgactgtgcaggccagtgacaatggcagccccccccgggtgaacaccaccaccgtgaacattgatgtgtctgatgtgaatgacaatgcccctgtgttcagccggggcaactacagcgtcatcatccaggagaacaagcctgtgggcttctctgtgctgcagctggtggtgacagatgaggacagcagccacaacggcccccccttcttcttcaccatcgtgactggaaatgatgagaaggcctttgaggtgaacccccagggcgtgctgctgaccagcagcgccatcaagaggaaggagaaggaccactacctgctgcaggtgaaggtggccgacaacgggaagccccagctgagcagcctgacctacatcgacatccgggtcatcgaggagagcatctaccccccagccatcctgcccctggagatcttcatcaccagcagtggagaggagtacagcggcggcgtcatcggcaagatccacgccacagaccaggatgtgtatgacaccctgacctacagcctggacccccagatggacaacctcttctctgtgagcagcactggaggcaagctgattgcccacaagaagctggacatcggccagtacctgctgaatgtgtctgtgacagatggcaagttcaccaccgtggccgacatcaccgtgcacatccggcaggtgacccaggagatgctgaaccacaccatcgccatccgctttgccaacctgaccccagaggagtttgtgggggactactggaggaacttccagagggccctgaggaacatcctgggcgtgagaagaaatgacatccagatcgtgtccctgcagagcagcgagccccacccccacctggatgtgctgctgtttgtggagaagccaggcagcgcccagatcagcaccaagcagctgctgcacaagatcaacagctctgtgacagacatcgaggagatcatcggcgtgcgcatcctgaatgtgttccagaagctgtgtgccggcctggactgcccctggaagttctgtgatgagaaggtgtctgtggatgaatctgtgatgagcacccacagcacagcccggctgagctttgtgacccccaggcaccacagagctgctgtgtgcctgtgcaaggagggccgctgcccccctgtgcaccacggctgtgaagatgacccctgcccagagggctctgaatgtgtgtctgacccctgggaggagaagcacacctgtgtgtgccccagcggccgcttcggccagtgccccggcagcagctccatgaccctgactggaaacagctatgtgaagtaccgcctgacagaaaatgaaaacaagctggagatgaagctgaccatgaggctgcggacctacagcacccatgctgtggtgatgtatgcccggggcacagactacagcatcctggagatccaccacggccgcctgcagtacaagtttgactgtggcagcggccctggcatcgtgtctgtgcagagcatccaggtgaatgatggccagtggcatgctgtggccctggaggtgaatggaaattatgcccggctggtgctggaccaggtgcacacagccagcggcacagcccctggcaccctgaagaccctgaacctggacaactacgtgttcttcggcggccacatccggcagcagggcaccaggcatggccgcagcccccaggtgggcaatggcttccggggctgcatggacagcatctacctgaatggccaggagctgcccctgaacagcaagcccaggagctatgcccacatcgaggagagcgtggatgtgtccccaggctgcttcctgacagccacagaggactgtgccagcaacccctgccagaatggaggagtgtgcaaccccagccctgctgggggctactactgcaagtgcagcgccctgtacatcggcacccactgtgagatctctgtgaacccctgcagcagcaagccctgcctgtatggaggcacctgtgtggtggacaatggaggctttgtgtgccagtgccggggcctgtacacaggccagcgctgccagctgagcccctactgcaaggatgagccctgcaagaatggaggcacctgctttgacagcctggatggagctgtgtgccagtgtgacagcggcttccggggggagcgctgccagagcgacattgatgagtgcagcggcaacccctgcctgcacggggccctgtgtgagaacacccacggcagctaccactgcaactgcagccatgagtaccggggccgccactgtgaagatgctgcccccaaccagtatgtgtccaccccctggaacatcggcctggccgagggcattggaattgtggtgtttgtggccggcatcttcctgctggtggtggtgtttgtgctgtgcaggaagatgatcagcaggaagaagaagcaccaggccgagcccaaggacaagcacctgggccctgccacagccttcctgcagaggccctactttgacagcaagctgaacaagaacatctacagcgacatccccccccaggtgcctgtgcggcccatctcctacacccccagcatccccagcgacagcaggaacaacctggacaggaacagctttgagggcagcgccatccctgagcaccctgagttcagcaccttcaaccctgagagcgtgcacggccacaggaaggctgtggccgtgtgcagcgtggcccccaacctgcccccacctccacccagcaacagccccagcgacagcgacagcatccagaagcccagctgggactttgattatgacaccaaggtggtggacctggacccctgcctgagcaagaagcccctggaggagaagcccagccagccctacagcgcccgggagagcctgtctgaggtgcagagcctgagcagcttccagagcgagagctgtgatgacaatggctaccactgggacaccagtgactggatgcccagcgtgcccctgcctgacatccaggagttccccaactatgaggtgattgatgagcagacccccctgtacagcgctgaccccaatgccatcgacacagactactacccaggcggctatgacattgaaagtgacttccccccacctcctgaggacttccctgctgctgatgagctgccccccctgcccccagagttcagcaaccagtttgagagcatccaccccccccgggacatgcctgctgctggcagcctgggcagcagcagcaggaaccggcagcgcttcaacctgaaccagtacctgcccaacttctaccccctggacatgtctgagccccagaccaagggcaccggggagaacagcacctgccgggagccccacgccccctacccacctggctaccagaggcactttgaggccccagctgtggagagcatgcccatgtctgtgtatgccagcacagccagctgcagtgatgtgtctgcctgctgtgaggtggagagcgaggtgatgatgtctgactatgagagcggagatgatggccactttgaggaggtgaccatcccccccctggacagccagcagcacacagaggtgtag

SEQ ID NO: 19660 - DNA, 13767 bp, synthetic construct
  misc_feature 1..13767: note = Description of Artificial Sequence: Synthetic coding sequence
  source 1..13767: mol_type = other DNA
atgggccgccacctggccctgctgctgctgctgctgctgctcttccagcactttggagacagtgatggcagccagaggctggagcagacccccctgcagttcacccacctggagtacaacgtgacagtgcaggagaacagcgctgccaagacctacgtgggccaccctgtgaagatgggcgtgtacatcacccacccagcctgggaggtgcgctacaagatcgtgtctggggacagcgagaacctcttcaaggccgaggagtacatcctgggggacttctgcttcctgcgcatccgcaccaagggcggcaacacagccatcctgaaccgggaggtgaaggaccactacaccctgattgtgaaggccctggagaagaacaccaacgtggaggcccggaccaaggtgcgggtgcaggtgctggacaccaatgacctgcggcccctcttcagccccaccagctacagcgtgtccctgcctgagaacacagccatccgcaccagcatcgcccgggtgtctgccacagatgctgacatcggcaccaatggagagttctactacagcttcaaggacagaacagacatgtttgccatccaccccaccagcggggtcatcgtgctgaccggccgcctggactacctggagaccaagctgtatgagatggagatcctggccgctgaccggggcatgaagctgtatggcagcagcggcatcagctccatggccaagctgactgtgcacatcgagcaggccaatgaatgtgcccctgtgatcacagctgtgaccctgagccccagcgagctggaccgggaccctgcctatgccatcgtgacagtggatgactgtgaccagggcgccaacggggacatcgccagcctgagcatcgtggccggggacctgctgcagcagttcagaacagtgcgctccttccctggcagcaaggagtacaaggtgaaggccatcggcggcatcgactgggacagccaccccttcggctacaacctgaccctgcaggccaaggacaagggcaccccaccccagttcagctctgtgaaggtgatccacgtgaccagcccccagttcaaggccggccctgtgaagtttgagaaggatgtgtacagagctgagatcagcgagtttgccccacccaacacccctgtggtgatggtgaaggccatcccagcctacagccacctgcgctacgtgttcaagagcacccctgggaaggccaagttcagcctgaactacaacacaggcctcatcagcatcctggagcctgtgaagaggcagcaggccgcccactttgagctggaggtgaccaccagtgacaggaaggccagcaccaaggtgctggtgaaggtgctgggcgccaacagcaaccccccagagttcacccagacagcctacaaggccgcctttgatgaaaatgtgcccatcggcaccaccgtgatgagcctgtctgctgtggaccctgatgaaggagaaaatggctacgtgacctacagcatcgccaacctgaaccacgtgccctttgccatcgaccacttcaccggggctgtgtccaccagcgagaacctggactatgagctgatgccccgggtgtacaccctgcgcatccgggccagtgactggggcctgccctaccgccgggaggtggaggtgctggccaccatcaccctgaacaacctgaatgacaacacccccctgtttgagaagatcaactgtgagggcaccatcccccgggacctgggcgtgggggagcagatcaccaccgtgtctgccattgatgctgatgagctgcagctggtgcagtaccagatcgaggccggaaatgagctggacttcttcagcctgaaccccaacagcggcgtgctgagcctgaagaggagcctgatggatggcctgggcgccaaggtgtccttccacagcctgcgcatcacagccacagatggagaaaattttgccacccccctgtacatcaacatcaccgtggccgccagccacaagctggtgaacctgcagtgtgaggagactggagtggccaagatgctggccgagaagctgctgcaggccaacaagctgcacaaccagggcgaggtggaggacatcttctttgacagccacagcgtgaatgcccacatcccccagttccgcagcaccctgcccaccggcatccaggtgaaggagaaccagcctgtgggcagcagcgtcatcttcatgaacagcacagacctggacaccggcttcaacgggaagctggtgtatgctgtgtctggaggaaatgaagacagctgcttcatgattgacatggagaccggcatgctgaagatcctgagccccctggaccgggagaccacagacaagtacaccctgaacatcaccgtgtatgacctgggcatcccccagaaggccgcctggaggctgctgcacgtggtggtggtggatgccaatgacaaccccccagagttcctgcaggagagctactttgtggaggtgtctgaggacaaggaggtgcacagcgagatcatccaggtggaggccacagacaaggacctgggccccaacggccacgtgacctacagcatcgtgacagacacagacaccttcagcattgacagcgtgactggagtggtgaacatcgcccggcccctggaccgggagctgcagcacgagcacagcctgaagattgaggcccgggaccaggcccgggaggagccccagctgttcagcacagtggtggtgaaggtgtccctggaggatgtgaatgacaacccccccaccttcatcccccccaactacagagtgaaggtgcgggaggacctgcctgagggcaccgtcatcatgtggctggaggcccatgaccctgacctgggccagagcggccaggtgcgctacagcctgctggaccatggagagggcaactttgatgtggacaagctgagcggggctgtgagaattgtgcagcagctggactttgagaagaagcaggtgtacaacctgactgtgcgggccaaggacaagggcaagcctgtgtccctgagcagcacctgctacgtggaggtggaggtggtggatgtgaatgaaaacctgcacccccctgtgttcagcagctttgtggagaagggcaccgtgaaggaggatgcccctgtgggcagcctggtgatgacagtgtctgcccatgatgaagatgccaggagagatggagagatccgctacagcatcagagatggcagcggcgtgggcgtcttcaagatcggggaggagaccggggtgattgagaccagtgaccggctggaccgggagagcaccagccactactggctgactgtgtttgccacagaccagggcgtggtgcccctgagcagcttcatcgagatctacatcgaggtggaggatgtgaatgacaatgccccccagaccagcgagcctgtgtactacccagagatcatggagaacagccccaaggatgtgtctgtggtgcagatcgaggcctttgatcctgacagcagcagcaatgacaagctgatgtacaagatcaccagcggcaacccccagggcttcttcagcatccaccccaagacaggcctcatcaccaccaccagcaggaagctggaccgggagcagcaggatgagcacatcctggaggtgacagtgacagacaatggcagcccccccaagagcaccatcgcccgggtcatcgtgaagatcctggatgaaaatgacaacaagccccagttcctgcagaagttctacaagatccggctgcctgagcgggagaagccagaccgggagagaaatgcccggcgggagcccctgtaccacgtgattgccacagacaaggatgagggccccaatgctgagatctcctacagcattgaagatggaaatgaacatggcaagttcttcatcgagcccaagacaggagtggtgagcagcaagcgcttctctgctgctggggagtatgacatcctgagcatcaaggctgtggacaatggccggccccagaagagcagcaccacccggctgcacatcgagtggatcagcaagcccaagcccagcctggagcccatcagctttgaggagagcttcttcaccttcaccgtgatggagagtgaccctgtggcccacatgattggagtcatctctgtggagcccccaggcatccccctgtggtttgacatcaccggcggcaactatgacagccactttgatgtggacaagggcaccggcaccatcatcgtggccaagcccctggatgctgagcagaagagcaactacaacctgactgtggaggccacagatggcaccaccaccatcctgacccaggtgttcatcaaggtgattgacaccaatgaccaccggccccagttcagcaccagcaaatatgaggtggtgattcctgaggacacagcccctgagacagagatcctgcagatctctgctgtggaccaggatgagaagaacaagctgatctacaccctgcagagcagccgggaccccctgagcctgaagaagttccggctggaccctgccaccggcagcctgtacaccagcgagaagctggaccacgaggccgtgcaccagcacaccctgactgtgatggtgcgggaccaggatgtgcctgtgaagaggaactttgcccgcatcgtggtgaatgtgtctgacaccaatgaccacgccccctggttcaccgccagcagctacaagggccgggtgtatgagagcgctgctgtgggctctgtggtgctgcaggtgacagccctggacaaggacaagggcaagaatgctgaggtgctgtacagcattgaaagtggcaacatcggcaacagcttcatgattgatcctgtgctgggcagcatcaagacagccaaggagctggacaggagcaaccaggccgagtatgacctgatggtgaaggccacagacaagggcagcccccccatgtctgagatcacctctgtgcgcatctttgtgaccatcgctgacaatgccagccccaagttcaccagcaaggagtacagcgtggagctgtctgaaacagtgtccatcggcagctttgtgggcatggtgacagcccacagccagagctctgtggtgtatgagatcaaggatggcaacacaggagatgcctttgacatcaacccccacagcggcaccatcatcacccagaaggccctggactttgagaccctgcccatctacaccctcatcatccagggcaccaacatggccggcctgagcaccaacaccaccgtgctggtgcacctgcaggatgaaaatgacaatgcccctgtgttcatgcaggccgagtacacaggcctcatcagcgagagcgccagcatcaacagcgtggtgctgacagacagaaatgtgcccctggtgatccgggctgctgatgctgacaaggacagcaatgccctgctggtgtaccacatcgtggagcccagcgtgcacacctactttgccatcgacagcagcactggagccatccacacagtgctgagcctggactatgaggagaccagcatcttccacttcaccgtgcaggtgcatgacatgggcaccccccggctgtttgctgaatatgctgccaacgtgacagtgcacgtgattgacatcaatgactgcccccctgtgtttgccaagcccctgtatgaggccagcctgctgctgcccacctacaagggcgtgaaggtgatcaccgtgaatgccacagatgctgacagcagcgccttcagccagctgatctacagcatcacagagggcaacattggagagaagttctccatggactacaagacaggagccctgactgtgcagaacaccacccagctgcggagccgctatgagctgactgtgcgggccagtgatggccgctttgctggcctgacctctgtgaagatcaacgtgaaggagagcaaggagagccacctgaagttcacccaggatgtgtacagcgctgtggtgaaggagaacagcacagaagctgagaccctggccgtcatcacagccatcggcaaccccatcaatgagcccctcttctaccacatcctgaacccagaccggcgcttcaagatcagcaggaccagcggcgtgctgagcaccaccggcaccccatttgaccgggagcagcaggaggcctttgatgtggtggtggaggtgacagaggagcacaagcccagcgctgtggcccacgtggtggtgaaggtgattgtggaggaccagaatgacaatgcccctgtgtttgtgaacctgccctactatgctgtggtgaaggtggacacagaggtgggccacgtgatccgctacgtgacagctgtggaccgggacagcggcagaaatggagaggtgcactactacctgaaggagcaccacgagcacttccagatcggccccctgggggagatcagcctgaagaagcagtttgagctggacaccctgaacaaggagtacctggtgacagtggtggccaaggatggcggcaacccagccttctctgctgaggtgattgtgcccatcaccgtgatgaacaaggccatgcctgtgtttgagaagcccttctacagcgctgagattgctgagagcatccaggtgcacagccctgtggtgcacgtgcaggccaacagccctgagggcctgaaggtgttctacagcatcacagatggagaccccttcagccagttcaccatcaacttcaacacaggagtcatcaacgtgattgcccccctggactttgaggcccacccagcctacaagctgagcatccgggccacagacagcctgactggagcccatgctgaggtgtttgtggacatcatcgtggatgacatcaatgacaacccccctgtgtttgcccagcagagctatgctgtgaccctgtctgaggccagcgtcatcggcacctctgtggtgcaggtgcgggccacagacagcgacagcgagcccaacagaggcatctcctaccagatgtttggaaaccacagcaagagccatgaccacttccacgtggacagcagcacaggcctcatcagcctgctgcggaccctggactatgagcagagccggcagcacaccatctttgtgcgggctgtggatggcggcatgcccaccctgagcagtgatgtgattgtgacagtggatgtgacagacctgaatgacaacccccccctgtttgagcagcagatctatgaggcccgcatcagcgagcacgcccctcatggccactttgtgacctgtgtgaaggcctatgatgctgacagcagtgacatcgacaagctgcagtacagcatcctgtctggaaatgaccacaagcacttcgtcatcgacagcgccaccggcatcatcaccctgagcaacctgcacagacatgccctgaagcccttctacagcctgaacctgtctgtgtctgatggagtcttccgcagcagcacccaggtgcacgtgacagtgattggaggcaacctgcacagccctgccttcctgcagaatgaatatgaggtggagctggctgaaaatgcccccctgcacaccctggtgatggaggtgaagaccacagatggagacagcggcatctacggccacgtgacctaccacatcgtgaatgactttgccaaggaccgcttctacatcaatgaaagaggccagatcttcaccctggagaagctggaccgggagaccccagctgagaaggtgatctctgtgcggctgatggccaaggatgctgggggcaaggtggccttctgcaccgtgaatgtcatcctgacagatgacaatgacaatgccccccagttccgggccaccaagtatgaggtgaacatcggcagcagcgctgccaagggcacctctgtggtgaaggtgctggccagtgatgctgatgagggcagcaatgctgacatcacctacgccattgaagctgacagcgagagcgtgaaggagaacctggagatcaacaagctgagcggggtcatcaccaccaaggagagcctcatcggcctggagaatgagttcttcaccttctttgtgcgggctgtggacaatggcagccccagcaaggagagcgtggtgctggtgtatgtgaagatcctgcccccagagatgcagctgcccaagttcagcgagcccttctacaccttcaccgtgtctgaagatgtgcccatcggcacagaaattgacctgatccgggcagagcacagcggcaccgtgctgtacagcctggtgaagggcaacaccccagagagcaacagagatgagagctttgtgattgaccggcagagcggccgcctgaagctggagaagagcctggaccacgagaccaccaagtggtaccagttcagcatcctggcccgctgcacccaggatgaccacgagatggtggcctctgtggatgtgtccatccaggtgaaggatgccaatgacaacagccctgtgtttgagagcagcccctatgaggccttcatcgtggagaacctgcccggcggcagcagggtcatccagatccgggccagtgatgctgacagcggcaccaacggccaggtgatgtacagcctggaccagagccagagcgtggaggtgattgagagctttgccatcaacatggagaccggctggatcaccaccctgaaggagctggaccacgagaagagggacaactaccagatcaaggtggtggccagtgaccacggggagaagatccagctgagcagcacagccatcgtggatgtgacagtgacagatgtgaatgacagccccccacgcttcaccgctgagatctacaagggcaccgtgtctgaagatgacccccagggcggcgtgattgccatcctgagcaccacagatgctgacagcgaggagatcaaccggcaggtgacctacttcatcactggaggagaccccctgggccagtttgctgtggagaccatccagaatgagtggaaggtgtatgtgaagaagcccctggaccgggagaagagggacaactacctgctgaccatcacagccacagatggcaccttcagcagcaaggccatcgtggaggtgaaggtgctggatgccaatgacaacagccctgtgtgtgagaagaccctgtacagcgacaccatcccagaagatgtgctgcccgggaagctgatcatgcagatcagcgccacagatgctgacatccgcagcaatgctgagatcacctacaccctgctgggcagcggggctgagaagttcaagctgaacccagacaccggggagctgaagaccagcacccccctggaccgggaggagcaggccgtgtaccacctgctggtgcgggccacagatggcggcggccgcttctgccaggccagcatcgtgctgaccctggaggatgtgaatgacaatgcccctgagttctctgctgacccctatgccatcaccgtgtttgagaacacagagcccggcaccctgctgaccagggtgcaggccacagatgctgatgctggcctgaacaggaagatcctgtacagcctgattgattctgcagatggccagttcagcatcaatgagctgagcggcatcatccagctggagaagcccctggaccgggagctgcaggccgtgtacaccctgagcctgaaggctgtggaccagggcctgccccggcggctgacagccactggaacagtgattgtgtctgtgctggacatcaatgacaacccccctgtgtttgagtaccgggagtatggagccaccgtgtctgaggacatcctggtgggcacagaggtgctgcaggtgtatgctgccagccgggacatcgaggccaatgctgagatcacctacagcatcatctctggaaatgaacatggcaagttcagcattgacagcaagacaggagctgtgttcatcatcgagaacctggactatgagagcagccatgagtactacctgactgtggaggccacagatggcggcacccccagcctgagtgatgtggccaccgtgaatgtgaatgtgacagacatcaatgacaacacccctgtgttcagccaggacacctacaccaccgtcatcagtgaagatgctgtgctggagcagagcgtcatcaccgtgatggctgatgatgctgatggccccagcaacagccacatccactacagcatcattgatggcaaccagggcagcagcttcaccattgatcctgtgcggggggaggtgaaggtgaccaagctgctggaccgggagaccatcagcggctacaccctgactgtgcaggccagtgacaatggcagccccccccgggtgaacaccaccaccgtgaacattgatgtgtctgatgtgaatgacaatgcccctgtgttcagccggggcaactacagcgtcatcatccaggagaacaagcctgtgggcttctctgtgctgcagctggtggtgacagatgaggacagcagccacaacggcccccccttcttcttcaccatcgtgactggaaatgatgagaaggcctttgaggtgaacccccagggcgtgctgctgaccagcagcgccatcaagaggaaggagaaggaccactacctgctgcaggtgaaggtggccgacaacgggaagccccagctgagcagcctgacctacatcgacatccgggtcatcgaggagagcatctaccccccagccatcctgcccctggagatcttcatcaccagcagtggagaggagtacagcggcggcgtcatcggcaagatccacgccacagaccaggatgtgtatgacaccctgacctacagcctggacccccagatggacaacctcttctctgtgagcagcactggaggcaagctgattgcccacaagaagctggacatcggccagtacctgctgaatgtgtctgtgacagatggcaagttcaccaccgtggccgacatcaccgtgcacatccggcaggtgacccaggagatgctgaaccacaccatcgccatccgctttgccaacctgaccccagaggagtttgtgggggactactggaggaacttccagagggccctgaggaacatcctgggcgtgagaagaaatgacatccagatcgtgtccctgcagagcagcgagccccacccccacctggatgtgctgctgtttgtggagaagccaggcagcgcccagatcagcaccaagcagctgctgcacaagatcaacagctctgtgacagacatcgaggagatcatcggcgtgcgcatcctgaatgtgttccagaagctgtgtgccggcctggactgcccctggaagttctgtgatgagaaggtgtctgtggatgaatctgtgatgagcacccacagcacagcccggctgagctttgtgacccccaggcaccacagagctgctgtgtgcctgtgcaaggagggccgctgcccccctgtgcaccacggctgtgaagatgacccctgcccagagggctctgaatgtgtgtctgacccctgggaggagaagcacacctgtgtgtgccccagcggccgcttcggccagtgccccggcagcagctccatgaccctgactggaaacagctatgtgaagtaccgcctgacagaaaatgaaaacaagctggagatgaagctgaccatgaggctgcggacctacagcacccatgctgtggtgatgtatgcccggggcacagactacagcatcctggagatccaccacggccgcctgcagtacaagtttgactgtggcagcggccctggcatcgtgtctgtgcagagcatccaggtgaatgatggccagtggcatgctgtggccctggaggtgaatggaaattatgcccggctggtgctggaccaggtgcacacagccagcggcacagcccctggcaccctgaagaccctgaacctggacaactacgtgttcttcggcggccacatccggcagcagggcaccaggcatggccgcagcccccaggtgggcaatggcttccggggctgcatggacagcatctacctgaatggccaggagctgcccctgaacagcaagcccaggagctatgcccacatcgaggagagcgtggatgtgtccccaggctgcttcctgacagccacagaggactgtgccagcaacccctgccagaatggaggagtgtgcaaccccagccctgctgggggctactactgcaagtgcagcgccctgtacatcggcacccactgtgagatctctgtgaacccctgcagcagcaagccctgcctgtatggaggcacctgtgtggtggacaatggaggctttgtgtgccagtgccggggcctgtacacaggccagcgctgccagctgagcccctactgcaaggatgagccctgcaagaatggaggcacctgctttgacagcctggatggagctgtgtgccagtgtgacagcggcttccggggggagcgctgccagagcgacattgatgagtgcagcggcaacccctgcctgcacggggccctgtgtgagaacacccacggcagctaccactgcaactgcagccatgagtaccggggccgccactgtgaagatgctgcccccaaccagtatgtgtccaccccctggaacatcggcctggccgagggcattggaattgtggtgtttgtggccggcatcttcctgctggtggtggtgtttgtgctgtgcaggaagatgatcagcaggaagaagaagcaccaggccgagcccaaggacaagcacctgggccctgccacagccttcctgcagaggccctactttgacagcaagctgaacaagaacatctacagcgacatccccccccaggtgcctgtgcggcccatctcctacacccccagcatccccagcgacagcaggaacaacctggacaggaacagctttgagggcagcgccatccctgagcaccctgagttcagcaccttcaaccctgagagcgtgcacggccacaggaaggctgtggccgtgtgcagcgtggcccccaacctgcccccacctccacccagcaacagccccagcgacagcgacagcatccagaagcccagctgggactttgattatgacaccaaggtggtggacctggacccctgcctgagcaagaagcccctggaggagaagcccagccagccctacagcgcccgggagagcctgtctgaggtgcagagcctgagcagcttccagagcgagagctgtgatgacaatggctaccactgggacaccagtgactggatgcccagcgtgcccctgcctgacatccaggagttccccaactatgaggtgattgatgagcagacccccctgtacagcgctgaccccaatgccatcgacacagactactacccaggcggctatgacattgaaagtgacttccccccacctcctgaggacttccctgctgctgatgagctgccccccctgcccccagagttcagcaaccagtttgagagcatccaccccccccgggacatgcctgctgctggcagcctgggcagcagcagcaggaaccggcagcgcttcaacctgaaccagtacctgcccaacttctaccccctggacatgtctgagccccagaccaagggcaccggggagaacagcacctgccgggagccccacgccccctacccacctggctaccagaggcactttgaggccccagctgtggagagcatgcccatgtctgtgtatgccagcacagccagctgcagtgatgtgtctgcctgctgtgaggtggagagcgaggtgatgatgtctgactatgagagcggagatgatggccactttgaggaggtgaccatcccccccctggacagccagcagcacacagaggtgtag

SEQ ID NO: 19661 - DNA, 1467 bp, synthetic construct
  misc_feature 1..1467: note = Description of Artificial Sequence: Synthetic coding sequence
  source 1..1467: mol_type = other DNA
atgggccgccacctggccctgctgctgctgctgctgctgctcttccagcactttggagacagtgatggcagccagaggctggagcagacccccctgcagttcacccacctggagtacaacgtgacagtgcaggagaacagcgctgccaagacctacgtgggccaccctgtgaagatgggcgtgtacatcacccacccagcctgggaggtgcgctacaagatcgtgtctggggacagcgagaacctcttcaaggccgaggagtacatcctgggggacttctgcttcctgcgcatccgcaccaagggcggcaacacagccatcctgaaccgggaggtgaaggaccactacaccctgattgtgaaggccctggagaagaacaccaacgtggaggcccggaccaaggtgcgggtgcaggtgctggacaccaatgacctgcggcccctcttcagccccaccagctacagcgtgtccctgcctgagaacacagccatccgcaccagcatcgcccgggtgtctgccacagatgctgacatcggcaccaatggagagttctactacagcttcaaggacagaacagacatgtttgccatccaccccaccagcggggtcatcgtgctgaccggccgcctggactacctggagaccaagctgtatgagatggagatcctggccgctgaccggggcatgaagctgtatggcagcagcggcatcagctccatggccaagctgactgtgcacatcgagcaggccaatgaatgtgcccctgtgatcacagctgtgaccctgagccccagcgagctggaccgggaccctgcctatgccatcgtgacagtggatgactgtgaccagggcgccaacggggacatcgccagcctgagcatcgtggccggggacctgctgcagcagttcagaacagtgcgctccttccctggcagcaaggagtacaaggtgaaggccatcggcggcatcgactgggacagccaccccttcggctacaacctgaccctgcaggccaaggacaagggcaccccaccccagttcagctctgtgaaggtgatccacgtgaccagcccccagttcaaggccggccctgtgaagtttgagaaggatgtgtacagagctgagatcagcgagtttgccccacccaacacccctgtggtgatggtgaaggccatcccagcctacagccacctgcgctacgtgttcaagagcacccctgggaaggccaagttcagcctgaactacaacacaggcctcatcagcatcctggagcctgtgaagaggcagcaggccgcccactttgagctggaggtgaccaccagtgacaggaaggccagcaccaaggtgctggtgaaggtgctgggcgccaacagcaaccccccagagttcacccagacagcctacaaggccgcctttgatgaaaatgtgcccatcggcaccaccgtgatgagcctgtctgctgtgtag

SEQ ID NO: 19662 - DNA, 399 bp, synthetic construct
  misc_feature 1..399: note = Description of Artificial Sequence: Synthetic coding sequence
  source 1..399: mol_type = other DNA
atgtgtgatgcctttgtgggcacctggaagctggtgtccagtgaaaattttgatgactacatgaaggaggtgggcgtgggctttgccaccaggaaggtggccggcatggccaagcccaacatgatcatctctgtgaatggagatgtgatcaccatcaagtctgagagcaccttcaagaacacagagatctccttcatcctgggccaggagtttgatgaggtgacagcagatgacaggaaggtgaagagcaccatcaccctggatggcggcgtgctggtgcacgtgcagaagtgggatggcaagagcaccaccatcaagaggaagcgggaggatgacaagctggtggtggagtgtgtgatgaagggcgtgaccagcaccagggtgtatgagcgggcctag

SEQ ID NO: 19663 - DNA, 7536 bp, synthetic construct
  misc_feature 1..7536: note = Description of Artificial Sequence: Synthetic coding sequence
  source 1..7536: mol_type = other DNA
atggaggaggtggtgattgctggcatgtctgggaagctgcctgagagcgagaacctgcaggagttctgggacaacctgattggaggagtggacatggtgacagatgatgaccggcgctggaaggccggcctgtatggcctgcccaggagaagtggcaagctgaaggacctgagcagatttgatgccagcttctttggagtgcaccccaagcaggcccacaccatggacccccagctgcggctgctgctggaggtgacctatgaggccatcgtggatggcggcatcaacccagacagcctgcggggcacccacactggagtgtgggtgggcgtgtctggcagcgagaccagcgaggccctgagccgggaccctgagaccctggtgggctacagcatggtgggctgccagagggccatgatggccaaccggctgtccttcttctttgacttccggggccccagcatcgccctggacacagcctgcagcagcagcctgatggccctgcagaatgcctaccaggccatccacagcggccagtgcccagctgccatcgtgggcggcatcaacgtgctgctgaagcccaacacctctgtgcagttcctgcggctgggcatgctgagccctgagggcacctgcaaggcctttgacacagctggaaatggctactgccgctcagaaggagtggtggccgtgctgctgaccaagaagagcctggcccggcgggtgtatgccaccatcctgaatgccggcaccaacacagatggcttcaaggagcagggcgtgaccttccccagcggggacatccaggagcagctgatccgcagcctgtaccagagcgctggggtggcccctgagagctttgagtacatcgaggcccatggaacaggcaccaaggtgggggacccccaggagctgaatggcatcacccgggccctgtgtgccacccggcaggagcccctgctgattggcagcaccaagagcaacatgggccaccctgagcccgccagcggcctggccgccctggccaaggtgctgctgagcctggagcacggcctgtgggcccccaacctgcacttccacagccccaaccctgagatcccagccctgctggatggccgcctgcaggtggtggaccagcccctgcctgtgcggggcggcaatgtgggcatcaacagctttggatttggaggcagcaatgtgcacatcatcctgcggcccaacacccagcccccaccagccccagcccctcatgccaccctgccccggctgctgcgggccagcggccgcaccccagaggccgtgcagaagctgctggagcagggcctgcggcacagccaggacctggccttcctgtccatgctgaatgacattgctgctgtgcctgccacagccatgcccttccggggctatgctgtgctgggcggggagcggggcggccctgaggtgcagcaggtgcctgctggggagcggcccctgtggttcatctgcagcggcatgggcacccagtggaggggcatgggcctgagcctgatgaggctggaccgcttccgggacagcatcctgcggagtgatgaggccgtgaagcccttcggcctgaaggtgtcccagctgctgctgagcacagatgagagcacctttgatgacatcgtgcacagctttgtgtccctgacagccatccagatcggcctgattgacctgctgagctgcatgggcctgcggccagatggcatcgtgggccacagcctgggggaggtggcctgtggctatgcagatggctgcctgagccaggaggaggccgtgctggccgcctactggaggggccagtgcatcaaggaggcccacctgcccccaggggccatggctgctgtgggcctgtcctgggaggagtgcaagcagcgctgccccccaggagtggtgcctgcctgccacaacagcaaggacacagtgaccatcagcggcccccaggcccctgtgtttgaatttgtggagcagctgaggaaggagggcgtgtttgccaaggaggtgaggactggaggcatggccttccacagctacttcatggaggccatcgccccacccctgctgcaggagctgaagaaggtgatccgggagcccaagcccaggtctgcccgctggctgagcaccagcatccctgaggcccagtggcacagcagcctggcccggaccagcagcgctgagtacaacgtgaacaacctggtgtcccctgtgctcttccaggaggccctgtggcacgtgcctgagcacgctgtggtgctggagatcgccccccacgccctgctgcaggccgtgctgaagaggggcctgaagcccagctgcaccatcatccccctgatgaagaaggaccaccgggacaacctggagttcttcctggccggcatcggccgcctgcacctgagcggcattgatgccaaccccaatgccctcttcccccctgtggagttccctgccccccggggcacccccctcatcagccccctcatcaagtgggaccacagcctggcctgggatgtgcctgctgctgaggacttccccaacggcagcggcagccccagcgctgccatctacaacatcgacaccagcagcgagagcccagaccactacctggtggaccacaccctggatggccgggtgctcttccctgccaccggctacctgagcatcgtgtggaagaccctggcccgggccctgggcctgggcgtggagcagctgcctgtggtgtttgaagatgtggtgctgcaccaggccaccatcctgcccaagacaggcaccgtgtccctggaggtgcggctgctggaggccagccgggcctttgaggtgtctgaaaatggaaacctggtggtgtctgggaaggtgtaccagtgggatgatcctgacccccggctgtttgaccaccctgagagccccacccccaaccccacagagcccctcttcctggcccaggccgaggtgtacaaggagctgcggctgcggggctatgactatggcccccacttccagggcatcctggaggccagcctggagggggacagcggccgcctgctgtggaaggacaactgggtgtccttcatggacaccatgctgcagatgagcatcctgggcagcgccaagcacggcctgtacctgcccaccagggtgacagccatccacattgatcctgccacccaccggcagaagctgtacaccctgcaggacaaggcccaggtggctgatgtggtggtgagccgctggctgcgggtgacagtggccggcggcgtgcacatcagcggcctgcacacagaaagtgccccccggcggcagcaggagcagcaggtgcccatcctggagaagttctgcttcaccccccacacagaggagggctgcctgtctgagcgggccgccctgcaggaggagctgcagctgtgcaagggcctggtgcaggccctgcagaccaaggtgacccagcagggcctgaagatggtggtgcccggcctggatggagcccagatcccccgggaccccagccagcaggagctgccccggctgctgtctgctgcctgccgcctgcagctgaatggaaacctgcagctggagctggcccaggtgctggcccaggagcggcccaagctgcctgaggaccccctgctgagcggcctgctggacagccctgccctgaaggcctgcctggacacagctgtggagaacatgcccagcctgaagatgaaggtggtggaggtgctggccggccacggccacctgtacagccgcatccctggcctgctgagcccccaccccctgctgcagctgagctacacagccacagacagacacccccaggccctggaggccgcccaggccgagctgcagcagcatgatgtggcccagggccagtgggaccctgctgaccctgcccccagcgccctgggcagcgctgacctgctggtgtgcaactgtgctgtggccgccctgggggaccctgccagcgccctgagcaacatggtggccgccctgcgggagggcggcttcctgctgctgcacaccctgctgcggggccaccccctgggggacatcgtggccttcctgaccagcacagagccccagtatggccagggcatcctgagccaggatgcctgggagagcctcttcagccgggtgtccctgcggctggtgggcctgaagaagagcttctacggcagcaccctcttcctgtgccggcggcccaccccccaggacagccccatcttcctgcctgtggatgacaccagcttccgctgggtggagagcctgaagggcatcctggctgatgaggacagcagcaggcctgtgtggctgaaggccatcaactgtgccaccagcggcgtggtgggcctggtgaactgcctgcggcgggagcccggcggcaaccggctgcgctgtgtgctgctgagcaacctgagcagcaccagccacgtgcctgaggtggaccccggcagcgctgagctgcagaaggtgctgcagggcgacctggtgatgaatgtgtacagagatggagcctggggcgccttccgccacttcctgctggaggaggacaagccagaggagcccacagcccacgcctttgtgtccaccctgaccaggggggacctgagcagcatccgctgggtgtgcagcagcctgcggcatgcccagcccacctgccctggggcccagctgtgcaccgtgtactatgccagcctgaacttccgggacatcatgctggccaccgggaagctgagcccagatgccatccctgggaagtggaccagccaggacagcctgctgggcatggagttcagcggcagagatgccagcggcaagagggtgatgggcctggtgcctgccaagggcctggccacctctgtgctgctgagcccagacttcctgtgggatgtgcccagcaactggaccctggaggaggccgcctctgtgcctgtggtgtacagcacagcctactatgccctggtggtgcggggccgggtgcggcctggagagaccctgctgatccacagcggcagcggaggagtgggccaggccgccatcgccatcgccctgagcctgggctgcagggtcttcaccaccgtgggcagcgctgagaagagggcctacctgcaggcccgcttcccccagctggacagcaccagctttgccaacagccgggacaccagctttgagcagcacgtgctgtggcacactggaggaaaaggagtggacctggtgctgaacagcctggccgaggagaagctgcaggcctctgtgcgctgcctggccacccacggccgcttcctggagatcggcaagtttgacctgagccagaaccaccccctgggcatggccatcttcctgaagaatgtgaccttccacggcgtgctgctggatgccttcttcaatgaaagcagcgctgactggagggaggtgtgggccctggtgcaggccggcatcagagatggagtggtgcggcccctgaagtgcaccgtcttccacggggcccaggtggaggatgccttccgctacatggcccagggcaagcacatcggcaaggtggtggtgcaggtgctggccgaggagcctgaggccgtgctgaagggggccaagcccaagctgatgtctgccatcagcaagaccttctgcccagcccacaagagctacatcatcgccggcggcctgggcggcttcggcctggagctggcccagtggctgatccagaggggcgtgcagaagctggtgctgaccagccgcagcggcatcagaacaggctaccaggccaagcaggtgcggcgctggaggcggcagggcgtgcaggtgcaggtgtccaccagcaacatcagcagcctggagggcgcccggggcctgattgctgaggccgcccagctgggccctgtgggcggcgtcttcaacctggccgtggtgctgagagatggcctgctggagaaccagaccccagagttcttccaggatgtgtgcaagcccaagtacagcggcaccctgaacctggacagagtgacccgggaggcctgcccagagctggactactttgtggtgttcagctctgtgtcctgtggcagaggaaatgccggccagagcaactacggctttgccaacagcgccatggagcgcatctgtgagaagagaagacatgagggcctgcccggcctggccgtgcagtggggcgccatcggagatgtgggcatcctggtggagaccatgagcaccaatgacaccatcgtgtctggcaccctgccccagaggatggccagctgcctggaggtgctggacctcttcctgaaccagccccacatggtgctgagcagctttgtgctggccgagaaggccgccgcctacagagaccgggacagccagagggacctggtggaggccgtggcccacatcctgggcatccgggacctggccgctgtgaacctggacagcagcctggccgacctgggcctggacagcctgatgtctgtggaggtgcggcagaccctggagcgggagctgaacctggtgctgtctgtgcgggaggtgcggcagctgaccctgaggaagctgcaggagctgagcagcaaggcagatgaggccagcgagctggcctgccccacccccaaggaggatggcctggcccagcagcagacccagctgaacctgcggagcctgctggtgaaccctgagggccccaccctgatgaggctgaacagcgtgcagagcagcgagcggcccctcttcctggtgcaccccatcgagggcagcaccaccgtcttccacagcctggccagccggctgagcatccccacctacggcctgcagtgcacccgggccgcccccctggacagcatccacagcctggccgcctactacatcgactgcatccggcaggtgcagcctgagggcccctacagagtggccggctacagctatggagcctgtgtggcctttgagatgtgcagccagctgcaggcccagcagagccctgcccccacccacaacagcctcttcctgtttgatggcagccccacctacgtgctggcctacacccagagctaccgggccaagctgaccccaggctgtgaggccgaggccgagacagaggccatctgcttctttgtgcagcagttcacagacatggagcacaacagagtgctggaggccctgctgcccctgaagggcctggaggagcgggtggccgctgctgtggacctgatcatcaagagccaccagggcctggaccggcaggagctgagctttgctgcccggagcttctactacaagctgcgggctgctgagcagtacacccccaaggccaagtaccacggcaatgtgatgctgctgcgggccaagacaggaggagcctacggggaggacctgggcgctgactacaacctgagccaggtgtgtgatggcaaggtgtctgtgcacgtgattgaaggagaccacaggaccctgctggagggcagcggcctggagagcatcatcagcatcatccacagcagcctggccgagccccgggtgtctgtgcgggagggctag

SEQ ID NO: 19664 - DNA, 2502 bp, synthetic construct
  misc_feature 1..2502: note = Description of Artificial Sequence: Synthetic coding sequence
  source 1..2502: mol_type = other DNA
atgagcatcctgggcagcgccaagcacggcctgtacctgcccaccagggtgacagccatccacatcgaccctgccacccaccggcagaagctgtacaccctgcaggacaaggcccaggtggctgatgtggtggtgagccgctggctgcgggtgacagtggccggcggcgtgcacatcagcggcctgcacacagagagcgccccccggcggcagcaggagcagcaggtgcccatcctggagaagttctgcttcaccccccacacagaggagggctgcctgtctgaaagagctgccctgcaggaggagctgcagctgtgcaagggcctggtgcaggccctgcagaccaaggtgacccagcagggcctgaagatggtggtgcccggcctggatggagcccagatcccccgggaccccagccagcaggagctgccccggctgctgtctgctgcctgccgcctgcagctgaatggaaacctgcagctggagctggcccaggtgctggcccaggagcggcccaagctgcctgaggaccccctgctgagcggcctgctggacagccctgccctgaaggcctgcctggacacagctgtggagaacatgcccagcctgaagatgaaggtggtggaggtgctggccggccacggccacctgtacagccgcatccctggcctgctgagcccccaccccctgctgcagctgagctacacagccacagacagacacccccaggccctggaggccgcccaggccgagctgcagcagcatgatgtggcccagggccagtgggaccctgctgaccctgcccccagcgccctgggcagcgctgacctgctggtgtgcaactgtgctgtggccgccctgggggaccctgccagcgccctgagcaacatggtggccgccctgcgggagggcggcttcctgctgctgcacaccctgctgcggggccaccccctgggggacatcgtggccttcctgaccagcacagagccccagtatggccagggcatcctgagccaggatgcctgggagagcctcttcagccgggtgtccctgcggctggtgggcctgaagaagagcttctacggcagcaccctcttcctgtgcagaagacccaccccccaggacagccccatcttcctgcctgtggatgacaccagcttccgctgggtggagagcctgaagggcatcctggctgatgaggacagcagcaggcctgtgtggctgaaggccatcaactgtgccaccagcggcgtggtgggcctggtgaactgcctgcggcgggagcccggcggcaaccggctgcgctgtgtgctgctgagcaacctgagcagcaccagccacgtgcctgaggtggaccccggcagcgctgagctgcagaaggtgctgcagggcgacctggtgatgaatgtgtacagagatggagcctggggcgccttccgccacttcctgctggaggaggacaagccagaggagcccacagcccacgcctttgtgtccaccctgaccaggggggacctgagcagcatccgctgggtgtgcagcagcctgcggcatgcccagcccacctgccctggggcccagctgtgcaccgtgtactatgccagcctgaacttccgggacatcatgctggccaccgggaagctgagcccagatgccatccctgggaagtggaccagccaggacagcctgctgggcatggagttcagcggcagagatgccagcggcaagagggtgatgggcctggtgcctgccaagggcctggccacctctgtgctgctgagcccagacttcctgtgggatgtgcccagcaactggaccctggaggaggccgcctctgtgcctgtggtgtacagcacagcctactatgccctggtggtgcggggccgggtgcggcctggagagaccctgctgatccacagcggcagcggcggcgtgggccaggccgccatcgccatcgccctgagcctgggctgcagggtcttcaccaccgtgggcagcgctgagaagagggcctacctgcaggcccgcttcccccagctggacagcaccagctttgccaacagccgggacaccagctttgagcagcacgtgctgtggcacactggaggcaagggcgtggacctggtgctgaacagcctggccgaggagaagctgcaggcctctgtgcgctgcctggccacccacggccgcttcctggagatcggcaagtttgacctgagccagaaccaccccctgggcatggccatcttcctgaagaatgtgaccttccatggagtgctgctggatgccttcttcaatgaatcttctgctgactggagggaggtgtgggccctggtgcaggccggcatcagagatggagtggtgcggcccctgaagtgcaccgtcttccatggagcccaggtggaggatgccttccgctacatggcccaggccaaggccagccaggcctggccctgcagcggggcccccagcgccacctgggccttctggtggaggaggtag

SEQ ID NO: 19665 - DNA, 1143 bp, synthetic construct
  misc_feature 1..1143: note = Description of Artificial Sequence: Synthetic coding sequence
  source 1..1143: mol_type = other DNA
atgatgttcagcggcttcaatgctgactatgaggccagcagcagccgctgcagcagcgccagccctgctggggacagcctgagctactaccacagccctgctgacagcttcagctccatgggcagccctgtgaatgcccaggacttctgcacagacctggccgtgtcctctgccaacttcatccccaccgtgacagccatcagcaccagcccagacctgcagtggctggtgcagcctgccctggtgtcctctgtggcccccagccagacccgggccccccaccccttcggcgtgcctgcccccagcgctggggcctacagcagagctggggtggtgaagaccatgactggaggccgggcccagagcattggaagaagaggcaaggtggagcagctgagccctgaggaggaggagaagaggcgcatcagaagagagaggaacaagatggctgctgccaagtgcaggaacagaagaagagagctgacagacaccctgcaggccgagacagaccagctggaggatgagaagagcgccctgcagacagaaattgccaacctgctgaaggagaaggagaagctggagttcatcctggccgcccacaggcctgcctgcaagatcccagatgacctgggcttccctgaggagatgtctgtggccagcctggacctgaccggcggcctgcctgaggtggccaccccagagagcgaggaggccttcaccctgcccctgctgaatgaccctgagcccaagcccagcgtggagcctgtgaagagcatcagctccatggagctgaagacagagccctttgatgacttcctgtttcctgccagcagccggcccagcggcagcgagacagcccggtctgtgcctgacatggacctgagcggcagcttctacgccgctgactgggagcccctgcacagcggcagcctgggcatgggccccatggccacagagctggagcccctgtgcacccctgtggtgacctgcacccccagctgcacagcctacaccagcagctttgtgttcacctacccagaggccgacagcttccccagctgtgccgccgcccacaggaagggcagcagcagcaatgagcccagcagtgacagcctgagcagccccaccctgctggccctgtag

SEQ ID NO: 19666 - DNA, 966 bp, synthetic construct
  misc_feature 1..966: note = Description of Artificial Sequence: Synthetic coding sequence
  source 1..966: mol_type = other DNA
atggaggagggccagtacagcgagattgaggagctgccccggcggcgctgctgcagaagaggcacccagatcgtgctgctgggcctggtgacagctgccctgtgggccggcctgctgaccctgctgctgctgtggcactgggacaccacccagagcctgaagcagctggaggagcgggccgccagaaatgtgtcccaggtgtccaagaacctggagagccaccacggggaccagatggcccagaagagccagagcacccagatcagccaggagctggaggagctgcgggcagagcagcagaggctgaagagccaggacctggagctgtcctggaacctgaatggcctgcaggccgacctgagcagcttcaagagccaggagctgaatgaaagaaatgaggccagtgacctgctggagcggctgcgggaggaggtgaccaagctgaggatggagctgcaggtgagcagcggctttgtgtgcaacacctgcccagagaagtggatcaacttccagaggaagtgctactactttgggaagggcaccaagcagtgggtgcacgcccgctatgcctgtgatgacatggagggccagctggtgtccatccacagccctgaggagcaggacttcctgaccaagcacgccagccacacaggctcctggattggcctgaggaacctggacctgaagggggagttcatctgggtggatggcagccacgtggactacagcaactgggcccctggagagcccaccagccgcagccagggcgaggactgtgtgatgatgaggggcagcggccgctggaatgatgccttctgtgacaggaagctgggcgcctgggtgtgtgaccggctggccacctgcaccccaccagccagcgagggcagcgctgagagcatgggccctgacagcaggccagaccctgatggccgcctgcccacccccagcgcccccctgcacagctag

SEQ ID NO: 19667 - DNA, 963 bp, synthetic construct
  misc_feature 1..963: note = Description of Artificial Sequence: Synthetic coding sequence
  source 1..963: mol_type = other DNA
atgaacccccccagccaggagattgaggagctgccccggcggcgctgctgccggcggggcacccagatcgtgctgctgggcctggtgacagctgccctgtgggccggcctgctgaccctgctgctgctgtggcactgggacaccacccagagcctgaagcagctggaggagagagctgccagaaatgtgtcccaggtgtccaagaacctggagagccaccacggggaccagatggcccagaagagccagagcacccagatcagccaggagctggaggagctgcgggcagagcagcagaggctgaagagccaggacctggagctgtcctggaacctgaatggcctgcaggccgacctgagcagcttcaagagccaggagctgaatgaaagaaatgaggccagtgacctgctggagcggctgcgggaggaggtgaccaagctgaggatggagctgcaggtgagcagcggctttgtgtgcaacacctgcccagagaagtggatcaacttccagaggaagtgctactactttgggaagggcaccaagcagtgggtgcacgcccgctatgcctgtgatgacatggagggccagctggtgtccatccacagccctgaggagcaggacttcctgaccaagcacgccagccacacaggctcctggattggcctgaggaacctggacctgaagggggagttcatctgggtggatggcagccacgtggactacagcaactgggcccctggagagcccaccagccgcagccagggcgaggactgtgtgatgatgaggggcagcggccgctggaatgatgccttctgtgacaggaagctgggcgcctgggtgtgtgaccggctggccacctgcaccccaccagccagcgagggcagcgctgagagcatgggccctgacagcaggccagaccctgatggccgcctgcccaccccatctgcccccctgcacagctag

SEQ ID NO: 19668 - DNA, 1125 bp, synthetic construct
  misc_feature 1..1125: note = Description of Artificial Sequence: Synthetic coding sequence
  source 1..1125: mol_type = other DNA
atgtggttcctgaccaccctgctgctgtgggtgcctgtggatggccaggtggacaccaccaaggccgtcatcaccctgcagcccccctgggtgtctgtgttccaggaggagaccgtgaccctgcactgtgaggtgctgcacctgcccggcagcagcagcacccagtggttcctgaatggaacagccacccagaccagcacccccagctaccgcatcaccagcgcctctgtgaatgacagcggggagtaccgctgccagaggggcctgagcggccgcagtgaccccatccagctggagatccaccggggctggctgctgctgcaggtgagcagcagggtcttcacagaaggagagcccctggccctgcgctgccacgcctggaaggacaagctggtgtacaacgtgctgtactacagaaatggcaaggccttcaagttcttccactggaacagcaacctgaccatcctgaagaccaacatcagccacaacggcacctaccactgcagcggcatgggcaagcaccgctacaccagcgctggcatctctgtgacagtgaaggagctgtttcctgcccctgtgctgaatgcctctgtgaccagccccctgctggagggcaacctggtgaccctgagctgtgagaccaagctgctgctgcagaggcctggcctgcagctgtacttctccttctacatgggcagcaagaccctgcggggcaggaacaccagcagcgagtaccagatcctgacagccaggagagaagattctggcctgtactggtgtgaggccgccacagaagatggaaatgtgctgaagaggagccctgagctggagctgcaggtgctgggcctgcagctgcccacccctgtgtggttccacgtgctcttctacctggccgtgggcatcatgttcctggtgaacacagtgctgtgggtgaccatcaggaaggagctgaagaggaagaagaagtgggacctggagatcagcctggacagcggccacgagaagaaggtgatcagcagcctgcaggaggacagacacctggaggaggagctgaagtgccaggagcagaaggaggagcagctgcaggagggcgtgcacaggaaggagccccagggcgccacctag

SEQ ID NO: 19669 - DNA, 723 bp, synthetic construct
  misc_feature 1..723: note = Description of Artificial Sequence: Synthetic coding sequence
  source 1..723: mol_type = other DNA
atgtggttcctgaccaccctgctgctgtggggctggctgctgctgcaggtgagcagcagggtcttcacagaaggagagcccctggccctgcgctgccacgcctggaaggacaagctggtgtacaacgtgctgtactacagaaatggcaaggccttcaagttcttccactggaacagcaacctgaccatcctgaagaccaacatcagccacaacggcacctaccactgcagcggcatgggcaagcaccgctacaccagcgctggcatctctgtgacagtgaaggagctgtttcctgcccctgtgctgaatgcctctgtgaccagccccctgctggagggcaacctggtgaccctgagctgtgagaccaagctgctgctgcagaggcctggcctgcagctgtacttctccttctacatgggcagcaagaccctgcggggcaggaacaccagcagcgagtaccagatcctgacagccaggagagaagattctggcctgtactggtgtgaggccgccacagaagatggaaatgtgctgaagaggagccctgagctggagctgcaggtgctgggcctgcagctgcccacccctgtgtggttccacgtgctcttctacctggccgtgggcatcatgttcctggtgaacacagtgctgtgggtgaccatcaggaaggagctgaagaggaagaagaagtgggacctggagatcagcctggacagcggctag

SEQ ID NO: 19670 - DNA, 2469 bp, synthetic construct
  misc_feature 1..2469: note = Description of Artificial Sequence: Synthetic coding sequence
  source 1..2469: mol_type = other DNA
atgggcttcagcagcgagctgtgcagcccccagggccatggagtgctgcagcagatgcaggaggccgagctgcggctgctggagggcatgaggaagtggatggcccagagggtgaagagtgaccgggagtatgccggcctgctgcaccacatgagcctgcaggacagcggcggccagagccgggccatcagcccagacagccccatcagccagagctgggccgagatcaccagccagacagagggcctgagccggctgctgcggcagcacgccgaggacctgaacagcggccccctgagcaagctgagcctgctgatccgggagcggcagcagctgaggaagacctacagcgagcagtggcagcagctgcagcaggagctgaccaagacccacagccaggacatcgagaagctgaagagccagtaccgggccctggcccgggacagcgcccaggccaagaggaagtaccaggaggccagcaaggacaaggaccgggacaaggccaaggacaagtatgtgcgcagcctgtggaagctgtttgcccaccacaaccgctacgtgctgggcgtgcgggccgcccagctgcaccaccagcaccaccaccagctgctgctgcccggcctgctgcggagcctgcaggacctgcacgaggagatggcctgcatcctgaaggagatcctgcaggagtacctggagatcagcagcctggtgcaggatgaggtggtggccatccaccgggagatggctgctgctgctgcccgcatccagcctgaggccgagtaccagggcttcctgcggcagtatggcagcgccccagatgtgcccccctgtgtgacctttgatgagagcctgctggaggagggggagcccctggagcctggagagctgcagctgaatgagctgactgtggagagcgtgcagcacaccctgacctctgtgacagatgagctggccgtggccacagagatggtgttccggcggcaggagatggtgacccagctgcagcaggagctgagaaatgaggaggagaacacccacccccgggagcgggtgcagctgctgggcaagaggcaggtgctgcaggaggccctgcagggcctgcaggtggccctgtgcagccaggccaagctgcaggcccagcaggagctgctgcagaccaagctggagcacctgggccctggagagcccccacctgtgctgctgctgcaggatgacagacacagcaccagcagcagcgagcaggagcgggagggcggccgcacccccaccctggagatcctgaagagccacatcagcggcatcttccggcccaagttcagcctgcccccacccctgcagctgatccctgaggtgcagaagcccctgcacgagcagctgtggtaccacggggccatccccagggctgaggtggccgagctgctggtgcacagcggggacttcctggtgcgggagagccagggcaagcaggagtatgtgctgtctgtgctgtgggatggcctgcccaggcacttcatcatccagagcctggacaacctgtaccgcctggagggggagggcttccccagcatccccctgctgattgaccacctgctgagcacccagcagcccctgaccaagaagtctggagtggtgctgcacagagctgtgcccaaggacaagtgggtgctgaaccacgaggacctggtgctgggggagcagatcggccggggcaactttggagaggtgttttctggccgcctgcgggctgacaacaccctggtggccgtgaagagctgccgggagaccctgcccccagacctgaaggccaagttcctgcaggaggcccgcatcctgaagcagtacagccaccccaacatcgtgcggctgattggagtgtgcacccagaagcagcccatctacatcgtgatggagctggtgcagggcggggacttcctgaccttcctgaggacagagggcgcccggctgcgggtgaagaccctgctgcagatggtgggagatgctgctgctggcatggagtacctggagagcaagtgctgcatccaccgggacctggccgccaggaactgcctggtgacagagaagaatgtgctgaagatcagtgactttggcatgagccgggaggaggctgatggagtgtatgctgccagcggcggcctgcggcaggtgcctgtgaagtggacagcccctgaggccctgaactacggccgctacagcagcgagagtgatgtgtggagctttggcatcctgctgtgggagaccttcagcctgggcgccagcccctaccccaacctgagcaaccagcagacccgggagtttgtggagaagggcggccgcctgccctgcccagagctgtgcccagatgctgtgttccggctgatggagcagtgctgggcctatgagcccggccagaggcccagcttcagcaccatctaccaggagctgcagagcatcaggaagaggcacaggtag

SEQ ID NO: 19671 - DNA, 2295 bp, synthetic construct
  misc_feature 1..2295: note = Description of Artificial Sequence: Synthetic coding sequence
  source 1..2295: mol_type = other DNA
atgggcttcagcagcgagctgtgcagcccccagggccatggagtgctgcagcagatgcaggaggccgagctgcggctgctggagggcatgaggaagtggatggcccagagggtgaagagtgaccgggagtatgccggcctgctgcaccacatgagcctgcaggacagcggcggccagagccgggccatcagcccagacagccccatcagccagacccacagccaggacatcgagaagctgaagagccagtaccgggccctggcccgggacagcgcccaggccaagaggaagtaccaggaggccagcaaggacaaggaccgggacaaggccaaggacaagtatgtgcgcagcctgtggaagctgtttgcccaccacaaccgctacgtgctgggcgtgcgggccgcccagctgcaccaccagcaccaccaccagctgctgctgcccggcctgctgcggagcctgcaggacctgcacgaggagatggcctgcatcctgaaggagatcctgcaggagtacctggagatcagcagcctggtgcaggatgaggtggtggccatccaccgggagatggctgctgctgctgcccgcatccagcctgaggccgagtaccagggcttcctgcggcagtatggcagcgccccagatgtgcccccctgtgtgacctttgatgagagcctgctggaggagggggagcccctggagcctggagagctgcagctgaatgagctgactgtggagagcgtgcagcacaccctgacctctgtgacagatgagctggccgtggccacagagatggtgttccggcggcaggagatggtgacccagctgcagcaggagctgagaaatgaggaggagaacacccacccccgggagcgggtgcagctgctgggcaagaggcaggtgctgcaggaggccctgcagggcctgcaggtggccctgtgcagccaggccaagctgcaggcccagcaggagctgctgcagaccaagctggagcacctgggccctggagagcccccacctgtgctgctgctgcaggatgacagacacagcaccagcagcagcgagcaggagcgggagggcggccgcacccccaccctggagatcctgaagagccacatcagcggcatcttccggcccaagttcagcctgcccccacccctgcagctgatccctgaggtgcagaagcccctgcacgagcagctgtggtaccacggggccatccccagggctgaggtggccgagctgctggtgcacagcggggacttcctggtgcgggagagccagggcaagcaggagtatgtgctgtctgtgctgtgggatggcctgcccaggcacttcatcatccagagcctggacaacctgtaccgcctggagggggagggcttccccagcatccccctgctgattgaccacctgctgagcacccagcagcccctgaccaagaagtctggagtggtgctgcacagagctgtgcccaaggacaagtgggtgctgaaccacgaggacctggtgctgggggagcagatcggccggggcaactttggagaggtgttttctggccgcctgcgggctgacaacaccctggtggccgtgaagagctgccgggagaccctgcccccagacctgaaggccaagttcctgcaggaggcccgcatcctgaagcagtacagccaccccaacatcgtgcggctgattggagtgtgcacccagaagcagcccatctacatcgtgatggagctggtgcagggcggggacttcctgaccttcctgaggacagagggcgcccggctgcgggtgaagaccctgctgcagatggtgggagatgctgctgctggcatggagtacctggagagcaagtgctgcatccaccgggacctggccgccaggaactgcctggtgacagagaagaatgtgctgaagatcagtgactttggcatgagccgggaggaggctgatggagtgtatgctgccagcggcggcctgcggcaggtgcctgtgaagtggacagcccctgaggccctgaactacggccgctacagcagcgagagtgatgtgtggagctttggcatcctgctgtgggagaccttcagcctgggcgccagcccctaccccaacctgagcaaccagcagacccgggagtttgtggagaagggcggccgcctgccctgcccagagctgtgcccagatgctgtgttccggctgatggagcagtgctgggcctatgagcccggccagaggcccagcttcagcaccatctaccaggagctgcagagcatcaggaagaggcacaggtag

SEQ ID NO: 19672 - DNA, 2046 bp, synthetic construct
  misc_feature 1..2046: note = Description of Artificial Sequence: Synthetic coding sequence
  source 1..2046: mol_type = other DNA
atgggcttcagcagcgagctgtgcagcccccagggccatggagtgctgcagcagatgcaggaggccgagctgcggctgctggagggcatgaggaagtggatggcccagagggtgaagagtgaccgggagtatgccggcctgctgcaccacatgagcctgcaggacagcggcggccagagccgggccatcagcccagacagccccatcagccagacccacagccaggacatcgagaagctgaagagccagtaccgggccctggcccgggacagcgcccaggccaagaggaagtaccaggaggccagcaaggacaaggaccgggacaaggccaaggacaagtatgtgcgcagcctgtggaagctgtttgcccaccacaaccgctacgtgctgggcgtgcgggccgcccagctgcaccaccagcaccaccaccagctgctgctgcccggcctgctgcggagcctgcaggacctgcacgaggagatggcctgcatcctgaaggagatcctgcaggagtacctggagatcagcagcctggtgcaggatgaggtggtggccatccaccgggagatggctgctgctgctgcccgcatccagcctgaggccgagtaccagggcttcctgcggcagtatggcagcgccccagatgtgcccccctgtgtgacctttgatgagagcctgctggaggagggggagcccctggagcctggagagctgcagctgaatgagctgactgtggagagcgtgcagcacaccctgacctctgtgacagatgagctggccgtggccacagagatggtgttccggcggcaggagatggtgacccagctgcagcaggagctgagaaatgaggaggagaacacccacccccgggagcgggtgcagctgctgggcaagaggcaggtgctgcaggaggccctgcagggcctgcaggtggccctgtgcagccaggccaagctgcaggcccagcaggagctgctgcagaccaagctggagcacctgggccctggagagcccccacctgtgctgctgctgcaggatgacagacacagcaccagcagcagcgagcaggagcgggagggcggccgcacccccaccctggagatcctgaagagccacatcagcggcatcttccggcccaagttcagcaacctgtaccgcctggagggggagggcttccccagcatccccctgctgattgaccacctgctgagcacccagcagcccctgaccaagaagtctggagtggtgctgcacagagctgtgcccaaggacaagtgggtgctgaaccacgaggacctggtgctgggggagcagatcggccggggcaactttggagaggtgttttctggccgcctgcgggctgacaacaccctggtggccgtgaagagctgccgggagaccctgcccccagacctgaaggccaagttcctgcaggaggcccggagcagccccagcaccagctcctggagcctgtgccggggcagcagccccccagctggaggagacttcctgaccttcctgaggacagaaggagcccggctgcgggtgaagaccctgctgcagatggtgggagatgctgctgctggcatggagtacctggagagcaagtgctgcatccaccgggacctggccgccaggaactgcctggtgacagagaagaatgtgctgaagatcagtgactttggcatgagccgggaggaggctgatggagtgtatgctgccagcggcggcctgcggcaggtgcctgtgaagtggacagcccctgaggccctgaactacggccgctacagcagcgagagtgatgtgtggagctttggcatcctgctgtgggagaccttcagcctgggcgccagcccctaccccaacctgagcaaccagcagacccgggagtttgtggagaagggcggccgcctgccctgcccagagctgtgcccagatgctgtgttccggctgatggagcagtgctgggcctatgagcccggccagaggcccagcttcagcaccatctaccaggagctgcagagcatcaggaagaggcacaggtag

SEQ ID NO: 19673 - DNA, 2085 bp, synthetic construct
  misc_feature 1..2085: note = Description of Artificial Sequence: Synthetic coding sequence
  source 1..2085: mol_type = other DNA
atgggcttcagcagcgagctgtgcagcccccagggccatggagtgctgcagcagatgcaggaggccgagctgcggctgctggagggcatgaggaagtggatggcccagagggtgaagagtgaccgggagtatgccggcctgctgcaccacatgagcctgcaggacagcggcggccagagccgggccatcagcccagacagccccatcagccagacccacagccaggacatcgagaagctgaagagccagtaccgggccctggcccgggacagcgcccaggccaagaggaagtaccaggaggccagcaaggacaaggaccgggacaaggccaaggacaagtatgtgcgcagcctgtggaagctgtttgcccaccacaaccgctacgtgctgggcgtgcgggccgcccagctgcaccaccagcaccaccaccagctgctgctgcccggcctgctgcggagcctgcaggacctgcacgaggagatggcctgcatcctgaaggagatcctgcaggagtacctggagatcagcagcctggtgcaggatgaggtggtggccatccaccgggagatggctgctgctgctgcccgcatccagcctgaggccgagtaccagggcttcctgcggcagtatggcagcgccccagatgtgcccccctgtgtgacctttgatgagagcctgctggaggagggggagcccctggagcctggagagctgcagctgaatgagctgactgtggagagcgtgcagcacaccctgacctctgtgacagatgagctggccgtggccacagagatggtgttccggcggcaggagatggtgacccagctgcagcaggagctgagaaatgaggaggagaacacccacccccgggagcgggtgcagctgctgggcaagaggcaggtgctgcaggaggccctgcagggcctgcaggtggccctgtgcagccaggccaagctgcaggcccagcaggagctgctgcagaccaagctggagcacctgggccctggagagcccccacctgtgctgctgctgcaggatgacagacacagcaccagcagcagcgagcaggagcgggagggcggccgcacccccaccctggagatcctgaagagccacatcagcggcatcttccggcccaagttcagcaacctgtaccgcctggagggggagggcttccccagcatccccctgctgattgaccacctgctgagcacccagcagcccctgaccaagaagtctggagtggtgctgcacagagctgtgcccaaggacaagtgggtgctgaaccacgaggacctggtgctgggggagcagatcggccggggcaactttggagaggtgttttctggccgcctgcgggctgacaacaccctggtggccgtgaagagctgccgggagaccctgcccccagacctgaaggccaagttcctgcaggaggcccgcatcctgaagcagtacagccaccccaacatcgtgcggctgattggagtgtgcacccagaagcagcccatctacatcgtgatggagctggtgcagggcggggacttcctgaccttcctgaggacagagggcgcccggctgcgggtgaagaccctgctgcagatggtgggagatgctgctgctggcatggagtacctggagagcaagtgctgcatccaccgggacctggccgccaggaactgcctggtgacagagaagaatgtgctgaagatcagtgactttggcatgagccgggaggaggctgatggagtgtatgctgccagcggcggcctgcggcaggtgcctgtgaagtggacagcccctgaggccctgaactacggccgctacagcagcgagagtgatgtgtggagctttggcatcctgctgtgggagaccttcagcctgggcgccagcccctaccccaacctgagcaaccagcagacccgggagtttgtggagaagggcggccgcctgccctgcccagagctgtgcccagatgctgtgttccggctgatggagcagtgctgggcctatgagcccggccagaggcccagcttcagcaccatctaccaggagctgcagagcatcaggaagaggcacaggtag

SEQ ID NO: 19674 - DNA, 129 bp, synthetic construct
  misc_feature 1..129: note = Description of Artificial Sequence: Synthetic coding sequence
  source 1..129: mol_type = other DNA
atgggcttcagcagcgagctgtgcagcccccagggccatggagtgctgcagcagatgcaggaggccgagctgcggctgctggagggcatgaggaagtggatggcccagagggtgaagagtgacagatag

SEQ ID NO: 19675 - DNA, 348 bp, synthetic construct
  misc_feature 1..348: note = Description of Artificial Sequence: Synthetic coding sequence
  source 1..348: mol_type = other DNA
atgggcttcagcagcgagctgtgcagcccccagggccatggagtgctgcagcagatgcaggaggccgagctgcggctgctggagggcatgaggaagtggatggcccagagggtgaagagtgaccgggagtatgccggcctgctgcaccacatgagcctgcaggacagcggcggccagagccgggccatcagcccagacagccccatcagccagagctgggccgagatcaccagccagacagagggcctgagccggctgctgcggcagcacgccgaggacctgaacagcggccccctgagcaagctgagcctgctgatccgggagcggcagcagctgaggaagacctag

SEQ ID NO: 19676 - DNA, 2259 bp, synthetic construct
  misc_feature 1..2259: note = Description of Artificial Sequence: Synthetic coding sequence
  source 1..2259: mol_type = other DNA
atgggcttcagcagcgagctgtgcagcccccagggccatggagtgctgcagcagatgcaggaggccgagctgcggctgctggagggcatgaggaagtggatggcccagagggtgaagagtgaccgggagtatgccggcctgctgcaccacatgagcctgcaggacagcggcggccagagccgggccatcagcccagacagccccatcagccagagctgggccgagatcaccagccagacagagggcctgagccggctgctgcggcagcacgccgaggacctgaacagcggccccctgagcaagctgagcctgctgatccgggagcggcagcagctgaggaagacctacagcgagcagtggcagcagctgcagcaggagctgaccaagacccacagccaggacatcgagaagctgaagagccagtaccgggccctggcccgggacagcgcccaggccaagaggaagtaccaggaggccagcaaggacaaggaccgggacaaggccaaggacaagtatgtgcgcagcctgtggaagctgtttgcccaccacaaccgctacgtgctgggcgtgcgggccgcccagctgcaccaccagcaccaccaccagctgctgctgcccggcctgctgcggagcctgcaggacctgcacgaggagatggcctgcatcctgaaggagatcctgcaggagtacctggagatcagcagcctggtgcaggatgaggtggtggccatccaccgggagatggctgctgctgctgcccgcatccagcctgaggccgagtaccagggcttcctgcggcagtatggcagcgccccagatgtgcccccctgtgtgacctttgatgagagcctgctggaggagggggagcccctggagcctggagagctgcagctgaatgagctgactgtggagagcgtgcagcacaccctgacctctgtgacagatgagctggccgtggccacagagatggtgttccggcggcaggagatggtgacccagctgcagcaggagctgagaaatgaggaggagaacacccacccccgggagcgggtgcagctgctgggcaagaggcaggtgctgcaggaggccctgcagggcctgcaggtggccctgtgcagccaggccaagctgcaggcccagcaggagctgctgcagaccaagctggagcacctgggccctggagagcccccacctgtgctgctgctgcaggatgacagacacagcaccagcagcagcgagcaggagcgggagggcggccgcacccccaccctggagatcctgaagagccacatcagcggcatcttccggcccaagttcagcaacctgtaccgcctggagggggagggcttccccagcatccccctgctgattgaccacctgctgagcacccagcagcccctgaccaagaagtctggagtggtgctgcacagagctgtgcccaaggacaagtgggtgctgaaccacgaggacctggtgctgggggagcagatcggccggggcaactttggagaggtgttttctggccgcctgcgggctgacaacaccctggtggccgtgaagagctgccgggagaccctgcccccagacctgaaggccaagttcctgcaggaggcccgcatcctgaagcagtacagccaccccaacatcgtgcggctgattggagtgtgcacccagaagcagcccatctacatcgtgatggagctggtgcagggcggggacttcctgaccttcctgaggacagagggcgcccggctgcgggtgaagaccctgctgcagatggtgggagatgctgctgctggcatggagtacctggagagcaagtgctgcatccaccgggacctggccgccaggaactgcctggtgacagagaagaatgtgctgaagatcagtgactttggcatgagccgggaggaggctgatggagtgtatgctgccagcggcggcctgcggcaggtgcctgtgaagtggacagcccctgaggccctgaactacggccgctacagcagcgagagtgatgtgtggagctttggcatcctgctgtgggagaccttcagcctgggcgccagcccctaccccaacctgagcaaccagcagacccgggagtttgtggagaagggcggccgcctgccctgcccagagctgtgcccagatgctgtgttccggctgatggagcagtgctgggcctatgagcccggccagaggcccagcttcagcaccatctaccaggagctgcagagcatcaggaagaggcacaggtag

SEQ ID NO: 19677 - DNA, 2085 bp, synthetic construct; identical to SEQ ID NO: 19673
  misc_feature 1..2085: note = Description of Artificial Sequence: Synthetic coding sequence
  source 1..2085: mol_type = other DNA

SEQ ID NO: 19678 - DNA, 444 bp, synthetic construct
  misc_feature 1..444: note = Description of Artificial Sequence: Synthetic coding sequence
  source 1..444: mol_type = other DNA
atgggcttcagcagcgagctgtgcagcccccagggccatggagtgctgcagcagatgcaggaggccgagctgcggctgctggagggcatgaggaagtggatggcccagagggtgaagagtgaccgggagtatgccggcctgctgcaccacatgagcctgcaggacagcggcggccagagccgggccatcagcccagacagccccatcagccagagctgggccgagatcaccagccagacagagggcctgagccggctgctgcggcagcacgccgaggacctgaacagcggccccctgagcaagctgagcctgctgatccgggagcggcagcagctgaggaagacctacagcgagcagtggcagcagctgcagcaggagctgaccaagacccacagccaggacatcgagaagctgaagagccagtaccgggccctggccaggtag

SEQ ID NO: 19679 - DNA, 1638 bp, synthetic construct
  misc_feature 1..1638: note = Description of Artificial Sequence: Synthetic coding sequence
  source 1..1638: mol_type = other DNA
atgggcttcagcagcgagctgtgcagcccccagggccatggagtgctgcagcagatgcaggaggccgagctgcggctgctggagggcatgaggaagtggatggcccagagggtgaagagtgaccgggagtatgccggcctgctgcaccacatgagcctgcaggacagcggcggccagagccgggccatcagcccagacagccccatcagccagagctgggccgagatcaccagccagacagagggcctgagccggctgctgcggcagcacgccgaggacctgaacagcggccccctgagcaagctgagcctgctgatccgggagcggcagcagctgaggaagacctacagcgagcagtggcagcagctgcagcaggagctgaccaagacccacagccaggacatcgagaagctgaagagccagtaccgggccctggcccgggacagcgcccaggccaagaggaagtaccaggaggccagcaaggacaaggaccgggacaaggccaaggacaagtatgtgcgcagcctgtggaagctgtttgcccaccacaaccgctacgtgctgggcgtgcgggccgcccagctgcaccaccagcaccaccaccagctgctgctgcccggcctgctgcggagcctgcaggacctgcacgaggagatggcctgcatcctgaaggagatcctgcaggagtacctggagatcagcagcctggtgcaggatgaggtggtggccatccaccgggagatggctgctgctgctgcccgcatccagcctgaggccgagtaccagggcttcctgcggcagtatggcagcgccccagatgtgcccccctgtgtgacctttgatgagagcctgctggaggagggggagcccctggagcctggagagctgcagctgaatgagctgactgtggagagcgtgcagcacaccctgacctctgtgacagatgagctggccgtggccacagagatggtgttccggcggcaggagatggtgacccagctgcagcaggagctgagaaatgaggaggagaacacccacccccgggagcgggtgcagctgctgggcaagaggcaggtgctgcaggaggccctgcagggcctgcaggtggccctgtgcagccaggccaagctgcaggcccagcaggagctgctgcagaccaagctggagcacctgggccctggagagcccccacctgtgctgctgctgcaggatgacagacacagcaccagcagcagcgagcaggagcgggagggcggccgcacccccaccctggagatcctgaagagccacatcagcggcatcttccggcccaagttcagcctgcccccacccctgcagctgatccctgaggtgcagaagcccctgcacgagcagctgtggtaccacggggccatccccagggctgaggtggccgagctgctggtgcacagcggggacttcctggtgcgggagagccagggcaagcaggagtatgtgctgtctgtgctgtgggatggcctgcccaggcacttcatcatccaggcccacgcccccagcgagtggaggctgctgaccccaggccccctgccctgcaggacctgcacagactggaagggcaaggccttcctggccttcctgtgcagcagcaccacctactag

SEQ ID NO: 19680 - DNA, 366 bp, synthetic construct
  misc_feature 1..366: note = Description of Artificial Sequence: Synthetic coding sequence
  source 1..366: mol_type = other DNA
atgggcttcagcagcgagctgtgcagcccccagggccatggagtgctgcagcagatgcaggaggccgagctgcggctgctggagggcatgaggaagtggatggcccagagggtgaagagtgaccgggagtatgccggcctgctgcaccacatgagcctgcaggacagcggcggccagagccgggccatcagcccagacagccccatcagccaggtgggcctgtatggcaccctggtgggcgccggctgcatctgcctgctgctgcccctgctgggcgccctgtggggcagcggctggaggagcggccggcccatgctgggcagccactgtgcccccctgcctgccagccccatctgtgctgtgtag

SEQ ID NO: 19681 - DNA, 510 bp, synthetic construct
  misc_feature 1..510: note = Description of Artificial Sequence: Synthetic coding sequence
  source 1..510: mol_type = other DNA
atgggcttcagcagcgagctgtgcagcccccagggccatggagtgctgcagcagatgcaggaggccgagctgcggctgctggagggcatgaggaagtggatggcccagagggtgaagagtgaccgggagtatgccggcctgctgcaccacatgagcctgcaggacagcggcggccagagccgggccatcagcccagacagccccatcagccagagctgggccgagatcaccagccagacagagggcctgagccggctgctgcggcagcacgccgaggacctgaacagcggccccctgagcaagctgagcctgctgatccgggagcggcagcagctgaggaagacctacagcgagcagtggcagcagctgcagcaggagctgaccaagacccacagccaggacatcgagaagctgaagagccagtaccgggccctggcccgggacagcgcccaggccaagaggaagtaccaggaggccagcaaggacaaggaccgggacaaggccaagtag

SEQ ID NO: 19682 - DNA, 2283 bp, synthetic construct
  misc_feature 1..2283: note = Description of Artificial Sequence: Synthetic coding sequence
  source 1..2283: mol_type = other DNA
atgaagacctgggtgaagatcgtgtttggagtggccaccagcgctgtgctggccctgctggtgatgtgcatcgtgctgcggcccagccgggtgcacaacagcgaggagaacaccatgagggccctgaccctgaaggacatcctgaatggcaccttctcctacaagaccttcttccccaactggatcagcggccaggagtacctgcaccagagcgctgacaacaacatcgtgctgtacaacattgaaacaggccagagctacaccatcctgagcaacagaaccatgaagtctgtgaatgccagcaactacggcctgagcccagaccggcagtttgtgtacctggagagtgactacagcaagctgtggagatacagctacacagccacctactacatctatgacctgagcaatggagaatttgtgagaggaaatgagctgccccggcccatccagtacctgtgctggagccctgtgggcagcaagctggcctacgtgtaccagaacaacatctacctgaagcagaggcctggggacccccccttccagatcaccttcaacggccgggagaacaagatcttcaacggcatcccagactgggtgtatgaggaggagatgctggccaccaagtatgccctgtggtggagccccaacgggaagttcctggcctatgcagagttcaatgacacagacatccctgtgattgcctacagctactatggagatgagcagtaccccaggaccatcaacatcccctaccccaaggccggggccaagaaccctgtggtgcgcatcttcatcatcgacaccacctacccagcctacgtgggcccccaggaggtgcctgtgcctgccatgattgccagcagtgactactacttctcctggctgacctgggtgacagatgagcgggtgtgcctgcagtggctgaagagggtgcagaatgtgtctgtgctgagcatctgtgacttccgggaggactggcagacctgggactgccccaagacccaggagcacatcgaggagagcaggacaggctgggccggcggcttctttgtgtccacccctgtgttctcctatgatgccatctcctactacaagatcttcagtgacaaggatggctacaagcacatccactacatcaaggacacagtggagaatgccatccagatcaccagcggcaagtgggaggccatcaacatcttccgggtgacccaggacagcctcttctacagcagcaatgaatttgaggagtacccaggaagaagaaacatctaccgcatcagcatcggcagctacccacccagcaagaagtgtgtgacctgccacctgaggaaggagcgctgccagtactacacagccagcttcagtgactatgccaagtactatgccctggtgtgctacggccctggcatccccatcagcaccctgcatgatggccgcacagaccaggagatcaagatcctggaggagaacaaggagctggagaatgccctgaagaacatccagctgcccaaggaggagatcaagaagctggaggtggatgagatcaccctgtggtacaagatgatcctgcccccccagtttgacaggagcaagaagtaccccctgctgatccaggtgtatggaggcccctgcagccagagcgtgcgctctgtgtttgctgtgaactggatctcctacctggccagcaaggagggcatggtgattgccctggtggatggccggggcacagccttccagggcgacaagctgctgtatgctgtgtacaggaagctgggcgtgtatgaggtggaggaccagatcacagctgtgaggaagttcatcgagatgggcttcattgatgagaagagaattgccatctggggctggagctatggaggctacgtgagcagcctggccctggccagcggcaccggcctcttcaagtgtggcattgctgtggcccctgtgtcctcctgggagtactatgcctctgtgtacacagagcgcttcatgggcctgcccaccaaggatgacaacctggagcactacaagaacagcacagtgatggcccgggcagagtacttcagaaatgtggactacctgctgatccacggcacagcagatgacaacgtgcacttccagaacagcgcccagatcgccaaggccctggtgaatgcccaggtggacttccaggccatgtggtacagcgaccagaaccacggcctgagcggcctgagcaccaaccacctgtacacccacatgacccacttcctgaagcagtgcttcagcctgagtgactag

SEQ ID NO: 19683 - DNA, 2208 bp, synthetic construct
  misc_feature 1..2208: note = Description of Artificial Sequence: Synthetic coding sequence
  source 1..2208: mol_type = other DNA
atgaagacctgggtgaagatcgtgtttggagtggccaccagcgctgtgctggccctgctggtgatgtgcatcgtgctgcggcccagccgggtgcacaacagcgaggagaacaccatgagggccctgaccctgaaggacatcctgaatggcaccttctcctacaagaccttcttccccaactggatcagcggccaggagtacctgcaccagagcgctgacaacaacatcgtgctgtacaacattgaaacaggccagagctacaccatcctgagcaacagaaccatgctgtggagatacagctacacagccacctactacatctatgacctgagcaatggagaatttgtgagaggaaatgagctgccccggcccatccagtacctgtgctggagccctgtgggcagcaagctggcctacgtgtaccagaacaacatctacctgaagcagaggcctggggacccccccttccagatcaccttcaacggccgggagaacaagatcttcaacggcatcccagactgggtgtatgaggaggagatgctggccaccaagtatgccctgtggtggagccccaacgggaagttcctggcctatgcagagttcaatgacacagacatccctgtgattgcctacagctactatggagatgagcagtaccccaggaccatcaacatcccctaccccaaggccggggccaagaaccctgtggtgcgcatcttcatcatcgacaccacctacccagcctacgtgggcccccaggaggtgcctgtgcctgccatgattgccagcagtgactactacttctcctggctgacctgggtgacagatgagcgggtgtgcctgcagtggctgaagagggtgcagaatgtgtctgtgctgagcatctgtgacttccgggaggactggcagacctgggactgccccaagacccaggagcacatcgaggagagcaggacaggctgggccggcggcttctttgtgtccacccctgtgttctcctatgatgccatctcctactacaagatcttcagtgacaaggatggctacaagcacatccactacatcaaggacacagtggagaatgccatccagatcaccagcggcaagtgggaggccatcaacatcttccgggtgacccaggacagcctcttctacagcagcaatgaatttgaggagtacccaggaagaagaaacatctaccgcatcagcatcggcagctacccacccagcaagaagtgtgtgacctgccacctgaggaaggagcgctgccagtactacacagccagcttcagtgactatgccaagtactatgccctggtgtgctacggccctggcatccccatcagcaccctgcatgatggccgcacagaccaggagatcaagatcctggaggagaacaaggagctggagaatgccctgaagaacatccagctgcccaaggaggagatcaagaagctggaggtggatgagatcaccctgtggtacaagatgatcctgcccccccagtttgacaggagcaagaagtaccccctgctgatccaggtgtatggaggcccctgcagccagagcgtgcgctctgtgtttgctgtgaactggatctcctacctggccagcaaggagggcatggtgattgccctggtggatggccggggcacagccttccagggcgacaagctgctgtatgctgtgtacaggaagctgggcgtgtatgaggtggaggaccagatcacagctgtgaggaagttcatcgagatgggcttcattgatgagaagagaattgccatctggggctggagctatggaggctacgtgagcagcctggccctggccagcggcaccggcctcttcaagtgtggcattgctgtggcccctgtgtcctcctgggagtactatgcctctgtgtacacagagcgcttcatgggcctgcccaccaaggatgacaacctggagcactacaagaacagcacagtgatggcccgggcagagtacttcagaaatgtggactacctgctgattcatggaacagcagatgacaacgtgcacttccagaacagcgcccagatcgccaaggccctggtgaatgcccaggtggacttccaggccatgtggtacagcgaccagaaccacggcctgagcggcctgagcaccaaccacctgtacacccacatgacccacttcctgaagcagtgcttcagcctgagtgactag

SEQ ID NO: 19684 - DNA, 468 bp, synthetic construct
  misc_feature 1..468: note = Description of Artificial Sequence: Synthetic coding sequence
  source 1..468: mol_type = other DNA
atggccgagggggagatcaccaccttcaccgccctgacagagaagttcaacctgcccccaggcaactacaagaagcccaagctgctgtactgcagcaatggaggccacttcctgcgcatcctgcctgatggcaccgtggatggcacccgggacagaagtgaccagcacatccagctgcagctgtctgctgagagcgtgggggaggtgtacatcaagagcacagagaccggccagtacctggccatggacacagatggcctgctgtatggcagccagaccccaaatgaagaatgtctcttcctggagcggctggaggagaaccactacaacacctacatcagcaagaagcacgccgagaagaactggtttgtgggcctgaagaagaatggcagctgcaagaggggccccaggacccactacggccagaaggccatcctcttcctgcccctgcctgtgtccagtgactag

SEQ ID NO: 19685 - DNA, 468 bp, synthetic construct; identical to SEQ ID NO: 19684
  misc_feature 1..468: note = Description of Artificial Sequence: Synthetic coding sequence
  source 1..468: mol_type = other DNA

SEQ ID NO: 19686 - DNA, 468 bp, synthetic construct; identical to SEQ ID NO: 19684
  misc_feature 1..468: note = Description of Artificial Sequence: Synthetic coding sequence
  source 1..468: mol_type = other DNA

SEQ ID NO: 19687 - DNA, 177 bp, synthetic construct
  misc_feature 1..177: note = Description of Artificial Sequence: Synthetic coding sequence
  source 1..177: mol_type = other DNA
atggccgagggggagatcaccaccttcaccgccctgacagagaagttcaacctgcccccaggcaactacaagaagcccaagctgctgtactgcagcaatggaggccacttcctgcgcatcctgcctgatggcaccgtggatggcacccgggacagaagtgaccagcacatccagtag

SEQ ID NO: 19688 - DNA, 126 bp, synthetic construct
  misc_feature 1..126: note = Description of Artificial Sequence: Synthetic coding sequence
  source 1..126: mol_type = other DNA
atggccgagggggagatcaccaccttcaccgccctgacagagaagttcaacctgcccccaggcaactacaagaagcccaagctgctgtactgcagcaatggaggccacttcctgcgcatcctgtag

SEQ ID NO: 19689 - DNA, 468 bp, synthetic construct; identical to SEQ ID NO: 19684
  misc_feature 1..468: note = Description of Artificial Sequence: Synthetic coding sequence
  source 1..468: mol_type = other DNA

SEQ ID NO: 19690 - DNA, 468 bp, synthetic construct; identical to SEQ ID NO: 19684
  misc_feature 1..468: note = Description of Artificial Sequence: Synthetic coding sequence
  source 1..468: mol_type = other DNA

SEQ ID NO: 19691 - DNA, 183 bp, synthetic construct
  misc_feature 1..183: note = Description of Artificial Sequence: Synthetic coding sequence
  source 1..183: mol_type = other DNA
atggccgagggggagatcaccaccttcaccgccctgacagagaagttcaacctgcccccaggcaactacaagaagcccaagctgctgtactgcagcaatggaggccacttcctgcgcatcctgcctgatggcaccgtggatggcacccgggacagaagtgaccagcacacagacaccaagtag

SEQ ID NO: 19692 - DNA, 627 bp, synthetic construct
  misc_feature 1..627: note = Description of Artificial Sequence: Synthetic coding sequence
  source 1..627: mol_type = other DNA
atgtggaagtggatcctgacccactgtgccagcgccttcccccacctgcccggctgctgctgctgctgcttcctgctgctcttcctggtgtcctctgtgcctgtgacctgccaggccctgggccaggacatggtgtccccagaggccaccaacagcagcagcagcagcttcagcagccccagcagcgctggccgccacgtgcgcagctacaaccacctgcagggagatgtgcgctggaggaagctgttctccttcaccaagtacttcctgaagattgagaagaatggcaaggtgtctggcaccaagaaggagaactgcccctacagcatcctggagatcacctctgtggagattggagtggtggccgtgaaggccatcaacagcaactactacctggccatgaacaagaagggcaagctgtatggcagcaaggagttcaacaatgactgcaagctgaaggagcgcatcgaggagaatggctacaacacctacgccagcttcaactggcagcacaacggccggcagatgtatgtggccctgaatggaaaaggagccccccggcggggccagaagaccaggaggaagaacaccagcgcccacttcctgcccatggtggtgcacagctag

SEQ ID NO: 19693 - DNA, 201 bp, synthetic construct
  misc_feature 1..201: note = Description of Artificial Sequence: Synthetic coding sequence
  source 1..201: mol_type = other DNA
atgtggaagtggatcctgacccactgtgccagcgccttcccccacctgcccggctgctgctgctgctgcttcctgctgctcttcctggtgtcctctgtgcctgtgacctgccaggccctgggccaggacatggtgtccccagaggccaccaacagcagcagcagcagcttcagcagccccagcagcgctggccgccactag

SEQ ID NO: 19694 - DNA, 867 bp, synthetic construct
  misc_feature 1..867: note = Description of Artificial Sequence: Synthetic coding sequence
  source 1..867: mol_type = other DNA
ctggtgggcgtgggcggcggagatgtggaggatgtgacccccaggcctgggggctgccagatcagcggccgcggggcccggggctgcaatggcatccctggagctgctgcctgggaggccgccctgcccaggagaagaccccggcggcaccccagcgtgaaccccaggagcagagctgctggcagccccaggacccggggccgcaggacagaggagcggcccagcggcagccggctgggggaccggggccggggccgggccctgcccggcggccgcctgggcggccggggccggggccgggcccctgagcgggtgggcggccggggccggggccggggcacagctgcccccagggctgccccagctgcccggggcagccggcccggccctgctggcaccatggccgccggcagcatcaccaccctgcctgccctgcctgaagatggcggcagcggggccttccccccaggccacttcaaggaccccaagaggctgtactgcaagaatggaggcttcttcctgcgcatccacccagatggccgggtggatggagtgcgggagaagagtgacccccacatcaagctgcagctgcaggccgaggagcggggcgtggtgtccatcaagggcgtgtgtgccaaccgctacctggccatgaaggaggatggccgcctgctggccagcaaatgtgtgacagatgagtgcttcttctttgagcggctggagagcaacaactacaacacctaccgcagcaggaagtacacctcctggtacgtggccctgaagaggacaggccagtacaagctgggcagcaagacaggccctggccagaaggccatcctcttcctgcccatgtctgccaagagctag

SEQ ID NO: 19695 - DNA, 585 bp, synthetic construct
  misc_feature 1..585: note = Description of Artificial Sequence: Synthetic coding sequence
  source 1..585: mol_type = other DNA
atgcacaagtggatcctgacctggatcctgcccaccctgctgtaccgcagctgcttccacatcatctgcctggtgggcaccatcagcctggcctgcaatgacatgaccccagagcagatggccaccaacgtgaactgcagcagccctgagcggcacaccaggagctatgactacatggagggcggggacatccgggtgagaagactcttctgcaggacccagtggtacctgagaattgacaagaggggcaaggtgaagggcacccaggagatgaagaacaactacaacatcatggagatcagaacagtggccgtgggcatcgtggccatcaagggcgtggagagcgagttctacctggccatgaacaaggagggcaagctgtatgccaagaaggagtgcaatgaagactgcaacttcaaggagctgatcctggagaaccactacaacacctacgccagcgccaagtggacccacaatggaggagagatgtttgtggccctgaaccagaagggcatccctgtgcggggcaagaagaccaagaaggagcagaagacagcccacttcctgcccatggccatcacctag

SEQ ID NO: 19696 - DNA, 585 bp, synthetic construct; identical to SEQ ID NO: 19695
  misc_feature 1..585: note = Description of Artificial Sequence: Synthetic coding sequence
  source 1..585: mol_type = other DNA

SEQ ID NO: 19697 - DNA, 705 bp, synthetic construct
  misc_feature 1..705: note = Description of Artificial Sequence: Synthetic coding sequence
  source 1..705: mol_type = other DNA
atgaagatctgcagcctgaccctgctgtccttcctgctgctggccgcccaggtgctgctggtggagggcaagaagaaggtgaagaatggcctgcacagcaaggtggtgtctgagcagaaggacaccctgggcaacacccagatcaagcagaagagccggcccggcaacaagggcaagtttgtgaccaaggaccaggccaactgccgctgggccgccacagagcaggaggagggcatcagcctgaaggtggagtgcacccagctggaccacgagttcagctgtgtgtttgctggcaaccccaccagctgcctgaagctgaaggatgagcgggtgtactggaagcaggtggccaggaacctgcggagccagaaggacatctgccgctacagcaagacagctgtgaagaccagggtgtgcaggaaggacttccctgagagcagcctgaagctggtgagcagcaccctgtttggaaacaccaagcccaggaaggagaagacagagatgagcccccgggagcacatcaagggcaaggagaccacccccagcagcctggccgtgacccagaccatggccaccaaggccccagaatgtgtggaggaccctgacatggccaaccagaggaagacagccctggagttctgtggggagacctggagcagcctgtgcaccttcttcctgagcatcgtgcaggacaccagctgctag

SEQ ID NO: 19698 - DNA, 705 bp, synthetic construct; identical to SEQ ID NO: 19697
  misc_feature 1..705: note = Description of Artificial Sequence: Synthetic coding sequence
  source 1..705: mol_type = other DNA

SEQ ID NO: 19699 - DNA, 2421 bp, synthetic construct
  misc_feature 1..2421: note = Description of Artificial Sequence: Synthetic coding sequence
  source 1..2421: mol_type = other DNA
atgggcgccccagcctgtgccctggccctgtgtgtggccgtggccatcgtggccggggccagcagcgagagcctgggcacagagcagagggtggtgggccgggctgctgaggtgcccggccctgagcccggccagcaggagcagctggtgtttggaagtggagatgctgtggagctgagctgccccccacctgggggcggccccatgggccccaccgtgtgggtgaaggatggcaccggcctggtgcccagcgagcgggtgctggtgggcccccagaggctgcaggtgctgaatgccagccatgaggacagcggggcctacagctgccggcagaggctgacccagagggtgctgtgccacttctctgtgcgggtgacagatgcccccagcagtggagatgatgaagatggagaagatgaagctgaggacaccggggtggacaccggggccccctactggaccaggcctgagaggatggacaagaagctgctggccgtgcctgctgccaacacagtgcgcttccgctgcccagctgctggcaaccccacccccagcatctcctggctgaagaatggccgggagttccggggggagcacagaattggaggcatcaagctgcggcaccagcagtggagcctggtgatggagagcgtggtgcccagcgaccggggcaactacacctgtgtggtggagaacaagtttggcagcatccggcagacctacaccctggatgtgctggagaggagcccccaccggcccatcctgcaggccggcctgcctgccaaccagacagctgtgctgggcagtgatgtggagttccactgcaaggtgtacagtgatgcccagccccacatccagtggctgaagcacgtggaggtgaatggcagcaaggtgggcccagatggcaccccctacgtgacagtgctgaagacagctggggccaacaccacagacaaggagctggaggtgctgagcctgcacaacgtgacctttgaagatgctggggagtacacctgcctggccggcaacagcatcggcttcagccaccacagcgcctggctggtggtgctgcctgctgaggaggagctggtggaggctgatgaagctggctctgtgtatgccggcatcctgtcctatggagtgggcttcttcctgttcatcctggtggtggccgctgtgaccctgtgccgcctgcggagcccccccaagaagggcctgggcagccccaccgtgcacaagatcagccgcttccccctgaagaggcaggtgtccctggagagcaatgcctccatgagcagcaacacccccctggtgcgcatcgcccggctgagcagtggagagggccccaccctggccaacgtgtctgagctggagctgcctgctgaccccaagtgggagctgagccgggcccggctgaccctgggcaagcccctgggggagggctgcttcggccaggtggtgatggccgaggccatcggcatcgacaaggacagagctgccaagcctgtgacagtggccgtgaagatgctgaaggatgatgccacagacaaggacctgagtgacctggtgtctgagatggagatgatgaagatgattggcaagcacaagaacatcatcaacctgctgggcgcctgcacccagggcggccccctgtatgtgctggtggagtatgctgccaagggcaacctgcgggagttcctgcgggcccggcggcccccaggcctggactacagctttgacacctgcaagcccccagaggagcagctgaccttcaaggacctggtgtcctgtgcctaccaggtggcccggggcatggagtacctggccagccagaagtgcatccaccgggacctggccgccagaaatgtgctggtgacagaagataatgtgatgaagattgctgactttggcctggccagagatgtgcacaacctggactactacaagaagaccaccaacggccgcctgcctgtgaagtggatggcccctgaggccctgtttgacagagtgtacacccaccagagtgatgtgtggagctttggagtgctgctgtgggagatcttcaccctgggcggcagcccctacccaggcatccctgtggaggagctgttcaagctgctgaaggagggccacaggatggacaagccagccaactgcacccatgacctgtacatgatcatgagggagtgctggcatgctgcccccagccagaggcccaccttcaagcagctggtggaggacctggacagagtgctgactgtgaccagcacagatgagtacctggacctgagcgccccctttgagcagtacagccctgggggccaggacacccccagcagcagcagcagtggagatgattctgtgtttgcccatgacctgctgcccccagccccacccagcagcggcggcagcaggacatag

SEQ ID NO: 19700 - DNA, 513 bp, synthetic construct
  misc_feature 1..513: note = Description of Artificial Sequence: Synthetic coding sequence
  source 1..513: mol_type = other DNA
gagtacctggacctgagcgccccctttgagcagtacagccctgggggccaggacacccccagcagcagcagcagtggagatgattctgtgtttgcccatgacctgctggccaccggcccccagcagtgtgagggcagcctggccgcccaccctgctgctggggcccagcccctgcccggcatgaggctgtctgcagatggagaaacagccacccagagctttggcctgtgtgtgtgtgtgtgtgtgtgtgtgtgctgcaccagcgcctgtgcctgtgtgcgggcccacctggccagccgctgccggggcaccctgggcgtgcctgctgctgtgcagaggagcccagactggtgctgcagcacagagggccccctcttctggggagaccctgtgcagaatgtgtctggccccacccgctgggaccccggccagggcgccggccctgacatgaggcccctgcccctgcaccacggcaccagccagggcctgggccccagccacacccagagctag

SEQ ID NO: 19701 - DNA, 2427 bp, synthetic construct
  misc_feature 1..2427: note = Description of Artificial Sequence: Synthetic coding sequence
  source 1..2427: mol_type = other DNA
atgggcgccccagcctgtgccctggccctgtgtgtggccgtggccatcgtggccggggccagcagcgagagcctgggcacagagcagagggtggtgggccgggctgctgaggtgcccggccctgagcccggccagcaggagcagctggtgtttggaagtggagatgctgtggagctgagctgccccccacctgggggcggccccatgggccccaccgtgtgggtgaaggatggcaccggcctggtgcccagcgagcgggtgctggtgggcccccagaggctgcaggtgctgaatgccagccatgaggacagcggggcctacagctgccggcagaggctgacccagagggtgctgtgccacttctctgtgcgggtgacagatgcccccagcagtggagatgatgaagatggagaagatgaagctgaggacaccggggtggacaccggggccccctactggaccaggcctgagaggatggacaagaagctgctggccgtgcctgctgccaacacagtgcgcttccgctgcccagctgctggcaaccccacccccagcatctcctggctgaagaatggccgggagttccggggggagcacagaattggaggcatcaagctgcggcaccagcagtggagcctggtgatggagagcgtggtgcccagcgaccggggcaactacacctgtgtggtggagaacaagtttggcagcatccggcagacctacaccctggatgtgctggagaggagcccccaccggcccatcctgcaggccggcctgcctgccaaccagacagctgtgctgggcagtgatgtggagttccactgcaaggtgtacagtgatgcccagccccacatccagtggctgaagcacgtggaggtgaatggcagcaaggtgggcccagatggcaccccctacgtgacagtgctgaagtcctggatcagcgagagcgtggaggctgatgtgcggctgcggctggccaacgtgtctgaaagagatggaggagagtacctgtgccgggccaccaacttcatcggcgtggccgagaaggccttctggctgtctgtgcacggccccagggctgctgaggaggagctggtggaggctgatgaagctggctctgtgtatgccggcatcctgtcctatggagtgggcttcttcctgttcatcctggtggtggccgctgtgaccctgtgccgcctgcggagcccccccaagaagggcctgggcagccccaccgtgcacaagatcagccgcttccccctgaagaggcaggtgtccctggagagcaatgcctccatgagcagcaacacccccctggtgcgcatcgcccggctgagcagtggagagggccccaccctggccaacgtgtctgagctggagctgcctgctgaccccaagtgggagctgagccgggcccggctgaccctgggcaagcccctgggggagggctgcttcggccaggtggtgatggccgaggccatcggcatcgacaaggacagagctgccaagcctgtgacagtggccgtgaagatgctgaaggatgatgccacagacaaggacctgagtgacctggtgtctgagatggagatgatgaagatgattggcaagcacaagaacatcatcaacctgctgggcgcctgcacccagggcggccccctgtatgtgctggtggagtatgctgccaagggcaacctgcgggagttcctgcgggcccggcggcccccaggcctggactacagctttgacacctgcaagcccccagaggagcagctgaccttcaaggacctggtgtcctgtgcctaccaggtggcccggggcatggagtacctggccagccagaagtgcatccaccgggacctggccgccagaaatgtgctggtgacagaagataatgtgatgaagattgctgactttggcctggccagagatgtgcacaacctggactactacaagaagaccaccaacggccgcctgcctgtgaagtggatggcccctgaggccctgtttgacagagtgtacacccaccagagtgatgtgtggagctttggagtgctgctgtgggagatcttcaccctgggcggcagcccctacccaggcatccctgtggaggagctgttcaagctgctgaaggagggccacaggatggacaagccagccaactgcacccatgacctgtacatgatcatgagggagtgctggcatgctgcccccagccagaggcccaccttcaagcagctggtggaggacctggacagagtgctgactgtgaccagcacagatgagtacctggacctgagcgccccctttgagcagtacagccctgggggccaggacacccccagcagcagcagcagtggagatgattctgtgtttgcccatgacctgctgcccccagccccacccagcagcggcggcagcaggacatag

SEQ ID NO: 19702 - DNA, 2085 bp, synthetic construct
  misc_feature 1..2085: note = Description of Artificial Sequence: Synthetic coding sequence
  source 1..2085: mol_type = other DNA
atgggcgccccagcctgtgccctggccctgtgtgtggccgtggccatcgtggccggggccagcagcgagagcctgggcacagagcagagggtggtgggccgggctgctgaggtgcccggccctgagcccggccagcaggagcagctggtgtttggaagtggagatgctgtggagctgagctgccccccacctgggggcggccccatgggccccaccgtgtgggtgaaggatggcaccggcctggtgcccagcgagcgggtgctggtgggcccccagaggctgcaggtgctgaatgccagccatgaggacagcggggcctacagctgccggcagaggctgacccagagggtgctgtgccacttctctgtgcgggtgacagatgcccccagcagtggagatgatgaagatggagaagatgaagctgaggacaccggggtggacaccggggccccctactggaccaggcctgagaggatggacaagaagctgctggccgtgcctgctgccaacacagtgcgcttccgctgcccagctgctggcaaccccacccccagcatctcctggctgaagaatggccgggagttccggggggagcacagaattggaggcatcaagctgcggcaccagcagtggagcctggtgatggagagcgtggtgcccagcgaccggggcaactacacctgtgtggtggagaacaagtttggcagcatccggcagacctacaccctggatgtgctggagaggagcccccaccggcccatcctgcaggccggcctgcctgccaaccagacagctgtgctgggcagtgatgtggagttccactgcaaggtgtacagtgatgcccagccccacatccagtggctgaagcacgtggaggtgaatggcagcaaggtgggcccagatggcaccccctacgtgacagtgctgaaggtgtccctggagagcaatgcctccatgagcagcaacacccccctggtgcgcatcgcccggctgagcagtggagagggccccaccctggccaacgtgtctgagctggagctgcctgctgaccccaagtgggagctgagccgggcccggctgaccctgggcaagcccctgggggagggctgcttcggccaggtggtgatggccgaggccatcggcatcgacaaggacagagctgccaagcctgtgacagtggccgtgaagatgctgaaggatgatgccacagacaaggacctgagtgacctggtgtctgagatggagatgatgaagatgattggcaagcacaagaacatcatcaacctgctgggcgcctgcacccagggcggccccctgtatgtgctggtggagtatgctgccaagggcaacctgcgggagttcctgcgggcccggcggcccccaggcctggactacagctttgacacctgcaagcccccagaggagcagctgaccttcaaggacctggtgtcctgtgcctaccaggtggcccggggcatggagtacctggccagccagaagtgcatccaccgggacctggccgccagaaatgtgctggtgacagaagataatgtgatgaagattgctgactttggcctggccagagatgtgcacaacctggactactacaagaagaccaccaacggccgcctgcctgtgaagtggatggcccctgaggccctgtttgacagagtgtacacccaccagagtgatgtgtggagctttggagtgctgctgtgggagatcttcaccctgggcggcagcccctacccaggcatccctgtggaggagctgttcaagctgctgaaggagggccacaggatggacaagccagccaactgcacccatgacctgtacatgatcatgagggagtgctggcatgctgcccccagccagaggcccaccttcaagcagctggtggaggacctggacagagtgctgactgtgaccagcacagatgagtacctggacctgagcgccccctttgagcagtacagccctgggggccaggacacccccagcagcagcagcagtggagatgattctgtgtttgcccatgacctgctgcccccagccccacccagcagcggcggcagcaggacatag

SEQ ID NO: 19703 - DNA, 2421 bp, synthetic construct; identical to SEQ ID NO: 19699
  misc_feature 1..2421: note = Description of Artificial Sequence: Synthetic coding sequence
  source 1..2421: mol_type = other DNA

SEQ ID NO: 19704 - DNA, 2379 bp, synthetic construct
  misc_feature 1..2379: note = Description of Artificial Sequence: Synthetic coding sequence
  source 1..2379: mol_type = other DNA
atgggcgccccagcctgtgccctggccctgtgtgtggccgtggccatcgtggccggggccagcagcgagagcctgggcacagagcagagggtggtgggccgggctgctgaggtgcccggccctgagcccggccagcaggagcagctggtgtttggaagtggagatgctgtggagctgagctgccccccacctgggggcggccccatgggccccaccgtgtgggtgaaggatggcaccggcctggtgcccagcgagcgggtgctggtgggcccccagaggctgcaggtgctgaatgccagccatgaggacagcggggcctacagctgccggcagaggctgacccagagggtgctgtgccacttctctgtgcgggtgacagatgcccccagcagtggagatgatgaagatggagaagatgaagctgaggacaccggggtggacaccggggccccctactggaccaggcctgagaggatggacaagaagctgctggccgtgcctgctgccaacacagtgcgcttccgctgcccagctgctggcaaccccacccccagcatctcctggctgaagaatggccgggagttccggggggagcacagaattggaggcatcaagctgcggcaccagcagtggagcctggtgatggagagcgtggtgcccagcgaccggggcaactacacctgtgtggtggagaacaagtttggcagcatccggcagacctacaccctggatgtgctggagaggagcccccaccggcccatcctgcaggccggcctgcctgccaaccagacagctgtgctgggcagtgatgtggagttccactgcaaggtgtacagtgatgcccagccccacatccagtggctgaagcacgtggaggtgaatggcagcaaggtgggcccagatggcaccccctacgtgacagtgctgaagacagctggggccaacaccacagacaaggagctggaggtgctgagcctgcacaacgtgacctttgaagatgctggggagtacacctgcctggccggcaacagcatcggcttcagccaccacagcgcctggctggtggtgctgcctgctgaggaggagctggtggaggctgatgaagctggctctgtgtatgccggcatcctgtcctatggagtgggcttcttcctgttcatcctggtggtggccgctgtgaccctgtgccgcctgcggagcccccccaagaagggcctgggcagccccaccgtgcacaagatcagccgcttccccctgaagaggcagcaggtgtccctggagagcaatgcctccatgagcagcaacacccccctggtgagaattgcccggctgagcagcggggagggccccaccctggccaacgtgtctgagctggagctgcctgctgaccccaagtgggagctgagccgggcccggctgaccctgggcaagcccctgggggagggctgcttcggccaggtggtgatggccgaggccatcggcatcgacaaggaccgggccgccaagcctgtgacagtggccgtgaagatgctgaaggatgatgccacagacaaggacctgagtgacctggtgtctgagatggagatgatgaagatgattggcaagcacaagaacatcatcaacctgctgggcgcctgcacccagggcggccccctgtatgtgctggtggagtatgctgccaagggcaacctgcgggagttcctgcgggcccggcggcccccaggcctggactacagctttgacacctgcaagcccccagaggagcagctgaccttcaaggacctggtgtcctgtgcctaccaggtggcccggggcatggagtacctggccagccagaagtgcatccaccgggacctggccgccagaaatgtgctggtgacagaggacaacgtgatgaagattgctgactttggcctggccagagatgtgcacaacctggactactacaagaagaccaccaacctggtgctgtggggccctgccctgggggacctgcatgctgggggcctgcctgtgcccaggcacccctgtggcggggccctgcaggccgctgagggcggccccccccacggccaggcccggcagctgcacaccaggcctgtgcatgaccatgctggggtgctggcctgccgggccctgcctgaggcccacctgcaggccgccggcggcggccctggcccctgcccctacagagatgtgcacagaagagtgcccggccctgtgggcgccttccgggctgtgctgcccggctggccaggccacccccagctgcagctgctgcggggccgcctgcgggtgtgccccaggcctgctgcccctggccccacccagcagtggggcctggctgatgtgaagggccactggagccccaccatgtag

SEQ ID NO: 19705 - DNA, 2409 bp, synthetic construct
  misc_feature 1..2409: note = Description of Artificial Sequence: Synthetic coding sequence
  source 1..2409: mol_type = other DNA
atgaggctgctgctggccctgctgggcgtgctgctgtctgtgcccggcccccctgtgctgagcctggaggccagcgaggaggtggagctggagccctgcctggcccccagcctggagcagcaggagcaggagctgactgtggccctgggccagcctgtgcggctgtgctgcggccgggcagagcggggcggccactggtacaaggagggcagccggctggccccagctggccgggtgcggggctggaggggccgcctggagatcgccagcttcctgcctgaagatgctggccgctacctgtgcctggcccggggctccatgattgtgctgcagaacctgaccctcatcactggagacagcctgaccagcagcaatgatgatgaggaccccaagagccaccgggaccccagcaacagacacagctacccccagcaggccccctactggacccacccccagaggatggagaagaagctgcatgctgtgcctgctggcaacacagtgaagttccgctgcccagctgctggcaaccccacccccaccatccgctggctgaaggatggccaggccttccacggggagaacagaattggaggcatccggctgcggcaccagcactggagcctggtgatggagagcgtggtgcccagcgaccggggcacctacacctgcctggtggagaatgctgtgggcagcatccgctacaactacctgctggatgtgctggagaggagcccccaccggcccatcctgcaggccggcctgcctgccaacaccacagctgtggtgggcagtgatgtggagctgctgtgcaaggtgtacagtgatgcccagccccacatccagtggctgaagcacatcgtcatcaatggcagcagctttggagcagatggcttcccctacgtgcaggtgctgaagacagctgacatcaacagcagcgaggtggaggtgctgtacctgagaaatgtgtctgcagaagatgctggggagtacacctgcctggccggcaacagcatcggcctgagctaccagagcgcctggctgactgtgctgcctgaggaggaccccacctggacagctgctgcccctgaggcccgctacacagacatcatcctgtatgccagcggcagcctggccctggccgtgctgctgctgctggccggcctgtaccggggccaggccctgcacggccgccacccccggcccccagccaccgtgcagaagctgagccgcttccccctggcccggcagttcagcctggagagcggcagcagcggcaagagcagcagcagcctggtgcggggcgtgcggctgagcagcagcggccctgccctgctggccggcctggtgtccctggacctgcccctggaccccctgtgggagttcccccgggaccggctggtgctgggcaagcccctgggggagggctgcttcggccaggtggtgcgggcagaggccttcggcatggaccctgcccggccagaccaggccagcacagtggccgtgaagatgctgaaggacaatgccagtgacaaggacctggccgacctggtgtctgagatggaggtgatgaagctgattggccgccacaagaacatcatcaacctgctgggcgtgtgcacccaggagggccccctgtatgtgattgtggagtgtgccgccaagggcaacctgcgggagttcctgcgggcccggcggcccccaggccctgacctgagcccagatggccccaggagcagcgagggccccctgtccttccctgtgctggtgtcctgtgcctaccaggtggcccggggcatgcagtacctggagagcaggaagtgcatccaccgggacctggccgccagaaatgtgctggtgacagaggacaacgtgatgaagattgctgactttggcctggcccggggcgtgcaccacatcgactactacaagaagaccagcaatggccgcctgcctgtgaagtggatggcccctgaggccctgtttgacagagtgtacacccaccagagtgatgtgtggagctttggcatcctgctgtgggagatcttcaccctgggcggcagcccctacccaggcatccctgtggaggagctgttcagcctgctgcgggagggccacaggatggacaggcctccccactgccccccagagctgtatggcctgatgagggagtgctggcacgccgcccccagccagaggcccaccttcaagcagctggtggaggccctggacaaggtgctgctggccgtgtctgaggagtacctggacctgcggctgaccttcggcccctacagccccagcggaggagatgccagcagcacctgcagcagcagtgacagcgtcttcagccatgaccccctgcccctgggcagcagcagcttccccttcggcagcggcgtgcagacctag

SEQ ID NO: 19706 - DNA, 2289 bp, synthetic construct
  misc_feature 1..2289: note = Description of Artificial Sequence: Synthetic coding sequence
  source 1..2289: mol_type = other DNA
atgaggctgctgctggccctgctgggcgtgctgctgtctgtgcccggcccccctgtgctgagcctggaggccagcgaggaggtggagctggagccctgcctggcccccagcctggagcagcaggagcaggagctgactgtggccctgggccagcctgtgcggctgtgctgcggccgggcagagcggggcggccactggtacaaggagggcagccggctggccccagctggccgggtgcggggctggaggggccgcctggagatcgccagcttcctgcctgaagatgctggccgctacctgtgcctggcccggggctccatgattgtgctgcagaacctgaccctcatcactggagacagcctgaccagcagcaatgatgatgaggaccccaagagccaccgggaccccagcaacagacacagctacccccagcaggccccctactggacccacccccagaggatggagaagaagctgcatgctgtgcctgctggcaacacagtgaagttccgctgcccagctgctggcaaccccacccccaccatccgctggctgaaggatggccaggccttccacggggagaacagaattggaggcatccggctgcggcaccagcactggagcctggtgatggagagcgtggtgcccagcgaccggggcacctacacctgcctggtggagaatgctgtgggcagcatccgctacaactacctgctggatgtgctggagaggagcccccaccggcccatcctgcaggccggcctgcctgccaacaccacagctgtggtgggcagtgatgtggagctgctgtgcaaggtgtacagtgatgcccagccccacatccagtggctgaagcacatcgtcatcaatggcagcagctttggagcagatggcttcccctacgtgcaggtgctgaagacagctgacatcaacagcagcgaggtggaggtgctgtacctgagaaatgtgtctgcagaagatgctggggagtacacctgcctggccggcaacagcatcggcctgagctaccagagcgcctggctgactgtgctgcccggcaccggccgcatcccccacctgacctgtgacagcctgaccccagctggccgcaccaagagccccaccctgcagttcagcctggagagcggcagcagcggcaagagcagcagcagcctggtgcggggcgtgcggctgagcagcagcggccctgccctgctggccggcctggtgtccctggacctgcccctggaccccctgtgggagttcccccgggaccggctggtgctgggcaagcccctgggggagggctgcttcggccaggtggtgcgggcagaggccttcggcatggaccctgcccggccagaccaggccagcacagtggccgtgaagatgctgaaggacaatgccagtgacaaggacctggccgacctggtgtctgagatggaggtgatgaagctgattggccgccacaagaacatcatcaacctgctgggcgtgtgcacccaggagggccccctgtatgtgattgtggagtgtgccgccaagggcaacctgcgggagttcctgcgggcccggcggcccccaggccctgacctgagcccagatggccccaggagcagcgagggccccctgtccttccctgtgctggtgtcctgtgcctaccaggtggcccggggcatgcagtacctggagagcaggaagtgcatccaccgggacctggccgccagaaatgtgctggtgacagaggacaacgtgatgaagattgctgactttggcctggcccggggcgtgcaccacatcgactactacaagaagaccagcaatggccgcctgcctgtgaagtggatggcccctgaggccctgtttgacagagtgtacacccaccagagtgatgtgtggagctttggcatcctgctgtgggagatcttcaccctgggcggcagcccctacccaggcatccctgtggaggagctgttcagcctgctgcgggagggccacaggatggacaggcctccccactgccccccagagctgtatggcctgatgagggagtgctggcacgccgcccccagccagaggcccaccttcaagcagctggtggaggccctggacaaggtgctgctggccgtgtctgaggagtacctggacctgcggctgaccttcggcccctacagccccagcggaggagatgccagcagcacctgcagcagcagtgacagcgtcttcagccatgaccccctgcccctgggcagcagcagcttccccttcggcagcggcgtgcagacctag

SEQ ID NO: 19707 - DNA, 3093 bp, synthetic construct
  misc_feature 1..3093: note = Description of Artificial Sequence: Synthetic coding sequence
  source 1..3093: mol_type = other DNA
ccctgcatgtggcaccagcagcacgtgccctgtgtgtgtgtgtgcccctacgtgtgtgtgtgcatgagggtgtgtgtgtgtgtgtgctggcccctgagctgtgccctgaatgctgtgtgtgtgacctgccccaagtctgtggcctttgccctgggcgtggccagcgctgcctgtggctgtgtgggcgtgaaggagtggtggctgctgcagcacgccctgcagagcgcctgtgccctgcacgtgcgctgtgtgctgtgcacccaggaggccgccagtgatggagctgctggcagcgctgacctgtgccccctgcccacagagccctgcctggcccccagcctggagcagcaggagcaggagctgactgtggccctgggccagcctgtgcggctgtgctgcggccgggcagagcggggcggccactggtacaaggagggcagccggctggccccagctggccgggtgcggggctggaggggccgcctggagatcgccagcttcctgcctgaagatgctggccgctacctgtgcctggcccggggctccatgattgtgctgcagaacctgaccctcatcactggagacagccccccagccaccatgatgaggacccccagccccatcggcaccccaagaattggaacagtgacccccagcaaggtgagccgcagccccaggacctgtgtgcctgctgctgcccacctgatcacagagaagaggaggcctgtgtgggagcacacagtcatcctgggcgccttcccctgccccccagccccctactggacccacccccagaggatggagaagaagctgcatgctgtgcctgctggcaacacagtgaagttccgctgcccagctgctggcaaccccacccccaccatccgctggctgaaggatggccaggccttccacggggagaacagaattggaggcatccggctgcggcaccagcactggagcctggtgatggagagcgtggtgcccagcgaccggggcacctacacctgcctggtggagaatgctgtgggcagcatccgctacaactacctgctggatgtgctggagaggagcccccaccggcccatcctgcaggccggcctgcctgccaacaccacagctgtggtgggcagtgatgtggagctgctgtgcaaggtgtacagtgatgcccagccccacatccagtggctgaagcacatcgtcatcaatggcagcagctttggagcagatggcttcccctacgtgcaggtgctgaagacagctgacatcaacagcagcgaggtggaggtgctgtacctgagaaatgtgtctgcagaagatgctggggagtacacctgcctggccggcaacagcatcggcctgagctaccagagcgcctggctgactgtgctgcccggggagcacctgaagggccaggagatgctgagagatgcccccctgggccagcagtggggcctgtggcctgtgggctggagcgtgtctgtgggcctgtggggcctggcctggggcgctgtgtgtggctttgtgggcctgagctgcatgacagcccccctgtgcctgagcacccggggccggccctgtgaccggctgctgcgctgtggctgcctgggcctgggcatcaccacagccagctctgtgtgtgtgcccacctacgtgggctcctgggagggcctgggctgcaccggccggcctgtgagccccctgaccagcctgtctgtgtgtgtgtgcccctgtgcccgggcagaggaggaccccacctggacagctgctgcccctgaggcccgctacacagacatcatcctgtatgccagcggcagcctggccctggccgtgctgctgctgctggccggcctgtaccggggccaggccctgcacggccgccacccccggcccccagccaccgtgcagaagctgagccgcttccccctggcccggcagttcagcctggagagcggcagcagcggcaagagcagcagcagcctggtgcggggcgtgcggctgagcagcagcggccctgccctgctggccggcctggtgtccctggacctgcccctggaccccctgtgggagttcccccgggaccggctggtgctgggcaagcccctgggggagggctgcttcggccaggtggtgcgggcagaggccttcggcatggaccctgcccggccagaccaggccagcacagtggccgtgaagatgctgaaggacaatgccagtgacaaggacctggccgacctggtgtctgagatggaggtgatgaagctgattggccgccacaagaacatcatcaacctgctgggcgtgtgcacccaggagggccccctgtatgtgattgtggagtgtgccgccaagggcaacctgcgggagttcctgcgggcccggcggcccccaggccctgacctgagcccagatggccccaggagcagcgagggccccctgtccttccctgtgctggtgtcctgtgcctaccaggtggcccggggcatgcagtacctggagagcaggaagtgcatccaccgggacctggccgccagaaatgtgctggtgacagaggacaacgtgatgaagattgctgactttggcctggcccggggcgtgcaccacatcgactactacaagaagaccagcaatggccgcctgcctgtgaagtggatggcccctgaggccctgtttgacagagtgtacacccaccagagtgatgtgtggagctttggcatcctgctgtgggagatcttcaccctgggcggcagcccctacccaggcatccctgtggaggagctgttcagcctgctgcgggagggccacaggatggacaggcctccccactgccccccagagctgtatggcctgatgagggagtgctggcacgccgcccccagccagaggcccaccttcaagcagctggtggaggccctggacaaggtgctgctggccgtgtctgaggagtacctggacctgcggctgaccttcggcccctacagccccagcggaggagatgccagcagcacctgcagcagcagtgacagcgtcttcagccatgaccccctgcccctgggcagcagcagcttccccttcggcagcggcgtgcagacctag

SEQ ID NO: 19708 - DNA, 2289 bp, synthetic construct; identical to SEQ ID NO: 19706
  misc_feature 1..2289: note = Description of Artificial Sequence: Synthetic coding sequence
  source 1..2289: mol_type = other DNA

SEQ ID NO: 19709 - DNA, 2409 bp, synthetic construct; identical to SEQ ID NO: 19705
  misc_feature 1..2409: note = Description of Artificial Sequence: Synthetic coding sequence
  source 1..2409: mol_type = other DNA

SEQ ID NO: 19710 - DNA, 606 bp, synthetic construct
  misc_feature 1..606: note = Description of Artificial Sequence: Synthetic coding sequence
  source 1..606: mol_type = other DNA
atgaggctgctgctggccctgctgggcgtgctgctgtctgtgcccggcccccctgtgctgagcctggaggccagcgaggaggtggagctggagccctgcctggcccccagcctggagcagcaggagcaggagctgactgtggccctgggccagcctgtgcggctgtgctgcggccgggcagagcggggcggccactggtacaaggagggcagccggctggccccagctggccgggtgcggggctggaggggccgcctggagatcgccagcttcctgcctgaagatgctggccgctacctgtgcctggcccggggctccatgattgtgctgcagaacctgaccctcatcactggagacagcctgaccagcagcaatgatgatgaggaccccaagagccaccgggaccccagcaacagacacagctacccccagcaggccccctactggacccacccccagaggatggagaagaagctgcatgctgtgcctgctggcaacacagtgaagttccgctgcccagctgctggcaaccccacccccaccatccgctggctgaaggatggccaggccttccacggggagaacagaattggaggcatcagatag

SEQ ID NO: 19711 - DNA, 264 bp, synthetic construct
  misc_feature 1..264: note = Description of Artificial Sequence: Synthetic coding sequence
  source 1..264: mol_type = other DNA
atgaggctgctgctggccctgctgggcgtgctgctgtctgtgcccggcccccctgtgctgagcctggaggccagcgaggaggtggagctggagccctgcctggcccccagcctggagcagcaggagcaggagctgactgtggccctgggccagcctgtgcggctgtgctgcggccgggcagagcggggcggccactggtacaaggagggcagccggctggccccagctggccgggtgcggggctggaggggccgcctggagtag

SEQ ID NO: 19712 - DNA, 327 bp, synthetic construct
  misc_feature 1..327: note = Description of Artificial Sequence: Synthetic coding sequence
  source 1..327: mol_type = other DNA
atgaggctgctgctggccctgctgggcgtgctgctgtctgtgcccggcccccctgtgctgagcctggaggccagcgaggaggtggagctggagccctgcctggcccccagcctggagcagcaggagcaggagctgactgtggccctgggccagcctgtgcggctgtgctgcggccgggcagagcggggcggccactggtacaaggagggcagccggctggccccagctggccgggtgcggggctggaggggccgcctggagatcgccagcttcctgcctgaagatgctggccgctacctgtgcctggcccggggctccatgatctag

SEQ ID NO: 19713 - DNA, 345 bp, synthetic construct
  misc_feature 1..345: note = Description of Artificial Sequence: Synthetic coding sequence
  source 1..345: mol_type = other DNA
atgaggctgctgctggccctgctgggcgtgctgctgtctgtgcccggcccccctgtgctgagcctggaggccagcgaggaggtggagctggagccctgcctggcccccagcctggagcagcaggagcaggagctgactgtggccctgggccagcctgtgcggctgtgctgcggccgggcagagcggggcggccactggtacaaggagggcagccggctggccccagctggccgggtgcggggctggaggggccgcctggagatcgccagcttcctgcctgaagatgctggccgctacctgtgcctggcccggggctccatgattgtgctgcagaacctgacctag

SEQ ID NO: 19714 - DNA, 7164 bp, synthetic construct
  misc_feature 1..7164: note = Description of Artificial Sequence: Synthetic coding sequence
  source 1..7164: mol_type = other DNA
atgctgcggggccctggccctggcctgctgctgctggccgtgcagtgcctgggcacagctgtgcccagcactggagccagcaagagcaagaggcaggcccagcagatggtgcagccccagagccctgtggccgtgtcccagagcaagccaggctgctatgacaatggcaagcactaccagatcaaccagcagtgggagaggacctacctgggcaatgccctggtgtgcacctgctatggaggcagccggggcttcaactgtgagagcaagccagaggccgaggagacctgctttgacaagtacacaggcaacacctacagagtgggggacacctatgaaagacccaaggacagcatgatctgggactgcacctgcatcggggccggccggggccgcatcagctgcaccatcgccaaccgctgccacgagggcggccagagctacaagatcggggacacctggaggcggccccatgagaccggcggctacatgctggagtgtgtgtgcctgggcaatggcaagggggagtggacctgcaagcccatcgccgagaagtgctttgaccacgccgccggcaccagctatgtggtgggggagacctgggagaagccctaccagggctggatgatggtggactgcacctgcctgggggagggcagcggccgcatcacctgcaccagcaggaaccgctgcaatgaccaggacaccaggaccagctaccgcatcggggacacctggagcaagaaggacaacagaggcaacctgctgcagtgcatctgcacaggaaatggccgcggggagtggaagtgtgagcggcacacctctgtgcagaccaccagcagcggcagcggccccttcacagatgtgcgggctgctgtgtaccagccccagccccacccccagcccccaccctacggccactgtgtgacagacagcggcgtggtgtacagcgtgggcatgcagtggctgaagacccagggcaacaagcagatgctgtgcacctgcctgggcaatggagtgtcctgccaggagacagctgtgacccagacctatggaggcaacagcaatggagagccctgtgtgctgcccttcacctacaatggaagaaccttctacagctgcaccacagagggccggcaggacggccacctgtggtgcagcaccaccagcaactatgagcaggaccagaagtacagcttctgcacagaccacacagtgctggtgcagacccggggcggcaacagcaatggagccctgtgccacttccccttcctgtacaacaaccacaactacacagactgcaccagcgagggcagaagagacaacatgaagtggtgtggcaccacccagaactatgatgctgaccagaagtttggcttctgccccatggccgcccacgaggagatctgcaccaccaatgaaggagtgatgtaccgcatcggggaccagtgggacaagcagcacgacatgggccacatgatgcgctgcacctgtgtgggcaatggccgcggggagtggacctgcatcgcctacagccagctgcgggaccagtgcatcgtggatgacatcacctacaacgtgaatgacaccttccacaagagacatgaggagggccacatgctgaactgcacctgcttcggccagggccggggccgctggaagtgtgaccctgtggaccagtgccaggacagcgagaccggcaccttctaccagatcggggacagctgggagaagtatgtgcatggagtgcgctaccagtgctactgctacggccggggcatcggggagtggcactgccagcccctgcagacctaccccagcagcagcggccctgtggaggtgttcatcacagagacccccagccagcccaacagccaccccatccagtggaatgccccccagcccagccacatcagcaagtacatcctgcgctggaggcccaagaacagcgtgggccgctggaaggaggccaccatccctggccacctgaacagctacaccatcaagggcctgaagccaggagtggtgtatgagggccagctgatcagcatccagcagtatggccaccaggaggtgaccaggtttgacttcaccaccaccagcaccagcacccctgtgaccagcaacacagtgactggagagaccacccccttcagccccctggtggccaccagcgagagcgtgacagagatcacagccagcagctttgtggtgtcctgggtgtctgccagtgacacagtgtctggcttccgggtggagtatgagctgtctgaggagggagatgagccccagtacctggacctgcccagcacagccacctctgtgaacatcccagacctgctgcccggcaggaagtacatcgtgaatgtgtaccagatcagtgaagatggagagcagagcctcatcctgagcaccagccagaccacagccccagatgcccccccagacaccaccgtggaccaggtggatgacaccagcatcgtggtgcgctggagccggccccaggcccccatcaccggctacagaattgtgtacagccccagcgtggagggcagcagcacagagctgaacctgcctgagacagccaacagcgtgaccctgagtgacctgcagcccggggtgcagtacaacatcaccatctatgctgtggaggagaaccaggagagcacccctgtggtgatccagcaggagaccaccggcacccccaggagtgacacagtgcccagcccccgggacctgcagtttgtggaggtgacagatgtgaaggtgaccatcatgtggaccccacctgagagcgctgtgacaggctacagagtggatgtgattcctgtgaacctgcctggagagcacggccagaggctgcccatcagcaggaacacctttgctgaggtgacaggcctgagccctggggtgacctactacttcaaggtgtttgctgtgagccacggccgggagagcaagcccctgacagcccagcagaccaccaagctggatgcccccaccaacctgcagtttgtgaatgaaacagacagcacagtgctggtgcgctggaccccaccccgggcccagatcaccggctaccgcctgactgtgggcctgacccggcggggccagccccggcagtacaacgtgggccccagcgtgtccaagtaccccctgaggaacctgcagcctgccagcgagtacacagtgtccctggtggccatcaagggcaaccaggagagccccaaggccactggagtcttcaccaccctgcagcccggcagcagcatccccccctacaacacagaggtgacagagaccaccatcgtcatcacctggaccccagcccccagaattggcttcaagctgggcgtgcggcccagccagggcggggaggccccccgggaggtgaccagtgacagcggcagcatcgtggtgtctggcctgaccccaggagtggagtatgtgtacaccatccaggtgctgagagatggccaggagagagatgcccccatcgtgaacaaggtggtgacccccctgagcccccccaccaacctgcacctggaggccaacccagacaccggggtgctgactgtgtcctgggagaggagcaccaccccagacatcaccggctaccgcatcaccaccacccccaccaacggccagcagggcaacagcctggaggaggtggtgcatgctgaccagagcagctgcacctttgacaacctgagccctggcctggagtacaacgtgtctgtgtacacagtgaaggatgacaaggagagcgtgcccatcagtgacaccatcatccctgaggtgccccagctgacagacctgagctttgtggacatcacagacagcagcatcggcctgcgctggacccccctgaacagcagcaccatcatcggctaccgcatcaccgtggtggccgccggggagggcatccccatctttgaagattttgtggacagctctgtgggctactacacagtgacaggcctggagcccggcatcgactatgacatcagcgtcatcaccctcatcaatggaggagagagcgcccccaccaccctgacccagcagacagctgtgcccccacccacagacctgcgcttcttcagtgacatcacagccaacagcttcaccgtgcactggatcgccccccgggccaccatcaccggctaccgcatccgccaccaccctgagcacttcagcggccggccccgggaggacagagtgccccacagcagaaattccatcaccctgaccaacctgaccccaggcacagaatatgtggtgtccatcgtggccctgaatggccgggaggagagccccctgctgattggccagcagagcacagtgtctgatgtgccccgggacctggaggtggtggccgccacccccaccagcctgctgatctcctgggatgccccagctgtgacagtgcgctactaccgcatcacctatggagagaccggcggcaacagccctgtgcaggagttcaccgtgcccggcagcaagagcacagccaccatcagcggcctgaagccaggagtggactacaccatcaccgtgtatgctgtgacaggccgcggggacagccctgccagcagcaagcccatcagcatcaactacagaacagaaattgacaagcccagccagatgcaggtgacagatgtgcaggacaacagcatctctgtgaagtggctgcccagcagcagccctgtgacaggctacagagtgaccaccacccccaagaatggacctggccccaccaagaccaagacagctggccctgaccagacagagatgaccatcgagggcctgcagcccaccgtggagtatgtggtgtctgtgtatgcccagaaccccagcggggagagccagcccctggtgcagacagctgtgaccaacatcgaccggcccaagggcctggccttcacagatgtggatgtggacagcatcaagatcgcctgggagagcccccagggccaggtgagccgctacagagtgacctacagcagcccagaagatggcatccacgagctgtttcctgccccagatggagaggaggacacagctgagctgcagggcctgcggcccggcagcgagtacacagtgtctgtggtggccctgcatgatgacatggagagccagcccctcatcggcacccagagcacagccatcccagcccccacagacctgaagttcacccaggtgacccccaccagcctgagcgcccagtggaccccaccaaatgtgcagctgaccggctacagagtgcgggtgacccccaaggagaagacaggccccatgaaggagatcaacctggccccagacagcagctctgtggtggtgtctggcctgatggtggccaccaagtatgaggtgtctgtgtatgccctgaaggacaccctgaccagcaggcctgcccagggcgtggtgaccaccctggagaatgtgtccccaccaagaagagcccgggtgacagatgccacagagaccaccatcaccatctcctggaggaccaagacagagaccatcaccggcttccaggtggatgctgtgcctgccaacggccagacccccatccagaggaccatcaagccagatgtgcgcagctacaccatcaccggcctgcagcccggcacagactacaagatctacctgtacaccctgaatgacaatgcccggagcagccctgtggtgattgatgccagcacagccattgatgcccccagcaacctgcgcttcctggccaccacccccaacagcctgctggtgtcctggcagcccccccgggcccgcatcaccggctacatcatcaagtatgagaagccaggcagccccccccgggaggtggtgccccggcccaggcctggggtgacagaggccaccatcaccggcctggagcccggcacagagtacaccatctacgtgattgccctgaagaacaaccagaagtctgagcccctgattggaaggaagaagacagatgagctgccccagctggtgaccctgccccaccccaacctgcacggccctgagatcctggatgtgcccagcacagtgcagaagaccccatttgtgacccaccctggctatgacacaggaaatggcatccagctgcccggcaccagcggccagcagcccagcgtgggccagcagatgatctttgaggagcacggcttccggaggaccaccccacccaccacagccacccccatccgccaccggccccggccctacccacccaacgtgggggaggagatccagatcggccacatccccagagaagatgtggactaccacctgtacccccacggccctggcctgaaccccaatgccagcacaggccaggaggccctgagccagaccaccatctcctgggcccccttccaggacaccagcgagtacatcatcagctgccaccctgtgggcacagatgaggagcccctgcagttccgggtgcccggcaccagcaccagcgccaccctgaccggcctgaccaggggggccacctacaacgtcatcgtggaggccctgaaggaccagcagaggcacaaggtgcgggaggaggtggtgacagtgggcaacagcgtgaatgaaggcctgaaccagcccacagatgacagctgctttgacccctacacagtgagccactatgctgtgggagatgagtgggagaggatgtctgagagcggcttcaagctgctgtgccagtgcctgggctttggaagtggccacttccgctgtgacagcagccgctggtgccacgacaatggagtgaactacaagattggagagaagtgggaccggcagggagaaaatggccagatgatgagctgcacctgcctgggcaatggcaagggggagttcaagtgtgacccccatgaggccacctgctatgatgatggcaagacctaccacgtgggggagcagtggcagaaggagtacctgggcgccatctgcagctgcacctgctttggaggccagaggggctggaggtgtgacaactgcagaagacctggaggagagcccagccctgagggcaccaccggccagagctacaaccagtacagccagcgctaccaccagaggaccaacaccaacgtgaactgccccatcgagtgcttcatgcccctggatgtgcaggccgaccgggaggacagccgggagtag

SEQ ID NO: 19715 - DNA, 7341 bp, synthetic construct
  misc_feature 1..7341: note = Description of Artificial Sequence: Synthetic coding sequence
  source 1..7341: mol_type = other DNA
atgctgcggggccctggccctggcctgctgctgctggccgtgcagtgcctgggcacagctgtgcccagcactggagccagcaagagcaagaggcaggcccagcagatggtgcagccccagagccctgtggccgtgtcccagagcaagccaggctgctatgacaatggcaagcactaccagatcaaccagcagtgggagaggacctacctgggcaatgccctggtgtgcacctgctatggaggcagccggggcttcaactgtgagagcaagccagaggccgaggagacctgctttgacaagtacacaggcaacacctacagagtgggggacacctatgaaagacccaaggacagcatgatctgggactgcacctgcatcggggccggccggggccgcatcagctgcaccatcgccaaccgctgccacgagggcggccagagctacaagatcggggacacctggaggcggccccatgagaccggcggctacatgctggagtgtgtgtgcctgggcaatggcaagggggagtggacctgcaagcccatcgccgagaagtgctttgaccacgccgccggcaccagctatgtggtgggggagacctgggagaagccctaccagggctggatgatggtggactgcacctgcctgggggagggcagcggccgcatcacctgcaccagcaggaaccgctgcaatgaccaggacaccaggaccagctaccgcatcggggacacctggagcaagaaggacaacagaggcaacctgctgcagtgcatctgcacaggaaatggccgcggggagtggaagtgtgagcggcacacctctgtgcagaccaccagcagcggcagcggccccttcacagatgtgcgggctgctgtgtaccagccccagccccacccccagcccccaccctacggccactgtgtgacagacagcggcgtggtgtacagcgtgggcatgcagtggctgaagacccagggcaacaagcagatgctgtgcacctgcctgggcaatggagtgtcctgccaggagacagctgtgacccagacctatggaggcaacagcaatggagagccctgtgtgctgcccttcacctacaatggaagaaccttctacagctgcaccacagagggccggcaggacggccacctgtggtgcagcaccaccagcaactatgagcaggaccagaagtacagcttctgcacagaccacacagtgctggtgcagacccggggcggcaacagcaatggagccctgtgccacttccccttcctgtacaacaaccacaactacacagactgcaccagcgagggcagaagagacaacatgaagtggtgtggcaccacccagaactatgatgctgaccagaagtttggcttctgccccatggccgcccacgaggagatctgcaccaccaatgaaggagtgatgtaccgcatcggggaccagtgggacaagcagcacgacatgggccacatgatgcgctgcacctgtgtgggcaatggccgcggggagtggacctgcatcgcctacagccagctgcgggaccagtgcatcgtggatgacatcacctacaacgtgaatgacaccttccacaagagacatgaggagggccacatgctgaactgcacctgcttcggccagggccggggccgctggaagtgtgaccctgtggaccagtgccaggacagcgagaccggcaccttctaccagatcggggacagctgggagaagtatgtgcatggagtgcgctaccagtgctactgctacggccggggcatcggggagtggcactgccagcccctgcagacctaccccagcagcagcggccctgtggaggtgttcatcacagagacccccagccagcccaacagccaccccatccagtggaatgccccccagcccagccacatcagcaagtacatcctgcgctggaggcccaagaacagcgtgggccgctggaaggaggccaccatccctggccacctgaacagctacaccatcaagggcctgaagccaggagtggtgtatgagggccagctgatcagcatccagcagtatggccaccaggaggtgaccaggtttgacttcaccaccaccagcaccagcacccctgtgaccagcaacacagtgactggagagaccacccccttcagccccctggtggccaccagcgagagcgtgacagagatcacagccagcagctttgtggtgtcctgggtgtctgccagtgacacagtgtctggcttccgggtggagtatgagctgtctgaggagggagatgagccccagtacctggacctgcccagcacagccacctctgtgaacatcccagacctgctgcccggcaggaagtacatcgtgaatgtgtaccagatcagtgaagatggagagcagagcctcatcctgagcaccagccagaccacagccccagatgcccccccagacaccaccgtggaccaggtggatgacaccagcatcgtggtgcgctggagccggccccaggcccccatcaccggctacagaattgtgtacagccccagcgtggagggcagcagcacagagctgaacctgcctgagacagccaacagcgtgaccctgagtgacctgcagcccggggtgcagtacaacatcaccatctatgctgtggaggagaaccaggagagcacccctgtggtgatccagcaggagaccaccggcacccccaggagtgacacagtgcccagcccccgggacctgcagtttgtggaggtgacagatgtgaaggtgaccatcatgtggaccccacctgagagcgctgtgacaggctacagagtggatgtgattcctgtgaacctgcctggagagcacggccagaggctgcccatcagcaggaacacctttgctgaggtgacaggcctgagccctggggtgacctactacttcaaggtgtttgctgtgagccacggccgggagagcaagcccctgacagcccagcagaccaccaagctggatgcccccaccaacctgcagtttgtgaatgaaacagacagcacagtgctggtgcgctggaccccaccccgggcccagatcaccggctaccgcctgactgtgggcctgacccggcggggccagccccggcagtacaacgtgggccccagcgtgtccaagtaccccctgaggaacctgcagcctgccagcgagtacacagtgtccctggtggccatcaagggcaaccaggagagccccaaggccactggagtcttcaccaccctgcagcccggcagcagcatccccccctacaacacagaggtgacagagaccaccatcgtcatcacctggaccccagcccccagaattggcttcaagctgggcgtgcggcccagccagggcggggaggccccccgggaggtgaccagtgacagcggcagcatcgtggtgtctggcctgaccccaggagtggagtatgtgtacaccatccaggtgctgagagatggccaggagagagatgcccccatcgtgaacaaggtggtgacccccctgagcccccccaccaacctgcacctggaggccaacccagacaccggggtgctgactgtgtcctgggagaggagcaccaccccagacatcaccggctaccgcatcaccaccacccccaccaacggccagcagggcaacagcctggaggaggtggtgcatgctgaccagagcagctgcacctttgacaacctgagccctggcctggagtacaacgtgtctgtgtacacagtgaaggatgacaaggagagcgtgcccatcagtgacaccatcatccctgaggtgccccagctgacagacctgagctttgtggacatcacagacagcagcatcggcctgcgctggacccccctgaacagcagcaccatcatcggctaccgcatcaccgtggtggccgccggggagggcatccccatctttgaagattttgtggacagctctgtgggctactacacagtgacaggcctggagcccggcatcgactatgacatcagcgtcatcaccctcatcaatggaggagagagcgcccccaccaccctgacccagcagacagctgtgcccccacccacagacctgcgcttcaccaacattggaccagacaccatgagggtgacctgggcccctcctccttccattgacctgaccaacttcctggtgcgctacagccctgtgaagaatgaggaggatgtggccgagctgagcatcagccccagcgacaatgctgtggtgctgaccaacctgctgcctggaacagaatatgtggtgtctgtgtcctctgtgtatgagcagcacgagagcacccccctgcggggccggcagaagacaggcctggacagccccactggaattgacttcagtgacatcacagccaacagcttcaccgtgcactggatcgccccccgggccaccatcaccggctaccgcatccgccaccaccctgagcacttcagcggccggccccgggaggacagagtgccccacagcagaaattccatcaccctgaccaacctgaccccaggcacagaatatgtggtgtccatcgtggccctgaatggccgggaggagagccccctgctgattggccagcagagcacagtgtctgatgtgccccgggacctggaggtggtggccgccacccccaccagcctgctgatctcctgggatgccccagctgtgacagtgcgctactaccgcatcacctatggagagaccggcggcaacagccctgtgcaggagttcaccgtgcccggcagcaagagcacagccaccatcagcggcctgaagccaggagtggactacaccatcaccgtgtatgctgtgacaggccgcggggacagccctgccagcagcaagcccatcagcatcaactacagaacagaaattgacaagcccagccagatgcaggtgacagatgtgcaggacaacagcatctctgtgaagtggctgcccagcagcagccctgtgacaggctacagagtgaccaccacccccaagaatggacctggccccaccaagaccaagacagctggccctgaccagacagagatgaccatcgagggcctgcagcccaccgtggagtatgtggtgtctgtgtatgcccagaaccccagcggggagagccagcccctggtgcagacagctgtgaccaacatcgaccggcccaagggcctggccttcacagatgtggatgtggacagcatcaagatcgcctgggagagcccccagggccaggtgagccgctacagagtgacctacagcagcccagaagatggcatccacgagctgtttcctgccccagatggagaggaggacacagctgagctgcagggcctgcggcccggcagcgagtacacagtgtctgtggtggccctgcatgatgacatggagagccagcccctcatcggcacccagagcacagccatcccagcccccacagacctgaagttcacccaggtgacccccaccagcctgagcgcccagtggaccccaccaaatgtgcagctgaccggctacagagtgcgggtgacccccaaggagaagacaggccccatgaaggagatcaacctggccccagacagcagctctgtggtggtgtctggcctgatggtggccaccaagtatgaggtgtctgtgtatgccctgaaggacaccctgaccagcaggcctgcccagggcgtggtgaccaccctggagaatgtgtccccaccaagaagagcccgggtgacagatgccacagagaccaccatcaccatctcctggaggaccaagacagagaccatcaccggcttccaggtggatgctgtgcctgccaacggccagacccccatccagaggaccatcaagccagatgtgcgcagctacaccatcaccggcctgcagcccggcacagactacaagatctacctgtacaccctgaatgacaatgcccggagcagccctgtggtgattgatgccagcacagccattgatgcccccagcaacctgcgcttcctggccaccacccccaacagcctgctggtgtcctggcagcccccccgggcccgcatcaccggctacatcatcaagtatgagaagccaggcagccccccccgggaggtggtgccccggcccaggcctggggtgacagaggccaccatcaccggcctggagcccggcacagagtacaccatctacgtgattgccctgaagaacaaccagaagtctgagcccctgattggaaggaagaagacagatgagctgccccagctggtgaccctgccccaccccaacctgcacggccctgagatcctggatgtgcccagcacagtgcagaagaccccatttgtgacccaccctggctatgacacaggaaatggcatccagctgcccggcaccagcggccagcagcccagcgtgggccagcagatgatctttgaggagcacggcttccggaggaccaccccacccaccacagccacccccatccgccaccggccccggccctacccacccaacgtgggccaggaggccctgagccagaccaccatctcctgggcccccttccaggacaccagcgagtacatcatcagctgccaccctgtgggcacagatgaggagcccctgcagttccgggtgcccggcaccagcaccagcgccaccctgaccggcctgaccaggggggccacctacaacgtgattgtggaggccctgaaggaccagcagaggcacaaggtgcgggaggaggtggtgacagtgggcaacagcgtgaatgaaggcctgaaccagcccacagatgacagctgctttgacccctacacagtgagccactatgctgtgggagatgagtgggagaggatgtctgagagcggcttcaagctgctgtgccagtgcctgggcttcggcagcggccacttccgctgtgacagcagccgctggtgccacgacaacggggtgaactacaagatcggggagaagtgggaccggcagggagaaaatggccagatgatgagctgcacctgcctgggcaatggaaaaggagagttcaagtgtgacccccatgaggccacctgctatgatgatggcaagacctaccacgtgggggagcagtggcagaaggagtacctgggcgccatctgcagctgcacctgcttcggcggccagaggggctggaggtgtgacaactgccggcggcctggaggagagcccagccctgagggcaccaccggccagagctacaaccagtacagccagcgctaccaccagaggaccaacaccaacgtgaactgccccatcgagtgcttcatgcccctggatgtgcaggccgaccgggaggacagccgggagtag

SEQ ID NO: 19716 - DNA, 7068 bp, synthetic construct
  misc_feature 1..7068: note = Description of Artificial Sequence: Synthetic coding sequence
  source 1..7068: mol_type = other DNA
atgctgcggggccctggccctggcctgctgctgctggccgtgcagtgcctgggcacagctgtgcccagcactggagccagcaagagcaagaggcaggcccagcagatggtgcagccccagagccctgtggccgtgtcccagagcaagccaggctgctatgacaatggcaagcactaccagatcaaccagcagtgggagaggacctacctgggcaatgccctggtgtgcacctgctatggaggcagccggggcttcaactgtgagagcaagccagaggccgaggagacctgctttgacaagtacacaggcaacacctacagagtgggggacacctatgaaagacccaaggacagcatgatctgggactgcacctgcatcggggccggccggggccgcatcagctgcaccatcgccaaccgctgccacgagggcggccagagctacaagatcggggacacctggaggcggccccatgagaccggcggctacatgctggagtgtgtgtgcctgggcaatggcaagggggagtggacctgcaagcccatcgccgagaagtgctttgaccacgccgccggcaccagctatgtggtgggggagacctgggagaagccctaccagggctggatgatggtggactgcacctgcctgggggagggcagcggccgcatcacctgcaccagcaggaaccgctgcaatgaccaggacaccaggaccagctaccgcatcggggacacctggagcaagaaggacaacagaggcaacctgctgcagtgcatctgcacaggaaatggccgcggggagtggaagtgtgagcggcacacctctgtgcagaccaccagcagcggcagcggccccttcacagatgtgcgggctgctgtgtaccagccccagccccacccccagcccccaccctacggccactgtgtgacagacagcggcgtggtgtacagcgtgggcatgcagtggctgaagacccagggcaacaagcagatgctgtgcacctgcctgggcaatggagtgtcctgccaggagacagctgtgacccagacctatggaggcaacagcaatggagagccctgtgtgctgcccttcacctacaatggaagaaccttctacagctgcaccacagagggccggcaggacggccacctgtggtgcagcaccaccagcaactatgagcaggaccagaagtacagcttctgcacagaccacacagtgctggtgcagacccggggcggcaacagcaatggagccctgtgccacttccccttcctgtacaacaaccacaactacacagactgcaccagcgagggcagaagagacaacatgaagtggtgtggcaccacccagaactatgatgctgaccagaagtttggcttctgccccatggccgcccacgaggagatctgcaccaccaatgaaggagtgatgtaccgcatcggggaccagtgggacaagcagcacgacatgggccacatgatgcgctgcacctgtgtgggcaatggccgcggggagtggacctgcatcgcctacagccagctgcgggaccagtgcatcgtggatgacatcacctacaacgtgaatgacaccttccacaagagacatgaggagggccacatgctgaactgcacctgcttcggccagggccggggccgctggaagtgtgaccctgtggaccagtgccaggacagcgagaccggcaccttctaccagatcggggacagctgggagaagtatgtgcatggagtgcgctaccagtgctactgctacggccggggcatcggggagtggcactgccagcccctgcagacctaccccagcagcagcggccctgtggaggtgttcatcacagagacccccagccagcccaacagccaccccatccagtggaatgccccccagcccagccacatcagcaagtacatcctgcgctggaggcccaagaacagcgtgggccgctggaaggaggccaccatccctggccacctgaacagctacaccatcaagggcctgaagccaggagtggtgtatgagggccagctgatcagcatccagcagtatggccaccaggaggtgaccaggtttgacttcaccaccaccagcaccagcacccctgtgaccagcaacacagtgactggagagaccacccccttcagccccctggtggccaccagcgagagcgtgacagagatcacagccagcagctttgtggtgtcctgggtgtctgccagtgacacagtgtctggcttccgggtggagtatgagctgtctgaggagggagatgagccccagtacctggacctgcccagcacagccacctctgtgaacatcccagacctgctgcccggcaggaagtacatcgtgaatgtgtaccagatcagtgaagatggagagcagagcctcatcctgagcaccagccagaccacagccccagatgcccccccagacaccaccgtggaccaggtggatgacaccagcatcgtggtgcgctggagccggccccaggcccccatcaccggctacagaattgtgtacagccccagcgtggagggcagcagcacagagctgaacctgcctgagacagccaacagcgtgaccctgagtgacctgcagcccggggtgcagtacaacatcaccatctatgctgtggaggagaaccaggagagcacccctgtggtgatccagcaggagaccaccggcacccccaggagtgacacagtgcccagcccccgggacctgcagtttgtggaggtgacagatgtgaaggtgaccatcatgtggaccccacctgagagcgctgtgacaggctacagagtggatgtgattcctgtgaacctgcctggagagcacggccagaggctgcccatcagcaggaacacctttgctgaggtgacaggcctgagccctggggtgacctactacttcaaggtgtttgctgtgagccacggccgggagagcaagcccctgacagcccagcagaccaccaagctggatgcccccaccaacctgcagtttgtgaatgaaacagacagcacagtgctggtgcgctggaccccaccccgggcccagatcaccggctaccgcctgactgtgggcctgacccggcggggccagccccggcagtacaacgtgggccccagcgtgtccaagtaccccctgaggaacctgcagcctgccagcgagtacacagtgtccctggtggccatcaagggcaaccaggagagccccaaggccactggagtcttcaccaccctgcagcccggcagcagcatccccccctacaacacagaggtgacagagaccaccatcgtcatcacctggaccccagcccccagaattggcttcaagctgggcgtgcggcccagccagggcggggaggccccccgggaggtgaccagtgacagcggcagcatcgtggtgtctggcctgaccccaggagtggagtatgtgtacaccatccaggtgctgagagatggccaggagagagatgcccccatcgtgaacaaggtggtgacccccctgagcccccccaccaacctgcacctggaggccaacccagacaccggggtgctgactgtgtcctgggagaggagcaccaccccagacatcaccggctaccgcatcaccaccacccccaccaacggccagcagggcaacagcctggaggaggtggtgcatgctgaccagagcagctgcacctttgacaacctgagccctggcctggagtacaacgtgtctgtgtacacagtgaaggatgacaaggagagcgtgcccatcagtgacaccatcatcccagctgtgcccccacccacagacctgcgcttcaccaacatcggccctgacaccatgagggtgacctgggcccccccacccagcattgacctgaccaacttcctggtgcgctacagccctgtgaagaatgaagaagatgtggccgagctgagcatcagccccagcgacaatgctgtggtgctgaccaacctgctgcccggcacagaatatgtggtgtctgtgtcctctgtgtatgagcagcacgagagcacccccctgcggggccggcagaagacaggcctggacagccccaccggcatcgacttcagtgacatcacagccaacagcttcaccgtgcactggatcgccccccgggccaccatcaccggctaccgcatccgccaccaccctgagcacttcagcggccggcccagagaagatagagtgccccacagcaggaacagcatcaccctgaccaacctgaccccaggcacagaatatgtggtgtccatcgtggccctgaatggccgggaggagagccccctgctgattggccagcagagcacagtgtctgatgtgccccgggacctggaggtggtggccgccacccccaccagcctgctgatctcctgggatgccccagctgtgacagtgcgctactaccgcatcacctacggggagactggaggcaacagccctgtgcaggagttcaccgtgcccggcagcaagagcacagccaccatcagcggcctgaagccaggagtggactacaccatcaccgtgtatgctgtgacaggccgcggggacagccctgccagcagcaagcccatcagcatcaactacagaacagaaattgacaagcccagccagatgcaggtgacagatgtgcaggacaacagcatctctgtgaagtggctgcccagcagcagccctgtgacaggctacagagtgaccaccacccccaagaatggacctggccccaccaagaccaagacagctggccctgaccagacagagatgaccatcgagggcctgcagcccaccgtggagtatgtggtgtctgtgtatgcccagaaccccagcggggagagccagcccctggtgcagacagctgtgaccaacatcgaccggcccaagggcctggccttcacagatgtggatgtggacagcatcaagatcgcctgggagagcccccagggccaggtgagccgctacagagtgacctacagcagcccagaagatggcatccacgagctgtttcctgccccagatggagaggaggacacagctgagctgcagggcctgcggcccggcagcgagtacacagtgtctgtggtggccctgcatgatgacatggagagccagcccctgattggcacccagagcacagccatcccagcccccacagacctgaagttcacccaggtgacccccaccagcctgagcgcccagtggaccccacccaacgtgcagctgaccggctacagagtgcgggtgacccccaaggagaagacaggccccatgaaggagatcaacctggccccagacagcagctctgtggtggtgtctggcctgatggtggccaccaagtatgaggtgtctgtgtatgccctgaaggacaccctgaccagcaggcctgcccagggcgtggtgaccaccctggagaatgtgagccccccccggcgggcccgggtgacagatgccacagagaccaccatcaccatctcctggaggaccaagacagagaccatcaccggcttccaggtggatgctgtgcctgccaacggccagacccccatccagaggaccatcaagccagatgtgcgcagctacaccatcaccggcctgcagcctggaacagactacaagatctacctgtacaccctgaatgacaatgcccggagcagccctgtggtgattgatgccagcacagccattgatgcccccagcaacctgcgcttcctggccaccacccccaacagcctgctggtgtcctggcagcccccccgggcccgcatcaccggctacatcatcaagtatgagaagccaggcagccccccccgggaggtggtgccccggcccaggcctggggtgacagaggccaccatcaccggcctggagcctggaacagagtacaccatctacgtgattgccctgaagaacaaccagaagtctgagcccctcatcggcaggaagaagacagatgagctgccccagctggtgaccctgccccaccccaacctgcacggccctgagatcctggatgtgcccagcacagtgcagaagaccccatttgtgacccaccctggctatgacacaggaaatggcatccagctgcccggcaccagcggccagcagcccagcgtgggccagcagatgatctttgaggagcacggcttccggaggaccaccccacccaccacagccacccccatccgccaccggccccggccctaccccccaaatgtgggccaggaggccctgagccagaccaccatctcctgggcccccttccaggacaccagcgagtacatcatcagctgccaccctgtgggcacagatgaggagcccctgcagttccgggtgcccggcaccagcaccagcgccaccctgaccggcctgaccaggggggccacctacaacgtcatcgtggaggccctgaaggaccagcagaggcacaaggtgcgggaggaggtggtgacagtgggcaacagcgtgaatgaaggcctgaaccagcccacagatgacagctgctttgacccctacacagtgagccactatgctgtgggagatgagtgggagaggatgtctgagagcggcttcaagctgctgtgccagtgcctgggctttggaagtggccacttccgctgtgacagcagccgctggtgccacgacaatggagtgaactacaagattggagagaagtgggaccggcagggagaaaatggccagatgatgagctgcacctgcctgggcaatggcaagggggagttcaagtgtgacccccatgaggccacctgctatgatgatggcaagacctaccacgtgggggagcagtggcagaaggagtacctgggcgccatctgcagctgcacctgctttggaggccagaggggctggaggtgtgacaactgcagaagacctggaggagagcccagccctgagggcaccaccggccagagctacaaccagtacagccagcgctaccaccagaggaccaacaccaacgtgaactgccccatcgagtgcttcatgcccctggatgtgcaggccgaccgggaggacagccgggagtag

SEQ ID NO: 19717 - DNA, 6555 bp, synthetic construct
  misc_feature 1..6555: note = Description of Artificial Sequence: Synthetic coding sequence
  source 1..6555: mol_type = other DNA
atgctgcggggccctggccctggcctgctgctgctggccgtgcagtgcctgggcacagctgtgcccagcactggagccagcaagagcaagaggcaggcccagcagatggtgcagccccagagccctgtggccgtgtcccagagcaagccaggctgctatgacaatggcaagcactaccagatcaaccagcagtgggagaggacctacctgggcaatgccctggtgtgcacctgctatggaggcagccggggcttcaactgtgagagcaagccagaggccgaggagacctgctttgacaagtacacaggcaacacctacagagtgggggacacctatgaaagacccaaggacagcatgatctgggactgcacctgcatcggggccggccggggccgcatcagctgcaccatcgccaaccgctgccacgagggcggccagagctacaagatcggggacacctggaggcggccccatgagaccggcggctacatgctggagtgtgtgtgcctgggcaatggcaagggggagtggacctgcaagcccatcgccgagaagtgctttgaccacgccgccggcaccagctatgtggtgggggagacctgggagaagccctaccagggctggatgatggtggactgcacctgcctgggggagggcagcggccgcatcacctgcaccagcaggaaccgctgcaatgaccaggacaccaggaccagctaccgcatcggggacacctggagcaagaaggacaacagaggcaacctgctgcagtgcatctgcacaggaaatggccgcggggagtggaagtgtgagcggcacacctctgtgcagaccaccagcagcggcagcggccccttcacagatgtgcgggctgctgtgtaccagccccagccccacccccagcccccaccctacggccactgtgtgacagacagcggcgtggtgtacagcgtgggcatgcagtggctgaagacccagggcaacaagcagatgctgtgcacctgcctgggcaatggagtgtcctgccaggagacagctgtgacccagacctatggaggcaacagcaatggagagccctgtgtgctgcccttcacctacaatggaagaaccttctacagctgcaccacagagggccggcaggacggccacctgtggtgcagcaccaccagcaactatgagcaggaccagaagtacagcttctgcacagaccacacagtgctggtgcagacccggggcggcaacagcaatggagccctgtgccacttccccttcctgtacaacaaccacaactacacagactgcaccagcgagggcagaagagacaacatgaagtggtgtggcaccacccagaactatgatgctgaccagaagtttggcttctgccccatggccgcccacgaggagatctgcaccaccaatgaaggagtgatgtaccgcatcggggaccagtgggacaagcagcacgacatgggccacatgatgcgctgcacctgtgtgggcaatggccgcggggagtggacctgcatcgcctacagccagctgcgggaccagtgcatcgtggatgacatcacctacaacgtgaatgacaccttccacaagagacatgaggagggccacatgctgaactgcacctgcttcggccagggccggggccgctggaagtgtgaccctgtggaccagtgccaggacagcgagaccggcaccttctaccagatcggggacagctgggagaagtatgtgcatggagtgcgctaccagtgctactgctacggccggggcatcggggagtggcactgccagcccctgcagacctaccccagcagcagcggccctgtggaggtgttcatcacagagacccccagccagcccaacagccaccccatccagtggaatgccccccagcccagccacatcagcaagtacatcctgcgctggaggcccaagaacagcgtgggccgctggaaggaggccaccatccctggccacctgaacagctacaccatcaagggcctgaagccaggagtggtgtatgagggccagctgatcagcatccagcagtatggccaccaggaggtgaccaggtttgacttcaccaccaccagcaccagcacccctgtgaccagcaacacagtgactggagagaccacccccttcagccccctggtggccaccagcgagagcgtgacagagatcacagccagcagctttgtggtgtcctgggtgtctgccagtgacacagtgtctggcttccgggtggagtatgagctgtctgaggagggagatgagccccagtacctggacctgcccagcacagccacctctgtgaacatcccagacctgctgcccggcaggaagtacatcgtgaatgtgtaccagatcagtgaagatggagagcagagcctcatcctgagcaccagccagaccacagccccagatgcccccccagacaccaccgtggaccaggtggatgacaccagcatcgtggtgcgctggagccggccccaggcccccatcaccggctacagaattgtgtacagccccagcgtggagggcagcagcacagagctgaacctgcctgagacagccaacagcgtgaccctgagtgacctgcagcccggggtgcagtacaacatcaccatctatgctgtggaggagaaccaggagagcacccctgtggtgatccagcaggagaccaccggcacccccaggagtgacacagtgcccagcccccgggacctgcagtttgtggaggtgacagatgtgaaggtgaccatcatgtggaccccacctgagagcgctgtgacaggctacagagtggatgtgattcctgtgaacctgcctggagagcacggccagaggctgcccatcagcaggaacacctttgctgaggtgacaggcctgagccctggggtgacctactacttcaaggtgtttgctgtgagccacggccgggagagcaagcccctgacagcccagcagaccaccaagctggatgcccccaccaacctgcagtttgtgaatgaaacagacagcacagtgctggtgcgctggaccccaccccgggcccagatcaccggctaccgcctgactgtgggcctgacccggcggggccagccccggcagtacaacgtgggccccagcgtgtccaagtaccccctgaggaacctgcagcctgccagcgagtacacagtgtccctggtggccatcaagggcaaccaggagagccccaaggccactggagtcttcaccaccctgcagcccggcagcagcatccccccctacaacacagaggtgacagagaccaccatcgtcatcacctggaccccagcccccagaattggcttcaagctgggcgtgcggcccagccagggcggggaggccccccgggaggtgaccagtgacagcggcagcatcgtggtgtctggcctgaccccaggagtggagtatgtgtacaccatccaggtgctgagagatggccaggagagagatgcccccatcgtgaacaaggtggtgacccccctgagcccccccaccaacctgcacctggaggccaacccagacaccggggtgctgactgtgtcctgggagaggagcaccaccccagacatcaccggctaccgcatcaccaccacccccaccaacggccagcagggcaacagcctggaggaggtggtgcatgctgaccagagcagctgcacctttgacaacctgagccctggcctggagtacaacgtgtctgtgtacacagtgaaggatgacaaggagagcgtgcccatcagtgacaccatcatcccagctgtgcccccacccacagacctgcgcttcaccaacatcggccctgacaccatgagggtgacctgggcccccccacccagcattgacctgaccaacttcctggtgcgctacagccctgtgaagaatgaagaagatgtggccgagctgagcatcagccccagcgacaatgctgtggtgctgaccaacctgctgcccggcacagaatatgtggtgtctgtgtcctctgtgtatgagcagcacgagagcacccccctgcggggccggcagaagacaggcctggacagccccaccggcatcgacttcagtgacatcacagccaacagcttcaccgtgcactggatcgccccccgggccaccatcaccggctaccgcatccgccaccaccctgagcacttcagcggccggcccagagaagatagagtgccccacagcaggaacagcatcaccctgaccaacctgaccccaggcacagaatatgtggtgtccatcgtggccctgaatggccgggaggagagccccctgctgattggccagcagagcacagtgtctgatgtgccccgggacctggaggtggtggccgccacccccaccagcctgctgatctcctgggatgccccagctgtgacagtgcgctactaccgcatcacctacggggagactggaggcaacagccctgtgcaggagttcaccgtgcccggcagcaagagcacagccaccatcagcggcctgaagccaggagtggactacaccatcaccgtgtatgctgtgacaggccgcggggacagccctgccagcagcaagcccatcagcatcaactacagaacagaaattgacaagcccagccagatgcaggtgacagatgtgcaggacaacagcatctctgtgaagtggctgcccagcagcagccctgtgacaggctacagagtgaccaccacccccaagaatggacctggccccaccaagaccaagacagctggccctgaccagacagagatgaccatcgagggcctgcagcccaccgtggagtatgtggtgtctgtgtatgcccagaaccccagcggggagagccagcccctggtgcagacagctgtgaccaacatcgaccggcccaagggcctggccttcacagatgtggatgtggacagcatcaagatcgcctgggagagcccccagggccaggtgagccgctacagagtgacctacagcagcccagaagatggcatccacgagctgtttcctgccccagatggagaggaggacacagctgagctgcagggcctgcggcccggcagcgagtacacagtgtctgtggtggccctgcatgatgacatggagagccagcccctgattggcacccagagcacagccatcccagcccccacagacctgaagttcacccaggtgacccccaccagcctgagcgcccagtggaccccacccaacgtgcagctgaccggctacagagtgcgggtgacccccaaggagaagacaggccccatgaaggagatcaacctggccccagacagcagctctgtggtggtgtctggcctgatggtggccaccaagtatgaggtgtctgtgtatgccctgaaggacaccctgaccagcaggcctgcccagggcgtggtgaccaccctggagaatgtgagccccccccggcgggcccgggtgacagatgccacagagaccaccatcaccatctcctggaggaccaagacagagaccatcaccggcttccaggtggatgctgtgcctgccaacggccagacccccatccagaggaccatcaagccagatgtgcgcagctacaccatcaccggcctgcagcctggaacagactacaagatctacctgtacaccctgaatgacaatgcccggagcagccctgtggtgattgatgccagcacagccattgatgcccccagcaacctgcgcttcctggccaccacccccaacagcctgctggtgtcctggcagcccccccgggcccgcatcaccggctacatcatcaagtatgagaagccaggcagccccccccgggaggtggtgccccggcccaggcctggggtgacagaggccaccatcaccggcctggagcctggaacagagtacaccatctacgtgattgccctgaagaacaaccagaagtctgagcccctcatcggcaggaagaagacagtgaatgaaggcctgaaccagcccacagatgacagctgctttgacccctacacagtgagccactatgctgtgggagatgagtgggagaggatgtctgagagcggcttcaagctgctgtgccagtgcctgggcttcggcagcggccacttccgctgtgacagcagccgctggtgccacgacaacggggtgaactacaagatcggggagaagtgggaccggcagggagaaaatggccagatgatgagctgcacctgcctgggcaatggaaaaggagagttcaagtgtgacccccatgaggccacctgctatgatgatggcaagacctaccacgtgggggagcagtggcagaaggagtacctgggcgccatctgcagctgcacctgcttcggcggccagaggggctggaggtgtgacaactgccggcggcctggaggagagcccagccctgagggcaccaccggccagagctacaaccagtacagccagcgctaccaccagaggaccaacaccaacgtgaactgccccatcgagtgcttcatgcccctggatgtgcaggccgaccgggaggacagccgggagtag

SEQ ID NO: 19718 - DNA, 6636 bp, synthetic construct
  misc_feature 1..6636: note = Description of Artificial Sequence: Synthetic coding sequence
  source 1..6636: mol_type = other DNA
atgctgcggggccctggccctggcctgctgctgctggccgtgcagtgcctgggcacagctgtgcccagcactggagccagcaagagcaagaggcaggcccagcagatggtgcagccccagagccctgtggccgtgtcccagagcaagccaggctgctatgacaatggcaagcactaccagatcaaccagcagtgggagaggacctacctgggcaatgccctggtgtgcacctgctatggaggcagccggggcttcaactgtgagagcaagccagaggccgaggagacctgctttgacaagtacacaggcaacacctacagagtgggggacacctatgaaagacccaaggacagcatgatctgggactgcacctgcatcggggccggccggggccgcatcagctgcaccatcgccaaccgctgccacgagggcggccagagctacaagatcggggacacctggaggcggccccatgagaccggcggctacatgctggagtgtgtgtgcctgggcaatggcaagggggagtggacctgcaagcccatcgccgagaagtgctttgaccacgccgccggcaccagctatgtggtgggggagacctgggagaagccctaccagggctggatgatggtggactgcacctgcctgggggagggcagcggccgcatcacctgcaccagcaggaaccgctgcaatgaccaggacaccaggaccagctaccgcatcggggacacctggagcaagaaggacaacagaggcaacctgctgcagtgcatctgcacaggaaatggccgcggggagtggaagtgtgagcggcacacctctgtgcagaccaccagcagcggcagcggccccttcacagatgtgcgggctgctgtgtaccagccccagccccacccccagcccccaccctacggccactgtgtgacagacagcggcgtggtgtacagcgtgggcatgcagtggctgaagacccagggcaacaagcagatgctgtgcacctgcctgggcaatggagtgtcctgccaggagacagctgtgacccagacctatggaggcaacagcaatggagagccctgtgtgctgcccttcacctacaatggaagaaccttctacagctgcaccacagagggccggcaggacggccacctgtggtgcagcaccaccagcaactatgagcaggaccagaagtacagcttctgcacagaccacacagtgctggtgcagacccggggcggcaacagcaatggagccctgtgccacttccccttcctgtacaacaaccacaactacacagactgcaccagcgagggcagaagagacaacatgaagtggtgtggcaccacccagaactatgatgctgaccagaagtttggcttctgccccatggccgcccacgaggagatctgcaccaccaatgaaggagtgatgtaccgcatcggggaccagtgggacaagcagcacgacatgggccacatgatgcgctgcacctgtgtgggcaatggccgcggggagtggacctgcatcgcctacagccagctgcgggaccagtgcatcgtggatgacatcacctacaacgtgaatgacaccttccacaagagacatgaggagggccacatgctgaactgcacctgcttcggccagggccggggccgctggaagtgtgaccctgtggaccagtgccaggacagcgagaccggcaccttctaccagatcggggacagctgggagaagtatgtgcatggagtgcgctaccagtgctactgctacggccggggcatcggggagtggcactgccagcccctgcagacctaccccagcagcagcggccctgtggaggtgttcatcacagagacccccagccagcccaacagccaccccatccagtggaatgccccccagcccagccacatcagcaagtacatcctgcgctggaggcccaagaacagcgtgggccgctggaaggaggccaccatccctggccacctgaacagctacaccatcaagggcctgaagccaggagtggtgtatgagggccagctgatcagcatccagcagtatggccaccaggaggtgaccaggtttgacttcaccaccaccagcaccagcacccctgtgaccagcaacacagtgactggagagaccacccccttcagccccctggtggccaccagcgagagcgtgacagagatcacagccagcagctttgtggtgtcctgggtgtctgccagtgacacagtgtctggcttccgggtggagtatgagctgtctgaggagggagatgagccccagtacctggacctgcccagcacagccacctctgtgaacatcccagacctgctgcccggcaggaagtacatcgtgaatgtgtaccagatcagtgaagatggagagcagagcctcatcctgagcaccagccagaccacagccccagatgcccccccagacaccaccgtggaccaggtggatgacaccagcatcgtggtgcgctggagccggccccaggcccccatcaccggctacagaattgtgtacagccccagcgtggagggcagcagcacagagctgaacctgcctgagacagccaacagcgtgaccctgagtgacctgcagcccggggtgcagtacaacatcaccatctatgctgtggaggagaaccaggagagcacccctgtggtgatccagcaggagaccaccggcacccccaggagtgacacagtgcccagcccccgggacctgcagtttgtggaggtgacagatgtgaaggtgaccatcatgtggaccccacctgagagcgctgtgacaggctacagagtggatgtgattcctgtgaacctgcctggagagcacggccagaggctgcccatcagcaggaacacctttgctgaggtgacaggcctgagccctggggtgacctactacttcaaggtgtttgctgtgagccacggccgggagagcaagcccctgacagcccagcagaccaccaagctggatgcccccaccaacctgcagtttgtgaatgaaacagacagcacagtgctggtgcgctggaccccaccccgggcccagatcaccggctaccgcctgactgtgggcctgacccggcggggccagccccggcagtacaacgtgggccccagcgtgtccaagtaccccctgaggaacctgcagcctgccagcgagtacacagtgtccctggtggccatcaagggcaaccaggagagccccaaggccactggagtcttcaccaccctgcagcccggcagcagcatccccccctacaacacagaggtgacagagaccaccatcgtcatcacctggaccccagcccccagaattggcttcaagctgggcgtgcggcccagccagggcggggaggccccccgggaggtgaccagtgacagcggcagcatcgtggtgtctggcctgaccccaggagtggagtatgtgtacaccatccaggtgctgagagatggccaggagagagatgcccccatcgtgaacaaggtggtgacccccctgagcccccccaccaacctgcacctggaggccaacccagacaccggggtgctgactgtgtcctgggagaggagcaccaccccagacatcaccggctaccgcatcaccaccacccccaccaacggccagcagggcaacagcctggaggaggtggtgcatgctgaccagagcagctgcacctttgacaacctgagccctggcctggagtacaacgtgtctgtgtacacagtgaaggatgacaaggagagcgtgcccatcagtgacaccatcatcccagctgtgcccccacccacagacctgcgcttcaccaacatcggccctgacaccatgagggtgacctgggcccccccacccagcattgacctgaccaacttcctggtgcgctacagccctgtgaagaatgaagaagatgtggccgagctgagcatcagccccagcgacaatgctgtggtgctgaccaacctgctgcccggcacagaatatgtggtgtctgtgtcctctgtgtatgagcagcacgagagcacccccctgcggggccggcagaagacaggcctggacagccccaccggcatcgacttcagtgacatcacagccaacagcttcaccgtgcactggatcgccccccgggccaccatcaccggctaccgcatccgccaccaccctgagcacttcagcggccggcccagagaagatagagtgccccacagcaggaacagcatcaccctgaccaacctgaccccaggcacagaatatgtggtgtccatcgtggccctgaatggccgggaggagagccccctgctgattggccagcagagcacagtgtctgatgtgccccgggacctggaggtggtggccgccacccccaccagcctgctgatctcctgggatgccccagctgtgacagtgcgctactaccgcatcacctacggggagactggaggcaacagccctgtgcaggagttcaccgtgcccggcagcaagagcacagccaccatcagcggcctgaagccaggagtggactacaccatcaccgtgtatgctgtgacaggccgcggggacagccctgccagcagcaagcccatcagcatcaactacagaacagaaattgacaagcccagccagatgcaggtgacagatgtgcaggacaacagcatctctgtgaagtggctgcccagcagcagccctgtgacaggctacagagtgaccaccacccccaagaatggacctggccccaccaagaccaagacagctggccctgaccagacagagatgaccatcgagggcctgcagcccaccgtggagtatgtggtgtctgtgtatgcccagaaccccagcggggagagccagcccctggtgcagacagctgtgaccaacatcgaccggcccaagggcctggccttcacagatgtggatgtggacagcatcaagatcgcctgggagagcccccagggccaggtgagccgctacagagtgacctacagcagcccagaagatggcatccacgagctgtttcctgccccagatggagaggaggacacagctgagctgcagggcctgcggcccggcagcgagtacacagtgtctgtggtggccctgcatgatgacatggagagccagcccctgattggcacccagagcacagccatcccagcccccacagacctgaagttcacccaggtgacccccaccagcctgagcgcccagtggaccccacccaacgtgcagctgaccggctacagagtgcgggtgacccccaaggagaagacaggccccatgaaggagatcaacctggccccagacagcagctctgtggtggtgtctggcctgatggtggccaccaagtatgaggtgtctgtgtatgccctgaaggacaccctgaccagcaggcctgcccagggcgtggtgaccaccctggagaatgtgagccccccccggcgggcccgggtgacagatgccacagagaccaccatcaccatctcctggaggaccaagacagagaccatcaccggcttccaggtggatgctgtgcctgccaacggccagacccccatccagaggaccatcaagccagatgtgcgcagctacaccatcaccggcctgcagcctggaacagactacaagatctacctgtacaccctgaatgacaatgcccggagcagccctgtggtgattgatgccagcacagccattgatgcccccagcaacctgcgcttcctggccaccacccccaacagcctgctggtgtcctggcagcccccccgggcccgcatcaccggctacatcatcaagtatgagaagccaggcagccccccccgggaggtggtgccccggcccaggcctggggtgacagaggccaccatcaccggcctggagcctggaacagagtacaccatctacgtgattgccctgaagaacaaccagaagtctgagcccctcatcggcaggaagaagacaggccaggaggccctgagccagaccaccatctcctgggcccccttccaggacaccagcgagtacatcatcagctgccaccctgtgggcacagatgaggagcccctgcagttccgggtgcccggcaccagcaccagcgccaccctgaccggcctgaccaggggggccacctacaacgtgattgtggaggccctgaaggaccagcagaggcacaaggtgcgggaggaggtggtgacagtgggcaacagcggctggtgccacgacaatggagtgaactacaagattggagagaagtgggaccggcagggagaaaatggccagatgatgagctgcacctgcctgggcaatggcaagggggagttcaagtgtgacccccatgaggccacctgctatgatgatggcaagacctaccacgtgggggagcagtggcagaaggagtacctgggcgccatctgcagctgcacctgctttggaggccagaggggctggaggtgtgacaactgcagaagacctggaggagagcccagccctgagggcaccaccggccagagctacaaccagtacagccagcgctaccaccagaggaccaacaccaacgtgaactgccccatcgagtgcttcatgcccctggatgtgcaggccgaccgggaggacagccgggagtag

SEQ ID NO: 19719 - DNA, 7434 bp, synthetic construct
  misc_feature 1..7434: note = Description of Artificial Sequence: Synthetic coding sequence
  source 1..7434: mol_type = other DNA
atgctgcggggccctggccctggcctgctgctgctggccgtgcagtgcctgggcacagctgtgcccagcactggagccagcaagagcaagaggcaggcccagcagatggtgcagccccagagccctgtggccgtgtcccagagcaagccaggctgctatgacaatggcaagcactaccagatcaaccagcagtgggagaggacctacctgggcaatgccctggtgtgcacctgctatggaggcagccggggcttcaactgtgagagcaagccagaggccgaggagacctgctttgacaagtacacaggcaacacctacagagtgggggacacctatgaaagacccaaggacagcatgatctgggactgcacctgcatcggggccggccggggccgcatcagctgcaccatcgccaaccgctgccacgagggcggccagagctacaagatcggggacacctggaggcggccccatgagaccggcggctacatgctggagtgtgtgtgcctgggcaatggcaagggggagtggacctgcaagcccatcgccgagaagtgctttgaccacgccgccggcaccagctatgtggtgggggagacctgggagaagccctaccagggctggatgatggtggactgcacctgcctgggggagggcagcggccgcatcacctgcaccagcaggaaccgctgcaatgaccaggacaccaggaccagctaccgcatcggggacacctggagcaagaaggacaacagaggcaacctgctgcagtgcatctgcacaggaaatggccgcggggagtggaagtgtgagcggcacacctctgtgcagaccaccagcagcggcagcggccccttcacagatgtgcgggctgctgtgtaccagccccagccccacccccagcccccaccctacggccactgtgtgacagacagcggcgtggtgtacagcgtgggcatgcagtggctgaagacccagggcaacaagcagatgctgtgcacctgcctgggcaatggagtgtcctgccaggagacagctgtgacccagacctatggaggcaacagcaatggagagccctgtgtgctgcccttcacctacaatggaagaaccttctacagctgcaccacagagggccggcaggacggccacctgtggtgcagcaccaccagcaactatgagcaggaccagaagtacagcttctgcacagaccacacagtgctggtgcagacccggggcggcaacagcaatggagccctgtgccacttccccttcctgtacaacaaccacaactacacagactgcaccagcgagggcagaagagacaacatgaagtggtgtggcaccacccagaactatgatgctgaccagaagtttggcttctgccccatggccgcccacgaggagatctgcaccaccaatgaaggagtgatgtaccgcatcggggaccagtgggacaagcagcacgacatgggccacatgatgcgctgcacctgtgtgggcaatggccgcggggagtggacctgcatcgcctacagccagctgcgggaccagtgcatcgtggatgacatcacctacaacgtgaatgacaccttccacaagagacatgaggagggccacatgctgaactgcacctgcttcggccagggccggggccgctggaagtgtgaccctgtggaccagtgccaggacagcgagaccggcaccttctaccagatcggggacagctgggagaagtatgtgcatggagtgcgctaccagtgctactgctacggccggggcatcggggagtggcactgccagcccctgcagacctaccccagcagcagcggccctgtggaggtgttcatcacagagacccccagccagcccaacagccaccccatccagtggaatgccccccagcccagccacatcagcaagtacatcctgcgctggaggcccaagaacagcgtgggccgctggaaggaggccaccatccctggccacctgaacagctacaccatcaagggcctgaagccaggagtggtgtatgagggccagctgatcagcatccagcagtatggccaccaggaggtgaccaggtttgacttcaccaccaccagcaccagcacccctgtgaccagcaacacagtgactggagagaccacccccttcagccccctggtggccaccagcgagagcgtgacagagatcacagccagcagctttgtggtgtcctgggtgtctgccagtgacacagtgtctggcttccgggtggagtatgagctgtctgaggagggagatgagccccagtacctggacctgcccagcacagccacctctgtgaacatcccagacctgctgcccggcaggaagtacatcgtgaatgtgtaccagatcagtgaagatggagagcagagcctcatcctgagcaccagccagaccacagccccagatgcccccccagacaccaccgtggaccaggtggatgacaccagcatcgtggtgcgctggagccggccccaggcccccatcaccggctacagaattgtgtacagccccagcgtggagggcagcagcacagagctgaacctgcctgagacagccaacagcgtgaccctgagtgacctgcagcccggggtgcagtacaacatcaccatctatgctgtggaggagaaccaggagagcacccctgtggtgatccagcaggagaccaccggcacccccaggagtgacacagtgcccagcccccgggacctgcagtttgtggaggtgacagatgtgaaggtgaccatcatgtggaccccacctgagagcgctgtgacaggctacagagtggatgtgattcctgtgaacctgcctggagagcacggccagaggctgcccatcagcaggaacacctttgctgaggtgacaggcctgagccctggggtgacctactacttcaaggtgtttgctgtgagccacggccgggagagcaagcccctgacagcccagcagaccaccaagctggatgcccccaccaacctgcagtttgtgaatgaaacagacagcacagtgctggtgcgctggaccccaccccgggcccagatcaccggctaccgcctgactgtgggcctgacccggcggggccagccccggcagtacaacgtgggccccagcgtgtccaagtaccccctgaggaacctgcagcctgccagcgagtacacagtgtccctggtggccatcaagggcaaccaggagagccccaaggccactggagtcttcaccaccctgcagcccggcagcagcatccccccctacaacacagaggtgacagagaccaccatcgtcatcacctggaccccagcccccagaattggcttcaagctgggcgtgcggcccagccagggcggggaggccccccgggaggtgaccagtgacagcggcagcatcgtggtgtctggcctgaccccaggagtggagtatgtgtacaccatccaggtgctgagagatggccaggagagagatgcccccatcgtgaacaaggtggtgacccccctgagcccccccaccaacctgcacctggaggccaacccagacaccggggtgctgactgtgtcctgggagaggagcaccaccccagacatcaccggctaccgcatcaccaccacccccaccaacggccagcagggcaacagcctggaggaggtggtgcatgctgaccagagcagctgcacctttgacaacctgagccctggcctggagtacaacgtgtctgtgtacacagtgaaggatgacaaggagagcgtgcccatcagtgacaccatcatccctgaggtgccccagctgacagacctgagctttgtggacatcacagacagcagcatcggcctgcgctggacccccctgaacagcagcaccatcatcggctaccgcatcaccgtggtggccgccggggagggcatccccatctttgaagattttgtggacagctctgtgggctactacacagtgacaggcctggagcccggcatcgactatgacatcagcgtcatcaccctcatcaatggaggagagagcgcccccaccaccctgacccagcagacagctgtgcccccacccacagacctgcgcttcaccaacattggaccagacaccatgagggtgacctgggcccctcctccttccattgacctgaccaacttcctggtgcgctacagccctgtgaagaatgaggaggatgtggccgagctgagcatcagccccagcgacaatgctgtggtgctgaccaacctgctgcctggaacagaatatgtggtgtctgtgtcctctgtgtatgagcagcacgagagcacccccctgcggggccggcagaagacaggcctggacagccccactggaattgacttcagtgacatcacagccaacagcttcaccgtgcactggatcgccccccgggccaccatcaccggctaccgcatccgccaccaccctgagcacttcagcggccggccccgggaggacagagtgccccacagcagaaattccatcaccctgaccaacctgaccccaggcacagaatatgtggtgtccatcgtggccctgaatggccgggaggagagccccctgctgattggccagcagagcacagtgtctgatgtgccccgggacctggaggtggtggccgccacccccaccagcctgctgatctcctgggatgccccagctgtgacagtgcgctactaccgcatcacctatggagagaccggcggcaacagccctgtgcaggagttcaccgtgcccggcagcaagagcacagccaccatcagcggcctgaagccaggagtggactacaccatcaccgtgtatgctgtgacaggccgcggggacagccctgccagcagcaagcccatcagcatcaactacagaacagaaattgacaagcccagccagatgcaggtgacagatgtgcaggacaacagcatctctgtgaagtggctgcccagcagcagccctgtgacaggctacagagtgaccaccacccccaagaatggacctggccccaccaagaccaagacagctggccctgaccagacagagatgaccatcgagggcctgcagcccaccgtggagtatgtggtgtctgtgtatgcccagaaccccagcggggagagccagcccctggtgcagacagctgtgaccaacatcgaccggcccaagggcctggccttcacagatgtggatgtggacagcatcaagatcgcctgggagagcccccagggccaggtgagccgctacagagtgacctacagcagcccagaagatggcatccacgagctgtttcctgccccagatggagaggaggacacagctgagctgcagggcctgcggcccggcagcgagtacacagtgtctgtggtggccctgcatgatgacatggagagccagcccctcatcggcacccagagcacagccatcccagcccccacagacctgaagttcacccaggtgacccccaccagcctgagcgcccagtggaccccaccaaatgtgcagctgaccggctacagagtgcgggtgacccccaaggagaagacaggccccatgaaggagatcaacctggccccagacagcagctctgtggtggtgtctggcctgatggtggccaccaagtatgaggtgtctgtgtatgccctgaaggacaccctgaccagcaggcctgcccagggcgtggtgaccaccctggagaatgtgtccccaccaagaagagcccgggtgacagatgccacagagaccaccatcaccatctcctggaggaccaagacagagaccatcaccggcttccaggtggatgctgtgcctgccaacggccagacccccatccagaggaccatcaagccagatgtgcgcagctacaccatcaccggcctgcagcccggcacagactacaagatctacctgtacaccctgaatgacaatgcccggagcagccctgtggtgattgatgccagcacagccattgatgcccccagcaacctgcgcttcctggccaccacccccaacagcctgctggtgtcctggcagcccccccgggcccgcatcaccggctacatcatcaagtatgagaagccaggcagccccccccgggaggtggtgccccggcccaggcctggggtgacagaggccaccatcaccggcctggagcccggcacagagtacaccatctacgtgattgccctgaagaacaaccagaagtctgagcccctgattggaaggaagaagacagatgagctgccccagctggtgaccctgccccaccccaacctgcacggccctgagatcctggatgtgcccagcacagtgcagaagaccccatttgtgacccaccctggctatgacacaggaaatggcatccagctgcccggcaccagcggccagcagcccagcgtgggccagcagatgatctttgaggagcacggcttccggaggaccaccccacccaccacagccacccccatccgccaccggccccggccctacccacccaacgtgggggaggagatccagatcggccacatccccagagaagatgtggactaccacctgtacccccacggccctggcctgaaccccaatgccagcacaggccaggaggccctgagccagaccaccatctcctgggcccccttccaggacaccagcgagtacatcatcagctgccaccctgtgggcacagatgaggagcccctgcagttccgggtgcccggcaccagcaccagcgccaccctgaccggcctgaccaggggggccacctacaacgtcatcgtggaggccctgaaggaccagcagaggcacaaggtgcgggaggaggtggtgacagtgggcaacagcgtgaatgaaggcctgaaccagcccacagatgacagctgctttgacccctacacagtgagccactatgctgtgggagatgagtgggagaggatgtctgagagcggcttcaagctgctgtgccagtgcctgggctttggaagtggccacttccgctgtgacagcagccgctggtgccacgacaatggagtgaactacaagattggagagaagtgggaccggcagggagaaaatggccagatgatgagctgcacctgcctgggcaatggcaagggggagttcaagtgtgacccccatgaggccacctgctatgatgatggcaagacctaccacgtgggggagcagtggcagaaggagtacctgggcgccatctgcagctgcacctgctttggaggccagaggggctggaggtgtgacaactgcagaagacctggaggagagcccagccctgagggcaccaccggccagagctacaaccagtacagccagcgctaccaccagaggaccaacaccaacgtgaactgccccatcgagtgcttcatgcccctggatgtgcaggccgaccgggaggacagccgggagtag

SEQ ID NO: 19720 - DNA, 6891 bp, synthetic construct
  misc_feature 1..6891: note = Description of Artificial Sequence: Synthetic coding sequence
  source 1..6891: mol_type = other DNA
atgctgcggggccctggccctggcctgctgctgctggccgtgcagtgcctgggcacagctgtgcccagcactggagccagcaagagcaagaggcaggcccagcagatggtgcagccccagagccctgtggccgtgtcccagagcaagccaggctgctatgacaatggcaagcactaccagatcaaccagcagtgggagaggacctacctgggcaatgccctggtgtgcacctgctatggaggcagccggggcttcaactgtgagagcaagccagaggccgaggagacctgctttgacaagtacacaggcaacacctacagagtgggggacacctatgaaagacccaaggacagcatgatctgggactgcacctgcatcggggccggccggggccgcatcagctgcaccatcgccaaccgctgccacgagggcggccagagctacaagatcggggacacctggaggcggccccatgagaccggcggctacatgctggagtgtgtgtgcctgggcaatggcaagggggagtggacctgcaagcccatcgccgagaagtgctttgaccacgccgccggcaccagctatgtggtgggggagacctgggagaagccctaccagggctggatgatggtggactgcacctgcctgggggagggcagcggccgcatcacctgcaccagcaggaaccgctgcaatgaccaggacaccaggaccagctaccgcatcggggacacctggagcaagaaggacaacagaggcaacctgctgcagtgcatctgcacaggaaatggccgcggggagtggaagtgtgagcggcacacctctgtgcagaccaccagcagcggcagcggccccttcacagatgtgcgggctgctgtgtaccagccccagccccacccccagcccccaccctacggccactgtgtgacagacagcggcgtggtgtacagcgtgggcatgcagtggctgaagacccagggcaacaagcagatgctgtgcacctgcctgggcaatggagtgtcctgccaggagacagctgtgacccagacctatggaggcaacagcaatggagagccctgtgtgctgcccttcacctacaatggaagaaccttctacagctgcaccacagagggccggcaggacggccacctgtggtgcagcaccaccagcaactatgagcaggaccagaagtacagcttctgcacagaccacacagtgctggtgcagacccggggcggcaacagcaatggagccctgtgccacttccccttcctgtacaacaaccacaactacacagactgcaccagcgagggcagaagagacaacatgaagtggtgtggcaccacccagaactatgatgctgaccagaagtttggcttctgccccatggccgcccacgaggagatctgcaccaccaatgaaggagtgatgtaccgcatcggggaccagtgggacaagcagcacgacatgggccacatgatgcgctgcacctgtgtgggcaatggccgcggggagtggacctgcatcgcctacagccagctgcgggaccagtgcatcgtggatgacatcacctacaacgtgaatgacaccttccacaagagacatgaggagggccacatgctgaactgcacctgcttcggccagggccggggccgctggaagtgtgaccctgtggaccagtgccaggacagcgagaccggcaccttctaccagatcggggacagctgggagaagtatgtgcatggagtgcgctaccagtgctactgctacggccggggcatcggggagtggcactgccagcccctgcagacctaccccagcagcagcggccctgtggaggtgttcatcacagagacccccagccagcccaacagccaccccatccagtggaatgccccccagcccagccacatcagcaagtacatcctgcgctggaggcccaagaacagcgtgggccgctggaaggaggccaccatccctggccacctgaacagctacaccatcaagggcctgaagccaggagtggtgtatgagggccagctgatcagcatccagcagtatggccaccaggaggtgaccaggtttgacttcaccaccaccagcaccagcacccctgtgaccagcaacacagtgactggagagaccacccccttcagccccctggtggccaccagcgagagcgtgacagagatcacagccagcagctttgtggtgtcctgggtgtctgccagtgacacagtgtctggcttccgggtggagtatgagctgtctgaggagggagatgagccccagtacctggacctgcccagcacagccacctctgtgaacatcccagacctgctgcccggcaggaagtacatcgtgaatgtgtaccagatcagtgaagatggagagcagagcctcatcctgagcaccagccagaccacagccccagatgcccccccagacaccaccgtggaccaggtggatgacaccagcatcgtggtgcgctggagccggccccaggcccccatcaccggctacagaattgtgtacagccccagcgtggagggcagcagcacagagctgaacctgcctgagacagccaacagcgtgaccctgagtgacctgcagcccggggtgcagtacaacatcaccatctatgctgtggaggagaaccaggagagcacccctgtggtgatccagcaggagaccaccggcacccccaggagtgacacagtgcccagcccccgggacctgcagtttgtggaggtgacagatgtgaaggtgaccatcatgtggaccccacctgagagcgctgtgacaggctacagagtggatgtgattcctgtgaacctgcctggagagcacggccagaggctgcccatcagcaggaacacctttgctgaggtgacaggcctgagccctggggtgacctactacttcaaggtgtttgctgtgagccacggccgggagagcaagcccctgacagcccagcagaccaccaagctggatgcccccaccaacctgcagtttgtgaatgaaacagacagcacagtgctggtgcgctggaccccaccccgggcccagatcaccggctaccgcctgactgtgggcctgacccggcggggccagccccggcagtacaacgtgggccccagcgtgtccaagtaccccctgaggaacctgcagcctgccagcgagtacacagtgtccctggtggccatcaagggcaaccaggagagccccaaggccactggagtcttcaccaccctgcagcccggcagcagcatccccccctacaacacagaggtgacagagaccaccatcgtcatcacctggaccccagcccccagaattggcttcaagctgggcgtgcggcccagccagggcggggaggccccccgggaggtgaccagtgacagcggcagcatcgtggtgtctggcctgaccccaggagtggagtatgtgtacaccatccaggtgctgagagatggccaggagagagatgcccccatcgtgaacaaggtggtgacccccctgagcccccccaccaacctgcacctggaggccaacccagacaccggggtgctgactgtgtcctgggagaggagcaccaccccagacatcaccggctaccgcatcaccaccacccccaccaacggccagcagggcaacagcctggaggaggtggtgcatgctgaccagagcagctgcacctttgacaacctgagccctggcctggagtacaacgtgtctgtgtacacagtgaaggatgacaaggagagcgtgcccatcagtgacaccatcatcccagctgtgcccccacccacagacctgcgcttcaccaacatcggccctgacaccatgagggtgacctgggcccccccacccagcattgacctgaccaacttcctggtgcgctacagccctgtgaagaatgaagaagatgtggccgagctgagcatcagccccagcgacaatgctgtggtgctgaccaacctgctgcccggcacagaatatgtggtgtctgtgtcctctgtgtatgagcagcacgagagcacccccctgcggggccggcagaagacaggcctggacagccccaccggcatcgacttcagtgacatcacagccaacagcttcaccgtgcactggatcgccccccgggccaccatcaccggctaccgcatccgccaccaccctgagcacttcagcggccggcccagagaagatagagtgccccacagcaggaacagcatcaccctgaccaacctgaccccaggcacagaatatgtggtgtccatcgtggccctgaatggccgggaggagagccccctgctgattggccagcagagcacagtgtctgatgtgccccgggacctggaggtggtggccgccacccccaccagcctgctgatctcctgggatgccccagctgtgacagtgcgctactaccgcatcacctacggggagactggaggcaacagccctgtgcaggagttcaccgtgcccggcagcaagagcacagccaccatcagcggcctgaagccaggagtggactacaccatcaccgtgtatgctgtgacaggccgcggggacagccctgccagcagcaagcccatcagcatcaactacagaacagaaattgacaagcccagccagatgcaggtgacagatgtgcaggacaacagcatctctgtgaagtggctgcccagcagcagccctgtgacaggctacagagtgaccaccacccccaagaatggacctggccccaccaagaccaagacagctggccctgaccagacagagatgaccatcgagggcctgcagcccaccgtggagtatgtggtgtctgtgtatgcccagaaccccagcggggagagccagcccctggtgcagacagctgtgaccaccatcccagcccccacagacctgaagttcacccaggtgacccccaccagcctgagcgcccagtggaccccacccaacgtgcagctgaccggctacagagtgcgggtgacccccaaggagaagacaggccccatgaaggagatcaacctggccccagacagcagctctgtggtggtgtctggcctgatggtggccaccaagtatgaggtgtctgtgtatgccctgaaggacaccctgaccagcaggcctgcccagggcgtggtgaccaccctggagaatgtgagccccccccggcgggcccgggtgacagatgccacagagaccaccatcaccatctcctggaggaccaagacagagaccatcaccggcttccaggtggatgctgtgcctgccaacggccagacccccatccagaggaccatcaagccagatgtgcgcagctacaccatcaccggcctgcagcctggaacagactacaagatctacctgtacaccctgaatgacaatgcccggagcagccctgtggtgattgatgccagcacagccattgatgcccccagcaacctgcgcttcctggccaccacccccaacagcctgctggtgtcctggcagcccccccgggcccgcatcaccggctacatcatcaagtatgagaagccaggcagccccccccgggaggtggtgccccggcccaggcctggggtgacagaggccaccatcaccggcctggagcctggaacagagtacaccatctacgtgattgccctgaagaacaaccagaagtctgagcccctcatcggcaggaagaagacagatgagctgccccagctggtgaccctgccccaccccaacctgcacggccctgagatcctggatgtgcccagcacagtgcagaagaccccatttgtgacccaccctggctatgacacaggaaatggcatccagctgcccggcaccagcggccagcagcccagcgtgggccagcagatgatctttgaggagcacggcttccggaggaccaccccacccaccacagccacccccatccgccaccggccccggccctaccccccaaatgtgggggaggagatccagatcggccacatcccccgggaggatgtggactaccacctgtacccccacggccctggcctgaaccccaatgccagcacaggccaggaggccctgagccagaccaccatctcctgggcccccttccaggacaccagcgagtacatcatcagctgccaccctgtgggcacagatgaggagcccctgcagttccgggtgcccggcaccagcaccagcgccaccctgaccggcctgaccaggggggccacctacaacgtgattgtggaggccctgaaggaccagcagaggcacaaggtgcgggaggaggtggtgacagtgggcaacagcgtgaatgaaggcctgaaccagcccacagatgacagctgctttgacccctacacagtgagccactatgctgtgggagatgagtgggagaggatgtctgagagcggcttcaagctgctgtgccagtgcctgggcttcggcagcggccacttccgctgtgacagcagccgctggtgccacgacaacggggtgaactacaagatcggggagaagtgggaccggcagggagaaaatggccagatgatgagctgcacctgcctgggcaatggaaaaggagagttcaagtgtgacccccatgaggccacctgctatgatgatggcaagacctaccacgtgggggagcagtggcagaaggagtacctgggcgccatctgcagctgcacctgcttcggcggccagaggggctggaggtgtgacaactgccggcggcctggaggagagcccagccctgagggcaccaccggccagagctacaaccagtacagccagcgctaccaccagaggaccaacaccaacgtgaactgccccatcgagtgcttcatgcccctggatgtgcaggccgaccgggaggacagccgggagtag

SEQ ID NO: 19721 - DNA, 6096 bp, synthetic construct
  misc_feature 1..6096: note = Description of Artificial Sequence: Synthetic coding sequence
  source 1..6096: mol_type = other DNA
atgctgcggggccctggccctggcctgctgctgctggccgtgcagtgcctgggcacagctgtgcccagcactggagccagcaagagcaagaggcaggcccagcagatggtgcagccccagagccctgtggccgtgtcccagagcaagccaggctgctatgacaatggcaagcactaccagatcaaccagcagtgggagaggacctacctgggcaatgccctggtgtgcacctgctatggaggcagccggggcttcaactgtgagagcaagccagaggccgaggagacctgctttgacaagtacacaggcaacacctacagagtgggggacacctatgaaagacccaaggacagcatgatctgggactgcacctgcatcggggccggccggggccgcatcagctgcaccatcgccaaccgctgccacgagggcggccagagctacaagatcggggacacctggaggcggccccatgagaccggcggctacatgctggagtgtgtgtgcctgggcaatggcaagggggagtggacctgcaagcccatcgccgagaagtgctttgaccacgccgccggcaccagctatgtggtgggggagacctgggagaagccctaccagggctggatgatggtggactgcacctgcctgggggagggcagcggccgcatcacctgcaccagcaggaaccgctgcaatgaccaggacaccaggaccagctaccgcatcggggacacctggagcaagaaggacaacagaggcaacctgctgcagtgcatctgcacaggaaatggccgcggggagtggaagtgtgagcggcacacctctgtgcagaccaccagcagcggcagcggccccttcacagatgtgcgggctgctgtgtaccagccccagccccacccccagcccccaccctacggccactgtgtgacagacagcggcgtggtgtacagcgtgggcatgcagtggctgaagacccagggcaacaagcagatgctgtgcacctgcctgggcaatggagtgtcctgccaggagacagctgtgacccagacctatggaggcaacagcaatggagagccctgtgtgctgcccttcacctacaatggaagaaccttctacagctgcaccacagagggccggcaggacggccacctgtggtgcagcaccaccagcaactatgagcaggaccagaagtacagcttctgcacagaccacacagtgctggtgcagacccggggcggcaacagcaatggagccctgtgccacttccccttcctgtacaacaaccacaactacacagactgcaccagcgagggcagaagagacaacatgaagtggtgtggcaccacccagaactatgatgctgaccagaagtttggcttctgccccatggccgcccacgaggagatctgcaccaccaatgaaggagtgatgtaccgcatcggggaccagtgggacaagcagcacgacatgggccacatgatgcgctgcacctgtgtgggcaatggccgcggggagtggacctgcatcgcctacagccagctgcgggaccagtgcatcgtggatgacatcacctacaacgtgaatgacaccttccacaagagacatgaggagggccacatgctgaactgcacctgcttcggccagggccggggccgctggaagtgtgaccctgtggaccagtgccaggacagcgagaccggcaccttctaccagatcggggacagctgggagaagtatgtgcatggagtgcgctaccagtgctactgctacggccggggcatcggggagtggcactgccagcccctgcagacctaccccagcagcagcggccctgtggaggtgttcatcacagagacccccagccagcccaacagccaccccatccagtggaatgccccccagcccagccacatcagcaagtacatcctgcgctggaggcccaagaacagcgtgggccgctggaaggaggccaccatccctggccacctgaacagctacaccatcaagggcctgaagccaggagtggtgtatgagggccagctgatcagcatccagcagtatggccaccaggaggtgaccaggtttgacttcaccaccaccagcaccagcacccctgtgaccagcaacacagtgactggagagaccacccccttcagccccctggtggccaccagcgagagcgtgacagagatcacagccagcagctttgtggtgtcctgggtgtctgccagtgacacagtgtctggcttccgggtggagtatgagctgtctgaggagggagatgagccccagtacctggacctgcccagcacagccacctctgtgaacatcccagacctgctgcccggcaggaagtacatcgtgaatgtgtaccagatcagtgaagatggagagcagagcctcatcctgagcaccagccagaccacagccccagatgcccccccagacaccaccgtggaccaggtggatgacaccagcatcgtggtgcgctggagccggccccaggcccccatcaccggctacagaattgtgtacagccccagcgtggagggcagcagcacagagctgaacctgcctgagacagccaacagcgtgaccctgagtgacctgcagcccggggtgcagtacaacatcaccatctatgctgtggaggagaaccaggagagcacccctgtggtgatccagcaggagaccaccggcacccccaggagtgacacagtgcccagcccccgggacctgcagtttgtggaggtgacagatgtgaaggtgaccatcatgtggaccccacctgagagcgctgtgacaggctacagagtggatgtgattcctgtgaacctgcctggagagcacggccagaggctgcccatcagcaggaacacctttgctgaggtgacaggcctgagccctggggtgacctactacttcaaggtgtttgctgtgagccacggccgggagagcaagcccctgacagcccagcagaccaccaagctggatgcccccaccaacctgcagtttgtgaatgaaacagacagcacagtgctggtgcgctggaccccaccccgggcccagatcaccggctaccgcctgactgtgggcctgacccggcggggccagccccggcagtacaacgtgggccccagcgtgtccaagtaccccctgaggaacctgcagcctgccagcgagtacacagtgtccctggtggccatcaagggcaaccaggagagccccaaggccactggagtcttcaccaccctgcagcccggcagcagcatccccccctacaacacagaggtgacagagaccaccatcgtcatcacctggaccccagcccccagaattggcttcaagctgggcgtgcggcccagccagggcggggaggccccccgggaggtgaccagtgacagcggcagcatcgtggtgtctggcctgaccccaggagtggagtatgtgtacaccatccaggtgctgagagatggccaggagagagatgcccccatcgtgaacaaggtggtgacccccctgagcccccccaccaacctgcacctggaggccaacccagacaccggggtgctgactgtgtcctgggagaggagcaccaccccagacatcaccggctaccgcatcaccaccacccccaccaacggccagcagggcaacagcctggaggaggtggtgcatgctgaccagagcagctgcacctttgacaacctgagccctggcctggagtacaacgtgtctgtgtacacagtgaaggatgacaaggagagcgtgcccatcagtgacaccatcatcccagctgtgcccccacccacagacctgcgcttcaccaacatcggccctgacaccatgagggtgacctgggcccccccacccagcattgacctgaccaacttcctggtgcgctacagccctgtgaagaatgaagaagatgtggccgagctgagcatcagccccagcgacaatgctgtggtgctgaccaacctgctgcccggcacagaatatgtggtgtctgtgtcctctgtgtatgagcagcacgagagcacccccctgcggggccggcagaagacaggcctggacagccccaccggcatcgacttcagtgacatcacagccaacagcttcaccgtgcactggatcgccccccgggccaccatcaccggctaccgcatccgccaccaccctgagcacttcagcggccggcccagagaagatagagtgccccacagcaggaacagcatcaccctgaccaacctgaccccaggcacagaatatgtggtgtccatcgtggccctgaatggccgggaggagagccccctgctgattggccagcagagcacagtgtctgatgtgccccgggacctggaggtggtggccgccacccccaccagcctgctgatctcctgggatgccccagctgtgacagtgcgctactaccgcatcacctacggggagactggaggcaacagccctgtgcaggagttcaccgtgcccggcagcaagagcacagccaccatcagcggcctgaagccaggagtggactacaccatcaccgtgtatgctgtgacaggccgcggggacagccctgccagcagcaagcccatcagcatcaactacagaacagaaattgacaagcccagccagatgcaggtgacagatgtgcaggacaacagcatctctgtgaagtggctgcccagcagcagccctgtgacaggctacagagtgaccaccacccccaagaatggacctggccccaccaagaccaagacagctggccctgaccagacagagatgaccatcgagggcctgcagcccaccgtggagtatgtggtgtctgtgtatgcccagaaccccagcggggagagccagcccctggtgcagacagctgtgaccaacatcgaccggcccaagggcctggccttcacagatgtggatgtggacagcatcaagatcgcctgggagagcccccagggccaggtgagccgctacagagtgacctacagcagcccagaagatggcatccacgagctgtttcctgccccagatggagaggaggacacagctgagctgcagggcctgcggcccggcagcgagtacacagtgtctgtggtggccctgcatgatgacatggagagccagcccctgattggcacccagagcacagccatcccagcccccacagacctgaagttcacccaggtgacccccaccagcctgagcgcccagtggaccccacccaacgtgcagctgaccggctacagagtgcgggtgacccccaaggagaagacaggccccatgaaggagatcaacctggccccagacagcagctctgtggtggtgtctggcctgatggtggccaccaagtatgaggtgtctgtgtatgccctgaaggacaccctgaccagcaggcctgcccagggcgtggtgaccaccctggagaatgtgagccccccccggcgggcccgggtgacagatgccacagagaccaccatcaccatctcctggaggaccaagacagagaccatcaccggcttccaggtggatgctgtgcctgccaacggccagacccccatccagaggaccatcaagccagatgtgcgcagctacaccatcaccggcctgcagcctggaacagactacaagatctacctgtacaccctgaatgacaatgcccggagcagccctgtggtgattgatgccagcacagccattgatgcccccagcaacctgcgcttcctggccaccacccccaacagcctgctggtgtcctggcagcccccccgggcccgcatcaccggctacatcatcaagtatgagaagccaggcagccccccccgggaggtggtgccccggcccaggcctggggtgacagaggccaccatcaccggcctggagcctggaacagagtacaccatctacgtgattgccctgaagaacaaccagaagtctgagcccctcatcggcaggaagaagacaggccaggaggccctgagccagaccaccatctcctgggcccccttccaggacaccagcgagtacatcatcagctgccaccctgtgggcacagatgaggagcccctgcagagcaccaaggcctag

SEQ ID NO: 19722 - DNA, 6531 bp, synthetic construct
  misc_feature 1..6531: note = Description of Artificial Sequence: Synthetic coding sequence
  source 1..6531: mol_type = other DNA
atgctgcggggccctggccctggcctgctgctgctggccgtgcagtgcctgggcacagctgtgcccagcactggagccagcaagagcaagaggcaggcccagcagatggtgcagccccagagccctgtggccgtgtcccagagcaagccaggctgctatgacaatggcaagcactaccagatcaaccagcagtgggagaggacctacctgggcaatgccctggtgtgcacctgctatggaggcagccggggcttcaactgtgagagcaagccagaggccgaggagacctgctttgacaagtacacaggcaacacctacagagtgggggacacctatgaaagacccaaggacagcatgatctgggactgcacctgcatcggggccggccggggccgcatcagctgcaccatcgccaaccgctgccacgagggcggccagagctacaagatcggggacacctggaggcggccccatgagaccggcggctacatgctggagtgtgtgtgcctgggcaatggcaagggggagtggacctgcaagcccatcgccgagaagtgctttgaccacgccgccggcaccagctatgtggtgggggagacctgggagaagccctaccagggctggatgatggtggactgcacctgcctgggggagggcagcggccgcatcacctgcaccagcaggaaccgctgcaatgaccaggacaccaggaccagctaccgcatcggggacacctggagcaagaaggacaacagaggcaacctgctgcagtgcatctgcacaggaaatggccgcggggagtggaagtgtgagcggcacacctctgtgcagaccaccagcagcggcagcggccccttcacagatgtgcgggctgctgtgtaccagccccagccccacccccagcccccaccctacggccactgtgtgacagacagcggcgtggtgtacagcgtgggcatgcagtggctgaagacccagggcaacaagcagatgctgtgcacctgcctgggcaatggagtgtcctgccaggagacagctgtgacccagacctatggaggcaacagcaatggagagccctgtgtgctgcccttcacctacaatggaagaaccttctacagctgcaccacagagggccggcaggacggccacctgtggtgcagcaccaccagcaactatgagcaggaccagaagtacagcttctgcacagaccacacagtgctggtgcagacccggggcggcaacagcaatggagccctgtgccacttccccttcctgtacaacaaccacaactacacagactgcaccagcgagggcagaagagacaacatgaagtggtgtggcaccacccagaactatgatgctgaccagaagtttggcttctgccccatggccgcccacgaggagatctgcaccaccaatgaaggagtgatgtaccgcatcggggaccagtgggacaagcagcacgacatgggccacatgatgcgctgcacctgtgtgggcaatggccgcggggagtggacctgcatcgcctacagccagctgcgggaccagtgcatcgtggatgacatcacctacaacgtgaatgacaccttccacaagagacatgaggagggccacatgctgaactgcacctgcttcggccagggccggggccgctggaagtgtgaccctgtggaccagtgccaggacagcgagaccggcaccttctaccagatcggggacagctgggagaagtatgtgcatggagtgcgctaccagtgctactgctacggccggggcatcggggagtggcactgccagcccctgcagacctaccccagcagcagcggccctgtggaggtgttcatcacagagacccccagccagcccaacagccaccccatccagtggaatgccccccagcccagccacatcagcaagtacatcctgcgctggaggcccaagaacagcgtgggccgctggaaggaggccaccatccctggccacctgaacagctacaccatcaagggcctgaagccaggagtggtgtatgagggccagctgatcagcatccagcagtatggccaccaggaggtgaccaggtttgacttcaccaccaccagcaccagcacccctgtgaccagcaacacagtgactggagagaccacccccttcagccccctggtggccaccagcgagagcgtgacagagatcacagccagcagctttgtggtgtcctgggtgtctgccagtgacacagtgtctggcttccgggtggagtatgagctgtctgaggagggagatgagccccagtacctggacctgcccagcacagccacctctgtgaacatcccagacctgctgcccggcaggaagtacatcgtgaatgtgtaccagatcagtgaagatggagagcagagcctcatcctgagcaccagccagaccacagccccagatgcccccccagacaccaccgtggaccaggtggatgacaccagcatcgtggtgcgctggagccggccccaggcccccatcaccggctacagaattgtgtacagccccagcgtggagggcagcagcacagagctgaacctgcctgagacagccaacagcgtgaccctgagtgacctgcagcccggggtgcagtacaacatcaccatctatgctgtggaggagaaccaggagagcacccctgtggtgatccagcaggagaccaccggcacccccaggagtgacacagtgcccagcccccgggacctgcagtttgtggaggtgacagatgtgaaggtgaccatcatgtggaccccacctgagagcgctgtgacaggctacagagtggatgtgattcctgtgaacctgcctggagagcacggccagaggctgcccatcagcaggaacacctttgctgaggtgacaggcctgagccctggggtgacctactacttcaaggtgtttgctgtgagccacggccgggagagcaagcccctgacagcccagcagaccaccaagctggatgcccccaccaacctgcagtttgtgaatgaaacagacagcacagtgctggtgcgctggaccccaccccgggcccagatcaccggctaccgcctgactgtgggcctgacccggcggggccagccccggcagtacaacgtgggccccagcgtgtccaagtaccccctgaggaacctgcagcctgccagcgagtacacagtgtccctggtggccatcaagggcaaccaggagagccccaaggccactggagtcttcaccaccctgcagcccggcagcagcatccccccctacaacacagaggtgacagagaccaccatcgtcatcacctggaccccagcccccagaattggcttcaagctgggcgtgcggcccagccagggcggggaggccccccgggaggtgaccagtgacagcggcagcatcgtggtgtctggcctgaccccaggagtggagtatgtgtacaccatccaggtgctgagagatggccaggagagagatgcccccatcgtgaacaaggtggtgacccccctgagcccccccaccaacctgcacctggaggccaacccagacaccggggtgctgactgtgtcctgggagaggagcaccaccccagacatcaccggctaccgcatcaccaccacccccaccaacggccagcagggcaacagcctggaggaggtggtgcatgctgaccagagcagctgcacctttgacaacctgagccctggcctggagtacaacgtgtctgtgtacacagtgaaggatgacaaggagagcgtgcccatcagtgacaccatcatcccagctgtgcccccacccacagacctgcgcttcaccaacatcggccctgacaccatgagggtgacctgggcccccccacccagcattgacctgaccaacttcctggtgcgctacagccctgtgaagaatgaagaagatgtggccgagctgagcatcagccccagcgacaatgctgtggtgctgaccaacctgctgcccggcacagaatatgtggtgtctgtgtcctctgtgtatgagcagcacgagagcacccccctgcggggccggcagaagacaggcctggacagccccaccggcatcgacttcagtgacatcacagccaacagcttcaccgtgcactggatcgccccccgggccaccatcaccggctaccgcatccgccaccaccctgagcacttcagcggccggcccagagaagatagagtgccccacagcaggaacagcatcaccctgaccaacctgaccccaggcacagaatatgtggtgtccatcgtggccctgaatggccgggaggagagccccctgctgattggccagcagagcacagtgtctgatgtgccccgggacctggaggtggtggccgccacccccaccagcctgctgatctcctgggatgccccagctgtgacagtgcgctactaccgcatcacctacggggagactggaggcaacagccctgtgcaggagttcaccgtgcccggcagcaagagcacagccaccatcagcggcctgaagccaggagtggactacaccatcaccgtgtatgctgtgacaggccgcggggacagccctgccagcagcaagcccatcagcatcaactacagaacagaaattgacaagcccagccagatgcaggtgacagatgtgcaggacaacagcatctctgtgaagtggctgcccagcagcagccctgtgacaggctacagagtgaccaccacccccaagaatggacctggccccaccaagaccaagacagctggccctgaccagacagagatgaccatcgagggcctgcagcccaccgtggagtatgtggtgtctgtgtatgcccagaaccccagcggggagagccagcccctggtgcagacagctgtgaccaccatcccagcccccacagacctgaagttcacccaggtgacccccaccagcctgagcgcccagtggaccccacccaacgtgcagctgaccggctacagagtgcgggtgacccccaaggagaagacaggccccatgaaggagatcaacctggccccagacagcagctctgtggtggtgtctggcctgatggtggccaccaagtatgaggtgtctgtgtatgccctgaaggacaccctgaccagcaggcctgcccagggcgtggtgaccaccctggagaatgtgagccccccccggcgggcccgggtgacagatgccacagagaccaccatcaccatctcctggaggaccaagacagagaccatcaccggcttccaggtggatgctgtgcctgccaacggccagacccccatccagaggaccatcaagccagatgtgcgcagctacaccatcaccggcctgcagcctggaacagactacaagatctacctgtacaccctgaatgacaatgcccggagcagccctgtggtgattgatgccagcacagccattgatgcccccagcaacctgcgcttcctggccaccacccccaacagcctgctggtgtcctggcagcccccccgggcccgcatcaccggctacatcatcaagtatgagaagccaggcagccccccccgggaggtggtgccccggcccaggcctggggtgacagaggccaccatcaccggcctggagcctggaacagagtacaccatctacgtgattgccctgaagaacaaccagaagtctgagcccctcatcggcaggaagaagacaggccaggaggccctgagccagaccaccatctcctgggcccccttccaggacaccagcgagtacatcatcagctgccaccctgtgggcacagatgaggagcccctgcagttccgggtgcccggcaccagcaccagcgccaccctgaccggcctgaccaggggggccacctacaacgtgattgtggaggccctgaaggaccagcagaggcacaaggtgcgggaggaggtggtgacagtgggcaacagcgtgaatgaaggcctgaaccagcccacagatgacagctgctttgacccctacacagtgagccactatgctgtgggagatgagtgggagaggatgtctgagagcggcttcaagctgctgtgccagtgcctgggcttcggcagcggccacttccgctgtgacagcagccgctggtgccacgacaacggggtgaactacaagatcggggagaagtgggaccggcagggagaaaatggccagatgatgagctgcacctgcctgggcaatggaaaaggagagttcaagtgtgacccccatgaggccacctgctatgatgatggcaagacctaccacgtgggggagcagtggcagaaggagtacctgggcgccatctgcagctgcacctgcttcggcggccagaggggctggaggtgtgacaactgccggcggcctggaggagagcccagccctgagggcaccaccggccagagctacaaccagtacagccagcgctaccaccagaggaccaacaccaacgtgaactgccccatcgagtgcttcatgcccctggatgtgcaggccgaccgggaggacagccgggagtag

SEQ ID NO: 19723 - DNA, 7161 bp, synthetic construct
  misc_feature 1..7161: note = Description of Artificial Sequence: Synthetic coding sequence
  source 1..7161: mol_type = other DNA
atgctgcggggccctggccctggcctgctgctgctggccgtgcagtgcctgggcacagctgtgcccagcactggagccagcaagagcaagaggcaggcccagcagatggtgcagccccagagccctgtggccgtgtcccagagcaagccaggctgctatgacaatggcaagcactaccagatcaaccagcagtgggagaggacctacctgggcaatgccctggtgtgcacctgctatggaggcagccggggcttcaactgtgagagcaagccagaggccgaggagacctgctttgacaagtacacaggcaacacctacagagtgggggacacctatgaaagacccaaggacagcatgatctgggactgcacctgcatcggggccggccggggccgcatcagctgcaccatcgccaaccgctgccacgagggcggccagagctacaagatcggggacacctggaggcggccccatgagaccggcggctacatgctggagtgtgtgtgcctgggcaatggcaagggggagtggacctgcaagcccatcgccgagaagtgctttgaccacgccgccggcaccagctatgtggtgggggagacctgggagaagccctaccagggctggatgatggtggactgcacctgcctgggggagggcagcggccgcatcacctgcaccagcaggaaccgctgcaatgaccaggacaccaggaccagctaccgcatcggggacacctggagcaagaaggacaacagaggcaacctgctgcagtgcatctgcacaggaaatggccgcggggagtggaagtgtgagcggcacacctctgtgcagaccaccagcagcggcagcggccccttcacagatgtgcgggctgctgtgtaccagccccagccccacccccagcccccaccctacggccactgtgtgacagacagcggcgtggtgtacagcgtgggcatgcagtggctgaagacccagggcaacaagcagatgctgtgcacctgcctgggcaatggagtgtcctgccaggagacagctgtgacccagacctatggaggcaacagcaatggagagccctgtgtgctgcccttcacctacaatggaagaaccttctacagctgcaccacagagggccggcaggacggccacctgtggtgcagcaccaccagcaactatgagcaggaccagaagtacagcttctgcacagaccacacagtgctggtgcagacccggggcggcaacagcaatggagccctgtgccacttccccttcctgtacaacaaccacaactacacagactgcaccagcgagggcagaagagacaacatgaagtggtgtggcaccacccagaactatgatgctgaccagaagtttggcttctgccccatggccgcccacgaggagatctgcaccaccaatgaaggagtgatgtaccgcatcggggaccagtgggacaagcagcacgacatgggccacatgatgcgctgcacctgtgtgggcaatggccgcggggagtggacctgcatcgcctacagccagctgcgggaccagtgcatcgtggatgacatcacctacaacgtgaatgacaccttccacaagagacatgaggagggccacatgctgaactgcacctgcttcggccagggccggggccgctggaagtgtgaccctgtggaccagtgccaggacagcgagaccggcaccttctaccagatcggggacagctgggagaagtatgtgcatggagtgcgctaccagtgctactgctacggccggggcatcggggagtggcactgccagcccctgcagacctaccccagcagcagcggccctgtggaggtgttcatcacagagacccccagccagcccaacagccaccccatccagtggaatgccccccagcccagccacatcagcaagtacatcctgcgctggaggcccaagaacagcgtgggccgctggaaggaggccaccatccctggccacctgaacagctacaccatcaagggcctgaagccaggagtggtgtatgagggccagctgatcagcatccagcagtatggccaccaggaggtgaccaggtttgacttcaccaccaccagcaccagcacccctgtgaccagcaacacagtgactggagagaccacccccttcagccccctggtggccaccagcgagagcgtgacagagatcacagccagcagctttgtggtgtcctgggtgtctgccagtgacacagtgtctggcttccgggtggagtatgagctgtctgaggagggagatgagccccagtacctggacctgcccagcacagccacctctgtgaacatcccagacctgctgcccggcaggaagtacatcgtgaatgtgtaccagatcagtgaagatggagagcagagcctcatcctgagcaccagccagaccacagccccagatgcccccccagacaccaccgtggaccaggtggatgacaccagcatcgtggtgcgctggagccggccccaggcccccatcaccggctacagaattgtgtacagccccagcgtggagggcagcagcacagagctgaacctgcctgagacagccaacagcgtgaccctgagtgacctgcagcccggggtgcagtacaacatcaccatctatgctgtggaggagaaccaggagagcacccctgtggtgatccagcaggagaccaccggcacccccaggagtgacacagtgcccagcccccgggacctgcagtttgtggaggtgacagatgtgaaggtgaccatcatgtggaccccacctgagagcgctgtgacaggctacagagtggatgtgattcctgtgaacctgcctggagagcacggccagaggctgcccatcagcaggaacacctttgctgaggtgacaggcctgagccctggggtgacctactacttcaaggtgtttgctgtgagccacggccgggagagcaagcccctgacagcccagcagaccaccaagctggatgcccccaccaacctgcagtttgtgaatgaaacagacagcacagtgctggtgcgctggaccccaccccgggcccagatcaccggctaccgcctgactgtgggcctgacccggcggggccagccccggcagtacaacgtgggccccagcgtgtccaagtaccccctgaggaacctgcagcctgccagcgagtacacagtgtccctggtggccatcaagggcaaccaggagagccccaaggccactggagtcttcaccaccctgcagcccggcagcagcatccccccctacaacacagaggtgacagagaccaccatcgtcatcacctggaccccagcccccagaattggcttcaagctgggcgtgcggcccagccagggcggggaggccccccgggaggtgaccagtgacagcggcagcatcgtggtgtctggcctgaccccaggagtggagtatgtgtacaccatccaggtgctgagagatggccaggagagagatgcccccatcgtgaacaaggtggtgacccccctgagcccccccaccaacctgcacctggaggccaacccagacaccggggtgctgactgtgtcctgggagaggagcaccaccccagacatcaccggctaccgcatcaccaccacccccaccaacggccagcagggcaacagcctggaggaggtggtgcatgctgaccagagcagctgcacctttgacaacctgagccctggcctggagtacaacgtgtctgtgtacacagtgaaggatgacaaggagagcgtgcccatcagtgacaccatcatcccagctgtgcccccacccacagacctgcgcttcaccaacatcggccctgacaccatgagggtgacctgggcccccccacccagcattgacctgaccaacttcctggtgcgctacagccctgtgaagaatgaagaagatgtggccgagctgagcatcagccccagcgacaatgctgtggtgctgaccaacctgctgcccggcacagaatatgtggtgtctgtgtcctctgtgtatgagcagcacgagagcacccccctgcggggccggcagaagacaggcctggacagccccaccggcatcgacttcagtgacatcacagccaacagcttcaccgtgcactggatcgccccccgggccaccatcaccggctaccgcatccgccaccaccctgagcacttcagcggccggcccagagaagatagagtgccccacagcaggaacagcatcaccctgaccaacctgaccccaggcacagaatatgtggtgtccatcgtggccctgaatggccgggaggagagccccctgctgattggccagcagagcacagtgtctgatgtgccccgggacctggaggtggtggccgccacccccaccagcctgctgatctcctgggatgccccagctgtgacagtgcgctactaccgcatcacctacggggagactggaggcaacagccctgtgcaggagttcaccgtgcccggcagcaagagcacagccaccatcagcggcctgaagccaggagtggactacaccatcaccgtgtatgctgtgacaggccgcggggacagccctgccagcagcaagcccatcagcatcaactacagaacagaaattgacaagcccagccagatgcaggtgacagatgtgcaggacaacagcatctctgtgaagtggctgcccagcagcagccctgtgacaggctacagagtgaccaccacccccaagaatggacctggccccaccaagaccaagacagctggccctgaccagacagagatgaccatcgagggcctgcagcccaccgtggagtatgtggtgtctgtgtatgcccagaaccccagcggggagagccagcccctggtgcagacagctgtgaccaacatcgaccggcccaagggcctggccttcacagatgtggatgtggacagcatcaagatcgcctgggagagcccccagggccaggtgagccgctacagagtgacctacagcagcccagaagatggcatccacgagctgtttcctgccccagatggagaggaggacacagctgagctgcagggcctgcggcccggcagcgagtacacagtgtctgtggtggccctgcatgatgacatggagagccagcccctgattggcacccagagcacagccatcccagcccccacagacctgaagttcacccaggtgacccccaccagcctgagcgcccagtggaccccacccaacgtgcagctgaccggctacagagtgcgggtgacccccaaggagaagacaggccccatgaaggagatcaacctggccccagacagcagctctgtggtggtgtctggcctgatggtggccaccaagtatgaggtgtctgtgtatgccctgaaggacaccctgaccagcaggcctgcccagggcgtggtgaccaccctggagaatgtgagccccccccggcgggcccgggtgacagatgccacagagaccaccatcaccatctcctggaggaccaagacagagaccatcaccggcttccaggtggatgctgtgcctgccaacggccagacccccatccagaggaccatcaagccagatgtgcgcagctacaccatcaccggcctgcagcctggaacagactacaagatctacctgtacaccctgaatgacaatgcccggagcagccctgtggtgattgatgccagcacagccattgatgcccccagcaacctgcgcttcctggccaccacccccaacagcctgctggtgtcctggcagcccccccgggcccgcatcaccggctacatcatcaagtatgagaagccaggcagccccccccgggaggtggtgccccggcccaggcctggggtgacagaggccaccatcaccggcctggagcctggaacagagtacaccatctacgtgattgccctgaagaacaaccagaagtctgagcccctcatcggcaggaagaagacagatgagctgccccagctggtgaccctgccccaccccaacctgcacggccctgagatcctggatgtgcccagcacagtgcagaagaccccatttgtgacccaccctggctatgacacaggaaatggcatccagctgcccggcaccagcggccagcagcccagcgtgggccagcagatgatctttgaggagcacggcttccggaggaccaccccacccaccacagccacccccatccgccaccggccccggccctaccccccaaatgtgggggaggagatccagatcggccacatcccccgggaggatgtggactaccacctgtacccccacggccctggcctgaaccccaatgccagcacaggccaggaggccctgagccagaccaccatctcctgggcccccttccaggacaccagcgagtacatcatcagctgccaccctgtgggcacagatgaggagcccctgcagttccgggtgcccggcaccagcaccagcgccaccctgaccggcctgaccaggggggccacctacaacgtgattgtggaggccctgaaggaccagcagaggcacaaggtgcgggaggaggtggtgacagtgggcaacagcgtgaatgaaggcctgaaccagcccacagatgacagctgctttgacccctacacagtgagccactatgctgtgggagatgagtgggagaggatgtctgagagcggcttcaagctgctgtgccagtgcctgggcttcggcagcggccacttccgctgtgacagcagccgctggtgccacgacaacggggtgaactacaagatcggggagaagtgggaccggcagggagaaaatggccagatgatgagctgcacctgcctgggcaatggaaaaggagagttcaagtgtgacccccatgaggccacctgctatgatgatggcaagacctaccacgtgggggagcagtggcagaaggagtacctgggcgccatctgcagctgcacctgcttcggcggccagaggggctggaggtgtgacaactgccggcggcctggaggagagcccagccctgagggcaccaccggccagagctacaaccagtacagccagcgctaccaccagaggaccaacaccaacgtgaactgccccatcgagtgcttcatgcccctggatgtgcaggccgaccgggaggacagccgggagtag

SEQ ID NO: 19724 - DNA, 6723 bp, synthetic construct
  misc_feature 1..6723: note = Description of Artificial Sequence: Synthetic coding sequence
  source 1..6723: mol_type = other DNA
atgctgcggggccctggccctggcctgctgctgctggccgtgcagtgcctgggcacagctgtgcccagcactggagccagcaagagcaagaggcaggcccagcagatggtgcagccccagagccctgtggccgtgtcccagagcaagccaggctgctatgacaatggcaagcactaccagatcaaccagcagtgggagaggacctacctgggcaatgccctggtgtgcacctgctatggaggcagccggggcttcaactgtgagagcaagccagaggccgaggagacctgctttgacaagtacacaggcaacacctacagagtgggggacacctatgaaagacccaaggacagcatgatctgggactgcacctgcatcggggccggccggggccgcatcagctgcaccatcgccaaccgctgccacgagggcggccagagctacaagatcggggacacctggaggcggccccatgagaccggcggctacatgctggagtgtgtgtgcctgggcaatggcaagggggagtggacctgcaagcccatcgccgagaagtgctttgaccacgccgccggcaccagctatgtggtgggggagacctgggagaagccctaccagggctggatgatggtggactgcacctgcctgggggagggcagcggccgcatcacctgcaccagcaggaaccgctgcaatgaccaggacaccaggaccagctaccgcatcggggacacctggagcaagaaggacaacagaggcaacctgctgcagtgcatctgcacaggaaatggccgcggggagtggaagtgtgagcggcacacctctgtgcagaccaccagcagcggcagcggccccttcacagatgtgcgggctgctgtgtaccagccccagccccacccccagcccccaccctacggccactgtgtgacagacagcggcgtggtgtacagcgtgggcatgcagtggctgaagacccagggcaacaagcagatgctgtgcacctgcctgggcaatggagtgtcctgccaggagacagctgtgacccagacctatggaggcaacagcaatggagagccctgtgtgctgcccttcacctacaatggaagaaccttctacagctgcaccacagagggccggcaggacggccacctgtggtgcagcaccaccagcaactatgagcaggaccagaagtacagcttctgcacagaccacacagtgctggtgcagacccggggcggcaacagcaatggagccctgtgccacttccccttcctgtacaacaaccacaactacacagactgcaccagcgagggcagaagagacaacatgaagtggtgtggcaccacccagaactatgatgctgaccagaagtttggcttctgccccatggccgcccacgaggagatctgcaccaccaatgaaggagtgatgtaccgcatcggggaccagtgggacaagcagcacgacatgggccacatgatgcgctgcacctgtgtgggcaatggccgcggggagtggacctgcatcgcctacagccagctgcgggaccagtgcatcgtggatgacatcacctacaacgtgaatgacaccttccacaagagacatgaggagggccacatgctgaactgcacctgcttcggccagggccggggccgctggaagtgtgaccctgtggaccagtgccaggacagcgagaccggcaccttctaccagatcggggacagctgggagaagtatgtgcatggagtgcgctaccagtgctactgctacggccggggcatcggggagtggcactgccagcccctgcagacctaccccagcagcagcggccctgtggaggtgttcatcacagagacccccagccagcccaacagccaccccatccagtggaatgccccccagcccagccacatcagcaagtacatcctgcgctggaggcccaagaacagcgtgggccgctggaaggaggccaccatccctggccacctgaacagctacaccatcaagggcctgaagccaggagtggtgtatgagggccagctgatcagcatccagcagtatggccaccaggaggtgaccaggtttgacttcaccaccaccagcaccagcacccctgtgaccagcaacacagtgactggagagaccacccccttcagccccctggtggccaccagcgagagcgtgacagagatcacagccagcagctttgtggtgtcctgggtgtctgccagtgacacagtgtctggcttccgggtggagtatgagctgtctgaggagggagatgagccccagtacctggacctgcccagcacagccacctctgtgaacatcccagacctgctgcccggcaggaagtacatcgtgaatgtgtaccagatcagtgaagatggagagcagagcctcatcctgagcaccagccagaccacagccccagatgcccccccagacaccaccgtggaccaggtggatgacaccagcatcgtggtgcgctggagccggccccaggcccccatcaccggctacagaattgtgtacagccccagcgtggagggcagcagcacagagctgaacctgcctgagacagccaacagcgtgaccctgagtgacctgcagcccggggtgcagtacaacatcaccatctatgctgtggaggagaaccaggagagcacccctgtggtgatccagcaggagaccaccggcacccccaggagtgacacagtgcccagcccccgggacctgcagtttgtggaggtgacagatgtgaaggtgaccatcatgtggaccccacctgagagcgctgtgacaggctacagagtggatgtgattcctgtgaacctgcctggagagcacggccagaggctgcccatcagcaggaacacctttgctgaggtgacaggcctgagccctggggtgacctactacttcaaggtgtttgctgtgagccacggccgggagagcaagcccctgacagcccagcagaccaccaagctggatgcccccaccaacctgcagtttgtgaatgaaacagacagcacagtgctggtgcgctggaccccaccccgggcccagatcaccggctaccgcctgactgtgggcctgacccggcggggccagccccggcagtacaacgtgggccccagcgtgtccaagtaccccctgaggaacctgcagcctgccagcgagtacacagtgtccctggtggccatcaagggcaaccaggagagccccaaggccactggagtcttcaccaccctgcagcccggcagcagcatccccccctacaacacagaggtgacagagaccaccatcgtcatcacctggaccccagcccccagaattggcttcaagctgggcgtgcggcccagccagggcggggaggccccccgggaggtgaccagtgacagcggcagcatcgtggtgtctggcctgaccccaggagtggagtatgtgtacaccatccaggtgctgagagatggccaggagagagatgcccccatcgtgaacaaggtggtgacccccctgagcccccccaccaacctgcacctggaggccaacccagacaccggggtgctgactgtgtcctgggagaggagcaccaccccagacatcaccggctaccgcatcaccaccacccccaccaacggccagcagggcaacagcctggaggaggtggtgcatgctgaccagagcagctgcacctttgacaacctgagccctggcctggagtacaacgtgtctgtgtacacagtgaaggatgacaaggagagcgtgcccatcagtgacaccatcatcccagctgtgcccccacccacagacctgcgcttcaccaacatcggccctgacaccatgagggtgacctgggcccccccacccagcattgacctgaccaacttcctggtgcgctacagccctgtgaagaatgaagaagatgtggccgagctgagcatcagccccagcgacaatgctgtggtgctgaccaacctgctgcccggcacagaatatgtggtgtctgtgtcctctgtgtatgagcagcacgagagcacccccctgcggggccggcagaagacaggcctggacagccccaccggcatcgacttcagtgacatcacagccaacagcttcaccgtgcactggatcgccccccgggccaccatcaccggctaccgcatccgccaccaccctgagcacttcagcggccggcccagagaagatagagtgccccacagcaggaacagcatcaccctgaccaacctgaccccaggcacagaatatgtggtgtccatcgtggccctgaatggccgggaggagagccccctgctgattggccagcagagcacagtgtctgatgtgccccgggacctggaggtggtggccgccacccccaccagcctgctgatctcctgggatgccccagctgtgacagtgcgctactaccgcatcacctacggggagactggaggcaacagccctgtgcaggagttcaccgtgcccggcagcaagagcacagccaccatcagcggcctgaagccaggagtggactacaccatcaccgtgtatgctgtgacaggccgcggggacagccctgccagcagcaagcccatcagcatcaactacagaacagaaattgacaagcccagccagatgcaggtgacagatgtgcaggacaacagcatctctgtgaagtggctgcccagcagcagccctgtgacaggctacagagtgaccaccacccccaagaatggacctggccccaccaagaccaagacagctggccctgaccagacagagatgaccatcgagggcctgcagcccaccgtggagtatgtggtgtctgtgtatgcccagaaccccagcggggagagccagcccctggtgcagacagctgtgaccaccatcccagcccccacagacctgaagttcacccaggtgacccccaccagcctgagcgcccagtggaccccacccaacgtgcagctgaccggctacagagtgcgggtgacccccaaggagaagacaggccccatgaaggagatcaacctggccccagacagcagctctgtggtggtgtctggcctgatggtggccaccaagtatgaggtgtctgtgtatgccctgaaggacaccctgaccagcaggcctgcccagggcgtggtgaccaccctggagaatgtgagccccccccggcgggcccgggtgacagatgccacagagaccaccatcaccatctcctggaggaccaagacagagaccatcaccggcttccaggtggatgctgtgcctgccaacggccagacccccatccagaggaccatcaagccagatgtgcgcagctacaccatcaccggcctgcagcctggaacagactacaagatctacctgtacaccctgaatgacaatgcccggagcagccctgtggtgattgatgccagcacagccattgatgcccccagcaacctgcgcttcctggccaccacccccaacagcctgctggtgtcctggcagcccccccgggcccgcatcaccggctacatcatcaagtatgagaagccaggcagccccccccgggaggtggtgccccggcccaggcctggggtgacagaggccaccatcaccggcctggagcctggaacagagtacaccatctacgtgattgccctgaagaacaaccagaagtctgagcccctcatcggcaggaagaagacagtgcagaagaccccatttgtgacccaccctggctatgacacaggaaatggcatccagctgcccggcaccagcggccagcagcccagcgtgggccagcagatgatctttgaggagcacggcttccggaggaccaccccacccaccacagccacccccatccgccaccggccccggccctacccacccaacgtgggccaggaggccctgagccagaccaccatctcctgggcccccttccaggacaccagcgagtacatcatcagctgccaccctgtgggcacagatgaggagcccctgcagttccgggtgcccggcaccagcaccagcgccaccctgaccggcctgaccaggggggccacctacaacgtgattgtggaggccctgaaggaccagcagaggcacaaggtgcgggaggaggtggtgacagtgggcaacagcgtgaatgaaggcctgaaccagcccacagatgacagctgctttgacccctacacagtgagccactatgctgtgggagatgagtgggagaggatgtctgagagcggcttcaagctgctgtgccagtgcctgggcttcggcagcggccacttccgctgtgacagcagccgctggtgccacgacaacggggtgaactacaagatcggggagaagtgggaccggcagggagaaaatggccagatgatgagctgcacctgcctgggcaatggaaaaggagagttcaagtgtgacccccatgaggccacctgctatgatgatggcaagacctaccacgtgggggagcagtggcagaaggagtacctgggcgccatctgcagctgcacctgcttcggcggccagaggggctggaggtgtgacaactgccggcggcctggaggagagcccagccctgagggcaccaccggccagagctacaaccagtacagccagcgctaccaccagaggaccaacaccaacgtgaactgccccatcgagtgcttcatgcccctggatgtgcaggccgaccgggaggacagccgggagtag

SEQ ID NO: 19725 - DNA, 1974 bp, synthetic construct
  misc_feature 1..1974: note = Description of Artificial Sequence: Synthetic coding sequence
  source 1..1974: mol_type = other DNA
atgctgcggggccctggccctggcctgctgctgctggccgtgcagtgcctgggcacagctgtgcccagcactggagccagcaagagcaagaggcaggcccagcagatggtgcagccccagagccctgtggccgtgtcccagagcaagccaggctgctatgacaatggcaagcactaccagatcaaccagcagtgggagaggacctacctgggcaatgccctggtgtgcacctgctatggaggcagccggggcttcaactgtgagagcaagccagaggccgaggagacctgctttgacaagtacacaggcaacacctacagagtgggggacacctatgaaagacccaaggacagcatgatctgggactgcacctgcatcggggccggccggggccgcatcagctgcaccatcgccaaccgctgccacgagggcggccagagctacaagatcggggacacctggaggcggccccatgagaccggcggctacatgctggagtgtgtgtgcctgggcaatggcaagggggagtggacctgcaagcccatcgccgagaagtgctttgaccacgccgccggcaccagctatgtggtgggggagacctgggagaagccctaccagggctggatgatggtggactgcacctgcctgggggagggcagcggccgcatcacctgcaccagcaggaaccgctgcaatgaccaggacaccaggaccagctaccgcatcggggacacctggagcaagaaggacaacagaggcaacctgctgcagtgcatctgcacaggaaatggccgcggggagtggaagtgtgagcggcacacctctgtgcagaccaccagcagcggcagcggccccttcacagatgtgcgggctgctgtgtaccagccccagccccacccccagcccccaccctacggccactgtgtgacagacagcggcgtggtgtacagcgtgggcatgcagtggctgaagacccagggcaacaagcagatgctgtgcacctgcctgggcaatggagtgtcctgccaggagacagctgtgacccagacctatggaggcaacagcaatggagagccctgtgtgctgcccttcacctacaatggaagaaccttctacagctgcaccacagagggccggcaggacggccacctgtggtgcagcaccaccagcaactatgagcaggaccagaagtacagcttctgcacagaccacacagtgctggtgcagacccggggcggcaacagcaatggagccctgtgccacttccccttcctgtacaacaaccacaactacacagactgcaccagcgagggcagaagagacaacatgaagtggtgtggcaccacccagaactatgatgctgaccagaagtttggcttctgccccatggccgcccacgaggagatctgcaccaccaatgaaggagtgatgtaccgcatcggggaccagtgggacaagcagcacgacatgggccacatgatgcgctgcacctgtgtgggcaatggccgcggggagtggacctgcatcgcctacagccagctgcgggaccagtgcatcgtggatgacatcacctacaacgtgaatgacaccttccacaagagacatgaggagggccacatgctgaactgcacctgcttcggccagggccggggccgctggaagtgtgaccctgtggaccagtgccaggacagcgagaccggcaccttctaccagatcggggacagctgggagaagtatgtgcatggagtgcgctaccagtgctactgctacggccggggcatcggggagtggcactgccagcccctgcagacctaccccagcagcagcggccctgtggaggtgttcatcacagagacccccagccagcccaacagccaccccatccagtggaatgccccccagcccagccacatcagcaagtacatcctgcgctggaggcctgtgtccatccccccaagaaacctgggctactag

SEQ ID NO: 19726 - DNA, 6804 bp, synthetic construct
  misc_feature 1..6804: note = Description of Artificial Sequence: Synthetic coding sequence
  source 1..6804: mol_type = other DNA
atgctgcggggccctggccctggcctgctgctgctggccgtgcagtgcctgggcacagctgtgcccagcactggagccagcaagagcaagaggcaggcccagcagatggtgcagccccagagccctgtggccgtgtcccagagcaagccaggctgctatgacaatggcaagcactaccagatcaaccagcagtgggagaggacctacctgggcaatgccctggtgtgcacctgctatggaggcagccggggcttcaactgtgagagcaagccagaggccgaggagacctgctttgacaagtacacaggcaacacctacagagtgggggacacctatgaaagacccaaggacagcatgatctgggactgcacctgcatcggggccggccggggccgcatcagctgcaccatcgccaaccgctgccacgagggcggccagagctacaagatcggggacacctggaggcggccccatgagaccggcggctacatgctggagtgtgtgtgcctgggcaatggcaagggggagtggacctgcaagcccatcgccgagaagtgctttgaccacgccgccggcaccagctatgtggtgggggagacctgggagaagccctaccagggctggatgatggtggactgcacctgcctgggggagggcagcggccgcatcacctgcaccagcaggaaccgctgcaatgaccaggacaccaggaccagctaccgcatcggggacacctggagcaagaaggacaacagaggcaacctgctgcagtgcatctgcacaggaaatggccgcggggagtggaagtgtgagcggcacacctctgtgcagaccaccagcagcggcagcggccccttcacagatgtgcgggctgctgtgtaccagccccagccccacccccagcccccaccctacggccactgtgtgacagacagcggcgtggtgtacagcgtgggcatgcagtggctgaagacccagggcaacaagcagatgctgtgcacctgcctgggcaatggagtgtcctgccaggagacagctgtgacccagacctatggaggcaacagcaatggagagccctgtgtgctgcccttcacctacaatggaagaaccttctacagctgcaccacagagggccggcaggacggccacctgtggtgcagcaccaccagcaactatgagcaggaccagaagtacagcttctgcacagaccacacagtgctggtgcagacccggggcggcaacagcaatggagccctgtgccacttccccttcctgtacaacaaccacaactacacagactgcaccagcgagggcagaagagacaacatgaagtggtgtggcaccacccagaactatgatgctgaccagaagtttggcttctgccccatggccgcccacgaggagatctgcaccaccaatgaaggagtgatgtaccgcatcggggaccagtgggacaagcagcacgacatgggccacatgatgcgctgcacctgtgtgggcaatggccgcggggagtggacctgcatcgcctacagccagctgcgggaccagtgcatcgtggatgacatcacctacaacgtgaatgacaccttccacaagagacatgaggagggccacatgctgaactgcacctgcttcggccagggccggggccgctggaagtgtgaccctgtggaccagtgccaggacagcgagaccggcaccttctaccagatcggggacagctgggagaagtatgtgcatggagtgcgctaccagtgctactgctacggccggggcatcggggagtggcactgccagcccctgcagacctaccccagcagcagcggccctgtggaggtgttcatcacagagacccccagccagcccaacagccaccccatccagtggaatgccccccagcccagccacatcagcaagtacatcctgcgctggaggcccaagaacagcgtgggccgctggaaggaggccaccatccctggccacctgaacagctacaccatcaagggcctgaagccaggagtggtgtatgagggccagctgatcagcatccagcagtatggccaccaggaggtgaccaggtttgacttcaccaccaccagcaccagcacccctgtgaccagcaacacagtgactggagagaccacccccttcagccccctggtggccaccagcgagagcgtgacagagatcacagccagcagctttgtggtgtcctgggtgtctgccagtgacacagtgtctggcttccgggtggagtatgagctgtctgaggagggagatgagccccagtacctggacctgcccagcacagccacctctgtgaacatcccagacctgctgcccggcaggaagtacatcgtgaatgtgtaccagatcagtgaagatggagagcagagcctcatcctgagcaccagccagaccacagccccagatgcccccccagacaccaccgtggaccaggtggatgacaccagcatcgtggtgcgctggagccggccccaggcccccatcaccggctacagaattgtgtacagccccagcgtggagggcagcagcacagagctgaacctgcctgagacagccaacagcgtgaccctgagtgacctgcagcccggggtgcagtacaacatcaccatctatgctgtggaggagaaccaggagagcacccctgtggtgatccagcaggagaccaccggcacccccaggagtgacacagtgcccagcccccgggacctgcagtttgtggaggtgacagatgtgaaggtgaccatcatgtggaccccacctgagagcgctgtgacaggctacagagtggatgtgattcctgtgaacctgcctggagagcacggccagaggctgcccatcagcaggaacacctttgctgaggtgacaggcctgagccctggggtgacctactacttcaaggtgtttgctgtgagccacggccgggagagcaagcccctgacagcccagcagaccaccaagctggatgcccccaccaacctgcagtttgtgaatgaaacagacagcacagtgctggtgcgctggaccccaccccgggcccagatcaccggctaccgcctgactgtgggcctgacccggcggggccagccccggcagtacaacgtgggccccagcgtgtccaagtaccccctgaggaacctgcagcctgccagcgagtacacagtgtccctggtggccatcaagggcaaccaggagagccccaaggccactggagtcttcaccaccctgcagcccggcagcagcatccccccctacaacacagaggtgacagagaccaccatcgtcatcacctggaccccagcccccagaattggcttcaagctgggcgtgcggcccagccagggcggggaggccccccgggaggtgaccagtgacagcggcagcatcgtggtgtctggcctgaccccaggagtggagtatgtgtacaccatccaggtgctgagagatggccaggagagagatgcccccatcgtgaacaaggtggtgacccccctgagcccccccaccaacctgcacctggaggccaacccagacaccggggtgctgactgtgtcctgggagaggagcaccaccccagacatcaccggctaccgcatcaccaccacccccaccaacggccagcagggcaacagcctggaggaggtggtgcatgctgaccagagcagctgcacctttgacaacctgagccctggcctggagtacaacgtgtctgtgtacacagtgaaggatgacaaggagagcgtgcccatcagtgacaccatcatccctgaggtgccccagctgacagacctgagctttgtggacatcacagacagcagcatcggcctgcgctggacccccctgaacagcagcaccatcatcggctaccgcatcaccgtggtggccgccggggagggcatccccatctttgaagattttgtggacagctctgtgggctactacacagtgacaggcctggagcccggcatcgactatgacatcagcgtcatcaccctcatcaatggaggagagagcgcccccaccaccctgacccagcagacagctgtgcccccacccacagacctgcgcttcaccaacattggaccagacaccatgagggtgacctgggcccctcctccttccattgacctgaccaacttcctggtgcgctacagccctgtgaagaatgaggaggatgtggccgagctgagcatcagccccagcgacaatgctgtggtgctgaccaacctgctgcctggaacagaatatgtggtgtctgtgtcctctgtgtatgagcagcacgagagcacccccctgcggggccggcagaagacaggcctggacagccccactggaattgacttcagtgacatcacagccaacagcttcaccgtgcactggatcgccccccgggccaccatcaccggctaccgcatccgccaccaccctgagcacttcagcggccggccccgggaggacagagtgccccacagcagaaattccatcaccctgaccaacctgaccccaggcacagaatatgtggtgtccatcgtggccctgaatggccgggaggagagccccctgctgattggccagcagagcacagtgtctgatgtgccccgggacctggaggtggtggccgccacccccaccagcctgctgatctcctgggatgccccagctgtgacagtgcgctactaccgcatcacctatggagagaccggcggcaacagccctgtgcaggagttcaccgtgcccggcagcaagagcacagccaccatcagcggcctgaagccaggagtggactacaccatcaccgtgtatgctgtgacaggccgcggggacagccctgccagcagcaagcccatcagcatcaactacagaacagaaattgacaagcccagccagatgcaggtgacagatgtgcaggacaacagcatctctgtgaagtggctgcccagcagcagccctgtgacaggctacagagtgaccaccacccccaagaatggacctggccccaccaagaccaagacagctggccctgaccagacagagatgaccatcgagggcctgcagcccaccgtggagtatgtggtgtctgtgtatgcccagaaccccagcggggagagccagcccctggtgcagacagctgtgaccaccatcccagcccccacagacctgaagttcacccaggtgacccccaccagcctgagcgcccagtggaccccaccaaatgtgcagctgaccggctacagagtgcgggtgacccccaaggagaagacaggccccatgaaggagatcaacctggccccagacagcagctctgtggtggtgtctggcctgatggtggccaccaagtatgaggtgtctgtgtatgccctgaaggacaccctgaccagcaggcctgcccagggcgtggtgaccaccctggagaatgtgtccccaccaagaagagcccgggtgacagatgccacagagaccaccatcaccatctcctggaggaccaagacagagaccatcaccggcttccaggtggatgctgtgcctgccaacggccagacccccatccagaggaccatcaagccagatgtgcgcagctacaccatcaccggcctgcagcccggcacagactacaagatctacctgtacaccctgaatgacaatgcccggagcagccctgtggtgattgatgccagcacagccattgatgcccccagcaacctgcgcttcctggccaccacccccaacagcctgctggtgtcctggcagcccccccgggcccgcatcaccggctacatcatcaagtatgagaagccaggcagccccccccgggaggtggtgccccggcccaggcctggggtgacagaggccaccatcaccggcctggagcccggcacagagtacaccatctacgtgattgccctgaagaacaaccagaagtctgagcccctgattggaaggaagaagacaggccaggaggccctgagccagaccaccatctcctgggcccccttccaggacaccagcgagtacatcatcagctgccaccctgtgggcacagatgaggagcccctgcagttccgggtgcccggcaccagcaccagcgccaccctgaccggcctgaccaggggggccacctacaacgtcatcgtggaggccctgaaggaccagcagaggcacaaggtgcgggaggaggtggtgacagtgggcaacagcgtgaatgaaggcctgaaccagcccacagatgacagctgctttgacccctacacagtgagccactatgctgtgggagatgagtgggagaggatgtctgagagcggcttcaagctgctgtgccagtgcctgggctttggaagtggccacttccgctgtgacagcagccgctggtgccacgacaatggagtgaactacaagattggagagaagtgggaccggcagggagaaaatggccagatgatgagctgcacctgcctgggcaatggcaagggggagttcaagtgtgacccccatgaggccacctgctatgatgatggcaagacctaccacgtgggggagcagtggcagaaggagtacctgggcgccatctgcagctgcacctgctttggaggccagaggggctggaggtgtgacaactgcagaagacctggaggagagcccagccctgagggcaccaccggccagagctacaaccagtacagccagcgctaccaccagaggaccaacaccaacgtgaactgccccatcgagtgcttcatgcccctggatgtgcaggccgaccgggaggacagccgggagtag

SEQ ID NO: 19727 - DNA, 6798 bp, synthetic construct
  misc_feature 1..6798: note = Description of Artificial Sequence: Synthetic coding sequence
  source 1..6798: mol_type = other DNA
atgctgcggggccctggccctggcctgctgctgctggccgtgcagtgcctgggcacagctgtgcccagcactggagccagcaagagcaagaggcaggcccagcagatggtgcagccccagagccctgtggccgtgtcccagagcaagccaggctgctatgacaatggcaagcactaccagatcaaccagcagtgggagaggacctacctgggcaatgccctggtgtgcacctgctatggaggcagccggggcttcaactgtgagagcaagccagaggccgaggagacctgctttgacaagtacacaggcaacacctacagagtgggggacacctatgaaagacccaaggacagcatgatctgggactgcacctgcatcggggccggccggggccgcatcagctgcaccatcgccaaccgctgccacgagggcggccagagctacaagatcggggacacctggaggcggccccatgagaccggcggctacatgctggagtgtgtgtgcctgggcaatggcaagggggagtggacctgcaagcccatcgccgagaagtgctttgaccacgccgccggcaccagctatgtggtgggggagacctgggagaagccctaccagggctggatgatggtggactgcacctgcctgggggagggcagcggccgcatcacctgcaccagcaggaaccgctgcaatgaccaggacaccaggaccagctaccgcatcggggacacctggagcaagaaggacaacagaggcaacctgctgcagtgcatctgcacaggaaatggccgcggggagtggaagtgtgagcggcacacctctgtgcagaccaccagcagcggcagcggccccttcacagatgtgcgggctgctgtgtaccagccccagccccacccccagcccccaccctacggccactgtgtgacagacagcggcgtggtgtacagcgtgggcatgcagtggctgaagacccagggcaacaagcagatgctgtgcacctgcctgggcaatggagtgtcctgccaggagacagctgtgacccagacctatggaggcaacagcaatggagagccctgtgtgctgcccttcacctacaatggaagaaccttctacagctgcaccacagagggccggcaggacggccacctgtggtgcagcaccaccagcaactatgagcaggaccagaagtacagcttctgcacagaccacacagtgctggtgcagacccggggcggcaacagcaatggagccctgtgccacttccccttcctgtacaacaaccacaactacacagactgcaccagcgagggcagaagagacaacatgaagtggtgtggcaccacccagaactatgatgctgaccagaagtttggcttctgccccatggccgcccacgaggagatctgcaccaccaatgaaggagtgatgtaccgcatcggggaccagtgggacaagcagcacgacatgggccacatgatgcgctgcacctgtgtgggcaatggccgcggggagtggacctgcatcgcctacagccagctgcgggaccagtgcatcgtggatgacatcacctacaacgtgaatgacaccttccacaagagacatgaggagggccacatgctgaactgcacctgcttcggccagggccggggccgctggaagtgtgaccctgtggaccagtgccaggacagcgagaccggcaccttctaccagatcggggacagctgggagaagtatgtgcatggagtgcgctaccagtgctactgctacggccggggcatcggggagtggcactgccagcccctgcagacctaccccagcagcagcggccctgtggaggtgttcatcacagagacccccagccagcccaacagccaccccatccagtggaatgccccccagcccagccacatcagcaagtacatcctgcgctggaggcccaagaacagcgtgggccgctggaaggaggccaccatccctggccacctgaacagctacaccatcaagggcctgaagccaggagtggtgtatgagggccagctgatcagcatccagcagtatggccaccaggaggtgaccaggtttgacttcaccaccaccagcaccagcacccctgtgaccagcaacacagtgactggagagaccacccccttcagccccctggtggccaccagcgagagcgtgacagagatcacagccagcagctttgtggtgtcctgggtgtctgccagtgacacagtgtctggcttccgggtggagtatgagctgtctgaggagggagatgagccccagtacctggacctgcccagcacagccacctctgtgaacatcccagacctgctgcccggcaggaagtacatcgtgaatgtgtaccagatcagtgaagatggagagcagagcctcatcctgagcaccagccagaccacagccccagatgcccccccagacaccaccgtggaccaggtggatgacaccagcatcgtggtgcgctggagccggccccaggcccccatcaccggctacagaattgtgtacagccccagcgtggagggcagcagcacagagctgaacctgcctgagacagccaacagcgtgaccctgagtgacctgcagcccggggtgcagtacaacatcaccatctatgctgtggaggagaaccaggagagcacccctgtggtgatccagcaggagaccaccggcacccccaggagtgacacagtgcccagcccccgggacctgcagtttgtggaggtgacagatgtgaaggtgaccatcatgtggaccccacctgagagcgctgtgacaggctacagagtggatgtgattcctgtgaacctgcctggagagcacggccagaggctgcccatcagcaggaacacctttgctgaggtgacaggcctgagccctggggtgacctactacttcaaggtgtttgctgtgagccacggccgggagagcaagcccctgacagcccagcagaccaccaagctggatgcccccaccaacctgcagtttgtgaatgaaacagacagcacagtgctggtgcgctggaccccaccccgggcccagatcaccggctaccgcctgactgtgggcctgacccggcggggccagccccggcagtacaacgtgggccccagcgtgtccaagtaccccctgaggaacctgcagcctgccagcgagtacacagtgtccctggtggccatcaagggcaaccaggagagccccaaggccactggagtcttcaccaccctgcagcccggcagcagcatccccccctacaacacagaggtgacagagaccaccatcgtcatcacctggaccccagcccccagaattggcttcaagctgggcgtgcggcccagccagggcggggaggccccccgggaggtgaccagtgacagcggcagcatcgtggtgtctggcctgaccccaggagtggagtatgtgtacaccatccaggtgctgagagatggccaggagagagatgcccccatcgtgaacaaggtggtgacccccctgagcccccccaccaacctgcacctggaggccaacccagacaccggggtgctgactgtgtcctgggagaggagcaccaccccagacatcaccggctaccgcatcaccaccacccccaccaacggccagcagggcaacagcctggaggaggtggtgcatgctgaccagagcagctgcacctttgacaacctgagccctggcctggagtacaacgtgtctgtgtacacagtgaaggatgacaaggagagcgtgcccatcagtgacaccatcatcccagctgtgcccccacccacagacctgcgcttcaccaacatcggccctgacaccatgagggtgacctgggcccccccacccagcattgacctgaccaacttcctggtgcgctacagccctgtgaagaatgaagaagatgtggccgagctgagcatcagccccagcgacaatgctgtggtgctgaccaacctgctgcccggcacagaatatgtggtgtctgtgtcctctgtgtatgagcagcacgagagcacccccctgcggggccggcagaagacaggcctggacagccccaccggcatcgacttcagtgacatcacagccaacagcttcaccgtgcactggatcgccccccgggccaccatcaccggctaccgcatccgccaccaccctgagcacttcagcggccggcccagagaagatagagtgccccacagcaggaacagcatcaccctgaccaacctgaccccaggcacagaatatgtggtgtccatcgtggccctgaatggccgggaggagagccccctgctgattggccagcagagcacagtgtctgatgtgccccgggacctggaggtggtggccgccacccccaccagcctgctgatctcctgggatgccccagctgtgacagtgcgctactaccgcatcacctacggggagactggaggcaacagccctgtgcaggagttcaccgtgcccggcagcaagagcacagccaccatcagcggcctgaagccaggagtggactacaccatcaccgtgtatgctgtgacaggccgcggggacagccctgccagcagcaagcccatcagcatcaactacagaacagaaattgacaagcccagccagatgcaggtgacagatgtgcaggacaacagcatctctgtgaagtggctgcccagcagcagccctgtgacaggctacagagtgaccaccacccccaagaatggacctggccccaccaagaccaagacagctggccctgaccagacagagatgaccatcgagggcctgcagcccaccgtggagtatgtggtgtctgtgtatgcccagaaccccagcggggagagccagcccctggtgcagacagctgtgaccaccatcccagcccccacagacctgaagttcacccaggtgacccccaccagcctgagcgcccagtggaccccacccaacgtgcagctgaccggctacagagtgcgggtgacccccaaggagaagacaggccccatgaaggagatcaacctggccccagacagcagctctgtggtggtgtctggcctgatggtggccaccaagtatgaggtgtctgtgtatgccctgaaggacaccctgaccagcaggcctgcccagggcgtggtgaccaccctggagaatgtgagccccccccggcgggcccgggtgacagatgccacagagaccaccatcaccatctcctggaggaccaagacagagaccatcaccggcttccaggtggatgctgtgcctgccaacggccagacccccatccagaggaccatcaagccagatgtgcgcagctacaccatcaccggcctgcagcctggaacagactacaagatctacctgtacaccctgaatgacaatgcccggagcagccctgtggtgattgatgccagcacagccattgatgcccccagcaacctgcgcttcctggccaccacccccaacagcctgctggtgtcctggcagcccccccgggcccgcatcaccggctacatcatcaagtatgagaagccaggcagccccccccgggaggtggtgccccggcccaggcctggggtgacagaggccaccatcaccggcctggagcctggaacagagtacaccatctacgtgattgccctgaagaacaaccagaagtctgagcccctcatcggcaggaagaagacagatgagctgccccagctggtgaccctgccccaccccaacctgcacggccctgagatcctggatgtgcccagcacagtgcagaagaccccatttgtgacccaccctggctatgacacaggaaatggcatccagctgcccggcaccagcggccagcagcccagcgtgggccagcagatgatctttgaggagcacggcttccggaggaccaccccacccaccacagccacccccatccgccaccggccccggccctaccccccaaatgtgggccaggaggccctgagccagaccaccatctcctgggcccccttccaggacaccagcgagtacatcatcagctgccaccctgtgggcacagatgaggagcccctgcagttccgggtgcccggcaccagcaccagcgccaccctgaccggcctgaccaggggggccacctacaacgtcatcgtggaggccctgaaggaccagcagaggcacaaggtgcgggaggaggtggtgacagtgggcaacagcgtgaatgaaggcctgaaccagcccacagatgacagctgctttgacccctacacagtgagccactatgctgtgggagatgagtgggagaggatgtctgagagcggcttcaagctgctgtgccagtgcctgggctttggaagtggccacttccgctgtgacagcagccgctggtgccacgacaatggagtgaactacaagattggagagaagtgggaccggcagggagaaaatggccagatgatgagctgcacctgcctgggcaatggcaagggggagttcaagtgtgacccccatgaggccacctgctatgatgatggcaagacctaccacgtgggggagcagtggcagaaggagtacctgggcgccatctgcagctgcacctgctttggaggccagaggggctggaggtgtgacaactgcagaagacctggaggagagcccagccctgagggcaccaccggccagagctacaaccagtacagccagcgctaccaccagaggaccaacaccaacgtgaactgccccatcgagtgcttcatgcccctggatgtgcaggccgaccgggaggacagccgggagtag

SEQ ID NO: 19728 - DNA, 6993 bp, synthetic construct
  misc_feature 1..6993: note = Description of Artificial Sequence: Synthetic coding sequence
  source 1..6993: mol_type = other DNA
atgctgcggggccctggccctggcctgctgctgctggccgtgcagtgcctgggcacagctgtgcccagcactggagccagcaagagcaagaggcaggcccagcagatggtgcagccccagagccctgtggccgtgtcccagagcaagccaggctgctatgacaatggcaagcactaccagatcaaccagcagtgggagaggacctacctgggcaatgccctggtgtgcacctgctatggaggcagccggggcttcaactgtgagagcaagccagaggccgaggagacctgctttgacaagtacacaggcaacacctacagagtgggggacacctatgaaagacccaaggacagcatgatctgggactgcacctgcatcggggccggccggggccgcatcagctgcaccatcgccaaccgctgccacgagggcggccagagctacaagatcggggacacctggaggcggccccatgagaccggcggctacatgctggagtgtgtgtgcctgggcaatggcaagggggagtggacctgcaagcccatcgccgagaagtgctttgaccacgccgccggcaccagctatgtggtgggggagacctgggagaagccctaccagggctggatgatggtggactgcacctgcctgggggagggcagcggccgcatcacctgcaccagcaggaaccgctgcaatgaccaggacaccaggaccagctaccgcatcggggacacctggagcaagaaggacaacagaggcaacctgctgcagtgcatctgcacaggaaatggccgcggggagtggaagtgtgagcggcacacctctgtgcagaccaccagcagcggcagcggccccttcacagatgtgcgggctgctgtgtaccagccccagccccacccccagcccccaccctacggccactgtgtgacagacagcggcgtggtgtacagcgtgggcatgcagtggctgaagacccagggcaacaagcagatgctgtgcacctgcctgggcaatggagtgtcctgccaggagacagctgtgacccagacctatggaggcaacagcaatggagagccctgtgtgctgcccttcacctacaatggaagaaccttctacagctgcaccacagagggccggcaggacggccacctgtggtgcagcaccaccagcaactatgagcaggaccagaagtacagcttctgcacagaccacacagtgctggtgcagacccggggcggcaacagcaatggagccctgtgccacttccccttcctgtacaacaaccacaactacacagactgcaccagcgagggcagaagagacaacatgaagtggtgtggcaccacccagaactatgatgctgaccagaagtttggcttctgccccatggccgcccacgaggagatctgcaccaccaatgaaggagtgatgtaccgcatcggggaccagtgggacaagcagcacgacatgggccacatgatgcgctgcacctgtgtgggcaatggccgcggggagtggacctgcatcgcctacagccagctgcgggaccagtgcatcgtggatgacatcacctacaacgtgaatgacaccttccacaagagacatgaggagggccacatgctgaactgcacctgcttcggccagggccggggccgctggaagtgtgaccctgtggaccagtgccaggacagcgagaccggcaccttctaccagatcggggacagctgggagaagtatgtgcatggagtgcgctaccagtgctactgctacggccggggcatcggggagtggcactgccagcccctgcagacctaccccagcagcagcggccctgtggaggtgttcatcacagagacccccagccagcccaacagccaccccatccagtggaatgccccccagcccagccacatcagcaagtacatcctgcgctggaggcccaagaacagcgtgggccgctggaaggaggccaccatccctggccacctgaacagctacaccatcaagggcctgaagccaggagtggtgtatgagggccagctgatcagcatccagcagtatggccaccaggaggtgaccaggtttgacttcaccaccaccagcaccagcacccctgtgaccagcaacacagtgactggagagaccacccccttcagccccctggtggccaccagcgagagcgtgacagagatcacagccagcagctttgtggtgtcctgggtgtctgccagtgacacagtgtctggcttccgggtggagtatgagctgtctgaggagggagatgagccccagtacctggacctgcccagcacagccacctctgtgaacatcccagacctgctgcccggcaggaagtacatcgtgaatgtgtaccagatcagtgaagatggagagcagagcctcatcctgagcaccagccagaccacagccccagatgcccccccagacaccaccgtggaccaggtggatgacaccagcatcgtggtgcgctggagccggccccaggcccccatcaccggctacagaattgtgtacagccccagcgtggagggcagcagcacagagctgaacctgcctgagacagccaacagcgtgaccctgagtgacctgcagcccggggtgcagtacaacatcaccatctatgctgtggaggagaaccaggagagcacccctgtggtgatccagcaggagaccaccggcacccccaggagtgacacagtgcccagcccccgggacctgcagtttgtggaggtgacagatgtgaaggtgaccatcatgtggaccccacctgagagcgctgtgacaggctacagagtggatgtgattcctgtgaacctgcctggagagcacggccagaggctgcccatcagcaggaacacctttgctgaggtgacaggcctgagccctggggtgacctactacttcaaggtgtttgctgtgagccacggccgggagagcaagcccctgacagcccagcagaccaccaagctggatgcccccaccaacctgcagtttgtgaatgaaacagacagcacagtgctggtgcgctggaccccaccccgggcccagatcaccggctaccgcctgactgtgggcctgacccggcggggccagccccggcagtacaacgtgggccccagcgtgtccaagtaccccctgaggaacctgcagcctgccagcgagtacacagtgtccctggtggccatcaagggcaaccaggagagccccaaggccactggagtcttcaccaccctgcagcccggcagcagcatccccccctacaacacagaggtgacagagaccaccatcgtcatcacctggaccccagcccccagaattggcttcaagctgggcgtgcggcccagccagggcggggaggccccccgggaggtgaccagtgacagcggcagcatcgtggtgtctggcctgaccccaggagtggagtatgtgtacaccatccaggtgctgagagatggccaggagagagatgcccccatcgtgaacaaggtggtgacccccctgagcccccccaccaacctgcacctggaggccaacccagacaccggggtgctgactgtgtcctgggagaggagcaccaccccagacatcaccggctaccgcatcaccaccacccccaccaacggccagcagggcaacagcctggaggaggtggtgcatgctgaccagagcagctgcacctttgacaacctgagccctggcctggagtacaacgtgtctgtgtacacagtgaaggatgacaaggagagcgtgcccatcagtgacaccatcatcccagctgtgcccccacccacagacctgcgcttcaccaacatcggccctgacaccatgagggtgacctgggcccccccacccagcattgacctgaccaacttcctggtgcgctacagccctgtgaagaatgaagaagatgtggccgagctgagcatcagccccagcgacaatgctgtggtgctgaccaacctgctgcccggcacagaatatgtggtgtctgtgtcctctgtgtatgagcagcacgagagcacccccctgcggggccggcagaagacaggcctggacagccccaccggcatcgacttcagtgacatcacagccaacagcttcaccgtgcactggatcgccccccgggccaccatcaccggctaccgcatccgccaccaccctgagcacttcagcggccggcccagagaagatagagtgccccacagcaggaacagcatcaccctgaccaacctgaccccaggcacagaatatgtggtgtccatcgtggccctgaatggccgggaggagagccccctgctgattggccagcagagcacagtgtctgatgtgccccgggacctggaggtggtggccgccacccccaccagcctgctgatctcctgggatgccccagctgtgacagtgcgctactaccgcatcacctacggggagactggaggcaacagccctgtgcaggagttcaccgtgcccggcagcaagagcacagccaccatcagcggcctgaagccaggagtggactacaccatcaccgtgtatgctgtgacaggccgcggggacagccctgccagcagcaagcccatcagcatcaactacagaacagaaattgacaagcccagccagatgcaggtgacagatgtgcaggacaacagcatctctgtgaagtggctgcccagcagcagccctgtgacaggctacagagtgaccaccacccccaagaatggacctggccccaccaagaccaagacagctggccctgaccagacagagatgaccatcgagggcctgcagcccaccgtggagtatgtggtgtctgtgtatgcccagaaccccagcggggagagccagcccctggtgcagacagctgtgaccaacatcgaccggcccaagggcctggccttcacagatgtggatgtggacagcatcaagatcgcctgggagagcccccagggccaggtgagccgctacagagtgacctacagcagcccagaagatggcatccacgagctgtttcctgccccagatggagaggaggacacagctgagctgcagggcctgcggcccggcagcgagtacacagtgtctgtggtggccctgcatgatgacatggagagccagcccctgattggcacccagagcacagccatcccagcccccacagacctgaagttcacccaggtgacccccaccagcctgagcgcccagtggaccccacccaacgtgcagctgaccggctacagagtgcgggtgacccccaaggagaagacaggccccatgaaggagatcaacctggccccagacagcagctctgtggtggtgtctggcctgatggtggccaccaagtatgaggtgtctgtgtatgccctgaaggacaccctgaccagcaggcctgcccagggcgtggtgaccaccctggagaatgtgagccccccccggcgggcccgggtgacagatgccacagagaccaccatcaccatctcctggaggaccaagacagagaccatcaccggcttccaggtggatgctgtgcctgccaacggccagacccccatccagaggaccatcaagccagatgtgcgcagctacaccatcaccggcctgcagcctggaacagactacaagatctacctgtacaccctgaatgacaatgcccggagcagccctgtggtgattgatgccagcacagccattgatgcccccagcaacctgcgcttcctggccaccacccccaacagcctgctggtgtcctggcagcccccccgggcccgcatcaccggctacatcatcaagtatgagaagccaggcagccccccccgggaggtggtgccccggcccaggcctggggtgacagaggccaccatcaccggcctggagcctggaacagagtacaccatctacgtgattgccctgaagaacaaccagaagtctgagcccctcatcggcaggaagaagacagtgcagaagaccccatttgtgacccaccctggctatgacacaggaaatggcatccagctgcccggcaccagcggccagcagcccagcgtgggccagcagatgatctttgaggagcacggcttccggaggaccaccccacccaccacagccacccccatccgccaccggccccggccctacccacccaacgtgggccaggaggccctgagccagaccaccatctcctgggcccccttccaggacaccagcgagtacatcatcagctgccaccctgtgggcacagatgaggagcccctgcagttccgggtgcccggcaccagcaccagcgccaccctgaccggcctgaccaggggggccacctacaacgtgattgtggaggccctgaaggaccagcagaggcacaaggtgcgggaggaggtggtgacagtgggcaacagcgtgaatgaaggcctgaaccagcccacagatgacagctgctttgacccctacacagtgagccactatgctgtgggagatgagtgggagaggatgtctgagagcggcttcaagctgctgtgccagtgcctgggcttcggcagcggccacttccgctgtgacagcagccgctggtgccacgacaacggggtgaactacaagatcggggagaagtgggaccggcagggagaaaatggccagatgatgagctgcacctgcctgggcaatggaaaaggagagttcaagtgtgacccccatgaggccacctgctatgatgatggcaagacctaccacgtgggggagcagtggcagaaggagtacctgggcgccatctgcagctgcacctgcttcggcggccagaggggctggaggtgtgacaactgccggcggcctggaggagagcccagccctgagggcaccaccggccagagctacaaccagtacagccagcgctaccaccagaggaccaacaccaacgtgaactgccccatcgagtgcttcatgcccctggatgtgcaggccgaccgggaggacagccgggagtag

SEQ ID NO: 19729 - DNA, 3312 bp, synthetic construct
  misc_feature 1..3312: note = Description of Artificial Sequence: Synthetic coding sequence
  source 1..3312: mol_type = other DNA
ctgcgctggacccccctgaacagcagcaccatcatcggctaccgcatcaccgtggtggccgccggggagggcatccccatctttgaagattttgtggacagctctgtgggctactacacagtgacaggcctggagcccggcatcgactatgacatcagcgtcatcaccctcatcaatggaggagagagcgcccccaccaccctgacccagcagacagctgtgcccccacccacagacctgcgcttcaccaacattggaccagacaccatgagggtgacctgggcccctcctccttccattgacctgaccaacttcctggtgcgctacagccctgtgaagaatgaggaggatgtggccgagctgagcatcagccccagcgacaatgctgtggtgctgaccaacctgctgcctggaacagaatatgtggtgtctgtgtcctctgtgtatgagcagcacgagagcacccccctgcggggccggcagaagacaggcctggacagccccactggaattgacttcagtgacatcacagccaacagcttcaccgtgcactggatcgccccccgggccaccatcaccggctaccgcatccgccaccaccctgagcacttcagcggccggccccgggaggacagagtgccccacagcagaaattccatcaccctgaccaacctgaccccaggcacagaatatgtggtgtccatcgtggccctgaatggccgggaggagagccccctgctgattggccagcagagcacagtgtctgatgtgccccgggacctggaggtggtggccgccacccccaccagcctgctgatctcctgggatgccccagctgtgacagtgcgctactaccgcatcacctatggagagaccggcggcaacagccctgtgcaggagttcaccgtgcccggcagcaagagcacagccaccatcagcggcctgaagccaggagtggactacaccatcaccgtgtatgctgtgacaggccgcggggacagccctgccagcagcaagcccatcagcatcaactacagaacagaaattgacaagcccagccagatgcaggtgacagatgtgcaggacaacagcatctctgtgaagtggctgcccagcagcagccctgtgacaggctacagagtgaccaccacccccaagaatggacctggccccaccaagaccaagacagctggccctgaccagacagagatgaccatcgagggcctgcagcccaccgtggagtatgtggtgtctgtgtatgcccagaaccccagcggggagagccagcccctggtgcagacagctgtgaccaccatcccagcccccacagacctgaagttcacccaggtgacccccaccagcctgagcgcccagtggaccccaccaaatgtgcagctgaccggctacagagtgcgggtgacccccaaggagaagacaggccccatgaaggagatcaacctggccccagacagcagctctgtggtggtgtctggcctgatggtggccaccaagtatgaggtgtctgtgtatgccctgaaggacaccctgaccagcaggcctgcccagggcgtggtgaccaccctggagaatgtgtccccaccaagaagagcccgggtgacagatgccacagagaccaccatcaccatctcctggaggaccaagacagagaccatcaccggcttccaggtggatgctgtgcctgccaacggccagacccccatccagaggaccatcaagccagatgtgcgcagctacaccatcaccggcctgcagcccggcacagactacaagatctacctgtacaccctgaatgacaatgcccggagcagccctgtggtgattgatgccagcacagccattgatgcccccagcaacctgcgcttcctggccaccacccccaacagcctgctggtgtcctggcagcccccccgggcccgcatcaccggctacatcatcaagtatgagaagccaggcagccccccccgggaggtggtgccccggcccaggcctggggtgacagaggccaccatcaccggcctggagcccggcacagagtacaccatctacgtgattgccctgaagaacaaccagaagtctgagcccctgattggaaggaagaagacagatgagctgccccagctggtgaccctgccccaccccaacctgcacggccctgagatcctggatgtgcccagcacagtgcagaagaccccatttgtgacccaccctggctatgacacaggaaatggcatccagctgcccggcaccagcggccagcagcccagcgtgggccagcagatgatctttgaggagcacggcttccggaggaccaccccacccaccacagccacccccatccgccaccggccccggccctacccacccaacgtgggggaggagatccagatcggccacatccccagagaagatgtggactaccacctgtacccccacggccctggcctgaaccccaatgccagcacaggccaggaggccctgagccagaccaccatctcctgggcccccttccaggacaccagcgagtacatcatcagctgccaccctgtgggcacagatgaggagcccctgcagttccgggtgcccggcaccagcaccagcgccaccctgaccggcctgaccaggggggccacctacaacgtcatcgtggaggccctgaaggaccagcagaggcacaaggtgcgggaggaggtggtgacagtgggcaacagcgtgaatgaaggcctgaaccagcccacagatgacagctgctttgacccctacacagtgagccactatgctgtgggagatgagtgggagaggatgtctgagagcggcttcaagctgctgtgccagtgcctgggctttggaagtggccacttccgctgtgacagcagccgctggtgccacgacaatggagtgaactacaagattggagagaagtgggaccggcagggagaaaatggccagatgatgagctgcacctgcctgggcaatggcaagggggagttcaagtgtgacccccatgaggccacctgctatgatgatggcaagacctaccacgtgggggagcagtggcagaaggagtacctgggcgccatctgcagctgcacctgctttggaggccagaggggctggaggtgtgacaactgcagaagacctggaggagagcccagccctgagggcaccaccggccagagctacaaccagtacagccagcgctaccaccagaggaccaacaccaacgtgaactgccccatcgagtgcttcatgcccctggatgtgcaggccgaccgggaggacagccgggagtag

SEQ ID NO: 19730 - DNA, 312 bp, synthetic construct
  misc_feature 1..312: note = Description of Artificial Sequence: Synthetic coding sequence
  source 1..312: mol_type = other DNA
atgcctgtgtctgtgagcagcggccgcaccttccccaagaggggccagacctgtgtggtgcactacacaggcatgctggaggatggcaagaagtttgacagcagccgggacaggaacaagcccttcaagttcatgctgggcaagcaggaggtgatccggggctgggaggagggcgtggcccagatgtctgtgggccagagggccaagctgaccatcagcccagactatgcctacggggccaccggccaccctggcatcatccccccccacgccaccctggtgtttgatgtggagctgctgaagctggagtag

SEQ ID NO: 19731 - DNA, 327 bp, synthetic construct
  misc_feature 1..327: note = Description of Artificial Sequence: Synthetic coding sequence
  source 1..327: mol_type = other DNA
atgggcgtgcaggtggagaccatcagccctggagatggccgcaccttccccaagaggggccagacctgtgtggtgcactacacaggcatgctggaggatggcaagaagtttgacagcagccgggacaggaacaagcccttcaagttcatgctgggcaagcaggaggtgatccggggctgggaggagggcgtggcccagatgtctgtgggccagagggccaagctgaccatcagcccagactatgcctatggagccaccggccaccctggcatcatcccccctcatgccaccctggtgtttgatgtggagctgctgaagctggagtag

SEQ ID NO: 19732 - DNA, 312 bp, synthetic construct; identical to SEQ ID NO: 19730
  misc_feature 1..312: note = Description of Artificial Sequence: Synthetic coding sequence
  source 1..312: mol_type = other DNA

SEQ ID NO: 19733 - DNA, 327 bp, synthetic construct; identical to SEQ ID NO: 19731
  misc_feature 1..327: note = Description of Artificial Sequence: Synthetic coding sequence
  source 1..327: mol_type = other DNA

SEQ ID NO: 19734 - DNA, 279 bp, synthetic construct
  misc_feature 1..279: note = Description of Artificial Sequence: Synthetic coding sequence
  source 1..279: mol_type = other DNA
atgggcgtgcaggtggagaccatcagccctggagatggcatgctggaggatggcaagaagtttgacagcagccgggacaggaacaagcccttcaagttcatgctgggcaagcaggaggtgatccggggctgggaggagggcgtggcccagatgtctgtgggccagagggccaagctgaccatcagcccagactatgcctatggagccaccggccaccctggcatcatcccccctcatgccaccctggtgtttgatgtggagctgctgaagctggagtag

SEQ ID NO: 19735 - DNA, 1143 bp, synthetic construct
  misc_feature 1..1143: note = Description of Artificial Sequence: Synthetic coding sequence
  source 1..1143: mol_type = other DNA
atgggcatccagggcctggccaagctgattgctgatgtggcccccagcgccatccgggagaatgacatcaagagctactttggaaggaaggtggccattgatgcctccatgagcatctaccagttcctgattgctgtgcggcagggcggagatgtgctgcagaatgaggagggggagaccaccagccacctgatgggcatgttctaccgcaccatccgcatgatggagaatggcatcaagcctgtgtatgtgtttgatggcaagccaccccagctgaagagcggggagctggccaagagaagtgaaagaagagctgaggccgagaagcagctgcagcaggcccaggccgccggggctgagcaggaggtggagaagttcaccaagaggctggtgaaggtgaccaagcagcacaatgatgagtgcaagcacctgctgagcctgatgggcatcccctacctggatgcccccagcgaggccgaggccagctgtgccgccctggtgaaggccggcaaggtgtatgctgctgccacagaggacatggactgcctgaccttcggcagccctgtgctgatgaggcacctgacagccagcgaggccaagaagctgcccatccaggagttccacctgagccgcatcctgcaggagctgggcctgaaccaggagcagtttgtggacctgtgcatcctgctgggcagtgactactgtgagagcatccggggcatcggccccaagagagctgtggacctgatccagaagcacaagagcattgaggagatcgtgcggcggctggaccccaacaagtaccctgtgcctgagaactggctgcacaaggaggcccaccagctgttcctggagcctgaggtgctggaccctgagagcgtggagctgaagtggagcgagcccaatgaggaggagctgatcaagttcatgtgtggggagaagcagttcagcgaggagcgcatccgctctggagtgaagaggctgagcaagagccggcagggcagcacccagggccgcctggatgacttcttcaaggtgacaggcagcctgagcagcgccaagaggaaggagcctgagcccaagggcagcaccaagaagaaggccaagacaggagctgctgggaagttcaagaggggcaagtag

SEQ ID NO: 19736 - DNA, 498 bp, synthetic construct
  misc_feature 1..498: note = Description of Artificial Sequence: Synthetic coding sequence
  source 1..498: mol_type = other DNA
atgggcatccagggcctggccaagctgattgctgatgtggcccccagcgccatccgggagaatgacatcaagagctactttggaaggaaggtggccattgatgcctccatgagcatctaccagttcctgattgctgtgcggcagggcggagatgtgctgcagaatgaggagggggagaccaccagccacctgatgggcatgttctaccgcaccatccgcatgatggagaatggcatcaagcctgtgtatgtgtttgatggcaagccaccccagctgaagagcggggagctggccaagagaagtgaaagaagagctgaggccgagaagcagctgcagcaggcccaggccgccggggctgagcaggaggtggagaagttcaccaagaggctggtgaaggtgaccaagcagcacaatgatgagtgcaagcacctgctgagcctgatgggcatcccctacctggatgcccccagcgaggccgaggccagctgtgccgcctag

SEQ ID NO: 19737 - DNA, 4017 bp, synthetic construct
  misc_feature 1..4017: note = Description of Artificial Sequence: Synthetic coding sequence
  source 1..4017: mol_type = other DNA
atggtgtcctactgggacacaggagtgctgctgtgtgccctgctgagctgcctgctgctgaccggcagcagcagcggcagcaagctgaaggaccctgagctgagcctgaagggcacccagcacatcatgcaggccggccagaccctgcacctgcagtgccgcggggaggccgcccacaagtggagcctgcctgagatggtgtccaaggagagcgagcggctgagcatcaccaagagcgcctgtggcagaaatggcaagcagttctgcagcaccctgaccctgaacacagcccaggccaaccacacaggcttctacagctgcaagtacctggccgtgcccaccagcaagaagaaggagacagagagcgccatctacatcttcatcagtgacaccggccggccctttgtggagatgtacagcgagatccctgagatcatccacatgacagagggccgggagctggtgatcccctgccgggtgaccagccccaacatcaccgtgaccctgaagaagttccccctggacaccctcatcccagatggcaagaggatcatctgggacagcaggaagggcttcatcatcagcaatgccacctacaaggagatcggcctgctgacctgtgaggccaccgtgaatggccacctgtacaagaccaactacctgacccaccggcagaccaacaccatcattgatgtgcagatcagcacccccaggcctgtgaagctgctgcggggccacaccctggtgctgaactgcacagccaccacccccctgaacaccagggtgcagatgacctggagctacccagatgagaagaacaagagggcctctgtgagaagaagaattgaccagagcaacagccacgccaacatcttctacagcgtgctgaccatcgacaagatgcagaacaaggacaagggcctgtacacctgccgggtgcgcagcggccccagcttcaagtctgtgaacacctctgtgcacatctatgacaaggccttcatcaccgtgaagcacaggaagcagcaggtgctggagaccgtggccggcaagaggagctaccgcctgtccatgaaggtgaaggccttccccagccctgaggtggtgtggctgaaggatggcctgcctgccacagagaagagcgcccgctacctgacccggggctacagcctcatcatcaaggatgtgacagaggaggatgctggcaactacaccatcctgctgagcatcaagcagagcaatgtgttcaagaacctgacagccaccctgattgtgaatgtgaagccccagatctatgagaaggctgtgtcctccttcccagaccctgccctgtaccccctgggcagccggcagatcctgacctgcacagcctacggcatcccccagcccaccatcaagtggttctggcacccctgcaaccacaaccacagcgaggcccgctgtgacttctgcagcaacaatgaggagagcttcatcctggatgctgacagcaacatgggcaaccgcatcgagagcatcacccagaggatggccatcatcgagggcaagaacaagatggccagcaccctggtggtggccgacagccgcatcagcggcatctacatctgcatcgccagcaacaaggtgggcaccgtgggcaggaacatctccttctacatcacagatgtgcccaacggcttccacgtgaacctggagaagatgcccacagaaggagaggacctgaagctgagctgcaccgtgaacaagttcctgtacagagatgtgacctggatcctgctgaggacagtgaacaacagaaccatgcactacagcatcagcaagcagaagatggccatcaccaaggagcacagcatcaccctgaacctgaccatcatgaatgtgtccctgcaggacagcggcacctacgcctgccgggccagaaatgtgtacacaggagaggagatcctgcagaagaaggagatcaccatccgggaccaggaggccccctacctgctgaggaacctgagtgaccacacagtggccatcagcagcagcaccaccctggactgccacgccaatggagtgcctgagccccagatcacctggttcaagaacaaccacaagatccagcaggagcccggcatcatcctgggccctggcagcagcaccctcttcatcgagcgggtgacagaggaggatgaaggagtgtaccactgcaaggccaccaaccagaagggctctgtggagagcagcgcctacctgactgtgcagggcaccagtgacaagagcaacctggagctgatcaccctgacctgcacctgtgtggccgccaccctcttctggctgctgctgaccctcttcatcaggaagatgaagaggagcagcagcgagatcaagacagactacctgagcatcatcatggaccctgatgaggtgcccctggatgagcagtgtgagcggctgccctatgatgccagcaagtgggagtttgcccgggagcggctgaagctgggcaagagcctgggccgcggggccttcggcaaggtggtgcaggccagcgccttcggcatcaagaagagccccacctgcaggacagtggccgtgaagatgctgaaggagggcgccacagccagcgagtacaaggccctgatgacagagctgaagatcctgacccacatcggccaccacctgaatgtggtgaacctgctgggcgcctgcaccaagcagggcggccccctgatggtgattgtggagtactgcaagtatggcaacctgagcaactacctgaagagcaagagggacctcttcttcctgaacaaggatgctgccctgcacatggagcccaagaaggagaagatggagcccggcctggagcagggcaagaagccccggctggacagcgtgaccagcagcgagagctttgccagcagcggcttccaggaggacaagagcctgagtgatgtggaggaggaggaggacagtgatggcttctacaaggagcccatcaccatggaggacctgatctcctacagcttccaggtggcccggggcatggagttcctgagcagcaggaagtgcatccaccgggacctggccgccaggaacatcctgctgtctgagaacaacgtggtgaagatctgtgactttggcctggcccgggacatctacaagaacccagactatgtgaggaagggggacacccggctgcccctgaagtggatggcccctgagagcatctttgacaagatctacagcaccaagagtgatgtgtggagctatggagtgctgctgtgggagatcttcagcctgggcggcagcccctacccaggagtgcagatggatgaggacttctgcagccggctgcgggagggcatgaggatgagggcccctgagtacagcaccccagagatctaccagatcatgctggactgctggcaccgggaccccaaggagcggcccaggtttgctgagctggtggagaagctgggggacctgctgcaggccaacgtgcagcaggacggcaaggactacatccccatcaatgccatcctgactggaaacagcggcttcacctacagcaccccagccttcagcgaggacttcttcaaggagagcatcagcgcccccaagttcaacagcggcagcagtgatgatgtgcgctacgtgaatgccttcaagttcatgagcctggagcgcatcaagacctttgaggagctgctgcccaatgccacctccatgtttgatgactaccagggcgacagcagcaccctgctggccagccccatgctgaagcgcttcacctggacagacagcaagcccaaggccagcctgaagattgacctgcgggtgaccagcaagagcaaggagagcggcctgagtgatgtgtcccggcccagcttctgccacagcagctgtggccacgtgtctgagggcaagaggcgcttcacctatgaccacgccgagctggagaggaagatcgcctgctgcagccccccaccagactacaacagcgtggtgctgtacagcaccccacccatctag

SEQ ID NO: 19738 - DNA, 531 bp, synthetic construct
  misc_feature 1..531: note = Description of Artificial Sequence: Synthetic coding sequence
  source 1..531: mol_type = other DNA
atggtgtcctactgggacacaggagtgctgctgtgtgccctgctgagctgcctgctgctgaccggcagcagcagcggcagcaagctgaaggaccctgagctgagcctgaagggcacccagcacatcatgcaggccggccagaccctgcacctgcagtgccgcggggaggccgcccacaagtggagcctgcctgagatggtgtccaaggagagcgagcggctgagcatcaccaagagcgcctgtggcagaaatggcaagcagttctgcagcaccctgaccctgaacacagcccaggccaaccacacaggcttctacagctgcaagtacctggccgtgcccaccagcaagaagaaggagacagagagcgccatctacatcttcatcagtgacaccggccggccctttgtggagatgtacagcgagatccctgagatcatccacatgacagagggccgggagctggtgatcccctgccgggtgaccagccccaacatcaccgtgaccctgaagaagaagaacaagagggcctag

SEQ ID NO: 19739 - DNA, 1626 bp, synthetic construct
  misc_feature 1..1626: note = Description of Artificial Sequence: Synthetic coding sequence
  source 1..1626: mol_type = other DNA
atggtgtcctactgggacacaggagtgctgctgtgtgccctgctgagctgcctgctgctgaccggcagcagcagcggcagcaagctgaaggaccctgagctgagcctgaagggcacccagcacatcatgcaggccggccagaccctgcacctgcagtgccgcggggaggccgcccacaagtggagcctgcctgagatggtgtccaaggagagcgagcggctgagcatcaccaagagcgcctgtggcagaaatggcaagcagttctgcagcaccctgaccctgaacacagcccaggccaaccacacaggcttctacagctgcaagtacctggccgtgcccaccagcaagaagaaggagacagagagcgccatctacatcttcatcagtgacaccggccggccctttgtggagatgtacagcgagatccctgagatcatccacatgacagagggccgggagctggtgatcccctgccgggtgaccagccccaacatcaccgtgaccctgaagaagttccccctggacaccctcatcccagatggcaagaggatcatctgggacagcaggaagggcttcatcatcagcaatgccacctacaaggagatcggcctgctgacctgtgaggccaccgtgaatggccacctgtacaagaccaactacctgacccaccggcagaccaacaccatcattgatgtgcagatcagcacccccaggcctgtgaagctgctgcggggccacaccctggtgctgaactgcacagccaccacccccctgaacaccagggtgcagatgacctggagctacccagatgagaagaacaagagggcctctgtgagaagaagaattgaccagagcaacagccacgccaacatcttctacagcgtgctgaccatcgacaagatgcagaacaaggacaagggcctgtacacctgccgggtgcgcagcggccccagcttcaagtctgtgaacacctctgtgcacatctatgacaaggccttcatcaccgtgaagcacaggaagcagcaggtgctggagaccgtggccggcaagaggagctaccgcctgtccatgaaggtgaaggccttccccagccctgaggtggtgtggctgaaggatggcctgcctgccacagagaagagcgcccgctacctgacccggggctacagcctcatcatcaaggatgtgacagaggaggatgctggcaactacaccatcctgctgagcatcaagcagagcaatgtgttcaagaacctgacagccaccctgattgtgaatgtgaagccccagatctatgagaaggctgtgtcctccttcccagaccctgccctgtaccccctgggcagccggcagatcctgacctgcacagcctacggcatcccccagcccaccatcaagtggttctggcacccctgcaaccacaaccacagcgaggcccgctgtgacttctgcagcaacaatgaggagagcttcatcctggatgctgacagcaacatgggcaaccgcatcgagagcatcacccagaggatggccatcatcgagggcaagaacaagctgcccccagccaacagcagcttcatgctgccccccaccagcttcagcagcaactacttccacttcctgccctag

SEQ ID NO: 19740 - DNA, 1671 bp, synthetic construct
  misc_feature 1..1671: note = Description of Artificial Sequence: Synthetic coding sequence
  source 1..1671: mol_type = other DNA
atgaagaggagcagcagcgagatcaagacagactacctgagcatcatcatggaccctgatgaggtgcccctggatgagcagtgtgagcggctgccctatgatgccagcaagtgggagtttgcccgggagcggctgaagctgggcaagagcctgggccgcggggccttcggcaaggtggtgcaggccagcgccttcggcatcaagaagagccccacctgcaggacagtggccgtgaagatgctgaaggagggcgccacagccagcgagtacaaggccctgatgacagagctgaagatcctgacccacatcggccaccacctgaatgtggtgaacctgctgggcgcctgcaccaagcagggcggccccctgatggtgattgtggagtactgcaagtatggcaacctgagcaactacctgaagagcaagagggacctcttcttcctgaacaaggatgctgccctgcacatggagcccaagaaggagaagatggagcccggcctggagcagggcaagaagccccggctggacagcgtgaccagcagcgagagctttgccagcagcggcttccaggaggacaagagcctgagtgatgtggaggaggaggaggacagtgatggcttctacaaggagcccatcaccatggaggacctgatctcctacagcttccaggtggcccggggcatggagttcctgagcagcaggaagtgcatccaccgggacctggccgccaggaacatcctgctgtctgagaacaacgtggtgaagatctgtgactttggcctggcccgggacatctacaagaacccagactatgtgaggaagggggacacccggctgcccctgaagtggatggcccctgagagcatctttgacaagatctacagcaccaagagtgatgtgtggagctatggagtgctgctgtgggagatcttcagcctgggcggcagcccctacccaggagtgcagatggatgaggacttctgcagccggctgcgggagggcatgaggatgagggcccctgagtacagcaccccagagatctaccagatcatgctggactgctggcaccgggaccccaaggagcggcccaggtttgctgagctggtggagaagctgggggacctgctgcaggccaacgtgcagcaggacggcaaggactacatccccatcaatgccatcctgactggaaacagcggcttcacctacagcaccccagccttcagcgaggacttcttcaaggagagcatcagcgcccccaagttcaacagcggcagcagtgatgatgtgcgctacgtgaatgccttcaagttcatgagcctggagcgcatcaagacctttgaggagctgctgcccaatgccacctccatgtttgatgactaccagggcgacagcagcaccctgctggccagccccatgctgaagcgcttcacctggacagacagcaagcccaaggccagcctgaagattgacctgcgggtgaccagcaagagcaaggagagcggcctgagtgatgtgtcccggcccagcttctgccacagcagctgtggccacgtgtctgagggcaagaggcgcttcacctatgaccacgccgagctggagaggaagatcgcctgctgcagccccccaccagactacaacagcgtggtgctgtacagcaccccacccatctag

SEQ ID NO: 19741 - DNA, 45 bp, synthetic construct
  misc_feature 1..45: note = Description of Artificial Sequence: Synthetic coding sequence
  source 1..45: mol_type = other DNA
gagctgagcaactttgagtgcctgcacccctgcagccaggagtag

SEQ ID NO: 19742 - DNA, 2202 bp, synthetic construct
  misc_feature 1..2202: note = Description of Artificial Sequence: Synthetic coding sequence
  source 1..2202: mol_type = other DNA
atggtgtcctactgggacacaggagtgctgctgtgtgccctgctgagctgcctgctgctgaccggcagcagcagcggcagcaagctgaaggaccctgagctgagcctgaagggcacccagcacatcatgcaggccggccagaccctgcacctgcagtgccgcggggaggccgcccacaagtggagcctgcctgagatggtgtccaaggagagcgagcggctgagcatcaccaagagcgcctgtggcagaaatggcaagcagttctgcagcaccctgaccctgaacacagcccaggccaaccacacaggcttctacagctgcaagtacctggccgtgcccaccagcaagaagaaggagacagagagcgccatctacatcttcatcagtgacaccggccggccctttgtggagatgtacagcgagatccctgagatcatccacatgacagagggccgggagctggtgatcccctgccgggtgaccagccccaacatcaccgtgaccctgaagaagttccccctggacaccctcatcccagatggcaagaggatcatctgggacagcaggaagggcttcatcatcagcaatgccacctacaaggagatcggcctgctgacctgtgaggccaccgtgaatggccacctgtacaagaccaactacctgacccaccggcagaccaacaccatcattgatgtgcagatcagcacccccaggcctgtgaagctgctgcggggccacaccctggtgctgaactgcacagccaccacccccctgaacaccagggtgcagatgacctggagctacccagatgagaagaacaagagggcctctgtgagaagaagaattgaccagagcaacagccacgccaacatcttctacagcgtgctgaccatcgacaagatgcagaacaaggacaagggcctgtacacctgccgggtgcgcagcggccccagcttcaagtctgtgaacacctctgtgcacatctatgacaaggccttcatcaccgtgaagcacaggaagcagcaggtgctggagaccgtggccggcaagaggagctaccgcctgtccatgaaggtgaaggccttccccagccctgaggtggtgtggctgaaggatggcctgcctgccacagagaagagcgcccgctacctgacccggggctacagcctcatcatcaaggatgtgacagaggaggatgctggcaactacaccatcctgctgagcatcaagcagagcaatgtgttcaagaacctgacagccaccctgattgtgaatgtgaagccccagatctatgagaaggctgtgtcctccttcccagaccctgccctgtaccccctgggcagccggcagatcctgacctgcacagcctacggcatcccccagcccaccatcaagtggttctggcacccctgcaaccacaaccacagcgaggcccgctgtgacttctgcagcaacaatgaggagagcttcatcctggatgctgacagcaacatgggcaaccgcatcgagagcatcacccagaggatggccatcatcgagggcaagaacaagatggccagcaccctggtggtggccgacagccgcatcagcggcatctacatctgcatcgccagcaacaaggtgggcaccgtgggcaggaacatctccttctacatcacagatgtgcccaacggcttccacgtgaacctggagaagatgcccacagaaggagaggacctgaagctgagctgcaccgtgaacaagttcctgtacagagatgtgacctggatcctgctgaggacagtgaacaacagaaccatgcactacagcatcagcaagcagaagatggccatcaccaaggagcacagcatcaccctgaacctgaccatcatgaatgtgtccctgcaggacagcggcacctacgcctgccgggccagaaatgtgtacacaggagaggagatcctgcagaagaaggagatcaccatccgggaccaggaggccccctacctgctgaggaacctgagtgaccacacagtggccatcagcagcagcaccaccctggactgccacgccaatggagtgcctgagccccagatcacctggttcaagaacaaccacaagatccagcaggagcctgagctgtacaccagcaccagccccagcagcagcagcagcagccccctgagcagcagcagcagcagcagcagcagcagcagcagctag

SEQ ID NO: 19743 - DNA, 1086 bp, synthetic construct
  misc_feature 1..1086: note = Description of Artificial Sequence: Synthetic coding sequence
  source 1..1086: mol_type = other DNA
atgaacagcgacctgctggtggacagtgatggcttctacaaggagcccatcaccatggaggacctgatctcctacagcttccaggtggcccggggcatggagttcctgagcagcaggaagtgcatccaccgggacctggccgccaggaacatcctgctgtctgaaaataatgtggtgaagatctgtgactttggcctggcccgggacatctacaagaacccagactatgtgaggaaaggagacacccggctgcccctgaagtggatggcccctgagagcatctttgacaagatctacagcaccaagagtgatgtgtggagctatggagtgctgctgtgggagatcttcagcctgggcggcagcccctacccaggagtgcagatggatgaggacttctgcagccggctgcgggagggcatgaggatgagggcccctgagtacagcaccccagagatctaccagatcatgctggactgctggcaccgggaccccaaggagcggcccaggtttgctgagctggtggagaagctgggggacctgctgcaggccaacgtgcagcaggacggcaaggactacatccccatcaatgccatcctgaccggcaacagcggcttcacctacagcaccccagccttcagcgaggacttcttcaaggagagcatcagcgcccccaagttcaacagcggcagcagtgatgatgtgcgctacgtgaatgccttcaagttcatgagcctggagcgcatcaagacctttgaggagctgctgcccaatgccacctccatgtttgatgactaccagggcgacagcagcaccctgctggccagccccatgctgaagcgcttcacctggacagacagcaagcccaaggccagcctgaagattgacctgcgggtgaccagcaagagcaaggagagcggcctgagtgatgtgtcccggcccagcttctgccacagcagctgtggccacgtgtctgagggcaagaggcgcttcacctatgaccatgctgagctggagaggaagatcgcctgctgcagccccccaccagactacaacagcgtggtgctgtacagcaccccacccatctag

SEQ ID NO: 19744 - DNA, 75 bp, synthetic construct
  misc_feature 1..75: note = Description of Artificial Sequence: Synthetic coding sequence
  source 1..75: mol_type = other DNA
ctgcccccagccaacagcagcttcatgctgccccccaccagcttcagcagcaactacttccacttcctgccctag

SEQ ID NO: 19745 - DNA, 1062 bp, synthetic construct
  misc_feature 1..1062: note = Description of Artificial Sequence: Synthetic coding sequence
  source 1..1062: mol_type = other DNA
atggagctgacagagctgctgctggtggtgatgctgctgctgacagcccggctgaccctgagcagccctgcccccccagcctgtgacctgcgggtgctgagcaagctgctgcgggacagccacgtgctgcacagccggctgagccagtgcccagaggtgcaccccctgcccacccctgtgctgctgcctgctgtggacttcagcctgggggagtggaagacccagatggaggagaccaaggcccaggacatcctgggcgctgtgaccctgctgctggagggcgtgatggccgcccggggccagctgggccccacctgcctgagcagcctgctgggccagctgagcggccaggtgcggctgctgctgggcgccctgcagagcctgctgggcacccagctgcccccccagggccgcaccacagcccacaaggaccccaatgccatcttcctgtccttccagcacctgctgcggggcaaggtgcgcttcctgatgctggtgggcggcagcaccctgtgtgtgcggcgggccccacccaccacagctgtgcccagcaggaccagcctggtgctgaccctgaatgagctgcccaacagaaccagcggcctgctggagaccaacttcaccgccagcgcccggaccaccggcagcggcctgctgaagtggcagcagggcttccgggccaagatccctggcctgctgaaccagaccagccgcagcctggaccagatccctggctacctgaaccgcatccacgagctgctgaatggcacccggggcctcttccctggccccagcaggaggaccctgggcgccccagacatcagcagcggcaccagtgacaccggcagcctgccccccaacctgcagcccggctacagccccagccccacccaccccccaacaggccagtacaccctcttccccctgccccccaccctgcccacccctgtggtgcagctgcaccccctgctgcctgaccccagcgcccccacccccacccccaccagccccctgctgaacaccagctacacccacagccagaacctgagccaggagggctag

SEQ ID NO: 19746 - DNA, 537 bp, synthetic construct
  misc_feature 1..537: note = Description of Artificial Sequence: Synthetic coding sequence
  source 1..537: mol_type = other DNA
atgacagtgctggccccagcctggagccccaccacctacctgctgctgctgctgctgctgagcagcggcctgagcggcacccaggactgcagcttccagcacagccccatcagcagtgactttgctgtgaagatccgggagctgagtgactacctgctgcaggactaccctgtgacagtggccagcaacctgcaggatgaggagctgtgtggcggcctgtggaggctggtgctggcccagcgctggatggagcggctgaagacagtggccggcagcaagatgcagggcctgctggagcgggtgaacacagagatccactttgtgaccaagtgtgccttccagcccccacccagctgcctgcgctttgtgcagaccaacatcagccggctgctgcaggagaccagcgagcagctggtggccctgaagccctggatcacccggcagaacttcagccgctgcctggagctgcagtgccagcctgtggagaccgtcttccaccgggtgtcccaggacggcctggacctgctgaccagctag

SEQ ID NO: 19747 - DNA, 708 bp, synthetic construct
  misc_feature 1..708: note = Description of Artificial Sequence: Synthetic coding sequence
  source 1..708: mol_type = other DNA
atgacagtgctggccccagcctggagccccaccacctacctgctgctgctgctgctgctgagcagcggcctgagcggcacccaggactgcagcttccagcacagccccatcagcagtgactttgctgtgaagatccgggagctgagtgactacctgctgcaggactaccctgtgacagtggccagcaacctgcaggatgaggagctgtgtggcggcctgtggaggctggtgctggcccagcgctggatggagcggctgaagacagtggccggcagcaagatgcagggcctgctggagcgggtgaacacagagatccactttgtgaccaagtgtgccttccagcccccacccagctgcctgcgctttgtgcagaccaacatcagccggctgctgcaggagaccagcgagcagctggtggccctgaagccctggatcacccggcagaacttcagccgctgcctggagctgcagtgccagcctgacagcagcaccctgcccccaccctggagcccccggcccctggaggccacagcccccacagccccccagccccccctgctgctgctgctgctgctgcctgtgggcctgctgctgctggccgccgcctggtgcctgcactggcagaggaccaggaggaggacccccaggcctggagagcaggtgccccctgtgcccagcccccaggacctgctgctggtggagcactag

SEQ ID NO: 19748 - DNA, 4092 bp, synthetic construct
  misc_feature 1..4092: note = Description of Artificial Sequence: Synthetic coding sequence
  source 1..4092: mol_type = other DNA
atgcagagaggagctgccctgtgcctgcggctgtggctgtgcctgggcctgctggatggcctggtgtctggctacagcatgaccccacccaccctgaacatcacagaggagagccacgtgattgacacaggagacagcctgagcatcagctgccggggccagcaccccctggagtgggcctggccaggggcccaggaggccccagccaccggggacaaggacagcgaggacaccggggtggtgcgggactgtgagggcacagatgcccggccctactgcaaggtgctgctgctgcacgaggtgcacgccaatgacaccggcagctatgtgtgctactacaagtacatcaaggcccgcatcgagggcaccacagctgccagcagctatgtgtttgtgcgggactttgagcagcccttcatcaacaagccagacaccctgctggtgaacaggaaggatgccatgtgggtgccctgcctggtgtccatccctggcctgaatgtgaccctgcggagccagagctctgtgctgtggccagatggccaggaggtggtgtgggatgaccggcggggcatgctggtgtccacccccctgctgcatgatgccctgtacctgcagtgtgagaccacctggggagaccaggacttcctgagcaaccccttcctggtgcacatcactggaaatgagctgtatgacatccagctgctgcccaggaagagcctggagctgctggtgggggagaagctggtgctgaactgcaccgtgtgggccgagttcaacagcggcgtgacctttgactgggactacccaggcaagcaggccgagcggggcaagtgggtgcctgagcggcgcagccagcagacccacacagagctgagcagcatcctgaccatccacaacgtgtcccagcacgacctgggcagctatgtgtgcaaggccaacaacggcatccagcgcttccgggagagcacagaggtgattgtgcatgagaaccccttcatctctgtggagtggctgaagggccccatcctggaggccacagctggagatgagctggtgaagctgcctgtgaagctggccgcctacccacctcctgagttccagtggtacaaggatggcaaggccctgagcggccgccacagcccccacgccctggtgctgaaggaggtgacagaggccagcacaggcacctacaccctggccctgtggaacagcgctgctggcctgcggaggaacatcagcctggagctggtggtgaatgtgcccccccagatccacgagaaggaggccagcagccccagcatctacagccgccacagccggcaggccctgacctgcacagcctacggcgtgcccctgcccctgagcatccagtggcactggaggccctggaccccctgcaagatgtttgcccagaggagcctgcggcggcggcagcagcaggacctgatgccccagtgccgggactggagggctgtgaccacccaggatgctgtgaaccccatcgagagcctggacacctggacagaatttgtggagggcaagaacaagacagtgtccaagctggtgatccagaatgccaacgtgtctgccatgtacaagtgtgtggtgagcaacaaggtgggccaggatgagcggctcatctacttctacgtgaccaccatcccagatggcttcaccatcgagagcaagcccagcgaggagctgctggagggccagcctgtgctgctgagctgccaggccgacagctacaagtatgagcacctgcgctggtaccgcctgaacctgagcaccctgcatgatgcccacggcaaccccctgctgctggactgcaagaatgtgcacctgtttgccacccccctggccgccagcctggaggaggtggcccctggggcccggcatgccaccctgagcctgagcatcccccgggtggcccctgagcacgagggccactacgtgtgtgaggtgcaggaccggcgcagccatgacaagcactgccacaagaagtacctgtctgtgcaggccctggaggccccccggctgacccagaacctgacagacctgctggtgaatgtgtctgacagcctggagatgcagtgcctggtggccggggcccacgcccccagcatcgtgtggtacaaggatgagcggctgctggaggagaagagcggcgtggacctggccgacagcaaccagaagctgagcatccagagggtgcgggaggaggatgctggccgctacctgtgcagcgtgtgcaatgccaagggctgtgtgaacagcagcgcctctgtggccgtggagggctctgaagataaaggctccatggagatcgtcatcctggtgggcaccggggtgattgctgtgttcttctgggtgctgctgctgctgatcttctgcaacatgagaagacctgcccacgccgacatcaagacaggctacctgagcatcatcatggaccctggagaggtgcccctggaggagcagtgtgagtacctgtcctatgatgccagccagtgggagttcccccgggagcggctgcacctgggccgggtgctgggctatggagccttcggcaaggtggtggaggccagcgccttcggcatccacaagggcagcagctgtgacacagtggccgtgaagatgctgaaggagggcgccacagccagcgagcaccgggccctgatgtctgagctgaagatcctgatccacatcggcaaccacctgaatgtggtgaacctgctgggcgcctgcaccaagccccagggccccctgatggtgattgtggagttctgcaagtatggcaacctgagcaacttcctgcgggccaagagagatgccttcagcccctgtgccgagaagagccctgagcagaggggccgcttccgggccatggtggagctggcccggctggacagaagaagacctggcagcagtgacagagtgctgtttgcccgcttcagcaagacagagggcggggcccggcgggccagcccagaccaggaggccgaggacctgtggctgagccccctgaccatggaggacctggtgtgctacagcttccaggtggcccggggcatggagttcctggccagcaggaagtgcatccaccgggacctggccgccaggaacatcctgctgtctgagagtgatgtggtgaagatctgtgactttggcctggcccgggacatctacaaggaccctgactatgtgaggaaaggaagtgcccggctgcccctgaagtggatggcccctgagagcatctttgacaaggtgtacaccacccagagtgatgtgtggagctttggagtgctgctgtgggagatcttcagcctgggcgccagcccctacccaggagtgcagatcaatgaggagttctgccagaggctgagagatggcaccaggatgagggcccctgagctggccaccccagccatccgccgcatcatgctgaactgctggagcggggaccccaaggcccggcctgccttcagcgagctggtggagatcctgggggacctgctgcagggccggggcctgcaggaggaggaggaggtgtgcatggcccccaggagcagccagagcagcgaggagggcagcttcagccaggtgtccaccatggccctgcacatcgcccaggctgatgctgaggacagcccccccagcctgcagaggcacagcctggccgcccgctactacaactgggtgtccttccctggctgcctggcccggggagctgagacccggggcagcagcaggatgaagacctttgaggagttccccatgacccccaccacctacaagggctctgtggacaaccagacagattctggcatggtgctggccagcgaggagtttgagcagatcgagagccgccaccggcaggagagcggcttcagctgcaagggccctggccagaatgtggccgtgacccgggcccacccagacagccagggcagaagaagaagacctgagcggggggcccggggcggccaggtgttctacaacagtgaatatggagagctgtctgagcccagcgaggaggaccactgcagccccagcgcccgggtgaccttcttcacagacaacagctactag

SEQ ID NO: 19749 - DNA, 2283 bp, synthetic construct
  misc_feature 1..2283: note = Description of Artificial Sequence: Synthetic coding sequence
  source 1..2283: mol_type = other DNA
atgctggtgtccacccccctgctgcatgatgccctgtacctgcagtgtgagaccacctggggagaccaggacttcctgagcaaccccttcctggtgcacatcactggaaatgagctgtatgacatccagctgctgcccaggaagagcctggagctgctggtgggggagaagctggtgctgaactgcaccgtgtgggccgagttcaacagcggcgtgacctttgactgggactacccaggcaagcaggccgagcggggcaagtgggtgcctgagcggcgcagccagcagacccacacagagctgagcagcatcctgaccatccacaacgtgtcccagcacgacctgggcagctatgtgtgcaaggccaacaacggcatccagcgcttccgggagagcacagaggtgattgtgcatgagaaccccttcatctctgtggagtggctgaagggccccatcctggaggccacagctggagatgagctggtgaagctgcctgtgaagctggccgcctacccacctcctgagttccagtggtacaaggatggcaaggccctgagcggccgccacagcccccacgccctggtgctgaaggaggtgacagaggccagcacaggcacctacaccctggccctgtggaacagcgctgctggcctgcggaggaacatcagcctggagctggtggtgaatgtgcccccccagatccacgagaaggaggccagcagccccagcatctacagccgccacagccggcaggccctgacctgcacagcctacggcgtgcccctgcccctgagcatccagtggcactggaggccctggaccccctgcaagatgtttgcccagaggagcctgcggcggcggcagcagcaggacctgatgccccagtgccgggactggagggctgtgaccacccaggatgctgtgaaccccatcgagagcctggacacctggacagaatttgtggagggcaagaacaagacagtgtccaagctggtgatccagaatgccaacgtgtctgccatgtacaagtgtgtggtgagcaacaaggtgggccaggatgagcggctcatctacttctacgtgaccaccatcccagatggcttcaccatcgagagcaagcccagcgaggagctgctggagggccagcctgtgctgctgagctgccaggccgacagctacaagtatgagcacctgcgctggtaccgcctgaacctgagcaccctgcatgatgcccacggcaaccccctgctgctggactgcaagaatgtgcacctgtttgccacccccctggccgccagcctggaggaggtggcccctggggcccggcatgccaccctgagcctgagcatcccccgggtggcccctgagcacgagggccactacgtgtgtgaggtgcaggaccggcgcagccatgacaagcactgccacaagaagtacctgtctgtgcaggccctggaggccccccggctgacccagaacctgacagacctgctggtgaatgtgtctgacagcctggagatgcagtgcctggtggccggggcccacgcccccagcatcgtgtggtacaaggatgagcggctgctggaggagaagagcggcgtggacctggccgacagcaaccagaagctgagcatccagagggtgcgggaggaggatgctggccgctacctgtgcagcgtgtgcaatgccaagggctgtgtgaacagcagcgcctctgtggccgtggagggctctgaagataaaggctccatggagatcgtcatcctggtgggcaccggggtgattgctgtgttcttctgggtgctgctgctgctgatcttctgcaacatgagaagacctgcccacgccgacatcaagacaggctacctgagcatcatcatggaccctggagaggtgcccctggaggagcagtgtgagtacctgtcctatgatgccagccagtgggagttcccccgggagcggctgcacctgggccgggtgctgggctatggagccttcggcaaggtggtggaggccagcgccttcggcatccacaagggcagcagctgtgacacagtggccgtgaagatgctgaagggcgtgggcagcgctgggggccggggcagcctggccggggaggagcagcagctgggcgtgggccgctgggatggcaacagcggccgggagacagaagctggcagccagagccacccccgcttctaccgggaggccgccggcttccgggcagagggccccccagagccccccagcgtgggccctgctggctgccctgggggcccctag

SEQ ID NO: 19750 - DNA, 3897 bp, synthetic construct
  misc_feature 1..3897: note = Description of Artificial Sequence: Synthetic coding sequence
  source 1..3897: mol_type = other DNA
atgcagagaggagctgccctgtgcctgcggctgtggctgtgcctgggcctgctggatggcctggtgtctggctacagcatgaccccacccaccctgaacatcacagaggagagccacgtgattgacacaggagacagcctgagcatcagctgccggggccagcaccccctggagtgggcctggccaggggcccaggaggccccagccaccggggacaaggacagcgaggacaccggggtggtgcgggactgtgagggcacagatgcccggccctactgcaaggtgctgctgctgcacgaggtgcacgccaatgacaccggcagctatgtgtgctactacaagtacatcaaggcccgcatcgagggcaccacagctgccagcagctatgtgtttgtgcgggactttgagcagcccttcatcaacaagccagacaccctgctggtgaacaggaaggatgccatgtgggtgccctgcctggtgtccatccctggcctgaatgtgaccctgcggagccagagctctgtgctgtggccagatggccaggaggtggtgtgggatgaccggcggggcatgctggtgtccacccccctgctgcatgatgccctgtacctgcagtgtgagaccacctggggagaccaggacttcctgagcaaccccttcctggtgcacatcactggaaatgagctgtatgacatccagctgctgcccaggaagagcctggagctgctggtgggggagaagctggtgctgaactgcaccgtgtgggccgagttcaacagcggcgtgacctttgactgggactacccaggcaagcaggccgagcggggcaagtgggtgcctgagcggcgcagccagcagacccacacagagctgagcagcatcctgaccatccacaacgtgtcccagcacgacctgggcagctatgtgtgcaaggccaacaacggcatccagcgcttccgggagagcacagaggtgattgtgcatgagaaccccttcatctctgtggagtggctgaagggccccatcctggaggccacagctggagatgagctggtgaagctgcctgtgaagctggccgcctacccacctcctgagttccagtggtacaaggatggcaaggccctgagcggccgccacagcccccacgccctggtgctgaaggaggtgacagaggccagcacaggcacctacaccctggccctgtggaacagcgctgctggcctgcggaggaacatcagcctggagctggtggtgaatgtgcccccccagatccacgagaaggaggccagcagccccagcatctacagccgccacagccggcaggccctgacctgcacagcctacggcgtgcccctgcccctgagcatccagtggcactggaggccctggaccccctgcaagatgtttgcccagaggagcctgcggcggcggcagcagcaggacctgatgccccagtgccgggactggagggctgtgaccacccaggatgctgtgaaccccatcgagagcctggacacctggacagaatttgtggagggcaagaacaagacagtgtccaagctggtgatccagaatgccaacgtgtctgccatgtacaagtgtgtggtgagcaacaaggtgggccaggatgagcggctcatctacttctacgtgaccaccatcccagatggcttcaccatcgagagcaagcccagcgaggagctgctggagggccagcctgtgctgctgagctgccaggccgacagctacaagtatgagcacctgcgctggtaccgcctgaacctgagcaccctgcatgatgcccacggcaaccccctgctgctggactgcaagaatgtgcacctgtttgccacccccctggccgccagcctggaggaggtggcccctggggcccggcatgccaccctgagcctgagcatcccccgggtggcccctgagcacgagggccactacgtgtgtgaggtgcaggaccggcgcagccatgacaagcactgccacaagaagtacctgtctgtgcaggccctggaggccccccggctgacccagaacctgacagacctgctggtgaatgtgtctgacagcctggagatgcagtgcctggtggccggggcccacgcccccagcatcgtgtggtacaaggatgagcggctgctggaggagaagagcggcgtggacctggccgacagcaaccagaagctgagcatccagagggtgcgggaggaggatgctggccgctacctgtgcagcgtgtgcaatgccaagggctgtgtgaacagcagcgcctctgtggccgtggagggctctgaagataaaggctccatggagatcgtcatcctggtgggcaccggggtgattgctgtgttcttctgggtgctgctgctgctgatcttctgcaacatgagaagacctgcccacgccgacatcaagacaggctacctgagcatcatcatggaccctggagaggtgcccctggaggagcagtgtgagtacctgtcctatgatgccagccagtgggagttcccccgggagcggctgcacctgggccgggtgctgggctatggagccttcggcaaggtggtggaggccagcgccttcggcatccacaagggcagcagctgtgacacagtggccgtgaagatgctgaaggagggcgccacagccagcgagcaccgggccctgatgtctgagctgaagatcctgatccacatcggcaaccacctgaatgtggtgaacctgctgggcgcctgcaccaagccccagggccccctgatggtgattgtggagttctgcaagtatggcaacctgagcaacttcctgcgggccaagagagatgccttcagcccctgtgccgagaagagccctgagcagaggggccgcttccgggccatggtggagctggcccggctggacagaagaagacctggcagcagtgacagagtgctgtttgcccgcttcagcaagacagagggcggggcccggcgggccagcccagaccaggaggccgaggacctgtggctgagccccctgaccatggaggacctggtgtgctacagcttccaggtggcccggggcatggagttcctggccagcaggaagtgcatccaccgggacctggccgccaggaacatcctgctgtctgagagtgatgtggtgaagatctgtgactttggcctggcccgggacatctacaaggaccctgactatgtgaggaaaggaagtgcccggctgcccctgaagtggatggcccctgagagcatctttgacaaggtgtacaccacccagagtgatgtgtggagctttggagtgctgctgtgggagatcttcagcctgggcgccagcccctacccaggagtgcagatcaatgaggagttctgccagaggctgagagatggcaccaggatgagggcccctgagctggccaccccagccatccgccgcatcatgctgaactgctggagcggggaccccaaggcccggcctgccttcagcgagctggtggagatcctgggggacctgctgcagggccggggcctgcaggaggaggaggaggtgtgcatggcccccaggagcagccagagcagcgaggagggcagcttcagccaggtgtccaccatggccctgcacatcgcccaggctgatgctgaggacagcccccccagcctgcagaggcacagcctggccgcccgctactacaactgggtgtccttccctggctgcctggcccggggagctgagacccggggcagcagcaggatgaagacctttgaggagttccccatgacccccaccacctacaagggctctgtggacaaccagacagattctggcatggtgctggccagcgaggagtttgagcagatcgagagccgccaccggcaggagagcggcttcagatag

SEQ ID NO: 19751 - DNA, 3921 bp, synthetic construct
  misc_feature 1..3921: note = Description of Artificial Sequence: Synthetic coding sequence
  source 1..3921: mol_type = other DNA
atgcagagaggagctgccctgtgcctgcggctgtggctgtgcctgggcctgctggatggcctggtgtctggctacagcatgaccccacccaccctgaacatcacagaggagagccacgtgattgacacaggagacagcctgagcatcagctgccggggccagcaccccctggagtgggcctggccaggggcccaggaggccccagccaccggggacaaggacagcgaggacaccggggtggtgcgggactgtgagggcacagatgcccggccctactgcaaggtgctgctgctgcacgaggtgcacgccaatgacaccggcagctatgtgtgctactacaagtacatcaaggcccgcatcgagggcaccacagctgccagcagctatgtgtttgtgcgggactttgagcagcccttcatcaacaagccagacaccctgctggtgaacaggaaggatgccatgtgggtgccctgcctggtgtccatccctggcctgaatgtgaccctgcggagccagagctctgtgctgtggccagatggccaggaggtggtgtgggatgaccggcggggcatgctggtgtccacccccctgctgcatgatgccctgtacctgcagtgtgagaccacctggggagaccaggacttcctgagcaaccccttcctggtgcacatcactggaaatgagctgtatgacatccagctgctgcccaggaagagcctggagctgctggtgggggagaagctggtgctgaactgcaccgtgtgggccgagttcaacagcggcgtgacctttgactgggactacccaggcaagcaggccgagcggggcaagtgggtgcctgagcggcgcagccagcagacccacacagagctgagcagcatcctgaccatccacaacgtgtcccagcacgacctgggcagctatgtgtgcaaggccaacaacggcatccagcgcttccgggagagcacagaggtgattgtgcatgagaaccccttcatctctgtggagtggctgaagggccccatcctggaggccacagctggagatgagctggtgaagctgcctgtgaagctggccgcctacccacctcctgagttccagtggtacaaggatggcaaggccctgagcggccgccacagcccccacgccctggtgctgaaggaggtgacagaggccagcacaggcacctacaccctggccctgtggaacagcgctgctggcctgcggaggaacatcagcctggagctggtggtgaatgtgcccccccagatccacgagaaggaggccagcagccccagcatctacagccgccacagccggcaggccctgacctgcacagcctacggcgtgcccctgcccctgagcatccagtggcactggaggccctggaccccctgcaagatgtttgcccagaggagcctgcggcggcggcagcagcaggacctgatgccccagtgccgggactggagggctgtgaccacccaggatgctgtgaaccccatcgagagcctggacacctggacagaatttgtggagggcaagaacaagacagtgtccaagctggtgatccagaatgccaacgtgtctgccatgtacaagtgtgtggtgagcaacaaggtgggccaggatgagcggctcatctacttctacgtgaccaccatcccagatggcttcaccatcgagagcaagcccagcgaggagctgctggagggccagcctgtgctgctgagctgccaggccgacagctacaagtatgagcacctgcgctggtaccgcctgaacctgagcaccctgcatgatgcccacggcaaccccctgctgctggactgcaagaatgtgcacctgtttgccacccccctggccgccagcctggaggaggtggcccctggggcccggcatgccaccctgagcctgagcatcccccgggtggcccctgagcacgagggccactacgtgtgtgaggtgcaggaccggcgcagccatgacaagcactgccacaagaagtacctgtctgtgcaggccctggaggccccccggctgacccagaacctgacagacctgctggtgaatgtgtctgacagcctggagatgcagtgcctggtggccggggcccacgcccccagcatcgtgtggtacaaggatgagcggctgctggaggagaagagcggcgtggacctggccgacagcaaccagaagctgagcatccagagggtgcgggaggaggatgctggccgctacctgtgcagcgtgtgcaatgccaagggctgtgtgaacagcagcgcctctgtggccgtggagggctctgaagataaaggctccatggagatcgtcatcctggtgggcaccggggtgattgctgtgttcttctgggtgctgctgctgctgatcttctgcaacatgagaagacctgcccacgccgacatcaagacaggctacctgagcatcatcatggaccctggagaggtgcccctggaggagcagtgtgagtacctgtcctatgatgccagccagtgggagttcccccgggagcggctgcacctgggccgggtgctgggctatggagccttcggcaaggtggtggaggccagcgccttcggcatccacaagggcagcagctgtgacacagtggccgtgaagatgctgaaggagggcgccacagccagcgagcaccgggccctgatgtctgagctgaagatcctgatccacatcggcaaccacctgaatgtggtgaacctgctgggcgcctgcaccaagccccagggccccctgatggtgattgtggagttctgcaagtatggcaacctgagcaacttcctgcgggccaagagagatgccttcagcccctgtgccgagaagagccctgagcagaggggccgcttccgggccatggtggagctggcccggctggacagaagaagacctggcagcagtgacagagtgctgtttgcccgcttcagcaagacagagggcggggcccggcgggccagcccagaccaggaggccgaggacctgtggctgagccccctgaccatggaggacctggtgtgctacagcttccaggtggcccggggcatggagttcctggccagcaggaagtgcatccaccgggacctggccgccaggaacatcctgctgtctgagagtgatgtggtgaagatctgtgactttggcctggcccgggacatctacaaggaccctgactatgtgaggaaaggaagtgcccggctgcccctgaagtggatggcccctgagagcatctttgacaaggtgtacaccacccagagtgatgtgtggagctttggagtgctgctgtgggagatcttcagcctgggcgccagcccctacccaggagtgcagatcaatgaggagttctgccagaggctgagagatggcaccaggatgagggcccctgagctggccaccccagccatccgccgcatcatgctgaactgctggagcggggaccccaaggcccggcctgccttcagcgagctggtggagatcctgggggacctgctgcagggccggggcctgcaggaggaggaggaggtgtgcatggcccccaggagcagccagagcagcgaggagggcagcttcagccaggtgtccaccatggccctgcacatcgcccaggctgatgctgaggacagcccccccagcctgcagaggcacagcctggccgcccgctactacaactgggtgtccttccctggctgcctggcccggggagctgagacccggggcagcagcaggatgaagacctttgaggagttccccatgacccccaccacctacaagggctctgtggacaaccagacagattctggcatggtgctggccagcgaggagtttgagcagatcgagagccgccaccggcaggagagcggcttccggggcaccaggaggaccaggggggcctag

SEQ ID NO: 19752 - DNA, 1740 bp, synthetic construct
  misc_feature 1..1740: note = Description of Artificial Sequence: Synthetic coding sequence
  source 1..1740: mol_type = other DNA
atgaatgccatcgtggccctgtgccacttctgtgagctgcacggccccaggaccctcttctgcacagaggtgctgcacgcccccctgccccagggagatggaaatgaagacagccctggccagggcgagcaggccgaggaggaggagggcggcatccagatgaacagcaggatgagggcccacagccctgctgagggcgcctctgtggagagcagcagccctggccccaagaagagtgacatgtgtgagggctgccgcagcctggccgccggccaccctggctacatcagccatgacaaggagaccagcatcaagtatgtgagccaccagcaccccagccacccccagctgttcagcatcgtgcggcaggcctgtgtgcgcagcctgagctgtgaggtgtgccccggccgggagggccccatcttctttggagatgagcagcacggctttgtgttcagccacaccttcttcatcaaggacagcctggcccggggcttccagcgctggtacagcatcatcaccatcatgatggaccgcatctacctgatcaacagctggcccttcctgctgggcaaggtgcggggcatcattgatgagctgcagggcaaggccctgaaggtgtttgaggccgagcagtttggctgcccccagagggcccagaggatgaacacagccttcacccccttcctgcaccagagaaatggaaatgctgcccggagcctgaccagcctgaccagtgatgacaacctgtgggcctgcctgcacaccagctttgcctggctgctgaaggcctgtggcagccggctgacagagaagctgctggagggcgcccccacagaggacaccctggtgcagatggagaagctggccgacctggaggaggagagcgagagctgggacaacagcgaggccgaggaggaggagaaggcccctgtgctgcctgagagcacagagggccgggagctgacccagggccctgctgagagcagcagcctgagcggctgcggctcctggcagcccaggaagctgcccgtcttcaagagcctgcggcacatgaggcaggtgctgggcgcccccagcttcaggatgctggcctggcacgtgctgatgggcaaccaggtgatctggaagagcagagatgtggacctggtgcagagcgcctttgaggtgctgcggaccatgctgcctgtgggctgtgtgcgcatcatcccctacagcagccagtatgaggaggcctaccgctgcaacttcctgggcctgagcccccacgtgcagatcccccctcatgtgctgagcagcgagtttgctgtgattgtggaggtgcatgctgctgcccggagcaccctgcaccctgtgggctgtgaagatgaccagagcctgagcaaatatgaatttgtggtgaccagcggcagccctgtggccgctgacagagtgggccccaccatcctgaacaagattgaggccgccctgaccaaccagaacctgtctgtggatgtggtggaccagtgcctggtgtgcctgaaggaggagtggatgaacaaggtgaaggtgctcttcaagttcaccaaggtggacagccggcccaaggaggacacccagaagctgctgagcatcctgggcgccagcgaggaggacaacgtgaagctgctgaagttctggatgacaggcctgagcaagacctacaagagccacctgatgagcacagtgcgcagccccacagccagcgagagcaggaactag

SEQ ID NO: 19753 - DNA, 594 bp, synthetic construct
  misc_feature 1..594: note = Description of Artificial Sequence: Synthetic coding sequence
  source 1..594: mol_type = other DNA
atgaatgccatcgtggccctgtgccacttctgtgagctgcacggccccaggaccctcttctgcacagaggtgctgcacgcccccctgccccagggagatggaaatgaagacagccctggccagggcgagcaggccgaggaggaggagggcggcatccagatgaacagcaggatgagggcccacagccctgctgagggcgcctctgtggagagcagcagccctggccccaagaagagtgacatgtgtgagggctgccgcagcctggccgccggccaccctggctacatcagccatgacaaggagaccagcatcaagtatgtgagccaccagcaccccagccacccccagctgttcagcatcgtgcggcaggcctgtgtgcgcagcctgagctgtgaggtgtccctggtggccacagagcctgtgtctgtgggcgcccacatgctgcccggggccctgggcggcctgggcgccagcatcgcccagggcggccgccactggagcagcctgcgggctgacccccagatcagcacagcccagggcaccggccgcctgccctgcccagagctgcgggaggagagctgctggacctgctag

SEQ ID NO: 19754 - DNA, 1029 bp, synthetic construct
  misc_feature 1..1029: note = Description of Artificial Sequence: Synthetic coding sequence
  source 1..1029: mol_type = other DNA
atgaatgccatcgtggccctgtgccacttctgtgagctgcacggccccaggaccctcttctgcacagaggtgctgcacgcccccctgccccagggagatggaaatgaagacagccctggccagggcgagcaggccgaggaggaggagggcggcatccagatgaacagcaggatgagggcccacagccctgctgagggcgcctctgtggagagcagcagccctggccccaagaagagtgacatgtgtgagggctgccgcagcctggccgccggccaccctggctacatcagccatgacaaggagaccagcatcaagtatgtgagccaccagcaccccagccacccccagctgttcagcatcgtgcggcaggcctgtgtgcgcagcctgagctgtgaggtgtgccccggccgggagggccccatcttctttggagatgagcagcacggctttgtgttcagccacaccttcttcatcaaggacagcctggcccggggcttccagcgctggtacagcatcatcaccatcatgatggaccgcatctacctgatcaacagctggcccttcctgctgggcaaggtgcggggcatcattgatgagctgcagggcaaggccctgaaggtgtttgaggccgagcagtttggctgcccccagagggcccagaggatgaacacagccttcacccccttcctgcaccagagaaatggaaatgctgcccggagcctgaccagcctgaccagtgatgacaacctgtgggcctgcctgcacaccagctttgcctggctgctgaaggcctgtggcagccggctgacagagaagctgctggagggcgcccccacagaggacaccctggtgcagatggagaagctggccggggaggccggcgtgctgctgcccggcccctggccaggctggccctggggcggcaccagctgcctgctgtcctggcaggagagcctgcgggagggcaatgctgccctgaaccagcccaggaccagcctgcgggaggcccacccccccatctctgtgtag

SEQ ID NO: 19755 - DNA, 594 bp, synthetic construct; identical to SEQ ID NO: 19753
  misc_feature 1..594: note = Description of Artificial Sequence: Synthetic coding sequence
  source 1..594: mol_type = other DNA

SEQ ID NO: 19756 - DNA, 462 bp, synthetic construct
  misc_feature 1..462: note = Description of Artificial Sequence: Synthetic coding sequence
  source 1..462: mol_type = other DNA
atgaacagcaggatgagggcccacagccctgctgagggcgcctctgtggagagcagcagccctggccccaagaagagtgacatgtgtgagggctgccgcagcctggccgccggccaccctggctacatcagccatgacaaggagaccagcatcaagtatgtgagccaccagcaccccagccacccccagctgttcagcatcgtgcggcaggcctgtgtgcgcagcctgagctgtgaggtgtgccccggccgggagggccccatcttctttggagatgagcagcacggctttgtgttcagccacaccttcttcatcaaggacagcctggcccggggcttccagcgctggtacagcatcatcaccatcatgatggaccgcatctacctgatcaacagctggcccttcctgctgggcaaggtgcggggcatcattgatgagctgcagggcaaggccctgaagtag

SEQ ID NO: 19757 - DNA, 1419 bp, synthetic construct
  misc_feature 1..1419: note = Description of Artificial Sequence: Synthetic coding sequence
  source 1..1419: mol_type = other DNA
atgctgggcaccgtgaagatggagggccacgagaccagtgactggaacagctactatgctgacacccaggaggcctacagctctgtgcctgtgagcaacatgaacagcggcctgggctccatgaacagcatgaacacctacatgaccatgaacaccatgaccaccagcggcaacatgaccccagccagcttcaacatgtcctatgccaaccctggcctgggcgccggcctgagccctggagctgtggccggcatgcctgggggcagcgctggggccatgaacagcatgacagctgctggggtgacagccatgggcacagccctgagccccagcggcatgggcgccatgggcgcccagcaggccgcctccatgaatggcctgggcccctatgctgctgccatgaacccctgcatgagccccatggcctatgcccccagcaacctgggccgcagcagagctgggggcggcggagatgccaagaccttcaagaggagctacccccacgccaagccaccctacagctacatcagcctcatcaccatggccatccagcaggcccccagcaagatgctgaccctgtctgagatctaccagtggatcatggacctcttcccctactaccggcagaaccagcagcgctggcagaacagcatccgccacagcctgtccttcaatgactgctttgtgaaggtggcccggagcccagacaagccaggcaagggcagctactggaccctgcacccagacagcggcaacatgtttgaaaatggctgctacctgcggcggcagaagcgcttcaagtgtgagaagcagcccggggccggcggcggcggcggcagcggcagcggcggcagcggggccaagggcggccctgagagcaggaaggaccccagcggggccagcaaccccagcgctgacagccccctgcaccggggcgtgcacggcaagacaggccagctggagggcgccccagcccctggccctgctgccagcccccagaccctggaccacagcggggccacagccactggaggagccagcgagctgaagaccccagccagcagcacagccccacccatcagcagcggccctggggccctggcctctgtgcctgccagccacccagcccacggcctggcccctcatgagagccagctgcacctgaagggggacccccactacagcttcaaccaccccttcagcatcaacaacctgatgagcagcagcgagcagcagcacaagctggacttcaaggcctatgagcaggccctgcagtacagcccctacggcagcaccctgcctgccagcctgcccctgggcagcgcctctgtgaccaccaggagccccatcgagcccagcgccctggagcccgcctactaccagggcgtgtacagcaggcctgtgctgaacaccagctag

SEQ ID NO: 19758 - DNA, 1320 bp, synthetic construct
  misc_feature 1..1320: note = Description of Artificial Sequence: Synthetic coding sequence
  source 1..1320: mol_type = other DNA
atgaacagcggcctgggctccatgaacagcatgaacacctacatgaccatgaacaccatgaccaccagcggcaacatgaccccagccagcttcaacatgtcctatgccaaccctggcctgggcgccggcctgagccctggagctgtggccggcatgcctgggggcagcgctggggccatgaacagcatgacagctgctggggtgacagccatgggcacagccctgagccccagcggcatgggcgccatgggcgcccagcaggccgcctccatgaatggcctgggcccctatgctgctgccatgaacccctgcatgagccccatggcctatgcccccagcaacctgggccgcagccgggccggcggcggcggagatgccaagaccttcaagaggagctacccccacgccaagccaccctacagctacatcagcctcatcaccatggccatccagcaggcccccagcaagatgctgaccctgtctgagatctaccagtggatcatggacctcttcccctactaccggcagaaccagcagcgctggcagaacagcatccgccacagcctgtccttcaatgactgctttgtgaaggtggcccggagcccagacaagccaggcaagggcagctactggaccctgcacccagattctggcaacatgtttgaaaatggctgctacctgcggcggcagaagcgcttcaagtgtgagaagcagcctggagctgggggcggcggcggcagcggcagcggcggcagcggggccaagggcggccctgagagcaggaaggaccccagcggggccagcaaccccagcgctgacagccccctgcacagaggagtgcacggcaagacaggccagctggagggcgccccagcccctggccctgctgccagcccccagaccctggaccacagcggggccacagccaccggcggggccagcgagctgaagaccccagccagcagcacagccccacccatcagcagcggccctggggccctggcctctgtgcctgccagccacccagcccacggcctggcccctcatgagagccagctgcacctgaagggggacccccactacagcttcaaccaccccttcagcatcaacaacctgatgagcagcagcgagcagcagcacaagctggacttcaaggcctatgagcaggccctgcagtacagcccctacggcagcaccctgcctgccagcctgcccctgggcagcgcctctgtgaccaccaggagccccatcgagcccagcgccctggagcccgcctactaccagggcgtgtacagcaggcctgtgctgaacaccagctag

SEQ ID NO: 19759 - DNA, 1506 bp, synthetic construct
  misc_feature 1..1506: note = Description of Artificial Sequence: Synthetic coding sequence
  source 1..1506: mol_type = other DNA
atgcaggcccgctacagcgtgtctgaccccaatgccctgggcgtggtgccctacctgtctgagcagaactactacagagctgctggcagctatggaggcatggccagccccatgggcgtgtacagcggccaccctgagcagtacagcgctggcatgggccgctcctatgccccctaccaccaccaccagcctgctgcccccaaggacctggtgaagccaccctacagctacatcgccctgatcaccatggccatccagaatgcccctgagaagaagatcaccctgaatggcatctaccagttcatcatggaccgcttccccttctaccgggagaacaagcagggctggcagaacagcatccgccacaacctgagcctgaatgaatgttttgtgaaggtgcccagagatgacaagaagccaggcaagggcagctactggaccctggaccctgacagctacaacatgtttgaaaatggcagcttcctgcggaggagaagacgcttcaagaagaaggatgtgtccaaggagaaggaggagcgggcccacctgaaggagcccccacctgctgccagcaagggggccccagccaccccccacctggctgatgcccccaaggaggccgagaagaaggtggtgatcaagtctgaggccgccagccctgccctgcctgtgatcaccaaggtggagaccctgagccctgagagcgccctgcagggcagccccaggtctgctgccagcaccccagctggcagcccagatggcagcctgcctgagcaccacgccgccgccccaaatggcctgcccggcttctctgtggagaacatcatgaccctgcggaccagccccccaggaggagagctgagccctggagctggccgggccggcctggtggtgccccccctggccctgccctatgctgctgcccctcctgctgcctacggccagccctgtgcccagggcctggaggccggggccgccggcggctaccagtgcagcatgagggccatgagcctgtacaccggggctgagaggcctgcccacatgtgtgtgcccccagccctggatgaggccctgagtgaccaccccagcggccccaccagccccctgagcgccctgaacctggccgccggccaggagggcgccctggccgccaccggccaccaccaccagcaccacggccaccaccacccccaggcccctcctcctcctccagccccccagccccagcccaccccccagcccggggctgctgctgcccaggccgcctcctggtacctgaaccacagcggggacctgaaccacctgcccggccacacctttgctgcccagcagcagaccttccccaacgtgcgggagatgttcaacagccaccggctgggcatcgagaacagcaccctgggggagagccaggtgtctggaaatgccagctgccagctgccctaccgcagcaccccacccctgtacagacatgctgccccctacagctatgactgcaccaagtactag

SEQ ID NO: 19760 - DNA, 1968 bp, synthetic construct
  misc_feature 1..1968: note = Description of Artificial Sequence: Synthetic coding sequence
  source 1..1968: mol_type = other DNA
atggccgaggccccccaggtggtggagattgatcctgactttgagcccctgccccggcccaggagctgcacctggcccctgcccaggcctgagttcagccagagcaacagcgccaccagcagccctgcccccagcggcagcgctgctgccaacccagatgctgctgctggcctgcccagcgccagcgctgctgctgtgtctgctgacttcatgagcaacctgagcctgctggaggagagcgaggacttcccccaggcccctggctctgtggccgctgctgtggccgctgctgctgctgctgctgccactggaggcctgtgtggggacttccagggccctgaggccggctgcctgcacccagccccaccccagcccccacctcctggccccctgagccagcacccccctgtgcccccagctgctgctggccccctggccggccagcccaggaagagcagcagcagcagaagaaatgcctggggcaacctgtcctatgctgacctgatcaccaaggccatcgagagcagcgctgagaagaggctgaccctgagccagatctatgagtggatggtgaagtctgtgccctacttcaaggacaagggggacagcaacagcagcgctggctggaagaacagcatccgccacaacctgagcctgcacagcaagttcatccgggtgcagaatgaaggaacaggcaagagctcctggtggatgctgaaccctgagggcggcaagagcggcaagagcccccggcggcgggccgcctccatggacaacaacagcaagtttgccaagagccgcagccgggccgccaagaagaaggccagcctgcagagcggccaggagggcgctggggacagccctggcagccagttcagcaagtggccagccagccctggcagccacagcaatgatgactttgacaactggagcaccttccggcccaggaccagcagcaatgccagcaccatcagcggccgcctgagccccatcatgacagagcaggatgacctgggggagggagatgtgcacagcatggtgtacccaccttctgctgccaagatggccagcaccctgcccagcctgtctgagatcagcaaccctgagaacatggagaacctgctggacaacctgaacctgctgagcagccccaccagcctgactgtgtccacccagagcagccctggcaccatgatgcagcagaccccctgctacagctttgccccacccaacaccagcctgaacagccccagccccaactaccagaagtacacctacggccagagctccatgagccccctgccccagatgcccatccagaccctgcaggacaacaagagcagctatggaggcatgagccagtacaactgtgcccctggcctgctgaaggagctgctgaccagtgacagccccccccacaatgacatcatgacccctgtggaccccggggtggcccagcccaacagccgggtgctgggccagaatgtgatgatgggccccaacagcgtgatgagcacctacggcagccaggccagccacaacaagatgatgaaccccagcagccacacccaccctggccacgcccagcagaccagcgctgtgaatggccggcccctgccccacacagtgtccaccatgccccacaccagcggcatgaaccggctgacccaggtgaagacccctgtgcaggtgcccctgccccaccccatgcagatgtctgccctgggcggctacagctctgtgagcagctgcaatggctacggccgcatgggcctgctgcaccaggagaagctgcccagcgacctggatggcatgtttattgagcggctggactgtgacatggagagcatcatcagaaatgacctgatggatggagacaccctggacttcaactttgacaacgtgctgcccaaccagagcttcccccacagcgtgaagaccaccacccacagctgggtgtctggatag
